United States Patent Application Publication US 2018/0126003 A1 - sequence listing, part 150

SEQ ID NO: 263069 - DNA, 585 bp, Artificial Sequence
  derived and/or modified sequence
aaagattgtctccgttattttgctttttgtgtggtgaatttcccagaaaccagatgcagccctactcaaatggagcagctatcagatgaagaaattgatcatggtgctgaagaagacagtgacaaggaagatcaggacctggacaaaatgtttggagcctggcttggagaactagacaaactcactcagagtttggattctgacaagcccatggaaccagtaaaaagatctcctcttcgccaggaaacaaacatggccaacttttcttaccgcttctccatatacaacttgaatgaagctctgaatcagggagagactgtggatctggatgccttgatggctgatctttgctctatagagcaggagctcagcagcattggttcaggaaacagtaagcgtcaaatcacagaaacgaaagctactcagaaattgcctgttagccgacatacattgaaacatggcaccttgaaaggattatcttcttcatctaataggatagctaaaccttcccatgccagctactccttggacgacgtcactgcacagttagaacaggcctctttgagtatggatgaggctgctcag

SEQ ID NO: 263070 - protein, 720 aa, Artificial Sequence
  derived and/or modified sequence
MNNHVSSKPSTMKLKHTINPILLYFIHFLISLYTILTYIPFYFFSESRQEKSNRIKAKPVNSKPDSAYRSVNSLDGLASVLYPGCDTLDKVFTYAKNKFKNKRLLGTREVLNEEDEVQPNGKIFKKVILGQYNWLSYEDVFVRAFNFGNGLQMLGQKPKTNIAIFCETRAEWMIAAQACFMYNFQLVTLYATLGGPAIVHALNETEVTNIITSKELLQTKLKDIVSLVPRLRHIITVDGKPPTWSEFPKGIIVHTMAAVEALGAKASMENQPHSKPLPSDIAVIMYTSGSTGLPKGVMISHSNIIAGITGMAERIPELGEEDVYIGYLPLAHVLELSAELVCLSHGCRIGYSSPQTLADQSSKIKKGSKGDTSMLKPTLMAAVPEIMDRIYKNVMNKVSEMSSFQRNLFILAYNYKMEQISKGRNTPLCDSFVFRKVRSLLGGNIRLLLCGGAPLSATTQRFMNICFCCPVGQGYGLTESAGAGTISEVWDYNTGRVGAPLVCCEIKLKNWEEGGYFNTDKPHPRGEILIGGQSVTMGYYKNEAKTKADFFEDENGQRWLCTGDIGEFEPDGCLKIIDRKKDLVKLQAGEYVSLGKVEAALKNLPLVDNICAYANSYHSYVIGFVVPNQKELTELARKKGLKGTWEELCNSCEMENEVLKVLSEAAISASLEKFEIPVKIRLSPEPWTPETGLVTDAFKLKRKELKTHYQADIERMYGRK

SEQ ID NO: 263071 - protein, 88 aa, Artificial Sequence
  derived and/or modified sequence
MNNHVSSKPSTMKLKHTINPILLYFIHFLISLYTILTYIPFYFFSESRQEKSNRIKAKPVNSKPDSAYRSVNSLDGLASVLYPGCDTL

SEQ ID NO: 263072 - protein, 95 aa, Artificial Sequence
  derived and/or modified sequence
MNNHVSSKPSTMKLKHTINPILLYFIHFLISLYTILTYIPFYFFSESRQEKSNRIKAKPVNSKPDSAYRSVNSLDGLASVLYPGCDTLDKVFTYA

SEQ ID NO: 263073 - DNA, 2163 bp, Artificial Sequence
  derived and/or modified sequence
atgaacaaccatgtcagctcgaaacccagtactatgaagctcaagcacaccatcaatcctatcctgttgtatttcatccacttccttatttctctgtataccatcctaacctacatacctttttatttctttagcgagagcaggcaagaaaagtctaatcgaatcaaagctaaaccagtgaatagtaagcctgatagcgcctacagatccgtgaactccctggatgggctggcctctgtcctgtacccggggtgcgacactttagacaaagtctttacctacgccaagaacaaatttaagaacaaaagactgctaggaaccagagaggtattaaatgaggaagacgaggtccagcccaatggcaaaattttcaagaaagtgatcctcggacagtataactggctaagctatgaagacgtctttgttcgggcatttaatttcgggaacggcctgcaaatgttagggcaaaagcccaagaccaacatagccattttttgcgaaacacgggcagagtggatgattgccgctcaagcctgtttcatgtacaacttccagctcgtgaccctgtacgctactctcggaggacccgccattgttcacgcgttgaatgagacagaggtcactaatatcattacatccaaagaactcctacaaaccaagctgaaggacatcgtgagtctagtgccacgccttagacacattattaccgtcgatggcaaaccccctacctggtctgagtttcctaaaggaatcatcgtgcatactatggccgccgtagaagccctgggcgccaaagccagcatggaaaatcagccccacagtaagcctctgccctcggacattgcggtgataatgtacacatcaggatctacagggctgccaaagggagtaatgatcagtcattcgaacattattgccgggatcaccggaatggcagagaggattcccgagctgggggaagaggacgtgtacattggctacctccctttggctcatgtcctggagttaagcgctgaactcgtatgcttgtcccacggctgccggattgggtactctagccctcagaccctcgccgaccaatcctctaaaattaaaaagggctccaagggagatacatctatgctgaagccaacgttgatggccgccgtacctgaaatcatggatcggatctacaaaaacgtcatgaacaaagtgtctgaaatgagcagttttcaacggaacctttttattctcgcttacaattacaagatggaacagatctccaagggccgaaacactcctctgtgcgattccttcgtgttcaggaaggtacgctccctcctcggcgggaatatcagactactcctgtgcgggggcgcccctctgtccgcaaccacgcagcgctttatgaatatttgcttctgttgccctgtcgggcaaggatacggtctgacagaaagtgcaggcgcagggactatcagcgaggtttgggactataataccggccgtgtgggcgctccattggtctgttgcgagatcaagctgaagaattgggaggagggagggtatttcaacactgataaaccccacccaaggggtgagattctgatcggcgggcagtctgttacaatggggtactataaaaacgaagcaaagaccaaggccgatttcttcgaggatgagaacggacagaggtggctgtgcacaggcgatatcggagagttcgaacctgacgggtgccttaagataatagacagaaaaaaagatctcgtcaagctgcaagccggcgaatacgtgtccttgggcaaggtagaagcagctttgaaaaacctgcccctggtcgacaacatatgcgcttacgcaaactcttaccacagctatgtgatcggatttgtggtaccaaaccagaaggaattgactgagctcgctcgtaagaaaggactcaagggcacctgggaagaattgtgcaattcctgtgaaatggaaaatgaggtgctgaaggtgctgagcgaagccgccatctcggcatctctggaaaagtttgagattcctgtgaagatccgcctgtcacccgagccttggacccccgagaccggtcttgtgaccgacgcattcaaactaaaaagaaaggagttgaagacacactaccaggccgacatcgagagaatgtatgggaggaagtag

SEQ ID NO: 263074 - DNA, 2163 bp, Artificial Sequence
  derived and/or modified sequence
atgaataatcacgtgtcaagtaagcccagtacaatgaagttaaagcataccatcaaccccattttattatactttattcacttcctcatttccctgtacaccattctcacctacatcccattttattttttttccgaatctaggcaggaaaagtccaatcggatcaaggcaaagcctgtcaattcgaagccggacagtgcatataggagcgtaaactccttagacgggctggcatctgttctgtaccctggttgtgatacactggataaggtgtttacatacgcaaaaaacaagttcaagaacaagcggctgctggggacaagggaggtgctgaatgaagaagacgaggtgcagccaaatgggaaaatttttaagaaggtgatacttggccaatacaattggttaagctacgaggacgtgtttgttagggccttcaattttggaaatggactgcagatgctgggtcagaaaccaaagacaaatattgctatcttctgtgagacgagagctgagtggatgatcgcagcccaggcatgtttcatgtataacttccagttggttacactgtacgccacactcgggggccctgccatagtgcacgcactgaatgaaaccgaggtgactaatattataacatctaaagaactccttcagacgaagctgaaagatattgtgagcctggtgcccaggctcaggcacattatcactgtggacgggaagccaccaacgtggagcgagtttcctaagggaatcattgtacacaccatggcggctgtagaggcgttaggggccaaggcctccatggagaaccagccacattccaagcccttgccaagcgacatcgctgtgataatgtacaccagcggctccaccggactgccaaagggcgtcatgatcagccactcaaacatcatcgccggcatcaccggcatggctgagcgcatccccgagctgggcgaagaagatgtctatatcgggtatcttcctctcgcacatgtcctagaactgtcggctgaactggtctgcctgtcccacggctgccgaattggatacagctcaccacagaccctggccgatcagtcctcaaagatcaagaaggggtcaaaaggagacacgtcgatgcttaaacctactttgatggcagccgtgccagagattatggaccggatttataagaacgtgatgaataaggtgtcagagatgagttcgtttcaacgaaatttattcatcctggcatataactacaagatggaacaaataagcaaggggcgcaataccccactgtgtgacagcttcgtcttcaggaaggtaagaagtctgctcgggggcaatatcaggctgctcctgtgcggcggcgctccgctgtccgccactacacaacgcttcatgaatatctgtttttgttgccccgtcggacagggctatggattgacagagagcgctggtgcaggaacaatctccgaagtgtgggactacaataccgggcgagtaggtgccccactggtatgttgcgagatcaagctgaagaactgggaggagggcgggtacttcaacactgataaacctcatcctaggggcgagatcctaataggtggtcagtccgtgacaatgggatactacaagaatgaggcaaaaaccaaggccgattttttcgaagacgagaacggacagcgttggctgtgcaccggcgatattggcgaattcgagcctgacggatgtctgaagattatcgatagaaagaaagacctggttaagttgcaggctggcgaatatgtgtcccttggtaaggtcgaagccgctttgaaaaacctccccctcgtggataacatctgtgcctacgcaaactcctaccacagctacgtgattggcttcgtggtgcctaaccagaaagagcttactgagctggctaggaagaagggcctgaagggcacctgggaggagctgtgtaattcctgcgagatggaaaacgaggtcctgaaggtattaagtgaggccgccattagcgcctccttggagaaattcgagatccctgtaaaaattcgtctttcacctgaaccctggacccctgaaactggactagtcacagatgccttcaaactgaagaggaaggagctaaagacacactatcaggccgatattgagagaatgtacggtaggaaatag

SEQ ID NO: 263075 - DNA, 267 bp, Artificial Sequence
  derived and/or modified sequence
atgaataatcacgtgtcttcgaagccgtctaccatgaagcttaaacatacaattaatcccatactgctgtattttatccactttctcatctccctctacaccatccttacttatattcctttctacttctttagcgaatcacgtcaggagaagtctaacagaatcaaagccaaaccagttaactccaaacccgacagcgcctaccgatccgtgaactcactggatggattagcgagcgtgctgtacccaggttgcgacacactttag

SEQ ID NO: 263076 - DNA, 288 bp, Artificial Sequence
  derived and/or modified sequence
atgaacaatcatgtgtcctctaaaccaagcaccatgaaactgaaacacacaattaatcccatcctgctttacttcatccacttcctcatatcgctgtacacaattctcacttatattcctttctattttttctccgaaagccgacaggagaaatctaatagaatcaaagccaaacctgtaaactctaagccagattccgcatacaggagcgtgaattctctcgacggacttgcctccgttctgtatccgggttgcgatacattggacaaagtgttcacctatgcatag

SEQ ID NO: 263077 - DNA, 2163 bp, Artificial Sequence
  derived and/or modified sequence
atgaacaaccacgtgagcagcaagcccagcaccatgaagctgaagcacaccatcaaccccatcctgctgtacttcatccacttcctgatcagcctgtacaccatcctgacctacatccccttctacttcttcagcgagagccggcaggagaagagcaaccgcatcaaggccaagcctgtgaacagcaagccagacagcgcctacagatctgtgaacagcctggatggcctggcctctgtgctgtacccaggctgtgacaccctggacaaggtgttcacctacgccaagaacaagttcaagaacaagaggctgctgggcacccgggaggtgctgaatgaggaggatgaggtgcagcccaacgggaagatcttcaagaaggtgatcctgggccagtacaactggctgtcctatgaagatgtgtttgtgcgggccttcaactttggaaatggcctgcagatgctgggccagaagcccaagaccaacatcgccatcttctgtgagaccagggctgagtggatgattgctgcccaggcctgcttcatgtacaacttccagctggtgaccctgtatgccaccctgggcggccctgccatcgtgcacgccctgaatgaaacagaggtgaccaacatcatcaccagcaaggagctgctgcagaccaagctgaaggacatcgtgtccctggtgccccggctgcggcacatcatcaccgtggatggcaagccacccacctggagcgagttccccaagggcatcatcgtgcacaccatggctgctgtggaggccctgggcgccaaggcctccatggagaaccagccccacagcaagcccctgcccagcgacattgctgtgatcatgtacaccagcggcagcacaggcctgcccaagggcgtgatgatcagccacagcaacatcatcgccggcatcaccggcatggccgagcgcatccctgagctgggggaggaggatgtgtacatcggctacctgcccctggcccacgtgctggagctgtctgctgagctggtgtgcctgagccacggctgcagaattggctacagcagcccccagaccctggccgaccagagcagcaagatcaagaagggcagcaaaggagacacctccatgctgaagcccaccctgatggctgctgtgcctgagatcatggaccgcatctacaagaatgtgatgaacaaggtgtctgagatgagcagcttccagaggaacctcttcatcctggcctacaactacaagatggagcagatcagcaagggcaggaacacccccctgtgtgacagctttgtgttcaggaaggtgcgcagcctgctgggcggcaacatccggctgctgctgtgtggcggggcccccctgagcgccaccacccagcgcttcatgaacatctgcttctgctgccctgtgggccagggctacggcctgacagagagcgctggagctggcaccatcagcgaggtgtgggactacaacacaggccgggtgggcgcccccctggtgtgctgtgagatcaagctgaagaactgggaggagggcggctacttcaacacagacaagccccaccccagaggagagatcctgattggaggccagagcgtgaccatgggctactacaagaatgaggccaagaccaaggctgacttctttgaagatgaaaatggccagcgctggctgtgcaccggggacattggagaatttgagccagatggctgcctgaagatcatcgacaggaagaaggacctggtgaagctgcaggccggggagtatgtgtccctgggcaaggtggaggccgccctgaagaacctgcccctggtggacaacatctgtgcctatgccaacagctaccacagctatgtgattggatttgtggtgcccaaccagaaggagctgacagagctggccaggaagaagggcctgaagggcacctgggaggagctgtgcaacagctgtgagatggagaatgaggtgctgaaggtgctgtctgaggccgccatcagcgccagcctggagaagtttgagatccctgtgaagatccggctgagccctgagccctggaccccagagaccggcctggtgacagatgccttcaagctgaagaggaaggagctgaagacccactaccaggccgacattgaaagaatgtatggcaggaagtag

SEQ ID NO: 263078 - DNA, 267 bp, Artificial Sequence
  derived and/or modified sequence
atgaacaaccacgtgagcagcaagcccagcaccatgaagctgaagcacaccatcaaccccatcctgctgtacttcatccacttcctgatcagcctgtacaccatcctgacctacatccccttctacttcttcagcgagagccggcaggagaagagcaaccgcatcaaggccaagcctgtgaacagcaagccagacagcgcctacagatctgtgaacagcctggatggcctggcctctgtgctgtacccaggctgtgacaccctgtag

SEQ ID NO: 263079 - DNA, 288 bp, Artificial Sequence
  derived and/or modified sequence
atgaacaaccacgtgagcagcaagcccagcaccatgaagctgaagcacaccatcaaccccatcctgctgtacttcatccacttcctgatcagcctgtacaccatcctgacctacatccccttctacttcttcagcgagagccggcaggagaagagcaaccgcatcaaggccaagcctgtgaacagcaagccagacagcgcctacagatctgtgaacagcctggatggcctggcctctgtgctgtacccaggctgtgacaccctggacaaggtgttcacctacgcctag

SEQ ID NO: 263080 - DNA, 2163 bp, Artificial Sequence
  derived and/or modified sequence
atgaacaaccacgtgagcagcaagcccagcaccatgaagctgaagcacactattaacccaatcctgttgtattttatccacttcttaatatcactgtatactatactgacatacattcccttctatttcttctcagagtcccgccaggaaaagtccaatagaattaaggctaaaccggttaactccaagccagatagtgcctatcgcagcgttaactcgctcgatggactcgcgtcggtgctgtatcctgggtgtgatacactagataaggttttcacatatgctaagaacaagttcaagaacaaaagactgttgggcacacgtgaagtcctgaacgaagaggatgaggtccagcctaatggtaagatcttcaaaaaggtaatcttgggtcagtacaactggctgtcctacgaggatgtctttgtccgggcattcaattttggcaatggtctccagatgctgggacagaagcccaaaacaaatattgctatattctgtgaaacacgggcagaatggatgatcgccgcccaagcctgctttatgtataatttccagttggtgacactgtacgcaaccttaggcggacctgcgatcgtgcacgcgcttaatgagaccgaggtgaccaatattattacaagtaaggagctgctgcagactaaacttaaggacatcgttagcctggtgccacggctgcggcatattatcacagtcgacggaaaacccccaacatggagcgagttccctaaaggcataatcgtacatacaatggctgcagtggaggctctcggtgccaaggcttccatggaaaaccagcctcacagcaagcccctgccttcggacatcgccgtgataatgtatacatctggctcgactggcttgcccaagggcgtcatgatctctcattctaacattattgccgggattacgggcatggctgagcggattccggagttgggggaggaagacgtgtatatcggctatctgccccttgctcatgttctagagctatctgccgagttagtgtgtttgagccacggatgccgcattggttatagttctcctcagacgctggccgaccagagcagcaaaattaagaaaggcagcaagggggacactagcatgctcaagccgactctcatggcggctgtacccgagatcatggaccggatttataaaaatgttatgaataaggtgtctgagatgagctcattccagcgaaatctttttatcctggcttacaactacaagatggaacagatctctaaaggtaggaacaccccactgtgcgacagtttcgtattccgcaaggtaagatccttgctgggtggcaatattcgcctgctactgtgtgggggcgctccattgtcagcaacaacgcagcgcttcatgaacatttgcttctgctgcccagtgggacagggctatggcctgaccgagagcgcaggggcaggcaccatcagtgaagtgtgggactacaacaccggacgtgtgggcgctccccttgtttgctgcgagattaagctgaagaactgggaggagggtgggtactttaatacggataaaccccacccaaggggggaaatcttgatcgggggccaatctgttaccatgggctattacaagaatgaggcgaaaacaaaagccgatttcttcgaagacgagaacggtcagcggtggctgtgtaccggggacatcggggagttcgagcctgacggatgtctgaagataatagataggaagaaggaccttgtgaagctgcaggctggcgagtacgtgtcactcgggaaagtagaggcggctttaaagaatcttcccttagtggataacatctgcgcatacgccaattcctaccactcttacgtgatcggtttcgtggtgcccaaccagaaagagctgaccgaactagcgcgcaaaaaagggctgaaaggaacgtgggaagagctgtgcaattcctgcgagatggagaacgaggtgttgaaggtcctttctgaggccgctatcagcgcatccctggagaaatttgagatccccgtaaaaattagactgtcacccgaaccatggactcccgaaaccggccttgtcacagatgcttttaagctgaagcgaaaagagcttaaaactcattatcaggccgacatcgaacgcatgtacggtagaaaatag

SEQ ID NO: 263081 - DNA, 2163 bp, Artificial Sequence
  derived and/or modified sequence
atgaacaaccacgtgagcagcaagcccagcaccatgaagctgaagcacacaatcaacccaatcctcctgtactttatccactttctgattagcctatatactatcctgacctacattcctttctacttcttctcggagagccgacaggagaaatcaaaccgcataaaggctaagccagtcaacagcaaacccgatagtgcatataggtccgtcaacagcctagacgggttggccagtgtgctgtaccccggatgcgacacgctggataaggtgttcacatacgccaagaacaaattcaagaacaagagactcttaggcaccagggaggtcctcaatgaagaagacgaagtgcagcctaatggcaaaatttttaaaaaggtcattcttgggcaatataactggctttcatatgaggacgtatttgtcagggccttcaatttcggtaatgggctgcagatgttgggacagaagccaaaaacaaatattgccatcttttgtgagaccagggcggaatggatgattgccgcccaggcttgtttcatgtacaattttcaactggtgaccctgtacgccaccttgggcggcccagccattgtgcatgcattgaatgaaaccgaggtcacaaacattatcacctcaaaagagctgctgcagactaagctgaaagacatagtgagtctggtccctaggcttcgacacattattaccgtagatggtaaacccccaacctggagcgagttcccaaaaggcatcatcgttcacacaatggccgcagtggaggctcttggagccaaggcttctatggagaaccagccgcatagtaagccactcccctcagatatagctgtgattatgtataccagtggctcaactggattgccgaagggagtcatgattagtcactcaaatatcatcgccggcattacggggatggcagagcgtatcccagaactgggggaggaagatgtgtacatcggatacctgccactggctcacgtactggagctgagcgccgaactggtgtgccttagtcatgggtgccgtatcggttacagttcgccccagaccttggcagaccagtcttctaaaattaagaaaggtagtaagggggatacaagcatgctcaaacccacactgatggccgcagtgccagagatcatggatcgcatttacaaaaacgtaatgaataaagtgtctgaaatgtccagttttcagcggaacctcttcattttggcatacaattacaaaatggagcagatctctaaggggaggaatacacccctctgtgacagcttcgtcttcagaaaggtgaggagcctgcttggagggaatatacgtcttttattgtgtggcggtgccccactaagtgcgacaacacagagattcatgaatatttgcttctgttgccctgtgggccagggctacggcctgacagagtcagctggagctgggacaatcagcgaagtgtgggactataacaccggtcgcgtcggcgctccgctcgtctgttgcgagattaagctgaaaaactgggaagaaggcggttactttaacactgacaaaccccatcctcgcggagagatcttgatcggaggccagagtgtgacaatgggatactataagaacgaggcaaaaaccaaggcagactttttcgaggacgaaaatggtcagcgctggctttgtactggagacataggcgaattcgaacccgatggctgccttaaaataattgacagaaaaaaggacctcgtgaagctccaggcgggggagtacgtgtctctgggcaaagtcgaagccgctttaaagaacttaccccttgtggacaacatttgcgcgtatgctaattcttaccatagctatgtaattggattcgtcgtccccaatcagaaggaactgaccgagctggcacggaaaaaagggcttaaggggacatgggaagaactttgcaacagctgcgagatggaaaatgaggtgctgaaggtgctaagcgaagccgctatctccgcttcattggagaagttcgaaatccctgtgaagatccggctctccccagagccatggacaccagagaccggcctcgtgaccgatgcatttaagctgaagcgcaaagagcttaaaacacattatcaggcggacatcgagcggatgtatgggaggaagtag

SEQ ID NO: 263082 - DNA, 267 bp, Artificial Sequence
  derived and/or modified sequence
atgaacaaccacgtgagcagcaagcccagcaccatgaagctgaagcacacgattaacccgatccttctttatttcatccacttcctgattagcttatatacaatattgacctacatccctttctatttcttctccgagtcacgccaggagaagtcaaaccgcataaaagccaagcccgtgaatagcaaacctgacagcgcctacaggtcggtgaattcacttgatggcctcgccagtgtactttaccccggatgtgatactctatag

SEQ ID NO: 263083 - DNA, 288 bp, Artificial Sequence
  derived and/or modified sequence
atgaacaaccacgtgagcagcaagcccagcaccatgaagctgaagcatacaatcaatcccatcctgctctacttcattcacttccttatttccctctatactatcttgacatacattccattttactttttcagtgaaagccgtcaggagaaatccaacagaattaaagcaaaacctgtaaatagtaagcctgactcagcctaccgctcggtgaatagtttagacggactggcctccgtcctctacccgggctgcgacaccctagacaaagtctttacctacgcatag

SEQ ID NO: 263084 - DNA, 2163 bp, Artificial Sequence
  derived and/or modified sequence
atgaataatcatgtgtcgagcaagcctagcactatgaagctcaagcatacgatcaatccaatccttctttactttatccactttctgatcagcttatacaccatcctaacctatatacctttttatttttttagtgagagccgacaggaaaagagtaaccgcattaaagccaagcccgtgaacagcaaaccggatagcgcctaccgctccgtgaactctctggacggactggcatccgtgttataccccggatgtgataccctcgacaaggtgttcacatatgccaagaacaaattcaaaaacaaacgcctcctcggcacacgcgaagtcctgaatgaggaggacgaagtccagccaaacgggaaaatcttcaagaaagtaatactggggcagtataactggttgagctacgaggatgtgtttgtaagagcctttaacttcggcaacggcctccaaatgctgggtcagaagcccaagactaacattgcaatcttctgcgagactagagccgaatggatgatcgctgcacaagcgtgtttcatgtacaacttccagctagtcacattgtatgcgacgctcggcggaccagccattgtgcacgcactgaacgaaacggaagttacaaatattattacttccaaggagctgctccagaccaaactgaaggacattgttagtctggttcctcgactgaggcacattatcaccgtcgacggtaaacctcccacgtggagtgaattccctaaggggatcatcgtccacaccatggcagccgtggaagcactgggcgcaaaggcctccatggagaatcagcctcacagcaaaccactgccatctgatatcgctgtgatcatgtatacctccggtagcacaggactacctaaaggagttatgattagccactctaatatcatcgctggcattacaggaatggcagaaagaatcccagaactgggggaagaggatgtgtatatcggctatcttccactggcacatgtccttgagttaagtgcggagcttgtctgccttagccacgggtgtcgcataggatattcgagcccacaaactcttgctgatcagtcttcaaagatcaaaaaaggctcaaaaggggataccagcatgctgaagcctacactgatggctgccgtccctgagatcatggaccgaatttataaaaacgtcatgaacaaggtgagtgagatgtctagctttcagcggaatctgttcattttggcgtacaactacaagatggaacaaatatcaaaggggagaaatacccccctctgtgattccttcgtattccggaaagttcgcagcctgctaggcggtaacatccgcctgctcctgtgcggcggtgccccactctcagccaccactcagaggttcatgaatatttgcttctgttgtcccgtcgggcaagggtatggtctgaccgaatccgctggcgctgggacaatctccgaggtgtgggattacaacacgggtagagtcggcgcaccattagtctgctgtgaaataaaacttaagaattgggaagaagggggatacttcaacaccgacaagcctcacccaaggggtgagatcttgattggtggacagtccgttaccatgggatattataaaaatgaggccaagaccaaagccgacttcttcgaggacgagaacggccagagatggctgtgtacaggcgacataggggagtttgaacctgatggctgtctgaagatcatagacaggaaaaaggaccttgtcaagctgcaggcaggggagtatgtgagtctgggaaaagtcgaggcggctctgaaaaacttgccattggtggataatatctgcgcctatgcaaatagctaccacagctatgtcatcgggtttgtagttcccaatcaaaaagagctgaccgagctggctagaaagaaaggtttgaaagggacatgggaagagctgtgcaactcatgtgagatggagaatgaggtcctgaaagtgcttagcgaggcagcaatcagtgcctctctcgaaaaattcgagatccctgttaagattagactttcacccgagccttggacaccagaaacgggcctggttactgacgcgttcaagctgaagcgcaaggagctgaagacgcactaccaggctgacattgaacgcatgtatggcaggaaatag

SEQ ID NO: 263085 - DNA, 2163 bp, Artificial Sequence
  derived and/or modified sequence
atgaataaccatgtttcttcaaaaccatctacaatgaaactaaaacacaccatcaatcctatactcctgtacttcatccacttcctgatctcactgtatacgatcctgacctacatcccgttctactttttctccgagagtagacaggagaaatctaatcggatcaaggccaagcccgttaacagcaaacccgattcagcgtatcggtctgttaacagtctagacggtctcgctagcgtcctgtaccctggttgtgataccttggacaaagtatttacctacgccaagaacaagtttaagaacaagcgactcctgggcacacgcgaggtgttgaacgaggaggacgaggttcagccaaatggcaaaatatttaaaaaagttatcctggggcagtacaactggctctcatatgaggacgtattcgtgagagcgtttaattttggcaatggccttcaaatgcttggacagaaacctaaaaccaatatcgcgattttctgcgagactcgcgctgagtggatgatcgcagctcaggcctgctttatgtataatttccagctagtcacattgtacgcgactcttggagggcctgccattgttcacgccttgaatgagacagaggtgaccaatattatcacctctaaagaactgttacaaaccaagctgaaggatatcgtgtcactcgtccccagacttcgtcatataataaccgtggatggcaagccaccaacctggtcagaattccccaaaggcattatcgtgcataccatggcggcagtggaagcactaggtgccaaggctagtatggagaatcagccccattctaaaccgctgccgagcgacatcgccgtgattatgtatacgtctgggagcactggcctgccaaaaggcgtcatgatttcccattcgaatataatagcgggaatcactggcatggctgagcgtatcccagagctaggtgaagaggacgtatacatcggctacctacctctggcccatgtgctggagctgtctgccgaactggtttgtctcagtcatggatgccggattggatatagctcacctcaaactttggctgaccaatcaagcaagatcaagaagggatccaagggtgacaccagtatgctgaaacccactttgatggcagctgtacccgagattatggaccggatctacaagaacgtcatgaacaaagtgagcgagatgagcagttttcagcggaatctgtttattttggcatacaactataagatggagcagatttcaaagggcaggaacactcccctgtgcgattcgttcgtctttagaaaggtccgatccctcctggggggaaatattaggctgctgctgtgcggcggagcccctctctctgctacaacccagagatttatgaacatttgcttctgctgcccagtgggccaggggtacgggctgacagagagcgctggcgctggtaccatctcagaggtgtgggattataacacaggcagagtgggagctcctcttgtgtgttgcgaaattaagctgaaaaattgggaggagggcggatattttaacaccgataagcctcacccgcgtggggaaatacttatcggcggtcagtctgtcactatggggtactataaaaacgaagccaagaccaaagccgacttcttcgaggatgagaatggccagaggtggttgtgtactggcgatattggggagttcgagccagacggctgccttaagatcatcgaccgtaaaaaagacctggtcaaactgcaggcaggagaatatgtctctctcgggaaggtggaagctgcgttgaagaatctgccattggtagacaacatttgcgcgtatgccaattcctaccattcttacgtaatcggatttgtggtacctaaccagaaagagcttaccgagcttgcacggaaaaaaggcctcaagggtacctgggaggagctttgcaattcctgcgagatggagaacgaagtgttaaaggttttaagcgaggcagcaattagcgcgagtctcgaaaaattcgagattcccgtgaagatacgactcagtcccgagccttggaccccagagacaggtctagtcacggatgcattcaagttgaaacggaaggagcttaaaactcactatcaggctgatatcgaacgcatgtacggtcggaagtag

SEQ ID NO: 263086 - DNA, 267 bp, Artificial Sequence
  derived and/or modified sequence
atgaataatcatgtttctagtaagccttcaactatgaagcttaagcataccattaatccaatcctgctgtacttcatccacttcctgatctctctctacaccattcttacctacattccgttctactttttttccgaatcacgacaggaaaaatccaatcgaataaaggccaaaccagtgaacagcaagccagattccgcctatagatccgtcaattctctggacgggctggcctcagtactgtatccagggtgcgacaccctctag

SEQ ID NO: 263087 - DNA, 288 bp, Artificial Sequence
  derived and/or modified sequence
atgaataaccacgtctccagtaagccttccacaatgaagctgaagcacaccatcaatcccatcctcttatacttcatccattttctcatttcgctttacacaattttgacatatatacccttttactttttcagcgaaagtagacaggagaaatccaaccggattaaagcaaaaccagtgaatagtaaaccagacagcgcctataggagcgttaacagtctggacggcctggcctccgtcttatatcctggttgcgacacgctggacaaagtgtttacctacgcgtag

SEQ ID NO: 263088 - DNA, 2163 bp, Artificial Sequence
  derived and/or modified sequence
atgaacaaccacgtgagcagcaagcccagcaccatgaagctgaagcacaccatcaaccccatcctgctgtacttcatccacttcctgatcagcctgtacaccatcctgacctacatccccttctacttcttcagcgagagcagacaggagaagagcaacagaatcaaggccaagcccgtgaacagcaagcccgacagcgcctacagaagcgtgaacagcctggacggcctggccagcgtgctgtaccccggctgcgacaccctggacaaggtgttcacctacgccaagaacaagttcaagaacaagagactgctgggcaccagagaggtgctgaacgaggaggacgaggtgcagcccaacggcaagatcttcaagaaggtgatcctgggccagtacaactggctgagctacgaggacgtgttcgtgagagccttcaacttcggcaacggcctgcagatgctgggccagaagcccaagaccaacatcgccatcttctgcgagaccagagccgagtggatgatcgccgcccaggcctgcttcatgtacaacttccagctggtgaccctgtacgccaccctgggcggccccgccatcgtgcacgccctgaacgagaccgaggtgaccaacatcatcaccagcaaggagctgctgcagaccaagctgaaggacatcgtgagcctggtgcccagactgagacacatcatcaccgtggacggcaagccccccacctggagcgagttccccaagggcatcatcgtgcacaccatggccgccgtggaggccctgggcgccaaggccagcatggagaaccagccccacagcaagcccctgcccagcgacatcgccgtgatcatgtacaccagcggcagcaccggcctgcccaagggcgtgatgatcagccacagcaacatcatcgccggcatcaccggcatggccgagagaatccccgagctgggcgaggaggacgtgtacatcggctacctgcccctggcccacgtgctggagctgagcgccgagctggtgtgcctgagccacggctgcagaatcggctacagcagcccccagaccctggccgaccagagcagcaagatcaagaagggcagcaagggcgacaccagcatgctgaagcccaccctgatggccgccgtgcccgagatcatggacagaatctacaagaacgtgatgaacaaggtgagcgagatgagcagcttccagagaaacctgttcatcctggcctacaactacaagatggagcagatcagcaagggcagaaacacccccctgtgcgacagcttcgtgttcagaaaggtgagaagcctgctgggcggcaacatcagactgctgctgtgcggcggcgcccccctgagcgccaccacccagagattcatgaacatctgcttctgctgccccgtgggccagggctacggcctgaccgagagcgccggcgccggcaccatcagcgaggtgtgggactacaacaccggcagagtgggcgcccccctggtgtgctgcgagatcaagctgaagaactgggaggagggcggctacttcaacaccgacaagccccaccccagaggcgagatcctgatcggcggccagagcgtgaccatgggctactacaagaacgaggccaagaccaaggccgacttcttcgaggacgagaacggccagagatggctgtgcaccggcgacatcggcgagttcgagcccgacggctgcctgaagatcatcgacagaaagaaggacctggtgaagctgcaggccggcgagtacgtgagcctgggcaaggtggaggccgccctgaagaacctgcccctggtggacaacatctgcgcctacgccaacagctaccacagctacgtgatcggcttcgtggtgcccaaccagaaggagctgaccgagctggccagaaagaagggcctgaagggcacctgggaggagctgtgcaacagctgcgagatggagaacgaggtgctgaaggtgctgagcgaggccgccatcagcgccagcctggagaagttcgagatccccgtgaagatcagactgagccccgagccctggacccccgagaccggcctggtgaccgacgccttcaagctgaagagaaaggagctgaagacccactaccaggccgacatcgagagaatgtacggcagaaagtag

SEQ ID NO: 263089 - DNA, 267 bp, Artificial Sequence
  derived and/or modified sequence
atgaacaaccacgtgagcagcaagcccagcaccatgaagctgaagcacaccatcaaccccatcctgctgtacttcatccacttcctgatcagcctgtacaccatcctgacctacatccccttctacttcttcagcgagagcagacaggagaagagcaacagaatcaaggccaagcccgtgaacagcaagcccgacagcgcctacagaagcgtgaacagcctggacggcctggccagcgtgctgtaccccggctgcgacaccctgtag

SEQ ID NO: 263090 - DNA, 288 bp, Artificial Sequence
  derived and/or modified sequence
atgaacaaccacgtgagcagcaagcccagcaccatgaagctgaagcacaccatcaaccccatcctgctgtacttcatccacttcctgatcagcctgtacaccatcctgacctacatccccttctacttcttcagcgagagcagacaggagaagagcaacagaatcaaggccaagcccgtgaacagcaagcccgacagcgcctacagaagcgtgaacagcctggacggcctggccagcgtgctgtaccccggctgcgacaccctggacaaggtgttcacctacgcctag

SEQ ID NO: 263091 - DNA, 5679 bp, Artificial Sequence
  derived and/or modified sequence
agccccgcacgcgccaccgctcgcgggccaatgggtggcagcctctctgcataggcaacgagtgccggccgggggtgagcgtcccaggcggttccgctcaacagacgctgctgtggctgcgccgggctgcgacactgcagttgtctacgcggccggggccgggacgaggaggcgttggacggggtcgcatacgttcgtcccctcgcattgcggccccgacagctgcgccaggatccccgggcggcggcgcggggcgtgaacgctctggggctcagccaggcctgcgcgggcccgaggccggaggaacccggactccggcgtagcggttttgacacaagggcgcatatcttcaaagcacctagtacctcctaccattgtcaactgatacagaattcgttgttgggaaggactggggaaacagctgtaacatttgccaccctcagaagctgctggtcctgtgtcacaccaccttagcctcttgatcgaggaagattctcgctgaagtctgttaattctactttttgagtacttatgaataaccacgtgtcttcaaaaccatctaccatgaagctaaaacataccatcaaccctattcttttatattttatacattttctaatatcactttatactattttaacatacattccgttttattttttctccgagtcaagacaagaaaaatcaaaccgaattaaagcaaagcctgtaaattcaaaacctgattctgcatacagatctgttaatagtttggatggtttggcttcagtattataccctggatgtgatactttagataaagtttttacatatgcaaaaaacaaatttaagaacaaaagactcttgggaacacgtgaagttttaaatgaggaagatgaagtacaaccaaatggaaaaatttttaaaaaggttattcttggacagtataattggctttcctatgaagatgtctttgttcgagcctttaattttggaaatggattacagatgttgggtcagaaaccaaagaccaacatcgccatcttctgtgagaccagggccgagtggatgatagctgcacaggcgtgttttatgtataattttcagcttgttacattatatgccactctaggaggtccagccattgttcatgcattaaatgaaacagaggtgaccaacatcattactagtaaagaactcttacaaacaaagttgaaggatatagtttctttggtcccacgcctgcggcacatcatcactgttgatggaaagccaccgacctggtccgagttccccaagggcatcattgtgcataccatggctgcagtggaggccctgggagccaaggccagcatggaaaaccaacctcatagcaaaccattgccctcagatattgcagtaatcatgtacacaagtggatccacaggacttccaaagggagtcatgatctcacatagtaacattattgctggtataactgggatggcagaaaggattccagaactaggagaggaagatgtctacattggatatttgcctctggcccatgttctagaattaagtgctgagcttgtctgtctttctcacggatgccgcattggttactcttcaccacagactttagcagatcagtcttcaaaaattaaaaaaggaagcaaaggggatacatccatgttgaaaccaacactgatggcagcagttccggaaatcatggatcggatctacaaaaatgtcatgaataaagtcagtgaaatgagtagttttcaacgtaatctgtttattctggcctataattacaaaatggaacagatttcaaaaggacgtaatactccactgtgcgacagctttgttttccggaaagttcgaagcttgctagggggaaatattcgtctcctgttgtgtggtggcgctccactttctgcaaccacgcagcgattcatgaacatctgtttctgctgtcctgttggtcagggatacgggctcactgaatctgctggggctggaacaatttccgaagtgtgggactacaatactggcagagtgggagcaccattagtttgctgtgaaatcaaattaaaaaactgggaggaaggtggatactttaatactgataagccacaccccaggggtgaaattcttattgggggccaaagtgtgacaatggggtactacaaaaatgaagcaaaaacaaaagctgatttctttgaagatgaaaatggacaaaggtggctctgtactggggatattggagagtttgaacccgatggatgcttaaagattattgatcgtaaaaaggaccttgtaaaactacaggcaggggaatatgtttctcttgggaaagtagaggcagctttgaagaatcttccactagtagataacatttgtgcatatgcaaacagttatcattcttatgtcattggatttgttgtgccaaatcaaaaggaactaactgaactagctcgaaagaaaggacttaaagggacttgggaggagctgtgtaacagttgtgaaatggaaaatgaggtacttaaagtgctttccgaagctgctatttcagcaagtctggaaaagtttgaaattccagtaaaaattcgtttgagtcctgaaccgtggacccctgaaactggtctggtgacagatgccttcaagctgaaacgcaaagagcttaaaacacattaccaggcggacattgagcgaatgtatggaagaaaataattattctcttctggcatcagtttgctacagtgagctcagatcaaataggaaaatacttgaaatgcatgtctcaagctgcaaggcaaactccattcctcatattaaactattacttctcatgacgtcaccatttttaactgacaggattagtaaaacattaagacagcaaacttgtgtctgtctcttctttcattttccccgccaccaacttactttaccacctatgactgtacttgtcagtatgagaatttttctgaatcatattggggaagcagtgattttaaaacctcaagtttttaaacatgatttatatgttctgtataatgttcagtttgtaactttttaaaagtttggatgtatagagggataaataggaaatataagaattggttatttgggggcttttttacttactgtatttaaaaatacaagggtattgatatgaaattatgtaaatttcaaatgcttatgaatcaaatcattgttgaacaaaagatttgttgctgtgtaattattgtcttgtatgcatttgagagaaataaatatacccatacttatgttttaagaagttgagatcttgtgaatatatgcctgtcagtgtcttctttatatatttattttttattagaaaaaatgaagtttggttggtgatgcatgaaacaaaatagcaagagagggttatagtttaatagtaagggagataacacagcatgtgtagcaccagttgataattggtctctagtagcttactgtcaaaatgttcaatgaagtcttctgttcatctgttgaaactaggaaaatacccaaacttaaatggaagaattctgaaagagaggatagaatttaaagaacaagagtatataaagttattctttgaatatttcgttgactatatgtacattgagttatctatatttgtaaacaaattagtcatggaaaattattctatctcaaagtctccttttagtctagataatcattatttcattttaaaattagtgtttttcctagtttgcactgatgcgtgtatggatgtgtgtgagtcagtggtagcttatttaaaaagcaccttatcctttctcccataacctttgtacactaaaaaatgaaagaatttagaatgtatttgatgatagcattctcactaagacacatgagaatttaactttataaccgcgtgagttaagatttaattcataggttttgatgtcattgttgaagttatttgtaattcagaaaccttgcttgtgtgatacatagtctcttcatttattactgcttgtctgttgttatatctggattatcaaaagcaatagtgcaccaattaagatgtgctcaaatcaggacttaaatcataggcaccacatttttcatgtcagactagttactttgttgattctcagttactgtaggcatcaaaaggcaaaaatcaaaaaaaaaaaaaacaaaaacaaaaaaaaagatgaacctaggtctgtgtaaagtaaggggagtgttaggagcagccaggactgtgtagtgtgtgtttggttgcatcacaaacatcgtatgtggagacattgcaatacagtgttttttgttttcaacttttcttgtattgtatatttgtattatgttttgaatgcttttctcttttcataattaaatattaatgtttgggataactgccaagaagaagtaaaaatattgaatggaacttctatatgaggatgctgtgatctaaaaattaaatctcagtgggcggagagaatttgtttctgatgccttgtctttagaataattgtttgctttcagatgattaaaaaaaggagattgtatctaggaaaaaagtgtgaatgcttcaaaggagagatactgataattgtgacttgaaatagtgtcagatgaattatgtagctgatcactgatggaaccatctaatgaggcaggcttaaactctatttagtttcgtttgttttctcatatgaagtttataattcctttcagtcctaaaatgtcagatgccaggtgtcaaatgccacagtagaaagtgaaattaagtagagtccccttttaaacaaatttgtctgtaagcaaaactatctttagtgacttaaaaaataatatcctctaaaattaccctttcaagaggaaaaaactgttcaatgaaaaaaccactcaattatgactcatataagaaatactggtttaaccaggagatatttggggagcaaaattttaaggaatttcaaattgctaaatctaatacaaatatctgacaataagatacagatctaaaagaatggttcttaagaactattgtttactgggaataaactaagctctatgaagaattcgtaagcattacatgttccagtaagtttagcaacttagagccaagactggtggccacctccatttatttccccactgctcctccactgacatccttcttagcagaaacttcatgaaaaagtttttgctgacacagaacaaacctgaaagtagtatctactttctaaatactactttgcttttcagtagtggatttgatatttataatgttctctaaagcttgcaactttttcagcaacgtttaaaaatagattaacctggaataacttacttgtttgctgctaaaatactcaagattttgccatttttaaacaaccagtccctgtgatacaactttgaaaaaacttttaaaaatctctgatgtgtgggctctttttttcccataagaattatgtacatctgtgatgttttacagggggatccgcttttaaacagtgtacatattggaccacactgaaatgtcatatatcctttctctacttaaaattggttatttactgtgagttcatttccgatgtgttcttggttgttgctgttttctgcctgaagacgtgtatcataaagagctacatggtatggactatttatttgtaatttgacataaagtttgaagaataaagatctataaaagttgaagtttctgatattaaa

SEQ ID NO: 263092 - DNA, 3147 bp, Artificial Sequence
  derived and/or modified sequence
acgcgccaccgctcgcgggccaatgggtggcagcctctctgcataggcaacgagtgccggccgggggtgagcgtcccaggcggttccgctcaacagacgctgctgtggctgcgccgggctgcgacactgcagttgtctacgcggccggggccgggacgaggaggcgttggacggggtcgcatacgttcgtcccctcgcattgcggccccgacagctgcgccaggatccccgggcggcggcgcggggcgtgaacgctctggggctcagccaggcctgcgcgggcccgaggccggaggaacccggactccggcgtagcggttttgacacaagggcgcatatcttcaaagcacctagtacctcctaccattgtcaactgattctcgctgaagtctgttaattctactttttgagtacttatgaataaccacgtgtcttcaaaaccatctaccatgaagctaaaacataccatcaaccctattcttttatattttatacattttctaatatcactttatactattttaacatacattccgttttattttttctccgagtcaagacaagaaaaatcaaaccgaattaaagcaaagcctgtaaattcaaaacctgattctgcatacagatctgttaatagtttggatggtttggcttcagtattataccctggatgtgatactttagataaagtttttacatatgcaaaaaacaaatttaagaacaaaagactcttgggaacacgtgaagttttaaatgaggaagatgaagtacaaccaaatggaaaaatttttaaaaaggttattcttggacagtataattggctttcctatgaagatgtctttgttcgagcctttaattttggaaatggattacagatgttgggtcagaaaccaaagaccaacatcgccatcttctgtgagaccagggccgagtggatgatagctgcacaggcgtgttttatgtataattttcagcttgttacattatatgccactctaggaggtccagccattgttcatgcattaaatgaaacagaggtgaccaacatcattactagtaaagaactcttacaaacaaagttgaaggatatagtttctttggtcccacgcctgcggcacatcatcactgttgatggaaagccaccgacctggtccgagttccccaagggcatcattgtgcataccatggctgcagtggaggccctgggagccaaggccagcatggaaaaccaacctcatagcaaaccattgccctcagatattgcagtaatcatgtacacaagtggatccacaggacttccaaagggagtcatgatctcacatagtaacattattgctggtataactgggatggcagaaaggattccagaactaggagaggaagatgtctacattggatatttgcctctggcccatgttctagaattaagtgctgagcttgtctgtctttctcacggatgccgcattggttactcttcaccacagactttagcagatcagtcttcaaaaattaaaaaaggaagcaaaggggatacatccatgttgaaaccaacactgatggcagcagttccggaaatcatggatcggatctacaaaaatgtcatgaataaagtcagtgaaatgagtagttttcaacgtaatctgtttattctggcctataattacaaaatggaacagatttcaaaaggacgtaatactccactgtgcgacagctttgttttccggaaagttcgaagcttgctagggggaaatattcgtctcctgttgtgtggtggcgctccactttctgcaaccacgcagcgattcatgaacatctgtttctgctgtcctgttggtcagggatacgggctcactgaatctgctggggctggaacaatttccgaagtgtgggactacaatactggcagagtgggagcaccattagtttgctgtgaaatcaaattaaaaaactgggaggaaggtggatactttaatactgataagccacaccccaggggtgaaattcttattgggggccaaagtgtgacaatggggtactacaaaaatgaagcaaaaacaaaagctgatttctttgaagatgaaaatggacaaaggtggctctgtactggggatattggagagtttgaacccgatggatgcttaaagattattgatcgtaaaaaggaccttgtaaaactacaggcaggggaatatgtttctcttgggaaagtagaggcagctttgaagaatcttccactagtagataacatttgtgcatatgcaaacagttatcattcttatgtcattggatttgttgtgccaaatcaaaaggaactaactgaactagctcgaaagaaaggacttaaagggacttgggaggagctgtgtaacagttgtgaaatggaaaatgaggtacttaaagtgctttccgaagctgctatttcagcaagtctggaaaagtttgaaattccagtaaaaattcgtttgagtcctgaaccgtggacccctgaaactggtctggtgacagatgccttcaagctgaaacgcaaagagcttaaaacacattaccaggcggacattgagcgaatgtatggaagaaaataattattctcttctggcatcagtttgctacagtgagctcagatcaaataggaaaatacttgaaatgcatgtctcaagctgcaaggcaaactccattcctcatattaaactattacttctcatgacgtcaccatttttaactgacaggattagtaaaacattaagacagcaaacttgtgtctgtctcttctttcattttccccgccaccaacttactttaccacctatgactgtacttgtcagtatgagaatttttctgaatcatattggggaagcagtgattttaaaacctcaagtttttaaacatgatttatatgttctgtataatgttcagtttgtaactttttaaaagtttggatgtatagagggataaataggaaatataagaattggttatttgggggcttttttacttactgtatttaaaaatacaagggtattgatatgaaattatgtaaatttcaaatgcttatgaatcaaatcattgttgaacaaaagatttgttgctgtgtaattattgtcttgtatgcatttgagagaaataaatatacccatacttatgttttaagaa

SEQ ID NO: 263093 - DNA, 650 bp, Artificial Sequence
  derived and/or modified sequence
actgcgtgcctcccggcgctgtggggcggggtggggaggccacccccttgaattaagagggctctgccgcggccccagcagtgcggtgtccgtggaaggagactcagccctgcgatttcggaaaacccttgtttggcggggcgggaggggctgttgctgcgtggggtgagaagaaactaggttttgacacaagggcgcatatcttcaaagcacctagtacctcctaccattgtcaactgatacagaattcgttgttgggaaggactggggaaacagctgtaacatttgccaccctcagaagctgctggtcctgtgtcacaccaccttagcctcttgatcgaggaagattctcgctgaagtctgttaattctactttttgagtacttatgaataaccacgtgtcttcaaaaccatctaccatgaagctaaaacataccatcaaccctattcttttatattttatacattttctaatatcactttatactattttaacatacattccgttttattttttctccgagtcaagacaagaaaaatcaaaccgaattaaagcaaagcctgtaaattcaaaacctgattctgcatacagatctgttaatagtttggatggtttggcttcagtattataccctggatgtgatacttta

SEQ ID NO: 263094 - DNA, 560 bp, Artificial Sequence
  derived and/or modified sequence
tccgctcaacagacgctgctgtggctgcgccgggctgcgacactgcagttgtctacgcggccggggccgggacgaggaggcgttggacggggtcgcatacgttcgtcccctcgcattgcggccccgacagctgcgccaggatccccgggcggcggcgcggggcgtgaacgctctggggctcagccaggcctgcgcgggcccgaggccggaggaacccggactccggcgtagcgattctcgctgaagtctgttaattctactttttgagtacttatgaataaccacgtgtcttcaaaaccatctaccatgaagctaaaacataccatcaaccctattcttttatattttatacattttctaatatcactttatactattttaacatacattccgttttattttttctccgagtcaagacaagaaaaatcaaaccgaattaaagcaaagcctgtaaattcaaaacctgattctgcatacagatctgttaatagtttggatggtttggcttcagtattataccctggatgtgatactttagataaagtttttacatatgcaaa

SEQ ID NO: 263095 - protein, 323 aa, Artificial Sequence
  derived and/or modified sequence
MAAARPEAQSRSSPTPESRSQEPLDLVLVPDDCRPGTPPSDLIEIQVVKVTDTTLVPEPPEPGSFHCALCPAAFRLVSELLFHEHGHLAGAEGGGQGGDPSRCHVCGHSCPGPASLRAHYSLHTGERPYRCALCPRAFKALAPLLRHQHRHGVEPGTSRRPPDTAAVAEQRPGVAPERAEVVMAAAAAGAAVGKPFACRFCAKPFRRSSDMRDHERVHTGERPYHCGICGKGFTQSSVLSGHARIHTGERPFRCTLCDRTFNNSSNFRKHQRTHFHGPGPGLGDSGGQLGSSAAEGSGSGCGVGDPAEEGRGETAKVKVEADQ

SEQ ID NO: 263096 - DNA, 1987 bp, Artificial Sequence
  derived and/or modified sequence
acaagatggccgctgcgcgcccagaggcccagagtcggagctcaccgactccggagtcgcgatcccaggagccactggacctggtcctggtgcctgatgactgccggcctggcacacccccgagtgacctcatcgagatccaggtggtgaaggtgacggacaccacgctggtccctgagcccccggagccaggttctttccactgtgccttgtgccctgctgccttccggctggtttccgagctgctgttccacgaacatggccacttggctggggccgagggaggcgggcagggtggggacccgagccggtgccacgtgtgcggccacagctgcccgggccccgccagcctgcgcgcgcactacagcttgcacacgggggagcggccctaccgctgcgcgctctgcccccgcgccttcaaggccttggcgcccctgctccggcaccagcaccggcacggggtggagccgggcacctctcggaggcctccggacacagcggccgttgcagaacagaggcccggggtggccccggagagggcggaggtggtgatggcggcggcggcggcgggcgcagcggtggggaagccttttgcctgcaggttctgcgccaagcccttccgccgctcctcagacatgcgagaccacgagcgcgtgcacactggcgagcggccataccattgcggcatctgcggcaagggcttcacccagtcctcggtgcttagcggccacgcccgcatccacactggcgagcgcccgttccgctgcacgctctgcgaccgcaccttcaacaactcctccaacttccgcaagcaccagcgcacccacttccacgggccggggccggggctgggagactctggaggccagctgggctcgtcggcggctgaggggtcggggagcgggtgtggggtaggggaccctgcggaggaggggcggggggagaccgcgaaggtgaaggtggaggccgaccagtaggctgcagaccagggacatgggttagttaaggcggaggtacgaggccgacccggggagggggacggggtggggaaacggaggcaggggacagaagaggggagattgggggagagatgacagctgcagggatggttgtgagccgctagtgatggagagcagagggagagggccaggctccagactcccacacgcccacacagcacctctgccaggcctaggagaggacaggtgcagctcttgcagctctgcgggtgtgcggccaaaggcaaggcccacgggctggatgtcacttccccgactgtctcttggttggcttgtccttgtgcaagacccagcctgtcacgacagagcctgggcacttcagaggaggagccaggatcgaatggaaggggggaattggggtccaccatagtcttctgctctggtcctccacgggtggaccaggatggtgtctcttgcctacctcactgcattgcactggacctgggatgcctatccaccctctggcagaagacactcaccaggttatctgtgaagagactctgggatcccatcacctcaaagccagagggtccccaagtcaccgctgagagcacttgagcctcaaggatgtaagcctgaccataggaccttgactccaacagcggcaacccccacccccattgtggtccgtccttaacccatccactcttcttcggaggcaactgagaacacataaagcaagcagctacctagcatccccctcctaaagctttagactcagagcccagggtcccccacaagcctcaaggtagcctcaggtttctctaatttcctccactcccagttcgaagcaaacagcttactgcctagtccccgccaatcccaagggcgggctggctgatggcagcatggtgggctggcctgggtgtggagtgaaagagtcactgtggtgggggcgagaggaggacttgggagctggaggtgtgacaccttcagttctgttcctattaaaggaccttctgaagggc

SEQ ID NO: 263097 - DNA, 972 bp, Artificial Sequence
  derived and/or modified sequence
atggccgccgccagacccgaggcccagagcagaagcagccccacccccgagagcagaagccaggagcccctggacctggtgctggtgcccgacgactgcagacccggcaccccccccagcgacctgatcgagatccaggtggtgaaggtgaccgacaccaccctggtgcccgagccccccgagcccggcagcttccactgcgccctgtgccccgccgccttcagactggtgagcgagctgctgttccacgagcacggccacctggccggcgccgagggcggcggccagggcggcgaccccagcagatgccacgtgtgcggccacagctgccccggccccgccagcctgagagcccactacagcctgcacaccggcgagagaccctacagatgcgccctgtgccccagagccttcaaggccctggcccccctgctgagacaccagcacagacacggcgtggagcccggcaccagcagaagaccccccgacaccgccgccgtggccgagcagagacccggcgtggcccccgagagagccgaggtggtgatggccgccgccgccgccggcgccgccgtgggcaagcccttcgcctgcagattctgcgccaagcccttcagaagaagcagcgacatgagagaccacgagagagtgcacaccggcgagagaccctaccactgcggcatctgcggcaagggcttcacccagagcagcgtgctgagcggccacgccagaatccacaccggcgagagacccttcagatgcaccctgtgcgacagaaccttcaacaacagcagcaacttcagaaagcaccagagaacccacttccacggccccggccccggcctgggcgacagcggcggccagctgggcagcagcgccgccgagggcagcggcagcggctgcggcgtgggcgaccccgccgaggagggcagaggcgagaccgccaaggtgaaggtggaggccgaccagtag

SEQ ID NO: 263098 - DNA, 972 bp, Artificial Sequence
  derived and/or modified sequence
atggccgccgctcggcctgaagcacagagtcgaagctctccaactccagaaagccgcagtcaggaaccactggacttggtcctcgttccggatgattgcaggcccggcactcctccctctgacctgattgagattcaggttgtgaaggtcactgacacgactctcgtgccagagccgcctgagccaggaagctttcattgcgctctgtgtcccgctgcgttccgcctggtgtccgagttgctgttccacgaacacggacatcttgctggggcggaggggggagggcaaggtggtgacccttcccggtgtcacgtctgcgggcacagttgccccggtcctgcctcactccgagcacattactctttacacaccggcgaacggccctacagatgtgccctctgcccccgggccttcaaggccttggccccattgctaaggcaccagcacagacatggcgtggagcccggtacttcgcgccggccgcccgacactgccgcagtggcagaacagagaccgggggtcgccccagagagggctgaggttgtgatggccgcggcggctgcaggggccgccgtagggaagcccttcgcgtgtagattctgtgccaagccatttcgccgtagctctgatatgagggaccacgagcgcgttcacactggcgaacgaccttatcactgcggtatctgcggcaaggggtttacacaaagctcagtgctgagtgggcatgcacggatccatactggagagagaccttttcgatgcacattatgcgatcgcaccttcaacaattcctctaacttcaggaaacaccagaggacccatttccacggcccaggcccaggactgggagactcgggtggacagcttggatccagcgccgcagagggatcagggagtggctgtggtgtaggcgatcctgccgaggagggccgcggcgaaacagcaaaagtgaaggtagaggccgatcagtag

SEQ ID NO: 263099 - DNA, 972 bp, Artificial Sequence
  derived and/or modified sequence
atggctgctgcccggcctgaggcccagagccgcagcagccccaccccagagagccgcagccaggagcccctggacctggtgctggtgcctgatgactgcaggcctggcaccccacccagcgacctgattgagatccaggtggtgaaggtgacagacaccaccctggtgcctgagcccccagagcccggcagcttccactgtgccctgtgcccagctgccttccggctggtgtctgagctgctcttccatgaacatggccacctggccggggctgagggcggcggccagggcggggaccccagccgctgccacgtgtgtggccacagctgccccggccctgccagcctgcgggcccactacagcctgcacactggagagcggccctaccgctgtgccctgtgcccccgggccttcaaggccctggcccccctgctgcggcaccagcacagacatggagtggagcccggcaccagcagaagacctccagacacagctgctgtggccgagcagaggcctggggtggcccctgagagagctgaggtggtgatggctgctgctgctgctggagctgctgtgggcaagccctttgcctgccgcttctgtgccaagcccttccgccgcagcagtgacatgagggaccacgagcgggtgcacactggagagcggccctaccactgcggcatctgtgggaagggcttcacccagagctctgtgctgagcggccacgcccgcatccacactggagagcggcccttccgctgcaccctgtgtgacaggaccttcaacaacagcagcaacttcaggaagcaccagaggacccacttccacggccctggccctggcctgggggacagcggcggccagctgggcagcagcgctgctgagggcagcggcagcggctgcggcgtgggggaccctgctgaggagggccgcggggagacagccaaggtgaaggtggaggccgaccagtag

SEQ ID NO: 263100 - DNA, 972 bp, Artificial Sequence
  derived and/or modified sequence
atggccgccgcccggcccgaggcccagagccggagcagccccacccctgagagtagatcacaggaacctcttgatcttgttctggttcctgatgactgtagaccaggaactcctcctagtgaccttatcgaaatccaagtggtcaaagtgacagatacgactttggttcctgagcctcctgaaccaggaagcttccactgcgctctgtgcccggctgcctttcgcctggtctctgagctcttgtttcacgagcacggccaccttgccggtgctgaggggggcggacagggtggagaccccagcaggtgccacgtttgcgggcattcttgcccggggcctgcctcactccgcgcccattattctcttcatactggcgaacgtccctacagatgcgccctgtgtccccgagcctttaaagccctggcccctctccttcgacaccaacatcgccatggggtcgaaccaggtacaagcagacgcccacctgacaccgctgctgtcgcagagcagaggcccggagtcgctcctgagcgggccgaggtcgtcatggcagcagccgccgcgggagcagcagtaggtaaaccctttgcatgtcgtttctgcgcgaagccttttcggcggtcttctgacatgcgggatcacgagcgggtacacaccggcgagcgcccatatcactgcggcatctgtggaaaggggtttacacagagcagtgttttgagtggccacgctaggatccacaccggggagcgtccttttcgctgcaccttgtgtgatcggacttttaataactctagcaactttagaaagcaccagcgtacacattttcatgggcctgggcccggtctcggcgacagcgggggccagctaggtagtagcgctgcagaaggttcggggagcggttgtggggttggcgacccggctgaagagggtaggggcgaaacagccaaggtgaaggtcgaagcggaccagtag

SEQ ID NO: 263101 - DNA, 972 bp, Artificial Sequence
  derived and/or modified sequence
atggcagccgcaaggcccgaggcacagtctcgatccagcccaaccccagagtccaggagccaggagccgctggatctggttctggtccctgatgattgtcgccctggaacacctccatcagatttaatcgagatccaggtggtcaaagtgactgataccaccttggtccccgagccgcctgaaccgggaagctttcattgcgctctgtgccctgccgcttttaggttagtctctgagctcctgttccatgagcacggccacttagcgggagcggagggtggtggccagggaggcgacccaagtagatgccatgtctgtgggcattcatgtcccggacctgccagcctgcgagcccattacagcctgcacaccggcgagcggccatacagatgcgctttgtgccccagagccttcaaggcattggccccacttctaaggcaccagcaccgacacggcgtggagcctggaaccagcagacggccacccgacaccgccgctgtcgcagagcagcggcctggcgtggccccagagcgcgctgaagtggtgatggcagccgcagcagctggcgctgctgtaggtaaacccttcgcatgcagattctgcgcaaaaccgtttcggaggagctccgacatgcgcgatcacgagagggtgcacactggcgagcggccatatcactgcggcatctgcggcaagggctttacccagtcttctgtattaagcggacatgccagaatccataccggcgagagaccgttcagatgcaccttgtgcgatagaacgtttaataacagctcaaacttccgcaaacaccaacgcacacacttccatggtccgggtcctggcctcggggattccgggggacagttgggttcgtctgcggctgaaggaagtggatcagggtgcggcgttggagatccagcagaggagggcaggggggaaacagcgaaggttaaagtggaggcggatcagtag

SEQ ID NO: 263102 - DNA, 1996 bp, Artificial Sequence
  derived and/or modified sequence
ggcttgggcacaagatggccgctgcgcgcccagaggcccagagtcggagctcaccgactccggagtcgcgatcccaggagccactggacctggtcctggtgcctgatgactgccggcctggcacacccccgagtgacctcatcgagatccaggtggtgaaggtgacggacaccacgctggtccctgagcccccggagccaggttctttccactgtgccttgtgccctgctgccttccggctggtttccgagctgctgttccacgaacatggccacttggctggggccgagggaggcgggcagggtggggacccgagccggtgccacgtgtgcggccacagctgcccgggccccgccagcctgcgcgcgcactacagcttgcacacgggggagcggccctaccgctgcgcgctctgcccccgcgccttcaaggccttggcgcccctgctccggcaccagcaccggcacggggtggagccgggcacctctcggaggcctccggacacagcggccgttgcagaacagaggcccggggtggccccggagagggcggaggtggtgatggcggcggcggcggcgggcgcagcggtggggaagccttttgcctgcaggttctgcgccaagcccttccgccgctcctcagacatgcgagaccacgagcgcgtgcacactggcgagcggccataccattgcggcatctgcggcaagggcttcacccagtcctcggtgcttagcggccacgcccgcatccacactggcgagcgcccgttccgctgcacgctctgcgaccgcaccttcaacaactcctccaacttccgcaagcaccagcgcacccacttccacgggccggggccggggctgggagactctggaggccagctgggctcgtcggcggctgaggggtcggggagcgggtgtggggtaggggaccctgcggaggaggggcggggggagaccgcgaaggtgaaggtggaggccgaccagtaggctgcagaccagggacatgggttagttaaggcggaggtacgaggccgacccggggagggggacggggtggggaaacggaggcaggggacagaagaggggagattgggggagagatgacagctgcagggatggttgtgagccgctagtgatggagagcagagggagagggccaggctccagactcccacacgcccacacagcacctctgccaggcctaggagaggacaggtgcagctcttgcagctctgcgggtgtgcggccaaaggcaaggcccacgggctggatgtcacttccccgactgtctcttggttggcttgtccttgtgcaagacccagcctgtcacgacagagcctgggcacttcagaggaggagccaggatcgaatggaaggggggaattggggtccaccatagtcttctgctctggtcctccacgggtggaccaggatggagtctcctgcctacctcactgcattgcactggacctgggatgcctatccaccctctggcagaagacactcaccaggttatctgtgaagagactctgggatcccatcacctcaaagccagagggtccccaagtcaccgctgagagcacttgagcctcaaggatgtaagcctgaccataggatcttgactccaacagcggcaacccccacccccattgtggtccgtccttaacccatccactcttcttcggaggcaactgagaacacataaagcaagcagctacctagcatccccctcctaaagctttagactcagagcccagggtcccccacaagcctcaaggtagcctcaggtttctctaatttcctccactcccagttcgaagcaaacagcttactgcctagtccccgccaatcccaagggcgggctggctgatggcagcatggtgggctggcctgggtgtggagtgaaagagtcactgtggtgggggcgagaggaggacttgggagctggaggtgtgacaccttcagttctgttcctattaaaggaccttctgaagggc

SEQ ID NO: 263103 - protein, 683 aa, Artificial Sequence
  derived and/or modified sequence
MLFIFNFLFSPLPTPALICILTFGAAIFLWLITRPQPVLPLLDLNNQSVGIEGGARKGVSQKNNDLTSCCFSDAKTMYEVFQRGLAVSDNGPCLGYRKPNQPYRWLSYKQVSDRAEYLGSCLLHKGYKSSPDQFVGIFAQNRPEWIISELACYTYSMVAVPLYDTLGPEAIVHIVNKADIAMVICDTPQKALVLIGNVEKGFTPSLKVIILMDPFDDDLKQRGEKSGIEILSLYDAENLGKEHFRKPVPPSPEDLSVICFTSGTTGDPKGAMITHQNIVSNAAAFLKCVEHAYEPTPDDVAISYLPLAHMFERIVQAVVYSCGARVGFFQGDIRLLADDMKTLKPTLFPAVPRLLNRIYDKVQNEAKTPLKKFLLKLAVSSKFKELQKGIIRHDSFWDKLIFAKIQDSLGGRVRVIVTGAAPMSTSVMTFFRAAMGCQVYEAYGQTECTGGCTFTLPGDWTSGHVGVPLACNYVKLEDVADMNYFTVNNEGEVCIKGTNVFKGYLKDPEKTQEALDSDGWLHTGDIGRWLPNGTLKIIDRKKNIFKLAQGEYIAPEKIENIYNRSQPVLQIFVHGESLRSSLVGVVVPDTDVLPSFAAKLGVKGSFEELCQNQVVREAILEDLQKIGKESGLKTFEQVKAIFLHPEPFSIENGLLTPTLKAKRGELSKYFRTQIDSLYEHIQD

SEQ ID NO: 263104 - protein, 465 aa, Artificial Sequence
  derived and/or modified sequence
MLFPGASIVPECWLLVLIQNLGKEHFRKPVPPSPEDLSVICFTSGTTGDPKGAMITHQNIVSNAAAFLKCVEHAYEPTPDDVAISYLPLAHMFERIVQAVVYSCGARVGFFQGDIRLLADDMKTLKPTLFPAVPRLLNRIYDKVQNEAKTPLKKFLLKLAVSSKFKELQKGIIRHDSFWDKLIFAKIQDSLGGRVRVIVTGAAPMSTSVMTFFRAAMGCQVYEAYGQTECTGGCTFTLPGDWTSGHVGVPLACNYVKLEDVADMNYFTVNNEGEVCIKGTNVFKGYLKDPEKTQEALDSDGWLHTGDIGRWLPNGTLKIIDRKKNIFKLAQGEYIAPEKIENIYNRSQPVLQIFVHGESLRSSLVGVVVPDTDVLPSFAAKLGVKGSFEELCQNQVVREAILEDLQKIGKESGLKTFEQVKAIFLHPEPFSIENGLLTPTLKAKRGELSKYFRTQIDSLYEHIQD

SEQ ID NO: 263105 - protein, 659 aa, Artificial Sequence
  derived and/or modified sequence
MLFIFNFLFSPLPTPALICILTFGAAIFLWLITRPQPVLPLLDLNNQSVGIEGGARKGVSQKNNDLTSCCFSDAKTMYEVFQRGLAVSDNGPCLGYRKPNQPYRWLSYKQVSDRAEYLGSCLLHKGYKSSPDQFVGIFAQNRPEWIISELACYTYSMVAVPLYDTLGPEAIVHIVNKADIAMVICDTPQKALVLIGNVEKGFTPSLKVIILMDPFDDDLKQRGEKSGIEILSLYDAENLGKEHFRKPVPPSPEDLSVICFTSGTTGDPKGAMITHQNIVSNAAAFLKCVEHAYEPTPDDVAISYLPLAHMFERIVQAVVYSCGARVGFFQGDIRLLADDMKTLKPTLFPAVPRLLNRIYDKVQNEAKTPLKKFLLKLAVSSKFKELQKGIIRHDSFWDKLIFAKIQDSLGGRVRVIVTGAAPMSTSVMTFFRAAMGCQVYEAYGQTECTGGCTFTLPGDWTSGHVGVPLACNYVKLEDVADMNYFTVNNEGEVCIKGTNVFKGYLKDPEKTQEALDSDGWLHTGDIGRWLPNGTLKIIDRKKNIFKLAQGEYIAPEKIENIYNRSQPVLQIFVHGESLRSSLVGVVVPDTDVLPSFAAKLGVKGSFEELCQNQVKAIFLHPEPFSIENGLLTPTLKAKRGELSKYFRTQIDSLYEHIQD

SEQ ID NO: 263106 - DNA, 2052 bp, Artificial Sequence
  derived and/or modified sequence
atgcttttcatcttcaactttttgttctcaccgctgcctacgcccgccctgatttgcatcctgaccttcggagctgcgattttcctttggcttatcacccggccgcaacctgtcctcccactcctggacctgaataaccagagcgtaggcattgagggaggtgcaagaaaaggggtgtctcaaaagaataatgatctgacaagctgttgtttctctgacgcaaagacaatgtatgaggtctttcagcgaggactggccgtgtctgacaacggaccctgtctggggtaccgaaaaccaaaccagccttaccggtggctgagttacaagcaggtctcagatagagcagaatatctgggctcttgcctcctccacaagggatataagtcttctcccgaccagtttgtaggaatttttgctcagaatcggccggagtggatcatctcagaacttgcatgctatacctactctatggttgcagtgcccctgtacgatacactcggaccggaggctatcgtacacatcgtcaataaggcagatatcgcaatggttatctgcgataccccgcagaaggccctggtactaattggtaacgtagaaaagggctttactccctctctgaaggtcatcattctgatggacccttttgatgatgacctgaagcaacgcggagaaaagtccggaatcgaaatcttatccctgtatgacgcggaaaacttaggcaaggaacacttccgaaagcctgtccccccaagtcccgaggacctctctgtcatatgttttacttctggcacaaccggtgatcccaaaggggccatgattacacatcagaatattgtgtcaaacgctgccgcattcttgaagtgcgtggagcatgcttacgagcccaccccagacgacgtggctatcagctacttgcccctcgctcatatgttcgagcggatcgtgcaggcagtggtgtacagctgcggggccagggtggggttttttcagggagacatccggctgctcgcagatgatatgaagacactgaagccaactctgtttcccgcggtcccacgactcctgaatcgtatttatgacaaagtgcaaaatgaggctaaaacaccactgaaaaaattcctactgaagttggcggtctcatcaaagttcaaggagttgcaaaaaggcatcatccgacatgattctttttgggacaagttaatcttcgccaagattcaggacagcttggggggtcgcgtgagggtgattgtgaccggagccgctcctatgagcacaagcgttatgacctttttccgcgccgccatgggatgccaggtctatgaggcctacgggcagacagaatgcaccggggggtgcacctttacactgcccggggactggacatccggccatgtcggagtgcctctggcatgcaactatgttaaactggaagacgtagctgacatgaactatttcactgtgaataatgagggcgaggtatgcatcaagggcaccaacgtgtttaaggggtacctgaaggatccagaaaaaactcaggaggcccttgacagcgatgggtggttgcataccggcgacatcgggaggtggctcccaaacggcactttaaaaatcatagaccgtaagaagaatatctttaagttagcccagggcgagtacattgcgcctgaaaagattgagaacatttacaaccggtctcagcctgtgcttcaaatctttgtacacggcgaatccctgaggtcctcactggtaggggtggtagtgccagatacagacgtgctgccatcttttgctgcaaagctgggggtgaagggctcttttgaggaattgtgtcaaaatcaggtagttagggaggctatcttggaggacctgcagaagatcggcaaggaaagcggccttaagacttttgagcaggtcaaagctatattcctacaccccgaaccatttagtattgaaaatggcctgcttaccccaactctcaaagctaagagaggggaactctcgaagtattttcggacacagattgattctctttacgagcatatccaggactag

SEQ ID NO: 263107 - DNA, 2052 bp, Artificial Sequence
  derived and/or modified sequence
atgttgttcattttcaattttctctttagtcctcttcccacgccggcactgatttgtattttaacctttggcgccgcaatatttttgtggttgataacccgtccacagcctgttctgccactcctagacctgaacaatcaatctgtggggatcgaaggcggggctagaaaaggagtctctcaaaagaacaacgacctgacaagttgctgcttttccgatgccaaaactatgtacgaggtcttccagcgggggcttgctgtgtctgataatgggccctgccttgggtaccgcaaaccaaatcagccttatagatggctctcctataaacaggtttccgatcgggctgagtatctcgggagttgcctcttgcacaaaggatataaaagtagcccagatcagttcgtcggaattttcgcccagaatcggccagagtggatcatctctgaactcgcctgctacacatattctatggtggcagtccctctgtacgacacgcttggcccagaagctattgtgcacattgtcaataaggctgacattgccatggtgatttgtgataccccacagaaggccctggtgttaatcggcaacgtggaaaaagggttcacaccctccctcaaagtcatcatcctgatggatccttttgatgatgatttgaaacagagaggagaaaagagtggtattgagatcctcagcctgtacgacgccgagaatttgggcaaggagcattttagaaagcctgtaccccctagccccgaagatctttctgtgatatgttttacatctggtactaccggagacccaaaaggagccatgataactcatcaaaatatagtgagtaatgctgcggcctttctgaagtgtgtagagcacgcctatgagcctactcctgacgatgttgccatctcctacttgccactggcccatatgtttgaacggattgtccaggccgttgtgtatagttgtggcgctcgtgtgggtttttttcagggcgatatacggctgctggctgatgacatgaaaactctgaaaccaactctctttcctgcagtccctaggttgctcaaccgcatatacgataaggtgcaaaacgaagccaaaactcccctaaagaagttcctgctaaaattggcggtctctagtaagtttaaggagctccagaaaggcatcatacgccatgactcattctgggacaagctgatattcgctaagatccaggatagtctgggcggaagggtcagggtcattgttacaggagcggctcccatgagtacttcggtgatgactttcttccgagcagctatgggttgccaggtttacgaggcatatggccagacagaatgcacaggcggatgcacgttcacgctgccaggagattggacttccggacacgtgggggtgccactggcctgcaattatgtgaagctcgaggacgtggctgacatgaattatttcacagtgaataatgagggcgaagtgtgcattaaaggcacgaacgtcttcaaaggatatctgaaggatccagaaaaaacccaagaagctcttgattcggatggatggctgcacactggcgacatcggcagatggcttcccaatgggacgctaaaaatcatcgaccgcaagaagaatattttcaagctcgcccagggggaatacatcgcccctgaaaagattgagaatatctacaacaggtcgcagcccgtcctgcagatcttcgtgcacggcgaaagcctccgttcatctcttgtgggggtggtggttccagatacagatgtattgcctagctttgcggccaaactcggcgtgaagggctctttcgaggagctgtgtcagaaccaggtagtcagagaagcaatactggaggatctgcagaaaatcggcaaggagtcaggattaaaaacttttgaacaagtgaaggccatctttctgcaccccgagccgtttagtatcgagaacgggctcctgaccccgacacttaaagcaaagcggggcgagctgtcaaaatactttcgtacacagatcgattcactgtatgaacatattcaggactag

SEQ ID NO: 263108 - DNA, 1398 bp, Artificial Sequence
  derived and/or modified sequence
atgctttttcccggtgcctccatcgtgcctgagtgctggttgctggttctgattcagaacttaggaaaggagcatttcagaaaacccgttcccccttcccccgaggatctgagtgtgatttgtttcacctcggggactaccggcgatcccaagggtgcgatgattacgcaccagaacattgtgagcaacgccgcagcatttctcaagtgtgttgaacacgcctatgagcccactccagatgacgtggctattagctatctgccactggcccacatgttcgagaggatcgtgcaggctgttgtatatagttgcggtgcccgtgtgggtttcttccagggagatatccgcctgctcgcagatgatatgaagacacttaaacctacgttgtttcccgctgtcccaagattgctaaaccgaatttatgacaaggtccagaacgaagctaaaactccgctcaagaagttcctgctgaagctcgccgtgtcatctaaattcaaagaattgcagaaaggaatcatcaggcacgactcattctgggacaaactgatcttcgccaaaatccaagatagtctggggggcagagtgcgggtgattgtgacaggtgcagctcccatgagtacgagtgtgatgacctttttcagagcagctatgggatgtcaagtgtatgaggcctacgggcagaccgagtgtactggtggctgtaccttcacgttgcctggcgactggacaagcggccacgtgggagtgcctctggcttgtaattacgttaagttggaggatgtggctgacatgaattacttcaccgtgaacaacgagggagaagtttgtatcaagggtactaatgtgttcaagggctacctgaaggatcccgagaaaactcaggaggcattagactcagacggctggcttcacacaggtgacattggcagatggctcccaaatggtacactgaagataattgatagaaaaaagaacatttttaagctcgcacagggcgaatacattgctcctgaaaagatagaaaacatttacaatagatctcagcctgtcctgcaaatcttcgtccacggcgagagccttcgcagctccctcgtgggtgtagtcgtccctgacacagatgtcttgccgtcatttgctgccaagctcggtgtgaagggaagctttgaggaactgtgtcagaaccaggtggtgagggaagccattcttgaagatctgcagaagataggcaaggaaagcggactcaagacttttgaacaagtaaaggcgatttttctgcacccagagccattttcgattgagaacggcctgctcacacccacactcaaggctaagagaggggaactgtcaaagtacttccgcacccagatcgactccttatatgagcatatccaagattag

SEQ ID NO: 263109 - DNA, 2052 bp, Artificial Sequence
  derived and/or modified sequence
atgttgttcatttttaacttcctgttcagtcccctccctacaccagccctcatctgtatcctgacatttggagccgccatttttctgtggctgattaccaggccccaacccgtgcttcccctcctggatctgaataaccagtcagtggggatcgaaggcggcgcaaggaaaggcgtgtctcaaaagaacaacgatctgacctcttgttgtttttccgacgccaagactatgtatgaagtgttccagcgcgggctggccgtatccgacaatggtccctgtttggggtaccgcaaacctaatcagccgtacaggtggctaagttataagcaagttagtgacagggccgaatatttaggctcatgcttgctgcataagggatataagtcgagccctgaccagttcgtaggaatcttcgctcagaaccgccccgaatggattatatccgagctggcctgttatacgtattcaatggtggccgtaccactctacgacaccctggggcctgaggctatagtgcacattgtcaataaagcggacatcgccatggtgatttgcgacaccccacagaaggcgctggtgctgatcgggaatgttgagaaaggtttcacaccgtctctaaaagtgatcatcttgatggacccttttgatgacgatttgaaacagaggggcgagaagtcagggattgaaattctgagtctttacgatgctgagaatcttgggaaggagcacttccggaagcctgtcccacccagccctgaagacctcagtgttatctgcttcacttcaggcactacaggcgacccaaaaggtgcgatgattacccatcagaacatcgtgtccaacgctgcggcctttctaaagtgcgtcgaacacgcatatgaacccaccccagacgacgttgccatttcctatctgccccttgcacatatgttcgagagaatcgttcaggccgtagtgtatagctgcggagctagggtgggatttttccagggcgacattagactgctggcggacgatatgaagacactgaagcccaccctgttccccgcagtgccaagattactcaatcgaatctatgacaaagtgcagaacgaggctaaaactcccctgaagaagttccttctgaagctggccgtgtcttcgaaatttaaagagctgcagaagggaataatccgtcacgattccttttgggacaagcttatatttgctaaaattcaggacagcctagggggccgagtgcgagttatagttacaggggctgcccctatgtctacctctgtgatgacatttttcagagccgccatgggttgccaagtctacgaggcttatggtcagacggaatgtacaggaggttgcactttcacgctgcctggagattggacatccgggcatgtgggtgtgcctctggcctgcaactacgtgaagctggaagatgtcgccgacatgaattactttacggtgaacaacgagggagaggtgtgcatcaaggggaccaacgtttttaagggttacctgaaggatcctgaaaagacgcaggaagctttggatagtgatggttggctccacacaggagacataggcagatggctacccaatggcaccttgaaaatcatagacaggaaaaagaatattttcaagttagctcagggggaatacatagcacctgaaaagatcgaaaacatatataaccggagtcagccagtcctgcagatatttgtacatggagagagtctccgcagttccctggtaggcgtggtcgtcccagataccgatgtgctcccgagtttcgcagccaagcttggagtgaaaggatctttcgaggagctctgccagaaccaagttgtcagagaggccatcctggaggatctgcaaaagatcggcaaagagtccggattaaagacattcgaacaggttaaagccatttttctgcatcccgaacctttcagtatcgagaatgggctgctgacacctactctcaaagccaaacggggggagctttccaaatacttccgtactcagatcgacagcctctatgagcacatccaggattag

SEQ ID NO: 263110 - DNA, 1980 bp, Artificial Sequence
  derived and/or modified sequence
atgttattcatttttaattttttgttttctcccctgcccacgcccgcgctgatttgcattctgacattcggggccgctatttttctatggcttattacccggccacagccagtgttaccgctgcttgacctgaataatcaatctgttgggattgaaggcggagctcgcaagggtgtgtcacaaaaaaacaacgatctcacgagttgttgctttagcgacgccaagacaatgtacgaggtcttccagagggggctcgcagtctccgacaatgggccttgcctggggtacagaaaaccaaatcaaccataccggtggctgtcctataaacaggtctcggatagggcagaatacctcgggtcctgcctcctacacaagggatacaagtcgagcccagatcagttcgtggggatcttcgcccagaaccggccagagtggattatctctgagttagcatgctacacgtactccatggtggctgtgccactgtacgatacactagggccagaggcgatcgtgcacatcgtaaataaggccgacatcgctatggtcatttgtgataccccccagaaagcgttagttttgatcggaaatgtcgagaaaggattcacacccagcctgaaggttatcatcctcatggaccccttcgacgacgacctcaagcaaaggggagagaagtcaggaatagaaatactgtccctttacgatgccgaaaatttaggcaaagaacacttccgaaagccagtccccccgagccccgaggacctttccgtgatctgctttacaagcggtacaactggagatccgaaaggcgcgatgatcacacaccaaaatattgttagcaatgccgctgctttcctcaagtgtgtcgaacacgcatacgagccaacccctgatgatgtggccatttcatatcttcccctggcccacatgttcgaacggatagtgcaggccgtggtgtatagttgtggtgctcgtgttggattttttcagggagacattcgactcttggccgacgacatgaagactttaaagcccaccctttttcccgctgtgccaaggttgttaaatcgcatatatgataaggttcagaatgaagcaaaaacgcccctgaaaaagttcctgctgaaactggcagtcagttccaaattcaaagagctccagaagggcattatcagacacgactctttttgggataagcttatcttcgcaaaaatccaggatagtctggggggacgggtcagagtgattgtcaccggcgcagcccctatgtcaaccagtgtcatgaccttcttccgggccgccatggggtgccaggtgtatgaagcctacggccagaccgaatgcaccgggggctgcaccttcacactgccaggtgattggaccagcggtcatgtgggggttcctttggcatgcaattacgtgaagttggaggacgtggccgatatgaactatttcaccgttaacaatgagggcgaagtgtgcattaaaggcaccaacgtcttcaaggggtatctgaaggacccagaaaaaactcaggaggccctagattctgatggttggcttcacacgggggacataggacgctggctccctaatgggacactcaaaataattgaccggaaaaaaaatatcttcaagttagcccaaggcgagtatatagcccctgagaaaatcgaaaacatttacaaccggagtcaaccagttttgcagatattcgtccacggcgagagtcttcgcagttcactcgtgggtgtcgtagtgccagatacagacgtgctcccatcctttgccgctaagctcggtgtcaaaggatcctttgaggaactgtgccagaaccaggtcaaggcaatattcctccatccagagcccttttcaatagaaaacggtttactaacacccaccctgaaggccaagcgaggtgagctcagtaagtacttcaggacacagattgattctttgtatgaacatattcaggactag

SEQ ID NO: 263111 - DNA, 2052 bp, Artificial Sequence
  derived and/or modified sequence
atgctgttcatcttcaacttcctgttcagccccctgcccaccccagccctgatctgcatcctgacctttggagctgccatcttcctgtggctgatcacccggccccagcctgtgctgcccctgctggacctgaacaaccagagcgtgggcattgaaggaggagccaggaaaggagtgtcccagaagaacaatgacctgaccagctgctgcttcagtgatgccaagaccatgtatgaggtgttccagaggggcctggccgtgtctgacaatggcccctgcctgggctacaggaagcccaaccagccctaccgctggctgagctacaagcaggtgtctgacagagctgagtacctgggcagctgcctgctgcacaagggctacaagagcagcccagaccagtttgtgggcatctttgcccagaacagacctgagtggatcatcagcgagctggcctgctacacctacagcatggtggccgtgcccctgtatgacaccctgggccctgaggccatcgtgcacatcgtgaacaaggctgacatcgccatggtgatctgtgacaccccccagaaggccctggtgctgattggaaatgtggagaagggcttcacccccagcctgaaggtgatcatcctgatggacccctttgatgatgacctgaagcagagaggagagaagagcggcatcgagatcctgagcctgtatgatgctgagaacctgggcaaggagcacttcaggaagcctgtgccccccagccctgaggacctgagcgtcatctgcttcaccagcggcaccactggagaccccaagggggccatgatcacccaccagaacatcgtgtccaatgctgctgccttcctgaagtgtgtggagcacgcctatgagcccaccccagatgatgtggccatctcctacctgcccctggcccacatgtttgagcgcatcgtgcaggccgtggtgtacagctgtggggcccgggtgggcttcttccagggcgacatccggctgctggctgatgacatgaagaccctgaagcccaccctcttccctgctgtgccccggctgctgaaccgcatctatgacaaggtgcagaatgaggccaagacccccctgaagaagttcctgctgaagctggccgtgagcagcaagttcaaggagctgcagaagggcatcatcagacatgacagcttctgggacaagctgatctttgccaagatccaggacagcctgggcggccgggtgcgggtcatcgtgactggagctgcccccatgagcacctctgtgatgaccttcttccgggccgccatgggctgccaggtgtatgaggcctacggccagacagaatgtactggaggctgcaccttcaccctgcccggggactggaccagcggccacgtgggcgtgcccctggcctgcaactacgtgaagctggaggatgtggccgacatgaactacttcaccgtgaacaatgaaggagaggtgtgcatcaagggcaccaacgtgttcaagggctacctgaaggaccctgagaagacccaggaggccctggacagtgatggctggctgcacactggagacatcggccgctggctgcccaacggcaccctgaagatcatcgacaggaagaagaacatcttcaagctggcccagggcgagtacatcgcccctgagaagattgagaacatctacaacagaagccagcctgtgctgcagatctttgtgcacggggagagcctgcggagcagcctggtgggcgtggtggtgcctgacacagatgtgctgcccagctttgctgccaagctgggcgtgaagggcagctttgaggagctgtgccagaaccaggtggtgcgggaggccatcctggaggacctgcagaagattggcaaggagagcggcctgaagacctttgagcaggtgaaggccatcttcctgcaccctgagcccttcagcattgaaaatggcctgctgacccccaccctgaaggccaagagaggagagctgagcaagtacttccgcacccagattgacagcctgtatgagcacatccaggactag

SEQ ID NO: 263112 - DNA, 1398 bp, Artificial Sequence
  derived and/or modified sequence
atgctgtttcctggggccagcatcgtgcctgagtgctggctgctggtgctgatccagaacctgggcaaggagcacttcaggaagcctgtgccccccagccctgaggacctgagcgtcatctgcttcaccagcggcaccactggagaccccaagggggccatgatcacccaccagaacatcgtgtccaatgctgctgccttcctgaagtgtgtggagcacgcctatgagcccaccccagatgatgtggccatctcctacctgcccctggcccacatgtttgagcgcatcgtgcaggccgtggtgtacagctgtggggcccgggtgggcttcttccagggcgacatccggctgctggctgatgacatgaagaccctgaagcccaccctcttccctgctgtgccccggctgctgaaccgcatctatgacaaggtgcagaatgaggccaagacccccctgaagaagttcctgctgaagctggccgtgagcagcaagttcaaggagctgcagaagggcatcatcagacatgacagcttctgggacaagctgatctttgccaagatccaggacagcctgggcggccgggtgcgggtcatcgtgactggagctgcccccatgagcacctctgtgatgaccttcttccgggccgccatgggctgccaggtgtatgaggcctacggccagacagaatgtactggaggctgcaccttcaccctgcccggggactggaccagcggccacgtgggcgtgcccctggcctgcaactacgtgaagctggaggatgtggccgacatgaactacttcaccgtgaacaatgaaggagaggtgtgcatcaagggcaccaacgtgttcaagggctacctgaaggaccctgagaagacccaggaggccctggacagtgatggctggctgcacactggagacatcggccgctggctgcccaacggcaccctgaagatcatcgacaggaagaagaacatcttcaagctggcccagggcgagtacatcgcccctgagaagattgagaacatctacaacagaagccagcctgtgctgcagatctttgtgcacggggagagcctgcggagcagcctggtgggcgtggtggtgcctgacacagatgtgctgcccagctttgctgccaagctgggcgtgaagggcagctttgaggagctgtgccagaaccaggtggtgcgggaggccatcctggaggacctgcagaagattggcaaggagagcggcctgaagacctttgagcaggtgaaggccatcttcctgcaccctgagcccttcagcattgaaaatggcctgctgacccccaccctgaaggccaagagaggagagctgagcaagtacttccgcacccagattgacagcctgtatgagcacatccaggactag

SEQ ID NO: 263113 - DNA, 1980 bp, Artificial Sequence
  derived and/or modified sequence
atgctgttcatcttcaacttcctgttcagccccctgcccaccccagccctgatctgcatcctgacctttggagctgccatcttcctgtggctgatcacccggccccagcctgtgctgcccctgctggacctgaacaaccagagcgtgggcattgaaggaggagccaggaaaggagtgtcccagaagaacaatgacctgaccagctgctgcttcagtgatgccaagaccatgtatgaggtgttccagaggggcctggccgtgtctgacaatggcccctgcctgggctacaggaagcccaaccagccctaccgctggctgagctacaagcaggtgtctgacagagctgagtacctgggcagctgcctgctgcacaagggctacaagagcagcccagaccagtttgtgggcatctttgcccagaacagacctgagtggatcatcagcgagctggcctgctacacctacagcatggtggccgtgcccctgtatgacaccctgggccctgaggccatcgtgcacatcgtgaacaaggctgacatcgccatggtgatctgtgacaccccccagaaggccctggtgctgattggaaatgtggagaagggcttcacccccagcctgaaggtgatcatcctgatggacccctttgatgatgacctgaagcagagaggagagaagagcggcatcgagatcctgagcctgtatgatgctgagaacctgggcaaggagcacttcaggaagcctgtgccccccagccctgaggacctgagcgtcatctgcttcaccagcggcaccactggagaccccaagggggccatgatcacccaccagaacatcgtgtccaatgctgctgccttcctgaagtgtgtggagcacgcctatgagcccaccccagatgatgtggccatctcctacctgcccctggcccacatgtttgagcgcatcgtgcaggccgtggtgtacagctgtggggcccgggtgggcttcttccagggcgacatccggctgctggctgatgacatgaagaccctgaagcccaccctcttccctgctgtgccccggctgctgaaccgcatctatgacaaggtgcagaatgaggccaagacccccctgaagaagttcctgctgaagctggccgtgagcagcaagttcaaggagctgcagaagggcatcatcagacatgacagcttctgggacaagctgatctttgccaagatccaggacagcctgggcggccgggtgcgggtcatcgtgactggagctgcccccatgagcacctctgtgatgaccttcttccgggccgccatgggctgccaggtgtatgaggcctacggccagacagaatgtactggaggctgcaccttcaccctgcccggggactggaccagcggccacgtgggcgtgcccctggcctgcaactacgtgaagctggaggatgtggccgacatgaactacttcaccgtgaacaatgaaggagaggtgtgcatcaagggcaccaacgtgttcaagggctacctgaaggaccctgagaagacccaggaggccctggacagtgatggctggctgcacactggagacatcggccgctggctgcccaacggcaccctgaagatcatcgacaggaagaagaacatcttcaagctggcccagggcgagtacatcgcccctgagaagattgagaacatctacaacagaagccagcctgtgctgcagatctttgtgcacggggagagcctgcggagcagcctggtgggcgtggtggtgcctgacacagatgtgctgcccagctttgctgccaagctgggcgtgaagggcagctttgaggagctgtgccagaaccaggtgaaggccatcttcctgcaccctgagcccttcagcattgaaaatggcctgctgacccccaccctgaaggccaagagaggagagctgagcaagtacttccgcacccagattgacagcctgtatgagcacatccaggactag

SEQ ID NO: 263114 - DNA, 2052 bp, Artificial Sequence
  derived and/or modified sequence
atgctgttcatcttcaacttcctgttcagccccctgcccacccccgcccttatctgtattctgacctttggtgcggccatcttcctgtggctgataactcgaccccagcccgtgctgccactgctagacctgaacaaccaatccgttgggattgagggcggggcaagaaagggcgtgagccagaaaaacaacgatctgactagttgttgttttagcgacgcaaaaaccatgtatgaggttttccagaggggtttggctgtgtccgataacggaccctgtctgggttatcgtaaaccaaatcagccctatcggtggctcagttataagcaagttagtgaccgcgccgagtacttaggatcatgcctgctgcataaaggttataagtcctctcccgatcagttcgtcggtatctttgcgcaaaaccgccctgaatggatcatctctgaactcgcctgctacacttacagcatggtggctgtgcccctgtacgacaccctgggaccggaggcaatagtgcacatcgtgaataaagctgatatcgcgatggtgatatgtgacacgcctcagaaagcgttggtcctgattggaaacgtggagaaagggtttaccccttcattgaaggtgattatcctgatggatccgtttgacgatgacctaaagcagaggggggagaaatcaggtattgagatactgagcctgtatgacgcagagaatttaggcaaagagcacttccgcaagcctgtcccaccatctccggaggatttgagcgtgatctgcttcacatccgggactacaggcgaccctaagggagcgatgataacacatcagaacatcgtgtccaatgcagctgcctttctgaaatgtgtggagcacgcatatgaacctacgccagatgacgtggccatcagctaccttcccctggcccacatgtttgagcgaattgtccaagctgtggtgtacagttgcggcgccagggttggcttctttcaaggcgacattcggctgttagctgacgatatgaaaacattgaagcctaccctctttccggctgtcccccgcctgctcaacaggatatatgacaaggtacagaacgaagctaagacgcctttgaagaaattcctactaaagctggctgtttcaagcaaattcaaggagctccagaaagggatcattagacacgacagcttctgggataagcttatcttcgccaaaattcaggactctctgggggggagggtgcgagtgattgtcacaggtgctgctcccatgagcacctccgtcatgaccttctttagggctgccatgggatgtcaggtgtatgaggcctatggacagactgagtgtacgggtgggtgcacttttactctccctggagactggacatccggacacgtgggcgttccattggcttgcaactatgtaaaactggaggatgttgccgatatgaactattttaccgttaataacgaaggggaagtttgcattaaggggactaatgtgttcaagggttatctgaaggatcccgagaaaactcaggaagccctggatagcgacggctggctacacacgggcgatatcggtagatggttacctaacggtacactcaagataattgatagaaaaaagaacatcttcaagctcgcccagggggagtacatcgcacccgaaaaaatcgaaaatatatataatcgttcccagccggtcttacagatattcgtccatggagaatctctgcggtcctctctggtgggggtagtggtcccagacacggatgtcctcccctccttcgccgctaaactaggagtcaaaggctccttcgaggagttgtgccagaaccaggtagtgagagaagcaatccttgaggacctacagaagatcggcaaggaatcaggactgaagactttcgagcaggtgaaggccatcttcctacatccagaacccttctcgattgagaacgggttgctaacccctactctgaaagcgaagcgaggtgagctttccaagtacttcagaacacagattgacagtttatacgagcacatacaggactag

SEQ ID NO: 263115 - DNA, 2052 bp, Artificial Sequence
  derived and/or modified sequence
atgctgttcatcttcaacttcctgttcagccccctgcccacccccgcgctcatttgtattctgactttcggtgcagcgatcttcctgtggctcatcacccgacctcagcccgtcctaccattgcttgacctcaataaccaaagcgtaggcattgaggggggcgcccggaagggagtctctcaaaaaaacaatgatctgacctcctgttgcttcagtgacgccaaaaccatgtatgaggttttccaacgcgggctggctgtctcggacaacggcccctgcctggggtaccgtaaacccaaccaaccctaccgttggctcagttataagcaggtctcagaccgggccgaatacttgggttcttgtctcttgcataagggttataaaagcagccctgaccaattcgtgggcatctttgcccaaaatcgacccgaatggatcatcagcgaactggcgtgctacacatatagtatggtggcggtccctctgtatgacaccctaggccccgaggcgatagtgcatatcgttaacaaggctgacatcgccatggtaatttgtgacactccacagaaggctttggttcttatcggtaatgtcgagaaggggtttacgccttccctgaaggtcatcattctgatggatcccttcgatgatgaccttaaacaaagaggagagaaaagcggcattgagatattgtcactttacgacgcggaaaatttaggcaaggagcattttaggaagcccgtgccgcctagtcccgaagatctaagtgttatttgctttacctctgggacaaccggcgacccaaagggggcaatgatcacgcatcaaaatatcgtcagtaatgcggcagctttcctaaaatgcgtggagcacgcttacgaacccactcctgatgacgtggcaatatcttatttgcctttggctcacatgtttgagagaatcgtccaggcagtagtttacagctgtggcgctagagttggtttctttcaaggcgatattaggctgttggccgacgatatgaagactttgaagcccacactgttccctgcagttcctaggctattgaatcggatctacgacaaagtgcagaacgaggcgaaaactcctttgaaaaagttccttttgaagctggcagtgtctagcaaattcaaagaactccagaaaggcatcatcaggcatgatagtttttgggacaagcttatctttgccaagattcaggactctctgggggggagggtgcgtgtcatagtgactggcgcagccccaatgagcacctcagttatgaccttctttcgggcggcgatgggctgtcaggtgtatgaggcgtatggacagactgaatgcacaggaggttgcactttcacccttccaggtgattggacgtcaggacatgtgggggtccccctcgcctgcaattatgtgaaactggaggacgtggccgacatgaactatttcacagtgaacaacgagggggaggtgtgcattaagggcactaatgtgtttaaggggtatctgaaagatcctgagaaaacacaggaggctctggacagcgatgggtggctgcatacaggagatatcggcagatggttacccaacggaactctcaagattatcgacaggaagaaaaacatattcaagctggcccagggagaatatattgccccagagaaaatcgagaacatctataaccgcagtcagcctgtcctgcaaatttttgtacatggtgagtccctccgatcttctttagtgggagtcgttgtcccagacaccgatgtactgcctagcttcgcagccaagctgggagtgaaggggtcctttgaggagctgtgtcagaatcaggtggtgagagaggccattcttgaagatctccagaagattggaaaagagtctgggctgaagaccttcgagcaggtgaaagcgatttttttgcaccccgaacctttctctatcgagaacggcctcctgacccctacactgaaagcaaagcggggtgagctgagcaagtacttccggactcagatcgatagtctgtacgagcacattcaggactag

SEQ ID NO: 263116 - DNA, 1398 bp, Artificial Sequence
  derived and/or modified sequence
atgctgttccccggcgccagcatcgtgcccgagtgctggctgctggttctcatccaaaatctcgggaaggaacactttcgaaagcccgtgcctccctcccccgaggacctctctgtgatttgttttacatcggggaccaccggtgaccccaagggcgccatgattacccatcagaacatcgtctccaacgctgccgcatttttaaaatgtgtggaacacgcatatgaaccgacccccgacgacgtagcaattagctatctacccctagctcacatgttcgagcgtatcgtgcaagctgtagtctattcatgtggtgcacgggtggggtttttccagggagacatccggctacttgctgatgacatgaagactttgaaaccaacactcttcccagccgttccaaggctccttaaccgcatctacgataaagtccagaacgaagccaaaacacctctgaaaaagttcttactaaaactcgccgtatcttccaagtttaaggaactccaaaagggaataattcgtcacgactcattctgggataagctcatttttgccaaaatacaggactcgttgggtggacgggtgagagtgatagtcacaggtgcggccccgatgagcacatccgttatgacgtttttccgtgcagctatgggctgccaggtctacgaagcttatggacagaccgagtgcactgggggctgtacattcacactgcctggagattggacctctggacatgtcggggtgccactggcctgcaattacgtaaagcttgaagacgtcgctgatatgaattactttacggttaacaacgaaggcgaggtgtgtatcaaaggtacgaacgtgtttaagggttatctaaaggaccctgagaaaactcaggaggcactggatagtgacggctggctgcacacgggagatattggtcgctggctacctaatggaacactgaagataatcgaccgtaaaaagaacatctttaagctggctcagggcgagtatattgcacctgagaaaattgagaatatctacaatcggtcccaacccgttctgcagatctttgtgcacggcgagtcgctcagatcaagcctcgtaggagtcgtcgtgccagatactgatgtactgccatcgtttgctgccaaattgggagttaagggttctttcgaggagctctgccagaaccaggtcgtccgggaggccattctagaggacctgcagaaaattgggaaggaaagcggacttaagacattcgagcaggtcaaagctatcttcctgcacccggagcccttttcaatcgagaacgggctgcttacacctacactcaaggctaaacgcggtgaactgtcgaaatattttagaacgcaaatcgatagcttgtacgaacacatccaggactag

SEQ ID NO: 263117 - DNA, 2052 bp, Artificial Sequence
  derived and/or modified sequence
atgctgttcatcttcaacttcctgttcagccccctgcccacccccgctctcatctgcatccttaccttcggagctgcaatcttcctgtggctgatcactaggccacagcccgtgctgccattgctggacctaaataatcagtctgtcggaatagaggggggtgctcggaaaggggtcagccaaaaaaataacgacctgacctcgtgctgcttttccgacgccaaaacaatgtacgaggtgttccagcgcggcctagcagtaagtgataacggtccatgcctggggtacaggaagccgaatcagccctaccggtggctgagttacaaacaagtgtccgaccgtgccgagtacctggggagctgtctcctgcacaagggttacaagagttctccagaccagttcgtcggcatcttcgcacagaacaggccagagtggatcattagtgagcttgcctgttatacttatagcatggtggcagttcctctgtacgacactttgggtcccgaggcaatagtacatatagtcaacaaggctgacattgccatggtgatatgtgatacaccccagaaagcacttgtacttatcggcaacgtcgagaagggcttcaccccaagcctgaaagtgatcatcctaatggacccttttgatgatgatctcaagcagagaggcgagaagtcgggaattgaaatactgtcgctgtatgacgctgaaaatctggggaaggagcattttaggaagccagtcccccccagcccggaagacctgtctgtgatctgttttacatccggcacaaccggcgatcccaaaggagctatgatcacccatcagaatatagtgtcgaacgcagctgctttcttaaagtgtgtcgaacatgcatatgagcctacccccgacgacgtagctattagttatctgcccctggctcacatgtttgaaagaatagtgcaggctgtggtgtactcctgtggagccagagtcggctttttccaaggagacatccgtctgttggcagatgacatgaaaacactcaagccgacactgttccccgcagtaccaagactgctgaatcgcatctatgataaggtgcaaaacgaagccaaaacccccttaaaaaagtttctgctgaagttagctgttagctctaaatttaaagaactgcagaagggcatcatcaggcatgactcgttctgggacaaactgatcttcgctaagatccaggattcactgggcgggcgggtccgagttattgtaacaggcgctgcaccaatgtcaacaagcgtcatgactttttttagggccgccatggggtgccaggtgtatgaggcctacggacagacggagtgtacgggcggctgcacctttaccctaccaggggactggaccagcggccatgtaggagtgccactcgcctgcaattatgtcaagttggaggatgtggcagacatgaactacttcacggtaaacaatgagggcgaggtctgtattaaagggaccaacgtctttaagggatatttgaaggaccctgagaaaacacaggaggccctggactcagatggttggctgcacaccggagacatcggcaggtggctgccaaacggaaccctgaaaatcattgatcgaaaaaaaaatatctttaagctcgcccagggtgagtatatcgcccccgagaaaattgaaaacatctacaacaggagccagcctgtgctgcagatttttgtgcacggagaatccctcaggtcctcccttgtcggggtggtggttccagatacagacgtgctgccatcttttgctgctaaactgggcgtgaaagggtccttcgaggagctgtgccaaaaccaagttgtccgcgaggccattctggaggacctgcagaagatcggtaaggaatccgggctcaaaacatttgagcaggtgaaagccatcttcctccaccctgaacccttcagcatagagaacggactactgacccccaccctgaaggcaaaaagaggggagctgtcaaagtatttcaggacccagatagactcactttatgaacacattcaagactag

SEQ ID NO: 263118 - DNA, 1980 bp, Artificial Sequence
  derived and/or modified sequence
atgctgttcatcttcaacttcctgttcagccccctgcccacccccgcactgatctgtatacttacctttggtgcagcgatattcctgtggttgatcacacggcctcagccagtacttccgctgctcgaccttaataatcagagcgtaggcatcgaaggcggcgcccggaagggggtctcccagaaaaataatgatcttacatcctgctgtttcagcgatgccaaaacgatgtatgaggtctttcaaaggggcctagctgtgtctgacaatggaccatgcctaggctaccgaaagccaaaccagccgtatagatggctcagttacaagcaggtgtcagatagggctgagtatctggggagttgtctcttacataagggctacaagtccagtcctgaccaattcgtcggaatttttgcacagaacaggcccgagtggattatttctgaactggcctgttatacctattccatggttgccgtgccactctacgatactctaggcccggaggctatcgtccacatcgtcaacaaagccgacatcgccatggtcatttgcgacacaccccagaaagcactggtgctaatcggtaatgtagaaaaaggatttacccctagcctgaaggtaattattttgatggatccgtttgatgacgacttaaaacagagaggcgaaaagtctggcattgaaatactaagtctgtacgatgcagagaatctaggaaaggagcatttccgcaagcctgtacctccttcacctgaagacctcagcgttatctgtttcacctccggtactaccggcgatccaaaaggagcgatgattacgcaccaaaacatcgtatccaatgccgccgcttttttaaagtgcgtcgaacacgcctacgaaccaactcctgatgacgtcgcaatttcatacctgccactggcacatatgttcgaaagaatcgtgcaggccgtggtatattcttgtggggcaagagtgggctttttccagggcgacattcgcctgttagcagacgacatgaagaccttgaagcccaccttgtttcctgccgtgcccagattattgaatcgtatttatgataaggtacaaaatgaagccaagacccctctcaaaaagttcttgctcaaactcgctgtctcatccaaattcaaggaattgcagaaaggcataattagacacgatagtttttgggataagctcattttcgccaagatccaggactcacttggtggccgggtgcgcgtgatcgtgacgggtgcagctcctatgtctacaagtgtgatgaccttctttagggccgcgatgggatgccaggtgtacgaagcttacgggcagacggagtgtacaggaggttgtaccttcaccctgccaggcgattggacctcaggacacgttggagtccccctcgcctgtaattacgtcaaactggaggacgtggccgacatgaattactttacggtgaacaacgagggagaagtgtgcattaagggcacaaacgttttcaaagggtacctcaaggatccagagaaaacccaggaggccctggatagcgatgggtggctgcacactggcgatataggcagatggctgcccaatggaacattgaagatcattgaccggaagaaaaatatattcaagctggcgcagggagaatacatagcgcccgagaaaatcgaaaacatctataaccgatctcaacctgtcttgcagatctttgtacacggtgagtctctaagatcatcactagtcggagtcgtggtccctgatactgatgtgttgccgagcttcgctgccaagcttggcgtaaaaggctccttcgaagagttgtgccagaaccaagtgaaagcaattttcctgcacccagaaccttttagcatcgagaacggccttctcacacccacactcaaggccaaaaggggtgaactttcaaaatacttccggacgcagatcgatagcctgtacgaacacattcaggactag

SEQ ID NO: 263119 - DNA, 2052 bp, Artificial Sequence
  derived and/or modified sequence
atgctgttcatcttcaacttcctcttctctcccctcccgacgcctgctttgatctgcatcttgacgtttggtgctgccatcttcctgtggcttataacccgccctcagcccgttctgccactccttgatttgaataaccagtccgtgggaatcgagggaggggctcgaaaaggagttagccagaagaataacgacctgacatcctgttgcttctcggacgctaagactatgtacgaagtgttccaacggggtctggccgtctcagacaatgggccttgtcttggctatagaaagcctaatcagccctaccggtggttatcatataagcaagtttccgatcgcgctgagtacctggggtcctgtctgttacataaagggtacaagtccagcccagaccagtttgtgggaatcttcgcccagaaccggccagagtggatcatcagcgaattggcgtgctacacatactccatggtggcagtgcccctctacgatactctcggacctgaagcaattgttcatatcgtaaacaaggcggacattgcgatggtgatctgcgatactcctcagaaggcactcgtgctgattggtaacgttgaaaaagggttcaccccatccctgaaggtgattattctgatggatccctttgacgatgacttgaagcaacggggagagaagtcgggaattgaaattctgtctctgtatgacgcagaaaacttaggtaaagaacactttagaaagcccgtgcctccgagcccggaggatctctctgtcatttgcttcacctcagggacaacgggagatcccaaaggagcaatgattacccatcaaaatattgtcagcaatgccgcagcatttctgaagtgcgtggagcacgcttacgagcccacacccgacgatgtggccatttcctatctgccgctcgcacatatgttcgagcgaattgtgcaagctgtggtctatagctgcggtgccagagtcggcttctttcaaggggacataagactgctggcagacgatatgaaaaccctgaagcctaccctgtttcccgctgtgcctcgcttgctaaaccgcatctatgataaggtacagaacgaggctaaaactccattgaagaagtttctcctgaagcttgccgtgtctagcaagttcaaggagctccaaaaaggaattataaggcatgacagcttttgggacaagttaattttcgctaaaatccaggatagcctcggtgggagggtacgagtcatcgtaactggagcggctcctatgtccacaagtgtgatgaccttttttagagccgctatgggctgtcaggtgtatgaggcgtatgggcagaccgagtgcacagggggttgcacattcacgctgcccggagattggaccagtggccatgtgggcgtgccactggcctgcaattacgtaaagttagaagacgtggctgatatgaattactttactgttaataatgagggcgaagtgtgtatcaagggcaccaacgtcttcaaggggtatctgaaggacccggaaaaaacccaggaagccctggacagcgatgggtggctgcacactggtgatatcgggaggtggttgcccaacggaactttgaaaatcatagacaggaagaagaatatcttcaagttggcacagggcgagtacatcgccccagaaaaaattgagaatatatacaatcgcagccagcccgtgttgcagattttcgtacatggagaatcgctgcgctcctcactggtcggcgtggtggtgccggatacagacgttctcccatcattcgcggctaagttgggcgttaaaggctctttcgaagagctgtgccagaatcaagtggtgcgcgaggctatcttggaggatctgcaaaaaatcggaaaggagtctggtcttaagacgttcgagcaggtaaaagccatctttctgcacccagaacccttctctattgagaacgggctcctgactcctactttaaaggcaaaaaggggagagctgtccaaatacttccgcacacagatagattcgctgtatgagcacattcaggattag

SEQ ID NO: 263120 - DNA, 2052 bp, Artificial Sequence
  derived and/or modified sequence
atgctgttcattttcaatttcctgttttcccccctgcccacccctgctcttatctgcatcctaacctttggagcagccattttcctctggttgatcaccaggccccagcccgtcctaccattgctggatttgaataatcagtcggtcggcattgaagggggtgctcgcaagggtgtctctcagaagaacaacgacctcactagttgttgcttctccgacgcaaagactatgtatgaagtatttcagcgagggctggcggtatccgataatggcccttgtttgggctatcgcaagccaaatcagccttatagatggctgtcctataagcaagtgtctgacagggcagaatatctgggctcctgcttattgcataaaggttacaagtcctcccctgaccagttcgtgggaatctttgcgcagaatcgcccagagtggattattagtgaacttgcttgctatacctatagcatggtagcagttcccctctatgatacgctcgggccagaggcaattgtccacattgtcaacaaggctgacatcgctatggtgatctgcgataccccgcaaaaggccctcgtgttgatcgggaatgtggagaaaggttttacacccagcttaaaggtgattatcctgatggacccgtttgacgacgatctgaagcagcgaggagagaaatctgggatcgagattctgagcctctatgatgctgagaatctgggcaaagagcactttcgtaagcctgtgcctccaagccctgaggacttgagtgtgatatgcttcacttcaggtaccacaggtgatcccaaaggagccatgatcacccatcagaacatcgtctctaacgctgccgcttttctgaagtgtgtcgaacatgcatacgagcctacgccagacgacgtggcaatcagctatctcccactcgctcacatgtttgagcgcatcgtgcaggctgttgtatactcctgcggcgctcgtgtgggatttttccagggtgacatcagactcctcgccgacgatatgaagactcttaagccaacattatttcccgcagtgccgagactcttaaatcgcatatacgataaggtccaaaatgaggccaaaacacctttaaagaaattcttgctaaagctggcagtgagtagcaagttcaaggagctccaaaagggcatcatcagacacgattcgttctgggacaagctgatcttcgccaaaatccaggactctctggggggacgcgtgcgtgtgatagttactggcgctgcaccaatgagcactagtgtgatgacctttttccgggctgccatgggatgtcaggtgtatgaggcatacggacagactgagtgtaccgggggttgcacattcacgttaccaggtgactggacctcggggcatgttggtgtgccactagcgtgtaactatgtcaaattagaggacgtcgccgacatgaactacttcaccgtgaataacgagggcgaggtatgcataaaaggcactaacgtgtttaagggctatctgaaagaccccgaaaagacccaggaggccctggatagcgacggatggctacatacaggcgatattggcaggtggctgcctaacggcactttaaagattatagatcggaaaaagaacatattcaagctggctcagggagagtatattgcgcctgaaaagattgaaaacatatacaataggtcacagcccgtactccagatcttcgtccatggagagagcctgagaagcagtctggtgggagtagtagtaccagacacagacgtgttgccctcctttgccgctaagcttggagtaaagggaagcttcgaggagctatgtcaaaaccaggtggtgagagaagctattctggaggacttacaaaaaattggcaaagaatcagggctgaaaacattcgaacaagttaaggccatattcctgcaccctgaacccttcagcatagaaaatggtttgttgacccccaccctgaaggcgaaacggggagaactgtcaaagtactttagaacacagattgattcactgtacgaacatatacaggactag

SEQ ID NO: 263121 - DNA, 1398 bp, Artificial Sequence
  derived and/or modified sequence
atgctttttccaggagcatccatagtgccagagtgttggttgcttgtgctcattcagaatctgggcaaagaacattttaggaagcccgtgcctccttcccccgaggacttgtcagtgatctgtttcaccagcggcactaccggagaccccaaaggagctatgatcacccatcagaacatcgtctccaacgccgctgcattcctgaaatgcgttgaacacgcttacgaacctactcccgacgacgtcgctattagctacctgcccctggcacatatgtttgagcggattgtccaggctgtagtttactcatgtggagcaagggtcggtttcttccagggtgacatccggctcctcgccgacgacatgaagacactgaagcccaccctattcccggcagtccctcgcttattgaacaggatatatgataaagttcagaacgaagccaagaccccactgaagaagttcctgctgaagcttgctgtcagtagcaagttcaaggagctgcagaaaggaatcatcagacatgattcgttctgggataagctgattttcgccaagattcaagactctctggggggacgcgtgcgcgtcatcgtgacgggggcagccccaatgtcaacatcagtgatgacattctttagagcagcgatggggtgtcaggtgtatgaagcttatggacagaccgagtgcaccgggggatgcacatttactttaccaggagattggacgagcgggcatgttggagtgcccctggcctgtaattatgttaagctcgaggacgtggctgatatgaactatttcacggtcaataacgagggcgaagtgtgcataaagggtactaatgtctttaagggttatctcaaggaccctgagaaaacccaggaagctctggactccgacgggtggcttcacaccggcgacatcggacgctggctacctaatggtacgctcaaaatcattgacaggaagaagaatatttttaagcttgcacagggcgagtatatcgctcccgagaaaattgaaaatatttacaaccgcagccagcccgtactccagatttttgttcacggtgagtctttgaggtcatctctcgttggggtggtggttccagatacagacgtgctgcccagcttcgccgcaaagctgggagtgaaaggcagcttcgaggagctgtgccaaaaccaagtcgtgcgggaagcaatcctggaggatctgcagaaaatcgggaaagaaagcggactcaagacatttgaacaagtgaaagccattttcttgcacccagaaccattttcgattgagaatggactgctaacacccaccttgaaggcgaaaaggggcgagctaagcaaatatttccgtacccaaatcgactctctttatgagcatatccaggattag

SEQ ID NO: 263122 - DNA, 2052 bp, Artificial Sequence
  derived and/or modified sequence
atgctgttcattttcaactttttgttctctcccctgcccacacctgccctgatttgcatcttaactttcggcgcagcaatattcttgtggctcatcacccgacctcagcccgtgttgcccctcctcgatctgaataaccaaagcgttgggatcgaggggggtgccaggaaaggtgtttcgcagaaaaacaatgatctgacctcctgttgttttagtgatgctaaaacaatgtatgaagtcttccaaaggggtctagctgtgagtgataacggcccatgcttaggctatcgtaagccaaatcaaccctatcgctggctgagctacaaacaagttagtgatcgcgcagaatacctgggttcttgtctgctgcacaaaggctataagtcctctccagatcagtttgtggggattttcgcgcagaatcgacctgagtggatcatttccgagcttgcctgttacacctattctatggtggccgtcccactctatgatacactaggccctgaggctattgtccatatcgtgaataaagccgatattgcaatggtcatttgtgacacaccacagaaggcactggtcctcatagggaacgtggaaaagggattcacccctagcctgaaggtaatcatactgatggatccctttgacgacgacctcaagcagcggggagagaagagcggcattgagatcctgtcactatacgacgctgagaacttgggcaaagaacacttcagaaaacccgtgcctcccagtccagaggatttgagtgtgatatgctttacatctggaaccacaggagatccgaaaggcgcaatgatcacacaccaaaacatagtcagcaatgccgcagctttcctcaaatgcgtcgaacatgcatatgaaccgaccccagatgacgttgcaattagttatctcccccttgctcatatgtttgaaaggatagtacaggctgttgtgtactcttgcggcgcaagagtgggcttcttccaaggagacattagactgttagcagatgacatgaagaccctgaaaccaaccctgttccccgctgtgccccgactgcttaatagaatttatgacaaagtgcagaacgaggccaaaaccccgttgaaaaaattcttactaaagctagcagtctcgagcaaattcaaggagctgcagaaaggaattattcgacacgactcgttttgggacaaattgatcttcgcgaaaatacaagacagcctgggcggacgggtgcgcgtcattgtgacaggtgcagctccgatgtctacttcagttatgaccttttttcgcgcagctatgggctgtcaagtctatgaagcgtatggacaaactgagtgcaccggaggatgcaccttcactttacctggagactggacaagcgggcacgttggagttcctttggcgtgcaattatgtgaagctcgaggatgtggcagacatgaattacttcaccgtcaataatgaaggggaagtgtgcatcaaaggcaccaatgtgtttaaaggctacctcaaagaccctgaaaaaacacaggaagccctggatagcgacgggtggcttcacaccggggacataggtaggtggctgccaaatgggactctgaagattatcgatagaaaaaaaaatatctttaaactcgcacaaggagaatatatcgcgcctgagaagattgaaaatatctacaatcgcagccagcctgtgcttcagatcttcgtgcacggagaatcgttgcgctccagcttggttggcgtggttgtgccagataccgacgtactcccctcatttgccgcaaaactcggggtgaaggggtcatttgaagagctgtgccagaaccaggtcgtgagggaggcgattctcgaggatctacaaaaaattgggaaggagagtggtctcaaaacatttgagcaggtgaaagcgatcttcctgcatcctgagccgttctcaatagagaatggcctgctcaccccaacactgaaggccaagagaggagaactttcaaaatatttccggacccagatagacagcctctacgagcacattcaagattag

SEQ ID NO: 263123 - DNA, 1980 bp, Artificial Sequence
  derived and/or modified sequence
atgttgtttatttttaatttcctgttttctccactgccaacccccgcattgatctgcatattgacattcggggctgccatttttctgtggcttattacaagaccacagccagtgttgcctctactggatcttaacaaccagagcgtggggatagaaggcggtgcaaggaagggagtttcacaaaagaataatgatctgacctcatgttgtttctctgatgctaagactatgtacgaagtcttccagcggggactggcggtgagcgacaatggtccatgcctgggctaccggaaaccaaatcagccctataggtggctgagttataagcaggtgtccgacagagcagaatacttgggtagttgtctgctccacaagggctacaaatcaagtccagatcagtttgtgggcatcttcgcccaaaacaggccagaatggatcatctctgaactggcatgttatacttactcaatggttgctgttccactgtacgacacgctcggcccagaagccatagtccatatagtgaataaggctgatatcgcaatggtaatctgcgacacaccacagaaagcactggtcttgatcggcaatgttgaaaaagggttcaccccaagcctgaaggttatcatccttatggatccgtttgatgacgacctgaagcagaggggcgaaaagagcggaatcgaaatcctttccctctacgacgcagaaaacctaggcaaggaacacttccgcaaacctgtgccgccatccccggaagatctctccgtcatatgctttacatctgggacaaccggagatcctaagggcgctatgatcacccatcaaaacatagtcagtaatgccgctgcgtttctcaaatgcgtcgagcacgcctacgaaccaaccccggatgatgtcgctatctcctacctgcctcttgcccacatgttcgagaggatcgtccaagccgttgtgtacagttgcggcgcacgcgtaggattctttcagggggacattcgccttctagcggatgacatgaagacgttgaaaccaacactcttcccagcagtgccacgtctgctgaaccgcatctacgacaaagttcagaacgaagctaaaacccccttaaagaagttcttgctgaaactcgctgtgtcgtcaaagtttaaggagctgcagaaagggataattcgtcacgacagcttctgggataagctgatcttcgcaaagatccaggacagcctcggcggtagggtgcgagtgatcgtcacaggggctgctccgatgagtacaagcgtcatgacattctttagggctgctatgggatgccaagtgtacgaagcttatggacagacggagtgcacgggaggctgcacattcaccctgcctggagactggacgtctgggcacgtgggtgtaccgttggcttgcaattacgtcaaacttgaggatgtcgctgatatgaattattttaccgtgaacaatgagggggaagtgtgtatcaagggtactaatgttttcaagggctatctaaaagatcccgagaagactcaagaagctctcgactcagacgggtggctccacaccggagatatcgggcgatggctacccaatggaacactcaagataatcgacaggaaaaaaaacattttcaaacttgcccaaggggagtacattgcccctgagaagatagagaatatttacaataggagtcagcctgtgttacagatctttgtgcacggcgagtccctccgcagtagcttggtcggagtcgtcgtgcctgatacagacgtcttaccttccttcgccgctaaactcggggtcaaggggagctttgaggaattgtgtcagaatcaggttaaagccatcttcctccatcccgagcctttttcaattgagaatggcttgttaacacccaccttgaaagctaagcggggtgaattgtcaaaatatttccgaacacaaatcgatagtctctatgaacacattcaggattag

SEQ ID NO: 263124 - DNA, 2052 bp, Artificial Sequence
  derived and/or modified sequence
atgctgttcatcttcaacttcctgttcagccccctgcccacccccgccctgatctgcatcctgaccttcggcgccgccatcttcctgtggctgatcaccagaccccagcccgtgctgcccctgctggacctgaacaaccagagcgtgggcatcgagggcggcgccagaaagggcgtgagccagaagaacaacgacctgaccagctgctgcttcagcgacgccaagaccatgtacgaggtgttccagagaggcctggccgtgagcgacaacggcccctgcctgggctacagaaagcccaaccagccctacagatggctgagctacaagcaggtgagcgacagagccgagtacctgggcagctgcctgctgcacaagggctacaagagcagccccgaccagttcgtgggcatcttcgcccagaacagacccgagtggatcatcagcgagctggcctgctacacctacagcatggtggccgtgcccctgtacgacaccctgggccccgaggccatcgtgcacatcgtgaacaaggccgacatcgccatggtgatctgcgacaccccccagaaggccctggtgctgatcggcaacgtggagaagggcttcacccccagcctgaaggtgatcatcctgatggaccccttcgacgacgacctgaagcagagaggcgagaagagcggcatcgagatcctgagcctgtacgacgccgagaacctgggcaaggagcacttcagaaagcccgtgccccccagccccgaggacctgagcgtgatctgcttcaccagcggcaccaccggcgaccccaagggcgccatgatcacccaccagaacatcgtgagcaacgccgccgccttcctgaagtgcgtggagcacgcctacgagcccacccccgacgacgtggccatcagctacctgcccctggcccacatgttcgagagaatcgtgcaggccgtggtgtacagctgcggcgccagagtgggcttcttccagggcgacatcagactgctggccgacgacatgaagaccctgaagcccaccctgttccccgccgtgcccagactgctgaacagaatctacgacaaggtgcagaacgaggccaagacccccctgaagaagttcctgctgaagctggccgtgagcagcaagttcaaggagctgcagaagggcatcatcagacacgacagcttctgggacaagctgatcttcgccaagatccaggacagcctgggcggcagagtgagagtgatcgtgaccggcgccgcccccatgagcaccagcgtgatgaccttcttcagagccgccatgggctgccaggtgtacgaggcctacggccagaccgagtgcaccggcggctgcaccttcaccctgcccggcgactggaccagcggccacgtgggcgtgcccctggcctgcaactacgtgaagctggaggacgtggccgacatgaactacttcaccgtgaacaacgagggcgaggtgtgcatcaagggcaccaacgtgttcaagggctacctgaaggaccccgagaagacccaggaggccctggacagcgacggctggctgcacaccggcgacatcggcagatggctgcccaacggcaccctgaagatcatcgacagaaagaagaacatcttcaagctggcccagggcgagtacatcgcccccgagaagatcgagaacatctacaacagaagccagcccgtgctgcagatcttcgtgcacggcgagagcctgagaagcagcctggtgggcgtggtggtgcccgacaccgacgtgctgcccagcttcgccgccaagctgggcgtgaagggcagcttcgaggagctgtgccagaaccaggtggtgagagaggccatcctggaggacctgcagaagatcggcaaggagagcggcctgaagaccttcgagcaggtgaaggccatcttcctgcaccccgagcccttcagcatcgagaacggcctgctgacccccaccctgaaggccaagagaggcgagctgagcaagtacttcagaacccagatcgacagcctgtacgagcacatccaggactag

SEQ ID NO: 263125 - DNA, 1398 bp, Artificial Sequence
  derived and/or modified sequence
atgctgttccccggcgccagcatcgtgcccgagtgctggctgctggtgctgatccagaacctgggcaaggagcacttcagaaagcccgtgccccccagccccgaggacctgagcgtgatctgcttcaccagcggcaccaccggcgaccccaagggcgccatgatcacccaccagaacatcgtgagcaacgccgccgccttcctgaagtgcgtggagcacgcctacgagcccacccccgacgacgtggccatcagctacctgcccctggcccacatgttcgagagaatcgtgcaggccgtggtgtacagctgcggcgccagagtgggcttcttccagggcgacatcagactgctggccgacgacatgaagaccctgaagcccaccctgttccccgccgtgcccagactgctgaacagaatctacgacaaggtgcagaacgaggccaagacccccctgaagaagttcctgctgaagctggccgtgagcagcaagttcaaggagctgcagaagggcatcatcagacacgacagcttctgggacaagctgatcttcgccaagatccaggacagcctgggcggcagagtgagagtgatcgtgaccggcgccgcccccatgagcaccagcgtgatgaccttcttcagagccgccatgggctgccaggtgtacgaggcctacggccagaccgagtgcaccggcggctgcaccttcaccctgcccggcgactggaccagcggccacgtgggcgtgcccctggcctgcaactacgtgaagctggaggacgtggccgacatgaactacttcaccgtgaacaacgagggcgaggtgtgcatcaagggcaccaacgtgttcaagggctacctgaaggaccccgagaagacccaggaggccctggacagcgacggctggctgcacaccggcgacatcggcagatggctgcccaacggcaccctgaagatcatcgacagaaagaagaacatcttcaagctggcccagggcgagtacatcgcccccgagaagatcgagaacatctacaacagaagccagcccgtgctgcagatcttcgtgcacggcgagagcctgagaagcagcctggtgggcgtggtggtgcccgacaccgacgtgctgcccagcttcgccgccaagctgggcgtgaagggcagcttcgaggagctgtgccagaaccaggtggtgagagaggccatcctggaggacctgcagaagatcggcaaggagagcggcctgaagaccttcgagcaggtgaaggccatcttcctgcaccccgagcccttcagcatcgagaacggcctgctgacccccaccctgaaggccaagagaggcgagctgagcaagtacttcagaacccagatcgacagcctgtacgagcacatccaggactag

SEQ ID NO: 263126 - DNA, 1980 bp, Artificial Sequence
  derived and/or modified sequence
atgctgttcatcttcaacttcctgttcagccccctgcccacccccgccctgatctgcatcctgaccttcggcgccgccatcttcctgtggctgatcaccagaccccagcccgtgctgcccctgctggacctgaacaaccagagcgtgggcatcgagggcggcgccagaaagggcgtgagccagaagaacaacgacctgaccagctgctgcttcagcgacgccaagaccatgtacgaggtgttccagagaggcctggccgtgagcgacaacggcccctgcctgggctacagaaagcccaaccagccctacagatggctgagctacaagcaggtgagcgacagagccgagtacctgggcagctgcctgctgcacaagggctacaagagcagccccgaccagttcgtgggcatcttcgcccagaacagacccgagtggatcatcagcgagctggcctgctacacctacagcatggtggccgtgcccctgtacgacaccctgggccccgaggccatcgtgcacatcgtgaacaaggccgacatcgccatggtgatctgcgacaccccccagaaggccctggtgctgatcggcaacgtggagaagggcttcacccccagcctgaaggtgatcatcctgatggaccccttcgacgacgacctgaagcagagaggcgagaagagcggcatcgagatcctgagcctgtacgacgccgagaacctgggcaaggagcacttcagaaagcccgtgccccccagccccgaggacctgagcgtgatctgcttcaccagcggcaccaccggcgaccccaagggcgccatgatcacccaccagaacatcgtgagcaacgccgccgccttcctgaagtgcgtggagcacgcctacgagcccacccccgacgacgtggccatcagctacctgcccctggcccacatgttcgagagaatcgtgcaggccgtggtgtacagctgcggcgccagagtgggcttcttccagggcgacatcagactgctggccgacgacatgaagaccctgaagcccaccctgttccccgccgtgcccagactgctgaacagaatctacgacaaggtgcagaacgaggccaagacccccctgaagaagttcctgctgaagctggccgtgagcagcaagttcaaggagctgcagaagggcatcatcagacacgacagcttctgggacaagctgatcttcgccaagatccaggacagcctgggcggcagagtgagagtgatcgtgaccggcgccgcccccatgagcaccagcgtgatgaccttcttcagagccgccatgggctgccaggtgtacgaggcctacggccagaccgagtgcaccggcggctgcaccttcaccctgcccggcgactggaccagcggccacgtgggcgtgcccctggcctgcaactacgtgaagctggaggacgtggccgacatgaactacttcaccgtgaacaacgagggcgaggtgtgcatcaagggcaccaacgtgttcaagggctacctgaaggaccccgagaagacccaggaggccctggacagcgacggctggctgcacaccggcgacatcggcagatggctgcccaacggcaccctgaagatcatcgacagaaagaagaacatcttcaagctggcccagggcgagtacatcgcccccgagaagatcgagaacatctacaacagaagccagcccgtgctgcagatcttcgtgcacggcgagagcctgagaagcagcctggtgggcgtggtggtgcccgacaccgacgtgctgcccagcttcgccgccaagctgggcgtgaagggcagcttcgaggagctgtgccagaaccaggtgaaggccatcttcctgcaccccgagcccttcagcatcgagaacggcctgctgacccccaccctgaaggccaagagaggcgagctgagcaagtacttcagaacccagatcgacagcctgtacgagcacatccaggactag

SEQ ID NO: 263127 - DNA, 1583 bp, Artificial Sequence
  derived and/or modified sequence
attggtgctgatagggaatgtagagaaaggcttcaccccgagcctgaaggtgatcatccttatggacccctttgatgatgacctgaagcaaagaggggagaagagtggaattgagatcttatccctatatgatgctgaggtagatgattttctagagaaatcttatgctcttccctggggcttccattgttcctgaatgttggcttctggtcctgatccagaacctaggcaaagagcacttcagaaaacctgtgcctcctagcccagaagacctgagcgtcatctgcttcaccagtgggaccacaggtgaccccaaaggagccatgataacccatcaaaatattgtttcaaatgctgctgcctttctcaaatgtgtggagcatgcttatgagcccactcctgatgatgtggccatatcctacctccctctggctcatatgtttgagaggattgtacaggctgttgtgtacagctgtggagccagagttggattcttccaaggggatattcggttgctggctgacgacatgaagactttgaagcccacattgtttcccgcggtgcctcgactccttaacaggatctacgataaggtacaaaatgaggccaagacacccttgaagaagttcttgttgaagctggctgtttccagtaaattcaaagagcttcaaaagggtatcatcaggcatgatagtttctgggacaagctcatctttgcaaagatccaggacagcctgggcggaagggttcgtgtaattgtcactggagctgcccccatgtccacttcagtcatgacattcttccgggcagcaatgggatgtcaggtgtatgaagcttatggtcaaacagaatgcacaggtggctgtacatttacattacctggggactggacatcaggtcacgttggggtgcccctggcttgcaattacgtgaagctggaagatgtggctgacatgaactactttacagtgaataatgaaggagaggtctgcatcaagggtacaaacgtgttcaaaggatacctgaaggaccctgagaagacacaggaagccctggacagtgatggctggcttcacacaggagacattggtcgctggctcccgaatggaactctgaagatcatcgaccgtaaaaagaacattttcaagctggcccaaggagaatacattgcaccagagaagatagaaaatatctacaacaggagtcaaccagtgttacaaatttttgtacacggggagagcttacggtcatccttagtaggagtggtggttcctgacacagatgtacttccctcatttgcagccaagcttggggtgaagggctcctttgaggaactgtgccaaaaccaagttgtaagggaagccattttagaagacttgcagaaaattgggaaagaaagtggccttaaaacttttgaacaggtcaaagccatttttcttcatccagagccattttccattgaaaatgggctcttgacaccaacattgaaagcaaagcgaggagagctttccaaatactttcggacccaaattgacagcctgtatgagcacatccaggattaggataaggtacttaagtacctg

SEQ ID NO: 263128 - protein, 198 aa, Artificial Sequence
  derived and/or modified sequence
MALQGISVVELSGLAPGPFCAMVLADFGARVVRVDRPGSRYDVSRLGRGKRSLVLDLKQPRGAAVLRRLCKRSDVLLEPFRRGVMEKLQLGPEILQRENPRLIYARLSGFGQSGSFCRLAGHDINYLALSGGRNSIFKFFSVENSEIESVGSTSRTEHVGWWSTFLYDLQDSRWGIHGCWSNRTPVLRAADQRTWTKV

SEQ ID NO: 263129 - protein, 229 aa, Artificial Sequence
  derived and/or modified sequence
MALQGISVVELSGLAPGPFCAMVLADFGARVVRVDRPGSRYDVSRLGRGKRSLVLDLKQPRGAAVLRRLCKRSDVLLEPFRRGVMEKLQLGPEILQRENPRLIYARLSGFGQSGSFCRLAGHDINYLALSGGRNSIFKFFSVENSEIESVGSTSRTEHVGWWSTFLYDLQDSRWGIHGCWSNRTPVLRAADQRSLIPYFNLYLQFLNISMQNLFKVHTLLRPCYFLGQK

SEQ ID NO: 263130 - DNA, 597 bp, Artificial Sequence
  derived and/or modified sequence
atggccttacaggggatctccgttgtggaactgagtggactggctccgggtcccttctgtgcgatggtgctcgccgactttggcgcccgtgtggtgcgggtagacaggcccgggtcccggtatgacgtatctagacttggccgcggtaagagaagcctcgtcctggacttaaagcagccacgcggggccgctgtgcttcggcggctttgtaaacggtccgatgtcctgctggaacctttcaggcggggcgtcatggagaaactgcagttgggtcctgaaatcctgcagcgcgaaaaccctaggctgatctatgcaaggctcagcgggtttggacagagcggttccttctgtcggcttgccggacacgacatcaattatttagccctgtctggtggaaggaattcaatcttcaagttttttagcgtagagaatagtgaaatagagtccgtcgggagtacctctagaacagagcatgttggttggtggagcaccttcctatatgacctccaggatagtaggtgggggatccacgggtgttggagcaacagaacgcccgtcctgcgggcggccgatcaaagaacatggacaaaagtgtag

SEQ ID NO: 263131 - DNA, 690 bp, Artificial Sequence
  derived and/or modified sequence
atggcccttcaagggatatccgtagtggaactgagtggcctcgcaccggggcctttctgcgctatggtactggccgactttggagctcgggtagtgcgcgttgaccgccccggctctcgatatgatgtgtcaagactgggaagggggaagagatcattggttctggacttgaaacaaccccggggcgccgccgtactgcgacgcttgtgtaagcgctctgatgtactactcgagccgttccgacgtggcgtcatggagaagcttcagcttggtcccgaaatacttcaacgcgaaaacccccgtctgatctacgcgcgcttatccgggtttggccagtccggaagcttttgtcgactggctggtcacgatatcaactatcttgccctcagtgggggccgcaacagcatatttaagtttttttccgtggagaacagcgaaattgaatcagttggtagcaccagcaggacagaacacgtgggatggtggtccacctttctgtacgacctgcaggactctcgctggggaatccacgggtgctggtccaacaggacccctgtgttgcgcgcagcagatcagcgcagcttgatcccatattttaacctatatctgcagtttctcaatatttccatgcagaacttgttcaaggttcatacccttttacgaccttgctacttcctgggccaaaagtag

SEQ ID NO: 263132 - DNA, 597 bp, Artificial Sequence
  derived and/or modified sequence
atggccctgcagggcatctctgtggtggagctgagcggcctggcccctggccccttctgtgccatggtgctggccgactttggagcccgggtggtgcgggtggacaggcctggcagccgctatgatgtgtcccggctgggccggggcaagaggagcctggtgctggacctgaagcagcccagaggagctgctgtgctgcggcggctgtgcaagagaagtgatgtgctgctggagcccttcagaagaggagtgatggagaagctgcagctgggccctgagatcctgcagcgggagaaccccaggctcatctatgcccggctgagcggcttcggccagagcggcagcttctgccgcctggccggccatgacatcaactacctggccctgagcggcggcagaaattccatcttcaagttcttctctgtggagaacagcgagattgaatctgtgggcagcaccagcaggacagagcacgtgggctggtggagcaccttcctgtatgacctgcaggacagccgctggggcatccacggctgctggagcaacagaacacctgtgctgcgggctgctgaccagaggacctggaccaaggtgtag

SEQ ID NO: 263133 - DNA, 690 bp, Artificial Sequence
  derived and/or modified sequence
atggccctgcagggcatctctgtggtggagctgagcggcctggcccctggccccttctgtgccatggtgctggccgactttggagcccgggtggtgcgggtggacaggcctggcagccgctatgatgtgtcccggctgggccggggcaagaggagcctggtgctggacctgaagcagcccagaggagctgctgtgctgcggcggctgtgcaagagaagtgatgtgctgctggagcccttcagaagaggagtgatggagaagctgcagctgggccctgagatcctgcagcgggagaaccccaggctcatctatgcccggctgagcggcttcggccagagcggcagcttctgccgcctggccggccatgacatcaactacctggccctgagcggcggcagaaattccatcttcaagttcttctctgtggagaacagcgagattgaatctgtgggcagcaccagcaggacagagcacgtgggctggtggagcaccttcctgtatgacctgcaggacagccgctggggcatccacggctgctggagcaacagaacacctgtgctgcgggctgctgaccagaggagcctcatcccctacttcaacctgtacctgcagttcctgaacatctccatgcagaacctcttcaaggtgcacaccctgctgcggccctgctacttcctgggccagaagtag

SEQ ID NO: 263134 - DNA, 2919 bp, Artificial Sequence
  derived and/or modified sequence
ctgggaagcgccatggcactgcagggcatctcggtcgtggagctgtccggcctggccccgggcccgttctgtgctatggtcctggctgacttcggggcgcgtgtggtacgcgtggaccggcccggctcccgctacgacgtgagccgcttgggccggggcaagcgctcgctagtgctggacctgaagcagccgcggggagccgccgtgctgcggcgtctgtgcaagcggtcggatgtgctgctggagcccttccgccgcggtgtcatggagaaactccagctgggcccagagattctgcagcgggaaaatccaaggcttatttatgccaggctgagtggatttggccagtcaggaagcttctgccggttagctggccacgatatcaactatttggctttgtcaggtggaaggaacagcatatttaagttcttttctgtggaaaactcagaaattgagtctgtgggaagcacctcgaggacagaacatgttggatggtggagcacctttctatacgacttacaggacagcagatggggaattcatggctgttggagcaatagaaccccagttctacgagctgctgatcaaaggacttggactaaagtctgatgaacttcccaatcagatgagcatggatgattggccagaaatgaagaagaagtttgcagatgtatttgcagagaagacgaaggcagagtggtgtcaaatctttgacggcacagatgcctgtgtgactccggttctgacttttgaggaggttgttcatcatgatcacaacaaggaacggggctcgtttatcaccagtgaggagcaggacgtgagcccccgccctgcacctctgctgttaaacaccccagccatcccttctttcaaaagggatcctttcataggagaacacactgaggagatacttgaagaatttggattcagccgcgaagagatttatcagcttaactcagataaaatcattgaaagtaataaggtaaaagctagtctctaacttccaggcccacggctcaagtgaatttgaatactgcatttacagtgtagagtaacacataacattgtatgcatggaaacatggaggaacagtattacagtgtcctaccactctaatcaagaaaagaattacagactctgattctacagtgatgattgaattctaaaaatggttatcattagggcttttgatttataaaactttgggtacttatactaaattatggtagttattctgccttccagtttgcttgatatatttgttgatattaagattcttgacttatattttgaatgggttctagtgaaaaaggaatgatatattcttgaagacatcgatatacatttatttacactcttgattctacaatgtagaaaatgaggaaatgccacaaattgtatggtgataaaagtcacgtgaaacagagtgattggttgcatccaggccttttgtcttggtgttcatgatctccctctaagcacattccaaactttagcaacagttatcacactttgtaatttgcaaagaaaagtttcacctgtattgaatcagaatgccttcaactgaaaaaaacatatccaaaataatgaggaaatgtgttggctcactacgtagagtccagagggacagtcagttttagggttgcctgtatccagtaactcggggcctgtttccccgtgggtctctgggctgtcagctttcctttctccatgtgtttgatttctcctcaggctggtagcaagttctggatcttatacccaacacacagcaacatccagaaataaagatctcaggaccccccagcaagtcgttttgtgtctccttggactgagttaagttacaagcctttcttatacctgtctttgacaaagaagacgggattgtctttacataaaaccagcctgctcctggagcttccctggactcaacttcctaaaggcatgtgaggaaggggtagattccacaatctaatccgggtgccatcagagtagagggagtagagaatggatgttgggtaggccatcaataaggtccattctgcgcagtatctcaactgccgttcaacaatcgcaagaggaaggtggagcaggtttcttcatcttacagttgagaaaacagagactcagaagggcttcttagttcatgtttcccttagcgcctcagtgattttttcatggtggcttaggccaaaagaaatatctaaccattcaatttataaataattaggtccccaacgaattaaatattatgtcctaccaacttattagctgcttgaaaaatataatacacataaataaaaaaatatatttttcatttctatttcattgttaatcacaactacttactaaggagatgtatgcacctattggacactgtgcaacttctcacctggaatgagattggacactgctgccctcattttctgctccatgttggtgtccatatagtacttgattttttatcagatggcctggaaaacccagtctcacaaaaatatgaaattatcagaaggattatagtgcaatcttatgttgaaagaatgaactacctcactagtagttcacgtgatgtctgacagatgttgagtttcattgtgtttgtgtgttcaaatttttaaatattctgagatactcttgtgaggtcactctaatgccctgggtgccttggcacagttttagaaataccagttgaaaatatttgctcaggaatatgcaactaggaaggggcagaatcagaatttaagctttcatattctagccttcagtcttgttcttcaaccatttttaggaactttcccataaggttatgttttccagcccaggcatggaggatcacttgaggccaagagttcgagaccagcctggggaacttggctggacctccgtttctacgaaataaaaataaaaaaattatccagg

SEQ ID NO: 263135 - DNA, 786 bp, Artificial Sequence
  derived and/or modified sequence
ggggcgtggcgccggggattgggagggcttcttgcaggctgctgggctggggctaagggctgctcagtttccttcagcggggcactgggaagcgccatggcactgcagggcatctcggtcgtggagctgtccggcctggccccgggcccgttctgtgctatggtcctggctgacttcggggcgcgtgtggtacgcgtggaccggcccggctcccgctacgacgtgagccgcttgggccggggcaagcgctcgctagtgctggacctgaagcagccgcggggagccgccgtgctgcggcgtctgtgcaagcggtcggatgtgctgctggagcccttccgccgcggtgtcatggagaaactccagctgggcccagagattctgcagcgggaaaatccaaggcttatttatgccaggctgagtggatttggccagtcaggaagcttctgccggttagctggccacgatatcaactatttggctttgtcaggtggaaggaacagcatatttaagttcttttctgtggaaaactcagaaattgagtctgtgggaagcacctcgaggacagaacatgttggatggtggagcacctttctatacgacttacaggacagcagatggggaattcatggctgttggagcaatagaaccccagttctacgagctgctgatcaaagatctttgataccatactttaatctgtatcttcagtttctgaacataagtatgcaaaatctttttaaggtgcatactctgctgcgtccctgctattttctaggacaaaaataa

SEQ ID NO: 263136 - DNA, 597 bp, Artificial Sequence
  derived and/or modified sequence
atggccctgcagggcatcagcgtggtggagctgagcggcctggccccaggccctttctgtgcgatggtcttggccgacttcggcgcccgggtagtgcgggtggaccggccaggatccagatacgatgtgtcacgcctcggacggggcaaacggtcactcgtgctggatctaaagcagccgcgcggcgccgccgtcttgagaagactctgtaaacgctccgacgtgctgttagagcccttcaggcgcggcgtcatggagaagttgcagctgggccctgagattctccaaagagagaacccacgccttatatacgcacgcctgagcggcttcggacagtcgggcagtttctgccggctggcaggtcacgatatcaactaccttgctcttagcgggggccgtaactcgattttcaaatttttctccgtggagaacagtgagatcgagtctgttgggagtacttcccgaactgaacatgtgggttggtggtctacgtttctctacgacctgcaggattcccgatggggaatacacgggtgttggagtaataggacaccggtactccgcgccgccgatcagaggacctggaccaaggtgtag

SEQ ID NO: 263137 - DNA, 690 bp, Artificial Sequence
  derived and/or modified sequence
atggccctgcagggcatcagcgtggtggagctgagcggcctggccccgggacccttttgcgccatggttctagccgatttcggcgcgagagtagtgcgcgtggataggccagggtcacgctacgacgtgtctcgactggggagggggaaacgctccttggttttagatctcaaacagccaaggggtgccgctgtgcttaggaggctttgcaaaaggtccgacgtcctcctggagccttttaggcggggggtgatggagaagctgcagctgggcccagagatcctgcagcgcgaaaacccaagactcatttatgccagactctccggtttcgggcagtcagggagcttttgtcgattagccggtcatgacattaactaccttgccctgagtggaggccgaaactctatttttaagttttttagcgtcgagaatagcgagatcgagtctgttgggtcaactagtagaacagagcatgtaggatggtggagtacttttctctatgatctgcaggattcacgctggggtatccacggttgttggtctaaccggactcctgtgctcagagcagccgatcagcggtcattgatcccctattttaatctgtatcttcagtttctcaatatatcaatgcaaaatttgttcaaggtgcatacgttacttcggccttgttattttctggggcagaaatag

SEQ ID NO: 263138 - DNA, 597 bp, Artificial Sequence
  derived and/or modified sequence
atggcactgcaggggattagtgtggtggagctgtccgggctggccccagggcctttctgtgctatggtgctggccgactttggtgctcgggtcgtcagagtagacagacctggaagtagatacgacgtgtctaggctggggaggggcaagcgatcgctggtgcttgacctgaaacagcctaggggagcggctgttcttcgtcgtctgtgcaaacggtctgacgtgctcctggaacctttcagacgaggggtcatggagaagcttcaactgggcccagagattttacagcgcgaaaaccccagattgatctacgccagactaagcggatttggtcagagtggctcgttctgcagacttgccggtcacgatatcaattacctggccctatcgggtgggcgaaattctatatttaaatttttcagtgtcgagaattcagagatagagagtgtgggttccacctctcggactgagcacgtaggttggtggtccaccttcctgtacgatcttcaagattccagatggggcatccatgggtgctggtcaaatcggacgcctgttctgagggcagcagatcagcggacctggaccaaggtgtag

SEQ ID NO: 263139 - DNA, 690 bp, Artificial Sequence
  derived and/or modified sequence
atggctttgcagggtatctcagtcgtcgagctctctggtcttgccccaggccctttctgcgctatggtcctggccgacttcggggcacgcgtagttcgggtagacagacctgggagcagatacgatgtctcccggctggggagaggaaagcgatctttggtgctggacctgaaacagccaagaggtgccgcagtgcttcggcgtctctgcaaaaggagcgatgtgctgctagaaccttttagaagaggagtaatggaaaaattacagctgggacctgagattcttcagagagaaaatccacgcctgatctacgctcgactctcaggctttgggcaatctggctctttctgtcgcctagctggccacgacatcaactatttggctctgtctggaggacggaactccattttcaaatttttctctgtcgagaactctgagatcgagtctgtgggcagcaccagcaggaccgagcacgtcggatggtggtctacctttctgtacgatctgcaggatagccgctggggaattcacggatgctggagcaaccgaacaccagtgttacgggcagcagaccaacggtctcttataccgtactttaatctttatctgcagtttctgaacatttcgatgcagaacctttttaaggttcacaccctgctgcgaccctgttacttccttggtcaaaaatag

SEQ ID NO: 263140 - DNA, 597 bp, Artificial Sequence
  derived and/or modified sequence
atggccctgcagggcatcagcgtggtggagctgagcggcctggcccccggccccttctgcgccatggtgctggccgacttcggcgccagagtggtgagagtggacagacccggcagcagatacgacgtgagcagactgggcagaggcaagagaagcctggtgctggacctgaagcagcccagaggcgccgccgtgctgagaagactgtgcaagagaagcgacgtgctgctggagcccttcagaagaggcgtgatggagaagctgcagctgggccccgagatcctgcagagagagaaccccagactgatctacgccagactgagcggcttcggccagagcggcagcttctgcagactggccggccacgacatcaactacctggccctgagcggcggcagaaacagcatcttcaagttcttcagcgtggagaacagcgagatcgagagcgtgggcagcaccagcagaaccgagcacgtgggctggtggagcaccttcctgtacgacctgcaggacagcagatggggcatccacggctgctggagcaacagaacccccgtgctgagagccgccgaccagagaacctggaccaaggtgtag

SEQ ID NO: 263141 - DNA, 690 bp, Artificial Sequence
  derived and/or modified sequence
atggccctgcagggcatcagcgtggtggagctgagcggcctggcccccggccccttctgcgccatggtgctggccgacttcggcgccagagtggtgagagtggacagacccggcagcagatacgacgtgagcagactgggcagaggcaagagaagcctggtgctggacctgaagcagcccagaggcgccgccgtgctgagaagactgtgcaagagaagcgacgtgctgctggagcccttcagaagaggcgtgatggagaagctgcagctgggccccgagatcctgcagagagagaaccccagactgatctacgccagactgagcggcttcggccagagcggcagcttctgcagactggccggccacgacatcaactacctggccctgagcggcggcagaaacagcatcttcaagttcttcagcgtggagaacagcgagatcgagagcgtgggcagcaccagcagaaccgagcacgtgggctggtggagcaccttcctgtacgacctgcaggacagcagatggggcatccacggctgctggagcaacagaacccccgtgctgagagccgccgaccagagaagcctgatcccctacttcaacctgtacctgcagttcctgaacatcagcatgcagaacctgttcaaggtgcacaccctgctgagaccctgctacttcctgggccagaagtag

SEQ ID NO: 263142 - protein, 94 aa, Artificial Sequence
  derived and/or modified sequence
KILDAMNRDCGIPLSHLQVDGGMTSNKILMQLQADILYIPVVKPSMPETTALGAAMAAGAAEGVGVWSLEPEDLSAVTMERFEPQINAEGTFKE

SEQ ID NO: 263143 - protein, 530 aa, Artificial Sequence
  derived and/or modified sequence
MAASKKAVLGPLVGAVDQGTSSTRFLVFNSKTAELLSHHQVEIKQEFPREGWVEQDPKEILHSVYECIEKTCEKLGQLNIDISNIKAIGVSNQRETTVVWDKITGEPLYNAVVWLDLRTQSTVESLSKRIPGNNNFVKSKTGLPLSTYFSAVKLRWLLDNVRKVQKAVEEKRALFGTIDSWLIWSLTGGVNGGVHCTDVTNASRTMLFNIHSLEWDKQLCEFFGIPMEILPNVRSSSEIYGLMKISHSVKAGALEGVPISGCLGDQSAALVGQMCFQIGQAKNTYGTGCFLLCNTGHKCVFSDHGLLTTVAYKLGRDKPVYYALEGSVAIAGAVIRWLRDNLGIIKTSEEIEKLAKEVGTSYGCYFVPAFSGLYAPYWEPSARGIICGLTQFTNKCHIAFAALEAVCFQTREILDAMNRDCGIPLSHLQVDGGMTSNKILMQLQADILYIPVVKPSMPETTALGAAMAAGAAEGVGVWSLEPEDLSAVTMERFEPQINAEESEIRYSTWKKAVMKSMGWVTTQSPESGIP

SEQ ID NO: 263144 - DNA, 1593 bp, Artificial Sequence
  derived and/or modified sequence
atggccgcttccaagaaggcagttttaggaccactcgtcggggccgtagatcagggaacctcaagcacacgctttctcgtcttcaacagcaaaaccgcagagctcctgtcccatcatcaggtagagattaaacaggagttcccacgggaggggtgggttgagcaggaccccaaagagatacttcatagcgtctacgagtgcattgaaaaaacgtgtgagaaactgggtcagcttaatatcgatatctcaaacatcaaggccatcggtgtatctaatcagcgcgagaccaccgtggtgtgggacaagattactggagaacctctctacaacgccgtggtgtggctggacttacggacgcaaagtacagtagagagtctaagtaaaaggattccaggaaacaacaattttgtcaagtctaaaaccggactgcccctttccacttacttctctgctgtgaaactaaggtggctcttggataatgtgaggaaggtacagaaggcggtggaagaaaaaagagcccttttcgggacaatcgactcctggcttatatggagtctgacaggaggcgtcaatggaggagtgcattgcacagatgtgacgaatgccagtcgcacgatgctctttaacatccactcgctggagtgggacaagcagctctgcgagttcttcggtatacctatggagatcctaccaaatgtgcggagctcgagtgagatttacgggctcatgaagatctcacatagcgtgaaggccggtgctctggaaggcgtacccatctccggctgcttaggggaccagtcagccgctttggtgggacagatgtgtttccagatagggcaggccaagaacacgtatggtaccggatgtttccttctgtgtaacaccggtcataaatgcgtattctcagaccatggactgctgactaccgttgcttacaaactggggcgggacaaaccagtgtactatgccttggagggttccgtcgccattgccggggctgtgatcaggtggctgagagacaatctcggcataatcaagacctccgaggagatcgagaagctagccaaagaggtgggaacaagctatggttgctactttgttcccgcctttagcggactttatgccccatattgggagcctagcgcccgcggcataatttgcggacttacccaatttaccaacaagtgccacatcgcattcgcagcattggaggctgtctgcttccagacgcgggagatccttgacgctatgaatagagattgcggcatacccttaagccacttacaagtcgatgggggcatgacgtctaataagatcctcatgcaactccaagctgacattctgtacatccccgtggttaagccctctatgcctgagacaaccgccctcggagccgccatggcagccggagcagctgagggagtcggcgtgtggagcctcgagccggaggacctctcagcagtaacgatggaaagattcgagccgcagatcaacgccgaagagagtgagattaggtattcaacctggaaaaaagcagtgatgaagagcatgggctgggtaacaacgcagtcacccgagtccggcattccctag

SEQ ID NO: 263145 - DNA, 1104 bp, Artificial Sequence
  derived and/or modified sequence
atggcctaccttgacaactttaaaacaaacgcccgacacttcatcctgtttgtgaacatttctagcctgacaggaggcgtcaatggcggtgtccattgcaccgatgtcaccaacgcttctcgtaccatgctgtttaatatccacagtcttgagtgggataaacagctgtgcgagtttttcggcattcctatggagatcttacctaacgtgcggtcctccagtgaaatctacgggctgatgaagatatcacactcagtcaaggccggagccctggagggagtgccaatctctggatgcttgggcgatcaatctgcagccctcgttggtcaaatgtgctttcaaattggccaggccaaaaacacatacggaacaggttgtttcctgttgtgtaatacaggccataagtgcgtgttttccgatcatggccttctaactacggttgcttataagctcggcagggacaaaccagtgtactacgccctcgagggaagcgtcgcgattgccggggccgtgatcaggtggttgagagataatctgggcattattaaaacctccgaggagattgaaaaactggctaaagaagtcggcacttcctatgggtgttattttgtgccagctttcagtggactctatgctccctattgggagccgagcgctagaggcattatctgtggactcacccagttcaccaataagtgccacattgcttttgccgctctcgaggcagtgtgttttcagactcgagagattctagatgctatgaaccgggactgcggtatcccgctgagccacctgcaggtcgacggaggtatgacgtccaataagatcttgatgcagctccaagcagatatcctgtacatccctgtggtgaaacctagcatgcctgaaacaactgccctcggtgcggccatggcagctggagccgctgagggcgtaggagtctggtctttggagccagaggacctatccgcagtaactatggaaagattcgagccccagatcaacgccgaagaatccgagattcgctattcaacatggaaaaaagcggtgatgaaatcgatgggatgggttactacacagagtcccgagagtggcattccatag

SEQ ID NO: 263146 - DNA, 3638 bp, Artificial Sequence
  derived and/or modified sequence
gggccggaggggcggggtgagaaggctgcgcgcgggtaaaggggccgcctcgagcgcggtccgagcgttcagcggacgcgcgcggcctcgatctctggactcgtcacctgcccctccccctcccgccgccgtcacccaggaaaccggccgcaatcgccggccgacctgaagctggtttcatggcagcctcaaagaaggcagttttggggccattggtgggggcggtggaccagggcaccagttcgacgcgctttttggttttcaattcaaaaacagctgaactacttagtcatcatcaagtagaaataaaacaagagttcccaagagaaggatgggtggaacaggaccctaaggaaattctacattctgtctatgagtgtatagagaaaacatgtgagaaacttggacagctcaatattgatatttccaacataaaagctattggtgtcagcaaccagagggaaaccactgtagtctgggacaagataactggagagcctctctacaatgctgtggtgtggcttgatctaagaacccagtctaccgttgagagtcttagtaaaagaattccaggaaataataactttgtcaagtccaagacaggccttccacttagcacttacttcagtgcagtgaaacttcgttggctccttgacaatgtgagaaaagttcaaaaggccgttgaagaaaaacgagctctttttgggactattgattcatggcttatttggagtttgacaggaggagtcaatggaggtgtccactgtacagatgtaacaaatgcaagtaggactatgcttttcaacattcattctttggaatgggataaacaactctgcgaattttttggaattccaatggaaattcttccaaatgtccggagttcttctgagatctatggcctaatgaaaatctctcatagcgtgaaagctggggccttggaaggtgtgccaatatctgggtgtttaggggaccagtctgctgcattggtgggacaaatgtgcttccagattggacaagccaaaaatacgtatggaacaggatgtttcttactatgtaatacaggccataagtgtgtattttctgatcatggccttctcaccacagtggcttacaaacttggcagagacaaaccagtatattatgctttggaaggttctgtagctatagctggtgctgttattcgctggctaagagacaatcttggaattataaagacctcagaagaaattgaaaaacttgctaaagaagtaggtacttcttatggctgctacttcgtcccagcattttcggggttatatgcaccttattgggagcccagcgcaagagggataatctgtggactcactcagttcaccaataaatgccatattgcttttgctgcattagaagctgtttgtttccaaactcgagagattttggatgccatgaatcgagactgtggaattccactcagtcatttgcaggtagatggaggaatgaccagcaacaaaattcttatgcagctacaagcagacattctgtatataccagtagtgaagccctcaatgcccgaaaccactgcactgggtgcggctatggcggcaggggctgcagaaggagtcggcgtatggagtctcgaacccgaggatttgtctgccgtcacgatggagcggtttgaacctcagattaatgcggaggaaagtgaaattcgttattctacatggaagaaagctgtgatgaagtcaatgggttgggttacaactcaatctccagaaagtggtattccataaaacctaccaactcatggattcccaagatgtgagctttttacataatgaaagaacccagcaattctgtctcttaatgcaatgacactattcatagactttgattttatttataagccacttgctgcatgaccctccaagtagacctgtggcttaaaataaagaaaatgcagcaaaaagaatgctatagaaatatttggtggttttttttttttttaaacatccacagttaaggttgggccagctacctttggggctgaccccctccattgccataacatcctgctccattccctctaagatgtaggaagaattcggatccttaccattggaatcttccatcgaacatactcaaacacttttggaccaggatttgagtctctgcatgacatatacttgattaaaaggttattactaacctgttaaaaatcagcagctctttgcttttaacagacaccctaaaagtcttcttttctacatagttgaagacagcaacatcttcactgaatgtttgaatagaaacctctactaaattattaaaatagacatttagtgttctcacagcttggatatttttctgaaaagttatttgccaaaactgaaatccttcagatgttttccatggtcccactaattataatgactttctgtctggatcttataggaaaagatactttcttttttcttccatctttcctttttatattttttactttgtatgtataacatacatgcctatatattttatacactgagggtagcccatttataaattaagagcacattatattcagaaggttctaacagggctggtcttaagtgaaccactgtgtatataaatatgttggaaaacagctgtatacatttttgggcaacggttatgcataatatttaccaggagaatttttttcttaacaagccaacatttaaaatttatgttttatgtcaataaaagaaaatatactttattgtgacttcaactatatttcttatcccttacatttttatttaattgtcttagcttaaaaaaagaagaaactgtggaatactacagtaaatattgttttcaaacacaagcaataattcaaatagttatttttcttttgaattaattttagacatattttggatcctattgaggggataagaggatgtcaaaaaagttaaatacctaagtagaaaaaaatatagaaataaagccaagaatctctttcagttcaaatgttatcaattgttaataagaaattgctatctgggatgacagaattacctctgcttagtatctcattataactgaaagaaggtttatcattacaaataccttccaatgaaaccaagaatttctcaaaatatttaatgtcacatattataagaagttacctaatcctgcttcttaacatcaatttttaaaaatatcttaaaattactttgttttgtagtaaacagtgaagaaaagattgcctcctaattatttttttcaatgagtgctgaatgggaaaacatttatatcttactataaaaggttctgttttgtttggaatcaatggtagctttattgactgttctgattgtgctgtttctaatttattgaatctgctaggttttattgatgcagccaccacttaagtgacataaatattatagaaaggtactgtgaaatgatcactttgtggcaggggtacttttaaacataaatgtttctacaaaagtaggttgagttcattgtaaataattgtgaaagccactgttcaaataattttaagattacattaatttttctataaattggaagatttataaatgtttgaaattgtacacattgatatttaatgacaaatttacttaaaataaattgaccccttgttctta

SEQ ID NO: 263147 - DNA, 2172 bp, Artificial Sequence
  derived and/or modified sequence
aggaaaccggccgcaatcgccggccgacctgaagctggtttcatggcagcctcaaagaaggcagttttggggccattggtgggggcggtggaccagggcaccagttcgacgcgctttttggttttcaattcaaaaacagctgaactacttagtcatcatcaagtagaaataaaacaagagttcccaagagaaggctattggtgtcagcaaccagagggaaaccactgtagtctgggacaagataactggagagcctctctacaatgctgtggtgtggcttgatctaagaacccagtctaccgttgagagtcttagtaaaagaattccaggaaataataactttgtcaagtccaagacaggccttccacttagcacttacttcagtgcagtgaaacttcgttggctccttgacaatgtgagaaaagttcaaaaggccgttgaagaaaaacgagctctttttgggactattgattcatggcttatttggataattttaaaacaaatgccagacatttcattttatttgtaaatatttcaagtttgacaggaggagtcaatggaggtgtccactgtacagatgtaacaaatgcaagtaggactatgcttttcaacattcattctttggaatgggataaacaactctgcgaattttttggaattccaatggaaattcttccaaatgtccggagttcttctgagatctatggcctaatgaaaatctctcatagcgtgaaagctggggccttggaaggtgtgccaatatctgggtgtttaggggaccagtctgctgcattggtgggacaaatgtgcttccagattggacaagccaaaaatacgtatggaacaggatgtttcttactatgtaatacaggccataagtgtgtattttctgatcatggccttctcaccacagtggcttacaaacttggcagagacaaaccagtatattatgctttggaaggttctgtagctatagctggtgctgttattcgctggctaagagacaatcttggaattataaagacctcagaagaaattgaaaaacttgctaaagaagtaggtacttcttatggctgctacttcgtcccagcattttcggggttatatgcaccttattgggagcccagcgcaagagggataatctgtggactcactcagttcaccaataaatgccatattgcttttgctgcattagaagctgtttgtttccaaactcgagagattttggatgccatgaatcgagactgtggaattccactcagtcatttgcaggtagatggaggaatgaccagcaacaaaattcttatgcagctacaagcagacattctgtatataccagtagtgaagccctcaatgcccgaaaccactgcactgggtgcggctatggcggcaggggctgcagaaggagtcggcgtatggagtctcgaacccgaggatttgtctgccgtcacgatggagcggtttgaacctcagattaatgcggaggaaagtgaaattcgttattctacatggaagaaagctgtgatgaagtcaatgggttgggttacaactcaatctccagaaagtggtattccataaaacctaccaactcatggattcccaagatgtgagctttttacataatgaaagaacccagcaattctgtctcttaatgcaatgacactattcatagactttgattttatttataagccacttgctgcatgaccctccaagtagacctgtggcttaaaataaagaaaatgcagcaaaaagaatgctatagaaatatttggtggttttttttttttttaaacatccacagttaaggttgggccagctacctttggggctgaccccctccattgccataacatcctgctccattccctctaagatgtaggaagaattcggatccttaccattggaatcttccatcgaacatactcaaacacttttggaccaggatttgagtctctgcatgacatatacttgattaaaaggttattactaacctgttaaaaatcagcagctctttgcttttaacagacaccctaaaagtcttcttttctacatagttgaagacagcaacatcttcactgaatgtttgaatagaaacctctactaattataatgactttctgtctggatcttataggaaaagatactttcttttttcttccatctttcctt

SEQ ID NO: 263148 - DNA, 1593 bp, Artificial Sequence
  derived and/or modified sequence
atggccgccagcaagaaggctgtgctgggccccctggtgggcgctgtggaccagggcaccagcagcacccgcttcctggtgttcaacagcaagacagctgagctgctgagccaccaccaggtggagatcaagcaggagttcccccgggagggctgggtggagcaggaccccaaggagatcctgcacagcgtgtatgagtgcatcgagaagacctgtgagaagctgggccagctgaacatcgacatcagcaacatcaaggccatcggcgtgagcaaccagcgggagaccaccgtggtgtgggacaagatcaccggggagcccctgtacaatgctgtggtgtggctggacctgcggacccagagcacagtggagagcctgagcaagagaattcctggcaacaacaactttgtgaagagcaagacaggcctgcccctgagcacctacttctctgctgtgaagctgcgctggctgctggacaacgtgaggaaggtgcagaaggctgtggaggagaagagggccctgtttggcaccatcgacagctggctgatctggagcctgactggaggagtgaatggaggagtgcactgcacagatgtgaccaatgccagcaggaccatgctgttcaacatccacagcctggagtgggacaagcagctgtgtgagttcttcggcatccccatggagatcctgcccaacgtgcgcagcagcagcgagatctacggcctgatgaagatcagccacagcgtgaaggccggggccctggagggcgtgcccatcagcggctgcctgggggaccagagcgctgccctggtgggccagatgtgcttccagatcggccaggccaagaacacctatggaacaggctgcttcctgctgtgcaacacaggccacaagtgtgtgttcagtgaccacggcctgctgaccaccgtggcctacaagctgggccgggacaagcctgtgtactatgccctggagggctctgtggccatcgccggggctgtgatccgctggctgcgggacaacctgggcatcatcaagaccagcgaggagattgagaagctggccaaggaggtgggcaccagctatggctgctactttgtgcctgccttcagcggcctgtatgccccctactgggagcccagcgcccggggcatcatctgtggcctgacccagttcaccaacaagtgccacatcgcctttgctgccctggaggccgtgtgcttccagacccgggagatcctggatgccatgaacagagactgtggcatccccctgagccacctgcaggtggatggcggcatgaccagcaacaagatcctgatgcagctgcaggccgacatcctgtacatccctgtggtgaagcccagcatgcctgagaccacagccctgggcgccgccatggctgctggagctgctgagggcgtgggcgtgtggagcctggagcctgaggacctgtctgctgtgaccatggagagatttgagccccagatcaatgctgaggagagcgagatccgctacagcacctggaagaaggctgtgatgaagtccatgggctgggtgaccacccagagccctgagagcggcatcccctag

SEQ ID NO: 263149 - DNA, 1104 bp, Artificial Sequence
  derived and/or modified sequence
atggcctacctggacaacttcaagaccaatgcccggcacttcatcctgtttgtgaacatcagcagcctgaccggcggcgtgaatggaggagtgcactgcacagatgtgaccaatgccagcaggaccatgctgttcaacatccacagcctggagtgggacaagcagctgtgtgagttcttcggcatccccatggagatcctgcccaacgtgcgcagcagcagcgagatctacggcctgatgaagatcagccacagcgtgaaggccggggccctggagggcgtgcccatcagcggctgcctgggggaccagagcgctgccctggtgggccagatgtgcttccagatcggccaggccaagaacacctacggcaccggctgcttcctgctgtgcaacacaggccacaagtgtgtgttcagtgaccacggcctgctgaccaccgtggcctacaagctgggccgggacaagcctgtgtactatgccctggagggctctgtggccatcgccggggccgtcatccgctggctgcgggacaacctgggcatcatcaagaccagcgaggagattgagaagctggccaaggaggtgggcaccagctatggctgctactttgtgcctgccttcagcggcctgtatgccccctactgggagcccagcgcccggggcatcatctgtggcctgacccagttcaccaacaagtgccacatcgcctttgctgccctggaggccgtgtgcttccagacccgggagatcctggatgccatgaacagagactgtggcatccccctgagccacctgcaggtggatggcggcatgaccagcaacaagatcctgatgcagctgcaggccgacatcctgtacatccctgtggtgaagcccagcatgcctgagaccacagccctgggcgccgccatggccgccggggctgctgagggcgtgggcgtgtggagcctggagcctgaggacctgtctgctgtgaccatggagagatttgagccccagatcaatgctgaggagagcgagatccgctacagcacctggaagaaggctgtgatgaagtccatgggctgggtgaccacccagagccctgagagcggcatcccctag

SEQ ID NO: 263150 - DNA, 1593 bp, Artificial Sequence
  derived and/or modified sequence
atggccgccagcaagaaggccgtgctgggccccctggtgggcgccgtggatcagggtacctcaagcacaagatttcttgtctttaacagtaagaccgcggagctgttatctcaccatcaggtagagattaagcaagaattcccgcgcgaagggtgggtggagcaggacccaaaagagatcctgcacagcgtgtatgagtgcatcgaaaagacctgcgaaaaactgggtcagctgaatatcgatatctccaatataaaagctattggcgtgtcaaaccaaagagagactactgttgtgtgggataagattaccggcgaaccactgtacaacgccgtggtctggctcgacttaaggacacagagcacagtggagtcgctgtcgaagcgcatcccggggaacaacaactttgtgaaaagcaaaacgggtctgccgcttagtacatatttcagtgccgtcaaacttaggtggctgttggacaacgtccggaaagtgcagaaagctgtggaagaaaaacgggcattgttcggaacaatcgattcctggctgatttggagcctcactggtggtgttaatggaggcgtccactgtacagacgttacaaacgcaagtcgaacgatgctgttcaatatccactctttggagtgggacaagcagctatgcgaattcttcggcattcccatggaaatcctccctaacgtccgctcatccagtgagatctacggactgatgaaaatttcccactctgtgaaggctggcgccctggaaggcgtgcccattagcggatgtctcggcgaccagtctgccgccctggttggacagatgtgttttcagatcgggcaagcaaagaacacgtatggcactgggtgtttcttactgtgcaacaccggtcacaaatgcgtcttctccgatcacggactgctaacaacagtagcctacaagctgggacgagataagcccgtatattacgctcttgagggtagtgttgcaatcgctggagccgttattcggtggctgcgcgacaatctgggaattataaaaacttctgaggaaatcgaaaagctcgcaaaggaggttggcacaagttatggatgttactttgtgcctgccttttcaggcctctatgccccatattgggagccttccgcccgcggaatcatctgtggtcttacacaatttactaataagtgccatattgcctttgccgcgctggaggcagtttgttttcaaacccgagagatcctagatgccatgaatcgcgattgcgggatccctctttcacaccttcaggtggacggtggtatgacaagcaacaaaatactgatgcagctgcaagccgacattctatatataccagtcgtgaaaccttcgatgcccgaaactacagccctgggggcggcgatggccgcaggtgcggccgagggtgtcggtgtatggtctttagagcctgaggacctgtcggcggtcaccatggagcggtttgaacctcaaatcaatgcagaggaatcagaaattagatactccacttggaagaaagccgtgatgaaatccatgggatgggttacaacccagtcccccgagtctggaatcccgtag

SEQ ID NO: 263151 - DNA, 1104 bp, Artificial Sequence
  derived and/or modified sequence
atggcctacctggacaacttcaagaccaacgcccggcacttcatcctgtttgtcaatatctcaagccttacaggtggcgttaacgggggggtccactgtaccgacgtgacaaatgccagccgaacaatgctctttaacatccactccctcgagtgggacaagcagttatgcgagttcttcggcatacctatggagatcctgcccaacgtcagaagcagctccgaaatttacggattgatgaaaattagccactccgttaaagcgggagccctggagggggtacccataagcgggtgtctgggggatcagagcgccgccctggtggggcagatgtgcttccagatcggccaggcgaagaacacttacggcactggctgcttcctgctctgtaatactgggcataagtgtgtgtttagtgaccatggccttttgaccactgttgcgtacaaattgggccgcgacaagcccgtctactacgctttggaggggagcgttgctatagccggggccgtaatccggtggctcagggacaacctgggcatcataaagacatctgaggagatagagaagctggccaaagaggttggcacgtcatatgggtgttactttgtgccagcgttcagtggattgtacgcgccctactgggagccctcggcacgaggaattatttgcggactgactcagttcacgaataagtgccacatcgcctttgccgccctagaagctgtttgtttccagacccgtgagatcctcgacgccatgaatagagattgcgggatccctctcagtcatcttcaggtggatggagggatgactagtaataagatcctcatgcagcttcaagcagacatactctatatccctgtggtgaagcctagtatgcctgagacaacggctttgggagccgcaatggcagcgggggcggcagagggtgtaggtgtgtggagcctcgaaccagaggacctgagcgcagttacaatggaacgttttgagcctcagattaatgcagaggaaagcgagatacgctacagtacttggaaaaaagctgtgatgaaatcgatgggatgggtgacaacacagtccccggagtctggcatcccatag

SEQ ID NO: 263152 - DNA, 1593 bp, Artificial Sequence
  derived and/or modified sequence
atggccgcatctaaaaaggctgtcctgggacctctggtgggcgctgtcgatcagggcacctcctctacgcggtttttggtgtttaactctaagacagcagaactactctcccaccaccaggtcgagataaaacaagagtttcccagagaaggctgggttgagcaggatcccaaagaaatacttcattcggtgtacgagtgtattgagaaaacgtgcgagaaattaggacagttaaatatagacatttctaacataaaggcgattggcgtgagcaatcagagggagaccaccgtggtttgggataaaatcacaggcgaacccctgtataacgccgtggtctggctggacttgcggactcagtccaccgtggaaagcctcagcaagcgaattccagggaacaataactttgtcaaatctaagacgggcttacccttatcaacttatttttcagcagtcaagttgcgctggttactggataacgtgaggaaagtgcagaaggctgtggaagagaagagggccctgttcggcacgatcgatagttggctgatttggtcactaacaggaggcgtgaatgggggagtgcactgtaccgatgtgacaaacgcatcacgcaccatgctgttcaacattcacagtctggaatgggacaagcagctatgtgagttctttgggataccaatggagatcttacccaacgtccggtcttcctcagagatttatggcctgatgaagatttctcactcagtgaaggctggtgctctggagggagtcccaatcagcggttgcctgggcgatcagagcgccgcactagtcggacagatgtgcttccaaatcggtcaggctaagaatacctacggcacaggctgctttctgttatgcaacactgggcacaaatgtgtgttctcagaccacggactccttacaaccgttgcttacaagcttggacgtgacaagccagtatattatgcactggaaggcagcgttgccatcgccggagcagtgattagatggctgcgagacaacctgggtatcatcaagacctctgaggagatcgagaagctggcgaaagaggtcggaacatcctatgggtgttatttcgtgcccgcatttagcggtctgtacgccccttactgggaaccctccgcgagagggatcatttgcggccttactcagttcacaaacaagtgtcacatagcctttgctgccctggaggccgtgtgttttcagactcgcgaaatactggacgctatgaaccgtgattgcggcatccccttatcccatctgcaagtggatggtggaatgacctccaacaaaattcttatgcagctgcaggcggatattctgtatatcccggtcgtaaaaccatctatgcccgagaccacagcactcggcgcagccatggccgcaggggcagcggaaggcgttggagtttggtctttagagccggaggatctgtcagcagtgacaatggagcggtttgaaccacagattaacgctgaggagtccgaaattaggtatagcacatggaagaaggcagtgatgaaatcgatgggctgggtgactactcagagccccgaaagcgggataccctag

SEQ ID NO: 263153 - DNA, 1104 bp, Artificial Sequence
  derived and/or modified sequence
atggcctacctggacaactttaagacaaatgcaagacattttatcctgtttgttaatatctcgtcactaaccggcggagtaaatggcggagtccactgtaccgacgtgacaaacgcttcccgcaccatgctatttaacatccactccctagagtgggataagcagctctgcgagttcttcggaattcctatggaaatcctgcctaacgtcaggagcagtagtgagatctacgggctgatgaagatcagccattctgtcaaggcaggcgctctggaaggagtgccaattagtggatgtttgggtgatcaaagtgctgccctggtgggccaaatgtgtttccagattgggcaggcaaagaacacttatggtaccggttgcttcctgctgtgcaataccggccataaatgcgtgtttagcgaccacggcctgttgaccacagtagcttacaagctcggtcgcgataaacccgtgtactatgcgctggaaggatctgtggccattgcaggagctgtcatcaggtggttgcgggacaatttggggatcatcaaaaccagcgaggagatagagaaactagctaaggaggtagggaccagctacggatgctacttcgtgcccgcattctctggcctctatgctccctactgggaaccaagtgccagaggcatcatttgtggtcttacgcagtttacaaacaagtgccatatcgcattcgccgcactggaagccgtgtgttttcagacccgagaaatcctcgatgctatgaacagagactgcggaatcccgctctcccacttgcaggtggatggaggcatgactagcaataagatacttatgcaacttcaggccgacattctctatattcctgtggtcaagccaagcatgcccgagaccactgccctgggagcggctatggcagcgggtgccgctgagggggttggcgtctggtctctggagcccgaagacctctctgccgtgactatggaacgattcgaaccgcagatcaatgccgaggaaagcgagattagatactctacatggaagaaggcagtcatgaaatccatgggctgggtgaccacccagtcccctgagagcggcattccatag

SEQ ID NO: 263154 - DNA, 1593 bp, Artificial Sequence
  derived and/or modified sequence
atggccgccagcaagaaggccgtgctgggccccctggtgggcgccgtggaccagggcaccagcagcaccagattcctggtgttcaacagcaagaccgccgagctgctgagccaccaccaggtggagatcaagcaggagttccccagagagggctgggtggagcaggaccccaaggagatcctgcacagcgtgtacgagtgcatcgagaagacctgcgagaagctgggccagctgaacatcgacatcagcaacatcaaggccatcggcgtgagcaaccagagagagaccaccgtggtgtgggacaagatcaccggcgagcccctgtacaacgccgtggtgtggctggacctgagaacccagagcaccgtggagagcctgagcaagagaatccccggcaacaacaacttcgtgaagagcaagaccggcctgcccctgagcacctacttcagcgccgtgaagctgagatggctgctggacaacgtgagaaaggtgcagaaggccgtggaggagaagagagccctgttcggcaccatcgacagctggctgatctggagcctgaccggcggcgtgaacggcggcgtgcactgcaccgacgtgaccaacgccagcagaaccatgctgttcaacatccacagcctggagtgggacaagcagctgtgcgagttcttcggcatccccatggagatcctgcccaacgtgagaagcagcagcgagatctacggcctgatgaagatcagccacagcgtgaaggccggcgccctggagggcgtgcccatcagcggctgcctgggcgaccagagcgccgccctggtgggccagatgtgcttccagatcggccaggccaagaacacctacggcaccggctgcttcctgctgtgcaacaccggccacaagtgcgtgttcagcgaccacggcctgctgaccaccgtggcctacaagctgggcagagacaagcccgtgtactacgccctggagggcagcgtggccatcgccggcgccgtgatcagatggctgagagacaacctgggcatcatcaagaccagcgaggagatcgagaagctggccaaggaggtgggcaccagctacggctgctacttcgtgcccgccttcagcggcctgtacgccccctactgggagcccagcgccagaggcatcatctgcggcctgacccagttcaccaacaagtgccacatcgccttcgccgccctggaggccgtgtgcttccagaccagagagatcctggacgccatgaacagagactgcggcatccccctgagccacctgcaggtggacggcggcatgaccagcaacaagatcctgatgcagctgcaggccgacatcctgtacatccccgtggtgaagcccagcatgcccgagaccaccgccctgggcgccgccatggccgccggcgccgccgagggcgtgggcgtgtggagcctggagcccgaggacctgagcgccgtgaccatggagagattcgagccccagatcaacgccgaggagagcgagatcagatacagcacctggaagaaggccgtgatgaagagcatgggctgggtgaccacccagagccccgagagcggcatcccctag

SEQ ID NO: 263155 - DNA, 1104 bp, Artificial Sequence
  derived and/or modified sequence
atggcctacctggacaacttcaagaccaacgccagacacttcatcctgttcgtgaacatcagcagcctgaccggcggcgtgaacggcggcgtgcactgcaccgacgtgaccaacgccagcagaaccatgctgttcaacatccacagcctggagtgggacaagcagctgtgcgagttcttcggcatccccatggagatcctgcccaacgtgagaagcagcagcgagatctacggcctgatgaagatcagccacagcgtgaaggccggcgccctggagggcgtgcccatcagcggctgcctgggcgaccagagcgccgccctggtgggccagatgtgcttccagatcggccaggccaagaacacctacggcaccggctgcttcctgctgtgcaacaccggccacaagtgcgtgttcagcgaccacggcctgctgaccaccgtggcctacaagctgggcagagacaagcccgtgtactacgccctggagggcagcgtggccatcgccggcgccgtgatcagatggctgagagacaacctgggcatcatcaagaccagcgaggagatcgagaagctggccaaggaggtgggcaccagctacggctgctacttcgtgcccgccttcagcggcctgtacgccccctactgggagcccagcgccagaggcatcatctgcggcctgacccagttcaccaacaagtgccacatcgccttcgccgccctggaggccgtgtgcttccagaccagagagatcctggacgccatgaacagagactgcggcatccccctgagccacctgcaggtggacggcggcatgaccagcaacaagatcctgatgcagctgcaggccgacatcctgtacatccccgtggtgaagcccagcatgcccgagaccaccgccctgggcgccgccatggccgccggcgccgccgagggcgtgggcgtgtggagcctggagcccgaggacctgagcgccgtgaccatggagagattcgagccccagatcaacgccgaggagagcgagatcagatacagcacctggaagaaggccgtgatgaagagcatgggctgggtgaccacccagagccccgagagcggcatcccctag

SEQ ID NO: 263156 - protein, 911 aa, Artificial Sequence
  derived and/or modified sequence
MEVNCLTLKDLISPRQPRLDFAVEDGENAQKENIFVDRSRMAPKTPIKNEPIDLSKQKKFTPERNPITPVKFVDRQQAEPWTPTANLKMLISAASPDIRDREKKKGLFRPIENKDDAFTDSLQLDVVGDSAVDEFEKQRPSRKQKSLGLLCQKFLARYPSYPLSTEKTTISLDEVAVSLGVERRRIYDIVNVLESLHLVSRVAKNQYGWHGRHSLPKTLRNLQRLGEEQKYEEQMAYLQQKELDLIDYKFGERKKDGDPDSQEQQLLDFSEPDCPSSSANSRKDKSLRIMSQKFVMLFLVSKTKIVTLDVAAKILIEESQDAPDHSKFKTKVRRLYDIANVLTSLALIKKVHVTEERGRKPAFKWIGPVDFSSSDEELVDVSASVLPELKRETYGQIQVCAKQKLARHGSFNTVQASERIQRKVNSEPSSPYREEQGSGGYSLEIGSLAAVYRQKIEDNSQGKAFASKRVVPPSSSLDPVAPFPVLSVDPEYCVNPLAHPVFSVAQTDLQAFSMQNGLNGQVDVSLASAASAVESLKPALLAGQPLVYVPSASLFMLYGSLQEGPASGSGSERDDRSSEAPATVELSSAPSAQKRLCEERKPQEEDEPATKRQSREYEDGPLSLVMPKKPSDSTDLASPKTMGNRASIPLKDIHVNGQLPAAEEISGKATANSLVSSEWGNPSRNTDVEKPSKENESTKEPSLLQYLCVQSPAGLNGFNVLLSGSQTPPTVGPSSGQLPSFSVPCMVLPSPPLGPFPVLYSPAMPGPVSSTLGALPNTGPVNFSLPGLGSIAQLLVGPTAVVNPKSSTLPSADPQLQSQPSLNLSPVMSRSHSVVQQPESPVYVGHPVSVVKLHQSPVPVTPKSIQRTHRETFFKTPGSLGDPVLKRRERNQSRNTSSAQRRLEIPSGGAD

SEQ ID NO: 263157 - protein, 728 aa, Artificial Sequence
  derived and/or modified sequence
MEVNCLTLKDLISPRQPRLDFAVEDGENAQKENIFVDRSRMAPKTPIKNEPIDLSKQKKFTPERNPITPVKFVDRQQAEPWTPTANLKMLISAASPDIRDREKKKGLFRPIENKDDAFTDSLQLDVVGDSAVDEFEKQRPSRKQKSLGLLCQKFLARYPSYPLSTEKTTISLDEVAVSLGVERRRIYDIVNVLESLHLVSRVAKNQYGWHGRHSLPKTLRNLQRLGEEQKYEEQMAYLQQKELDLIDYKFGERKKDGDPDSQEQQLLDFSEPDCPSSSANSRKDKSLRIMSQKFVMLFLVSKTKIVTLDVAAKILIEESQDAPDHSKFKTKVRRLYDIANVLTSLALIKKVHVTEERGRKPAFKWIGPVDFSSSDEELVDVSASVLPELKRETYGQIQVCAKQKLARHGSFNTVQASERIQRKVNSEPSSPYREEQGSGGYSLEIGSLAAVYRQKIEDNSQGKAFASKRVVPPSSSLDPVAPFPVLSVDPEYCVNPLAHPVFSVAQTDLQAFSMQNGLNGQVDVSLASAASAVESLKPALLAGQPLVYVPSASLFMLYGSLQEGPASGSGSERDDRSSEAPATVELSSAPSAQKRLCEERKPQEEDEPATKRQSREYEDGPLSLVMPKKPSDSTDLASPKTMGNRASIPLKDIHVNGQLPAAEEISGKATANSLVSSEWGNPSRNTDVEKPSKENESTKEPSLLQYLCVQSPAVTSSSDPQEHPTHTS

SEQ ID NO: 263158 - DNA, 2736 bp, Artificial Sequence
  derived and/or modified sequence
atggaggtaaattgtctgacactgaaagacctgataagtcctaggcaacctaggctggatttcgcagtagaggacggtgagaatgcacagaaggaaaacatctttgtcgaccgcagccggatggcgccgaaaacccctatcaaaaatgaaccaatcgacctgtcaaaacagaagaagttcacaccagaaagaaaccccatcacaccggtcaaatttgtggatcgtcagcaagctgaaccgtggactcctacagccaacctcaaaatgcttatctctgctgcctcgcccgatattcgagacagggagaaaaagaaaggactcttcaggcccattgagaataaagacgatgcgttcaccgacagtctgcagctggatgttgtcggagacagcgccgtagacgaattcgaaaagcagcggccttcccgaaaacagaaaagcctcggtctcctgtgccagaaattccttgcccggtatcctagttatccactctcaacggaaaaaaccacaatatcacttgatgaagtggctgtgagtctaggggtggaaaggaggcggatctacgatatagtaaacgtgcttgagtcgctgcatcttgtgagccgtgtggcaaagaatcagtacggatggcatggcaggcattccctccccaaaaccttacgcaatttacagcgcctgggtgaagaacagaagtacgaggagcaaatggcttacctgcagcaaaaggagctcgacttgattgattataagtttggcgagcgcaagaaagatggtgacccggatagccaagagcagcagctgttggacttctcagagccagattgcccaagctcctctgctaactcaaggaaggacaaatccctgaggatcatgagccagaagtttgtgatgctatttttagtgtcaaagaccaaaattgttaccctcgatgtggccgctaagattcttattgaagaatcccaggatgcacctgaccatagcaaatttaaaacgaaggtgcggagattatacgacatcgctaacgtcctgacttctctggccctgattaaaaaggtgcacgtgactgaagaaagagggaggaagccggccttcaagtggatcggtcccgtggatttcagcagttccgatgaagagctggttgacgtaagcgcatccgtgttgcccgagctgaagagggaaacttacggacagatccaggtctgtgctaagcagaaattagcgcgccatggatcttttaacacagtccaggccagtgagcgtatccaaaggaaggttaatagtgagccaagctcgccataccgggaggaacaaggcagtggtggttattcacttgagatcgggtcactagcggctgtgtaccgacagaaaatcgaagataacagccaaggtaaagccttcgcctcaaagcgagttgtgccccctagctctagtttagatcccgttgccccctttccagtgctgagcgtcgatcccgaatattgcgtgaacccactagcccacccagtgttctcagtcgctcagaccgatctgcaggcgttctccatgcagaacggtctaaatgggcaggttgatgtatccttagcctcagctgcgtccgccgtcgagtcccttaaaccagcactgctcgctggacaacccttggtgtacgtcccctctgcctctctgttcatgttatacgggagcctccaggaaggcccagcctccggttccgggagtgagagagatgatcgcagctccgaggcccctgccacagtggagctgagctcagcacccagcgcccagaagagactctgtgaagagcgtaagccccaagaagaggatgaaccagcaaccaaacgacagagcagagagtacgaggatggccccctgagtcttgtgatgccgaagaagccgagcgatagtaccgaccttgcaagccccaagactatgggtaaccgcgccagtattccacttaaggacatccacgtcaatggccaattgccggctgcggaggagatctcaggaaaagccaccgccaactccctagtatcatctgagtgggggaacccgtcccggaatacggatgtcgagaaaccatcaaaagaaaacgagagtacgaaggagccgagcctgttacaatacctgtgcgtgcagtcccctgctgggttgaatgggtttaatgtcctccttagtggcagccagacaccccctactgtgggccccagcagcggacagttgccaagtttctctgtgccctgcatggtgctccccagcccacctctgggccccttcccggttctatattcccctgcaatgcctggaccggtcagttccactctcggcgccctccctaatacagggcccgtgaacttctcactccctggactgggctcgatcgcccagctgctcgtgggccccacagccgttgtgaaccctaagtcttctactctaccttccgccgacccacagttgcagagtcagccaagcttaaacctgtcaccagtaatgtccaggtcgcacagcgtcgtgcagcagcctgaatcccctgtgtacgtcgggcaccctgtttcagtggtcaaactccatcagagcccagttccagtgactccaaagtccatccaaaggactcatagggaaactttcttcaagacacctggctcgctgggcgatcctgtgctgaagagacgcgagaggaaccagtccaggaatacttctagtgctcaacggcgcctcgagattccttctgggggtgcagattag

SEQ ID NO: 263159 - DNA, 2187 bp, Artificial Sequence
  derived and/or modified sequence
atggaagtgaattgcctgaccctgaaagatcttatatcaccaagacagcctcgcctagacttcgcggtggaggatggcgagaatgcccagaaggagaatatcttcgtggacagaagcaggatggcacccaagacccctatcaaaaatgaaccaatcgatctgtctaagcagaaaaagttcaccccggagagaaatcccataacacccgttaaattcgttgacagacagcaggccgagccctggacaccgacagccaatctaaagatgctcatcagtgcagcctcccccgacattagagatcgtgagaagaagaaggggttgttcaggccgatcgagaataaggatgacgccttcacagatagtctgcagctcgacgtggtgggggactccgctgtcgatgagtttgaaaagcagcgcccttcccggaagcaaaaatctctgggattgctgtgtcagaagtttcttgcccgttacccttcataccctctcagtacagaaaagacaacgatctctctagatgaagtcgcagtgtcattgggggtggaacgcaggagaatttacgatatagtaaatgtactggagtcactacaccttgttagccgcgtggccaagaaccagtatgggtggcacggccggcacagcctgccaaagacactgcgcaacctgcagcgcctgggcgaggaacagaagtatgaagagcaaatggcctatcttcaacagaaggaacttgatcttattgactacaagttcggtgagcgtaagaaagacggagatccggattctcaagaacagcagctgctggacttttcagagcccgattgcccatcttctagcgcgaactctcgcaaggacaagtctctgcgcattatgagccaaaaattcgttatgctgttccttgtctctaagacgaagatcgtgacgctcgacgtagccgctaagatcctgattgaggagagccaggatgctccggaccattccaaattcaagaccaaggttagaagattgtacgacatcgcaaacgtcctcacaagcttagctctgattaagaaagtgcatgttaccgaggagaggggcaggaaaccagcatttaagtggattggccctgttgatttctcctcatccgacgaggaattagtggatgtgtcagctagcgtcttgccagaactgaagcgtgagacctacggacagatacaggtatgtgcaaaacagaaactggcgcggcatggttcctttaatactgtgcaggcgtctgaaagaattcagcgcaaagtgaatagtgagccctcatccccctacagggaagagcagggtagcgggggctattccttggagatcggatctctagcagccgtataccggcagaaaatagaggacaatagccaagggaaagctttcgccagcaagcgggttgtgcccccctcctctagcctggatccggtggctcctttccccgtgttgagtgttgatcccgagtactgtgtcaaccccctggcacatccagtgttctcagttgctcaaaccgacctgcaggctttttccatgcaaaatggattgaacggccaggtggacgtgtctttggcctccgccgcctcagctgtagagtctctgaagccggccttactcgccggacagccactcgtgtatgtgcccagcgcgtcactctttatgctgtacgggtccctgcaggaaggccctgcctccggtagcggttcagagagggacgacaggagttcggaggcccctgcgacggtggaactttcttctgccccttccgctcagaagagactctgcgaggagcgtaagccacaggaagaggacgaaccagccaccaaaaggcagtctagggaatacgaggacgggcctctgagcctggtgatgcccaagaagcccagtgatagcaccgacttggcctctcctaagacgatgggcaaccgcgcttccattcctttgaaggacatccatgtgaacggtcagctgcctgccgccgaggaaattagcgggaaggccacagccaacagtttggtgagcagtgagtgggggaatccaagccgaaacacagacgtggaaaagccgagcaaggaaaatgagagtaccaaagagccatccttgctccagtatctctgtgtacaatcccctgcagtcacctcttccagcgaccctcaggagcaccccactcacacgtcctag

SEQ ID NO: 263160 - DNA, 2736 bp, Artificial Sequence
  derived and/or modified sequence
atggaggtgaactgcctgaccctgaaggacctgatcagcccccggcagccccggctggactttgctgtggaggatggagaaaatgcccagaaggagaacatctttgtggacaggagcaggatggcccccaagacccccatcaagaatgagcccatcgacctgagcaagcagaagaagttcaccccagagaggaaccccatcacccctgtgaagtttgtggaccggcagcaggccgagccctggacccccacagccaacctgaagatgctgatctctgctgccagcccagacatccgggaccgggagaagaagaagggcctcttccggcccatcgagaacaaggatgatgccttcacagacagcctgcagctggatgtggtgggggacagcgctgtggatgaatttgagaagcagaggcccagcaggaagcagaagagcctgggcctgctgtgccagaagttcctggcccgctaccccagctaccccctgagcacagagaagaccaccatcagcctggatgaggtggccgtgtccctgggcgtggagcggcggcgcatctatgacatcgtgaatgtgctggagagcctgcacctggtgtcccgggtggccaagaaccagtatggctggcacggccgccacagcctgcccaagaccctgaggaacctgcagaggctgggggaggagcagaagtatgaggagcagatggcctacctgcagcagaaggagctggacctgattgactacaagtttggagagaggaagaaggatggagaccctgacagccaggagcagcagctgctggacttcagcgagccagactgccccagcagcagcgccaacagcaggaaggacaagagcctgcgcatcatgagccagaagtttgtgatgctgttcctggtgtccaagaccaagatcgtgaccctggatgtggccgccaagatcctgattgaggagagccaggatgccccagaccacagcaagttcaagaccaaggtgcggcggctgtatgacatcgccaacgtgctgaccagcctggccctgatcaagaaggtgcacgtgacagaggagcggggcaggaagccagccttcaagtggattggccctgtggacttcagcagcagtgatgaggagctggtggatgtgtctgcctctgtgctgcctgagctgaagcgggagacctacggccagatccaggtgtgtgccaagcagaagctggcccggcacggcagcttcaacacagtgcaggccagcgagcgcatccagaggaaggtgaacagcgagcccagcagcccctaccgggaggagcagggcagcggcggctacagcctggagatcggcagcctggccgctgtgtaccggcagaagattgaggacaacagccagggcaaggcctttgccagcaagagggtggtgccccccagcagcagcctggaccctgtggcccccttccctgtgctgtctgtggaccctgagtactgtgtgaaccccctggcccaccctgtgttttctgtggcccagacagacctgcaggccttctccatgcagaatggcctgaatggccaggtggatgtgtccctggccagcgctgccagcgctgtggagagcctgaagccagccctgctggccggccagcccctggtgtatgtgcccagcgccagcctcttcatgctgtatggcagcctgcaggagggccctgccagcggcagcggcagcgagagagatgacaggagcagcgaggccccagccaccgtggagctgagcagcgcccccagcgcccagaagaggctgtgtgaggagaggaagccccaggaggaggatgagcccgccaccaagaggcagagccgggagtatgaagatggccccctgagcctggtgatgcccaagaagcccagcgacagcacagacctggccagccccaagaccatgggcaacagagccagcatccccctgaaggacatccacgtgaatggccagctgcctgctgctgaggagatcagcggcaaggccacagccaacagcctggtgtcctctgagtggggcaaccccagcaggaacacagatgtggagaagcccagcaaagaaaatgaaagcaccaaggagcccagcctgctgcagtacctgtgtgtgcagagccctgctggcctgaatggcttcaacgtgctgctgagcggcagccagaccccacccaccgtgggccccagcagcggccagctgcccagcttctctgtgccctgcatggtgctgcccagcccccccctgggccccttccctgtgctgtacagccctgccatgcctggccctgtgagcagcaccctgggcgccctgcccaacacaggccctgtgaacttcagcctgcccggcctgggcagcatcgcccagctgctggtgggccccacagctgtggtgaaccccaagagcagcaccctgcccagcgctgacccccagctgcagagccagcccagcctgaacctgagccctgtgatgagccgcagccacagcgtggtgcagcagcctgagagccctgtgtatgtgggccaccctgtgtctgtggtgaagctgcaccagagccctgtgcctgtgacccccaagagcatccagaggacccaccgggagaccttcttcaagaccccaggcagcctgggggaccctgtgctgaagagaagagagaggaaccagagcaggaacaccagcagcgcccagaggcggctggagatccccagcggcggcgctgactag

SEQ ID NO: 263161 - DNA, 2187 bp, Artificial Sequence
  derived and/or modified sequence
atggaggtgaactgcctgaccctgaaggacctgatcagcccccggcagccccggctggactttgctgtggaggatggagaaaatgcccagaaggagaacatctttgtggacaggagcaggatggcccccaagacccccatcaagaatgagcccatcgacctgagcaagcagaagaagttcaccccagagaggaaccccatcacccctgtgaagtttgtggaccggcagcaggccgagccctggacccccacagccaacctgaagatgctgatctctgctgccagcccagacatccgggaccgggagaagaagaagggcctcttccggcccatcgagaacaaggatgatgccttcacagacagcctgcagctggatgtggtgggggacagcgctgtggatgaatttgagaagcagaggcccagcaggaagcagaagagcctgggcctgctgtgccagaagttcctggcccgctaccccagctaccccctgagcacagagaagaccaccatcagcctggatgaggtggccgtgtccctgggcgtggagcggcggcgcatctatgacatcgtgaatgtgctggagagcctgcacctggtgtcccgggtggccaagaaccagtatggctggcacggccgccacagcctgcccaagaccctgaggaacctgcagaggctgggggaggagcagaagtatgaggagcagatggcctacctgcagcagaaggagctggacctgattgactacaagtttggagagaggaagaaggatggagaccctgacagccaggagcagcagctgctggacttcagcgagccagactgccccagcagcagcgccaacagcaggaaggacaagagcctgcgcatcatgagccagaagtttgtgatgctgttcctggtgtccaagaccaagatcgtgaccctggatgtggccgccaagatcctgattgaggagagccaggatgccccagaccacagcaagttcaagaccaaggtgcggcggctgtatgacatcgccaacgtgctgaccagcctggccctgatcaagaaggtgcacgtgacagaggagcggggcaggaagccagccttcaagtggattggccctgtggacttcagcagcagtgatgaggagctggtggatgtgtctgcctctgtgctgcctgagctgaagcgggagacctacggccagatccaggtgtgtgccaagcagaagctggcccggcacggcagcttcaacacagtgcaggccagcgagcgcatccagaggaaggtgaacagcgagcccagcagcccctaccgggaggagcagggcagcggcggctacagcctggagatcggcagcctggccgctgtgtaccggcagaagattgaggacaacagccagggcaaggcctttgccagcaagagggtggtgccccccagcagcagcctggaccctgtggcccccttccctgtgctgtctgtggaccctgagtactgtgtgaaccccctggcccaccctgtgttttctgtggcccagacagacctgcaggccttctccatgcagaatggcctgaatggccaggtggatgtgtccctggccagcgctgccagcgctgtggagagcctgaagccagccctgctggccggccagcccctggtgtatgtgcccagcgccagcctcttcatgctgtatggcagcctgcaggagggccctgccagcggcagcggcagcgagagagatgacaggagcagcgaggccccagccaccgtggagctgagcagcgcccccagcgcccagaagaggctgtgtgaggagaggaagccccaggaggaggatgagcccgccaccaagaggcagagccgggagtatgaagatggccccctgagcctggtgatgcccaagaagcccagcgacagcacagacctggccagccccaagaccatgggcaacagagccagcatccccctgaaggacatccacgtgaatggccagctgcctgctgctgaggagatcagcggcaaggccacagccaacagcctggtgtcctctgagtggggcaaccccagcaggaacacagatgtggagaagcccagcaaagaaaatgaaagcaccaaggagcccagcctgctgcagtacctgtgtgtgcagagccctgctgtgaccagcagcagtgacccccaggagcaccccacccacaccagctag

SEQ ID NO: 263162 - DNA, 2736 bp, Artificial Sequence
  derived and/or modified sequence
atggaggtgaactgcctgaccctgaaggacctgatcagcccccggcagccccggctcgacttcgcagtggaggacggtgagaatgcacagaaggagaatatctttgtggaccgaagccgcatggctccaaagacccccattaaaaacgaaccaattgatctgtccaagcagaagaaattcacacccgaacgcaatcccatcacacctgttaagttcgtcgatcgccagcaggcagaaccctggacacccaccgcaaacctcaagatgcttattagtgccgcatcgcctgatatccgcgaccgagaaaagaagaaagggctgttccgccccattgagaacaaggacgatgctttcactgatagtttacaactggatgttgtgggtgattcagctgtggacgagttcgagaaacagaggcccagcaggaagcaaaaatccttagggctactgtgtcagaaattcctggcaaggtaccctagctatccactgtctaccgaaaagaccactattagtcttgatgaggtcgcagtgtccctgggagtagagaggcgcaggatctatgacattgtcaacgttttggaatccttgcatctcgtatcccgtgtcgctaaaaatcaatatggatggcacggccgacatagtctgcctaagactcttagaaaccttcagcgtctaggcgaggaacaaaagtatgaggagcaaatggcgtaccttcagcagaaggaactggatttaatagactataagtttggagagcggaagaaagacggcgacccagattctcaggagcaacagctattagatttctcagagcccgattgtccatcttctagtgcaaactcacggaaagataaatctctgcgcattatgtcacagaagtttgtgatgctcttcttagtatcaaaaacaaagatcgtgacattggatgtggccgctaaaatcttaattgaagaatcccaggacgcaccagatcactctaaattcaaaacaaaggttcgaaggctctatgacattgcaaacgtactgacctcactggctcttattaagaaggtacacgtcactgaggaaaggggtagaaagccggccttcaagtggattggccccgtggattttagctcctctgacgaagagcttgtggatgtgtctgcgtcggtgttacctgaactgaagcgcgaaacatatgggcagatccaggtatgcgccaaacaaaagttggcgagacacggctctttcaatactgttcaggcatccgagcggattcagcgaaaggtgaattctgaaccttcatccccctatagggaggagcagggatcgggcggatactcactagagatcggctctctggcagccgtttaccgccagaaaatcgaagacaattcccaaggaaaagcctttgcgagtaaacgagtcgtgcctccatcctctagcctggacccagtggcaccttttcccgtgctgagcgtggatcctgaatattgtgtgaacccacttgctcacccagtattcagcgtagctcagacagacctgcaggctttttctatgcagaatggactcaacggacaggttgatgtgtccctcgccagtgccgcatccgccgtagagtccttgaagcccgcacttctcgctgggcaaccactggtgtatgtgccatcggcctccctctttatgttatacggctcactacaggaggggccggcctcaggatccggcagcgaacgggacgatcgatcttccgaggcaccagcaactgttgagctgagctcggcgccatcagcacagaagagactgtgtgaggaacgcaaaccacaggaggaggatgagcccgctactaagcgccagagtagagagtatgaagacggaccactgagcctggtgatgccaaaaaaacctagtgacagcactgatctggcatccccaaagaccatgggaaatagagcaagcattcccctgaaagacattcacgtaaatggccagcttccagctgcagaggagatatccggcaaagccacagctaatagtcttgtctctagtgagtggggcaatccaagtagaaatacagatgtggaaaagcctagcaaagagaatgaaagtaccaaggaaccctctcttttacaatacctatgtgtgcaatcccccgctgggttgaacggcttcaatgtgctgctctcagggtcacagacccccccgactgtggggccctcgtccggccagctgcccagcttctccgtgccgtgtatggtgcttccgtcccctccccttggcccatttcctgtcttgtactcgcccgccatgcctggcccagtgagcagtacgctgggcgcactgccaaatacaggacctgtgaacttctcactccctggtcttggatccattgctcagcttctggtgggaccaacagcggtggttaacccaaaaagctctacgctgccaagtgccgaccctcaactccaatctcagccaagcttgaatctcagccccgtgatgtccagaagccacagcgttgttcagcagcccgaatctcctgtgtacgtgggacatcccgtctccgtggtgaaactccaccaaagtcccgtgcccgtcactcctaagtcgatccaaagaacacacagggaaacattttttaagacacccggaagtctgggagatccggtgctaaagaggagggagagaaaccagtcaagaaacacgtccagtgcacaaagaaggctggaaattcctagtggtggagccgattag

SEQ ID NO: 263163 - DNA, 2187 bp, Artificial Sequence
  derived and/or modified sequence
atggaggtgaactgcctgaccctgaaggacctgatcagcccccggcagcctcggctggatttcgcggtggaggatggagaaaatgcccagaaggagaatatcttcgtcgacaggtctagaatggcgcctaagaccccgattaagaatgaacccattgatttgtcaaaacaaaaaaaattcactccagaacggaatcccatcactcccgtgaaatttgtggaccggcaacaggccgaaccttggacacctactgcaaatctgaaaatgctcatctccgccgctagccctgacatacgggatagagagaaaaaaaaggggctgttccgcccaattgaaaacaaagatgacgccttcaccgacagtctccagcttgatgtcgtgggagacagcgccgtcgacgaatttgaaaaacagcgcccgtctcgaaaacagaagagcttggggctcttgtgccagaaatttctagctcgctatccaagttatcccctgagcactgagaaaactaccatttctctcgatgaggtcgcggtgagtctaggggtggaacgccgccgcatctacgacatcgtgaacgtgctggagagtctccacctcgtgtcgcgggtggccaaaaatcagtatggatggcatgggcgccacagtctcccgaagacactgcgcaacctgcagcgcctaggcgaagagcagaaatatgaggagcagatggcttacctgcaacagaaggaactcgatctgattgattacaagtttggggaaagaaaaaaagacggcgaccccgattcacaggaacagcagttactcgatttttctgagccggactgtccatcttcttccgcaaattcaaggaaagataagtcattacgaattatgtcacagaagtttgtcatgctctttctggtgagcaagactaagatcgtgactctggatgtggctgctaagatccttatcgaggaatctcaggacgctcctgaccattccaaattcaaaacaaaggtcaggagactctatgatattgccaatgtactgacctcacttgcccttattaaaaaagtgcacgttactgaggagcgtggcagaaaaccagcctttaagtggattggtcccgtcgatttttcaagctccgacgaggaactggtagacgtgagtgctagtgtgttgcccgagctgaagagagagacatatggacaaatccaagtctgtgccaaacagaaacttgcgcgacatggtagttttaacaccgttcaggcatctgagaggatccagcgtaaagtgaatagtgagcccagttcaccttatagggaggaacagggctccggtggttactccctggagattgggagtcttgctgccgtttataggcagaaaatagaggataacagtcagggaaaagcctttgccagtaaaagagtggttcccccgtcctcttccctggacccggtcgctcccttccccgtgctgtcggtcgatccagaatactgcgttaatccactggctcatcccgtatttagtgtagcccagactgatttacaggcgtttagcatgcagaacgggttgaacggccaggtcgacgtgagcctggcaagcgcggcatctgccgttgagtctctaaaaccggcacttctcgcggggcagcctttggtctacgtaccaagtgcttcattgttcatgctctacggatcactacaagaaggccctgcctccggcagtggttcggagcgcgacgatcggtcaagcgaggcacccgcgacagtcgagttatcgtctgcgcctagcgcacagaagcgcctgtgtgaagagaggaaaccacaggaagaggacgaacccgcgactaagagacagtctagagaatatgaagatggtcccctgagtttggttatgcctaaaaaaccaagtgattccactgacctggcttctcctaagactatgggcaaccgtgcatcgatcccattgaaggatatccacgtgaacggacagctcccggccgctgaggagatttctggcaaggccaccgctaacagtctggtgtctagcgaatggggaaatccctcgcgcaacacagacgtggaaaagcctagcaaagaaaacgaatctacgaaggagcccagtctattgcagtatctgtgtgttcagtcacctgccgtcaccagcagttccgatccccaggaacacccaacccacactagctag

SEQ ID NO: 263164 - DNA, 2736 bp, Artificial Sequence
  derived and/or modified sequence
atggaagtgaattgtctgacgctgaaagatcttatttcaccgagacagcccagactcgactttgccgtggaggatggggagaatgcgcaaaaggaaaacattttcgtggatagaagccggatggcaccaaaaactcctatcaagaacgaacccattgacctgtccaagcagaagaagtttactcccgaaagaaatcctatcactcccgttaaattcgtggacagacagcaagctgaaccctggaccccgacagccaatctcaaaatgctcatcagcgccgcatcaccagacatccgagatcgggaaaagaaaaagggcttgttcagacctatcgaaaataaagatgacgcatttacagacagcctgcagctggatgtggtgggcgacagcgcagtggatgagtttgagaaacagcgaccgagccggaagcagaagagcctgggcctgttgtgccagaaatttctcgcgagatatccatcataccccctgtctacagagaagacaactatcagcctagatgaagtcgccgtatccctcggtgtggagcggaggaggatttatgacatagttaatgtgctggagagtctccatctggtatccagggtagcaaagaaccagtatgggtggcacggtcgtcattcactacccaagaccctgcgaaacctgcagcgtctgggagaggaacagaagtacgaggagcaaatggcgtacctgcagcaaaaggagctagatttaattgactacaagtttggtgagcgcaagaaggacggtgatcccgattcccaggagcagcagttacttgatttttcagaacctgattgtccatccagttcagccaacagccgcaaggacaagtccctgagaattatgtcccaaaagtttgtgatgctcttccttgtgtccaagaccaaaatcgtgaccctggacgttgccgctaagattttgatcgaggagagtcaggatgctcccgatcatagtaagtttaagactaaggtcagaaggctctatgacatagcaaacgtcctaacatcgcttgcactaataaagaaggtgcacgtgacggaggagcgcggtcgcaaacccgcatttaagtggattggcccagtagatttcagttcttctgacgaagaattggtcgatgtgtctgcctcagtgctcccagagctaaaacgagaaacgtatggacaaattcaagtgtgtgccaagcagaagctggcacgacatggctcctttaatactgtccaggcttctgagcgcattcagcggaaggtgaacagtgaaccctcgtccccctatcgcgaggaacaggggtctgggggatactcacttgagatcggctctcttgctgctgtctaccgtcagaaaattgaagataattcccaaggaaaagcttttgcaagtaagagggtcgtgcctccgtcctcttctctggaccccgtggctcctttccctgtgctttccgtggatccagagtactgcgtcaatcctcttgcccaccccgtcttttctgtcgcacagaccgatctccaggctttttcaatgcagaatgggcttaatggacaggttgacgtgagccttgcctcagcagccagcgcggtcgaaagcttgaagccagccctgctggccggacagccacttgtctatgtcccaagtgccagtctgttcatgctgtacgggtcgctgcaagaagggcctgcatctggatccggctcagagcgggatgatcggagttcggaagcacctgcgacagtcgagctgtcgagcgccccaagtgctcaaaaacggctgtgtgaagaacggaagccccaagaggaagacgagcccgctaccaagcgccaatcaagggaatatgaggatgggccactgtccttggtcatgccaaagaagccttccgactctacggatctcgcaagtccaaagactatgggcaaccgggctagcatcccacttaaggatattcacgtgaacggacagctcccggcagcagaggaaatctccggtaaggcgactgccaactcactggtgtcatccgagtgggggaaccctagcaggaatacagatgtggagaagcctagcaaggaaaacgagtcaaccaaagagcccagccttctgcaatacctgtgcgtgcagtcccccgcagggctcaatgggtttaacgtactcctctcggggtcccaaaccccacctaccgtcggaccttcctccggacagctgccatccttttcggtaccttgtatggtgctgcctagccccccacttggcccatttcccgtgctctatagtccagccatgccgggtcctgtgtcatccactctgggggctcttcccaacaccggcccagttaatttctctctccctggacttggctcaatcgcgcagttgctggttggccctactgcggtggttaaccctaagagttccaccctcccttccgctgatcctcagctgcagtcacagcctagtttgaacctgagcccagtcatgagtcgctcgcattccgtggtgcagcagccagagagtccggtttacgtaggccacccggtttcggtggtgaaacttcaccagtcgccggtgcctgtgactcccaaatctattcaaaggacacaccgtgaaacatttttcaaaacgcccggtagcttgggggatccagttctcaaacgtcgggagaggaaccagtcacgtaacacttcctcagcacaacggagattggaaattccttcaggaggagccgactag

SEQ ID NO: 263165 - DNA, 2187 bp, Artificial Sequence
  derived and/or modified sequence
atggaggtgaactgcctcactctgaaagacctgatcagcccacgccagcccaggttagattttgcggtagaggacggtgaaaatgcccaaaaggagaatatatttgttgacaggtcacgcatggctcccaagactcctataaagaacgaaccaatagaccttagcaagcagaaaaagtttacacccgaacggaatccgatcactccagtgaagttcgtggaccgccagcaggccgagccttggactccaacagcaaatctcaaaatgctaattagcgccgcttctccggacatccgggacagagaaaagaagaaaggcctgttccgaccaattgaaaacaaggacgatgcctttactgattccctccagctcgacgtggtcggcgatagtgccgtggatgaatttgagaagcagcgtcccagccgcaaacagaagtccctaggcttactgtgccaaaagtttttagctcggtatccgtcttaccccttgagcaccgagaagaccacgattagtctggacgaagttgccgtttcactgggagtggagcgtcggagaatctacgatatcgtgaacgtgctggagtcgctgcatcttgtgagtagagtcgcgaagaaccagtacggctggcacgggcgtcacagccttcccaagacactgaggaacctgcagagattgggagaggagcagaaatacgaggaacaaatggcctatcttcagcagaaggagttggacctcattgattacaaatttggggaaagaaaaaaagacggagacccagactctcaggaacagcagctgctggacttttcagaaccagattgtccatcctcatcggcaaattcccgtaaagataagtccctgagaatcatgagccaaaagttcgtgatgttgttcttagtttctaaaacaaagatcgtcaccctggatgtggctgctaagattttgatcgaagagtcgcaggatgccccagaccattccaaatttaagactaaagttcgccgattatacgacattgccaacgtacttacgtctctggcattaatcaagaaagtccacgtgacagaggagcgcggacgcaagcccgcattcaagtggatcggcccagtggacttctccagttcagacgaggaactggttgatgttagcgcctccgtcctgcctgagctcaaacgcgaaacttatggtcagattcaggtgtgtgccaagcaaaagctagctcggcatggctcgttcaatacagtccaggccagtgagagaatccagcgaaaggtcaactctgaaccttcgtccccatatcgagaggagcagggctcgggagggtacagtctcgaaatcggctctctggcagccgtctaccggcagaaaatcgaggataactctcagggaaaagcatttgcctccaagagggtcgttcccccaagcagctccctggatccggttgcgccatttcctgttttgagcgttgatccggaatattgcgtgaatcccttggcccatcccgtgttcagcgtggcccagaccgatcttcaggcattttccatgcagaacggcttgaacggccaggtggacgtttctctggcttcagccgcttctgcggtcgaatccttaaaaccagccctcctggccggacagcccctggtttacgtgccaagcgcatcactattcatgctgtacggcagcctccaggagggccctgcaagcggaagtggcagcgaacgggatgatagatcgtcagaggctcctgccactgtggaattgagttctgcccctagcgctcagaagcgcctgtgcgaggagagaaaaccacaggaagaggacgagccagcaactaagagacagtcccgcgaatatgaggatggcccattatccctcgtgatgccgaagaagccatctgactctactgacctggcctctcctaagacaatggggaaccgcgcatccatacccctgaaagacatccacgtaaatgggcaattacctgccgctgaagagattagcgggaaggccacagctaatagcctggtgagctctgagtggggaaaccccagcaggaatacagatgtcgagaagccctctaaggagaatgagagtaccaaggaaccatcccttcttcagtacctatgcgtccagtctccagccgtcacaagttcctccgatccccaggaacaccctactcacacatcctag

SEQ ID NO: 263166 - DNA, 2736 bp, Artificial Sequence
  derived and/or modified sequence
atggaggtgaactgcctgaccctgaaggacctgatcagccccagacagcccagactggacttcgccgtggaggacggcgagaacgcccagaaggagaacatcttcgtggacagaagcagaatggcccccaagacccccatcaagaacgagcccatcgacctgagcaagcagaagaagttcacccccgagagaaaccccatcacccccgtgaagttcgtggacagacagcaggccgagccctggacccccaccgccaacctgaagatgctgatcagcgccgccagccccgacatcagagacagagagaagaagaagggcctgttcagacccatcgagaacaaggacgacgccttcaccgacagcctgcagctggacgtggtgggcgacagcgccgtggacgagttcgagaagcagagacccagcagaaagcagaagagcctgggcctgctgtgccagaagttcctggccagataccccagctaccccctgagcaccgagaagaccaccatcagcctggacgaggtggccgtgagcctgggcgtggagagaagaagaatctacgacatcgtgaacgtgctggagagcctgcacctggtgagcagagtggccaagaaccagtacggctggcacggcagacacagcctgcccaagaccctgagaaacctgcagagactgggcgaggagcagaagtacgaggagcagatggcctacctgcagcagaaggagctggacctgatcgactacaagttcggcgagagaaagaaggacggcgaccccgacagccaggagcagcagctgctggacttcagcgagcccgactgccccagcagcagcgccaacagcagaaaggacaagagcctgagaatcatgagccagaagttcgtgatgctgttcctggtgagcaagaccaagatcgtgaccctggacgtggccgccaagatcctgatcgaggagagccaggacgcccccgaccacagcaagttcaagaccaaggtgagaagactgtacgacatcgccaacgtgctgaccagcctggccctgatcaagaaggtgcacgtgaccgaggagagaggcagaaagcccgccttcaagtggatcggccccgtggacttcagcagcagcgacgaggagctggtggacgtgagcgccagcgtgctgcccgagctgaagagagagacctacggccagatccaggtgtgcgccaagcagaagctggccagacacggcagcttcaacaccgtgcaggccagcgagagaatccagagaaaggtgaacagcgagcccagcagcccctacagagaggagcagggcagcggcggctacagcctggagatcggcagcctggccgccgtgtacagacagaagatcgaggacaacagccagggcaaggccttcgccagcaagagagtggtgccccccagcagcagcctggaccccgtggcccccttccccgtgctgagcgtggaccccgagtactgcgtgaaccccctggcccaccccgtgttcagcgtggcccagaccgacctgcaggccttcagcatgcagaacggcctgaacggccaggtggacgtgagcctggccagcgccgccagcgccgtggagagcctgaagcccgccctgctggccggccagcccctggtgtacgtgcccagcgccagcctgttcatgctgtacggcagcctgcaggagggccccgccagcggcagcggcagcgagagagacgacagaagcagcgaggcccccgccaccgtggagctgagcagcgcccccagcgcccagaagagactgtgcgaggagagaaagccccaggaggaggacgagcccgccaccaagagacagagcagagagtacgaggacggccccctgagcctggtgatgcccaagaagcccagcgacagcaccgacctggccagccccaagaccatgggcaacagagccagcatccccctgaaggacatccacgtgaacggccagctgcccgccgccgaggagatcagcggcaaggccaccgccaacagcctggtgagcagcgagtggggcaaccccagcagaaacaccgacgtggagaagcccagcaaggagaacgagagcaccaaggagcccagcctgctgcagtacctgtgcgtgcagagccccgccggcctgaacggcttcaacgtgctgctgagcggcagccagaccccccccaccgtgggccccagcagcggccagctgcccagcttcagcgtgccctgcatggtgctgcccagcccccccctgggccccttccccgtgctgtacagccccgccatgcccggccccgtgagcagcaccctgggcgccctgcccaacaccggccccgtgaacttcagcctgcccggcctgggcagcatcgcccagctgctggtgggccccaccgccgtggtgaaccccaagagcagcaccctgcccagcgccgacccccagctgcagagccagcccagcctgaacctgagccccgtgatgagcagaagccacagcgtggtgcagcagcccgagagccccgtgtacgtgggccaccccgtgagcgtggtgaagctgcaccagagccccgtgcccgtgacccccaagagcatccagagaacccacagagagaccttcttcaagacccccggcagcctgggcgaccccgtgctgaagagaagagagagaaaccagagcagaaacaccagcagcgcccagagaagactggagatccccagcggcggcgccgactag

SEQ ID NO: 263167 - DNA, 2187 bp, Artificial Sequence
  derived and/or modified sequence
atggaggtgaactgcctgaccctgaaggacctgatcagccccagacagcccagactggacttcgccgtggaggacggcgagaacgcccagaaggagaacatcttcgtggacagaagcagaatggcccccaagacccccatcaagaacgagcccatcgacctgagcaagcagaagaagttcacccccgagagaaaccccatcacccccgtgaagttcgtggacagacagcaggccgagccctggacccccaccgccaacctgaagatgctgatcagcgccgccagccccgacatcagagacagagagaagaagaagggcctgttcagacccatcgagaacaaggacgacgccttcaccgacagcctgcagctggacgtggtgggcgacagcgccgtggacgagttcgagaagcagagacccagcagaaagcagaagagcctgggcctgctgtgccagaagttcctggccagataccccagctaccccctgagcaccgagaagaccaccatcagcctggacgaggtggccgtgagcctgggcgtggagagaagaagaatctacgacatcgtgaacgtgctggagagcctgcacctggtgagcagagtggccaagaaccagtacggctggcacggcagacacagcctgcccaagaccctgagaaacctgcagagactgggcgaggagcagaagtacgaggagcagatggcctacctgcagcagaaggagctggacctgatcgactacaagttcggcgagagaaagaaggacggcgaccccgacagccaggagcagcagctgctggacttcagcgagcccgactgccccagcagcagcgccaacagcagaaaggacaagagcctgagaatcatgagccagaagttcgtgatgctgttcctggtgagcaagaccaagatcgtgaccctggacgtggccgccaagatcctgatcgaggagagccaggacgcccccgaccacagcaagttcaagaccaaggtgagaagactgtacgacatcgccaacgtgctgaccagcctggccctgatcaagaaggtgcacgtgaccgaggagagaggcagaaagcccgccttcaagtggatcggccccgtggacttcagcagcagcgacgaggagctggtggacgtgagcgccagcgtgctgcccgagctgaagagagagacctacggccagatccaggtgtgcgccaagcagaagctggccagacacggcagcttcaacaccgtgcaggccagcgagagaatccagagaaaggtgaacagcgagcccagcagcccctacagagaggagcagggcagcggcggctacagcctggagatcggcagcctggccgccgtgtacagacagaagatcgaggacaacagccagggcaaggccttcgccagcaagagagtggtgccccccagcagcagcctggaccccgtggcccccttccccgtgctgagcgtggaccccgagtactgcgtgaaccccctggcccaccccgtgttcagcgtggcccagaccgacctgcaggccttcagcatgcagaacggcctgaacggccaggtggacgtgagcctggccagcgccgccagcgccgtggagagcctgaagcccgccctgctggccggccagcccctggtgtacgtgcccagcgccagcctgttcatgctgtacggcagcctgcaggagggccccgccagcggcagcggcagcgagagagacgacagaagcagcgaggcccccgccaccgtggagctgagcagcgcccccagcgcccagaagagactgtgcgaggagagaaagccccaggaggaggacgagcccgccaccaagagacagagcagagagtacgaggacggccccctgagcctggtgatgcccaagaagcccagcgacagcaccgacctggccagccccaagaccatgggcaacagagccagcatccccctgaaggacatccacgtgaacggccagctgcccgccgccgaggagatcagcggcaaggccaccgccaacagcctggtgagcagcgagtggggcaaccccagcagaaacaccgacgtggagaagcccagcaaggagaacgagagcaccaaggagcccagcctgctgcagtacctgtgcgtgcagagccccgccgtgaccagcagcagcgacccccaggagcaccccacccacaccagctag

SEQ ID NO: 263168 - DNA, 5740 bp, Artificial Sequence
  derived and/or modified sequence
gttttagcggggactacgatccaggctggagttgcgctcggccggtctgagcgctggcgctgcccggacgccgcggggtccccgccagcccagggcactcggcgcggggatctgcgcgcctcgctctcccttcccgatgccgccgcccggctgctgatcgccgcaccaccttccctcatcggcttgggtccgtggaggtccctgcagaggcaggaagcctccttaggaaagcagggatggaggtaaattgtttaacactaaaagacctgatcagccccaggcagcccagactagattttgcagttgaagatggggaaaatgcacaaaaggaaaatatatttgttgatcgatcaaggatggccccgaagactccaataaaaaatgaaccaattgatttatcgaagcaaaaaaaatttactccagaaagaaatcccattactccagttaagtttgttgacagacagcaagcggaaccatggacacccacagctaacctgaagatgctcattagtgctgccagcccagatataagggaccgggagaagaaaaagggactattccgacccattgaaaacaaggacgatgcatttacagattctctacagcttgatgttgttggggacagtgctgtggacgaatttgaaaagcaaaggccaagcagaaaacagaaaagtttaggactcctgtgccagaagtttctagctcgctatccaagttatcccttgtcaactgagaaaactaccatctccctagatgaagttgctgtcagtcttggtgtggaaaggagacgcatctatgacattgtaaatgtgctggagtcgctgcatctggtcagccgggtggctaagaatcagtatggctggcatggacggcacagcctgccaaaaaccctgaggaacctccagagactaggagaggagcagaaatatgaagagcaaatggcctacctccaacagaaagagctggacctgatagattataaatttggagaacgtaaaaaagatggtgatccagattcccaggaacaacagttactggatttctctgaacccgactgtccctcttcatctgcaaacagtagaaaagacaagtctctgagaattatgagccagaagtttgtcatgctgttcctcgtctccaaaaccaagattgtcactctggatgtggctgccaaaatactgatagaagaaagccaagatgccccagaccatagtaaatttaaaacaaaggtacgacgcctctatgacatagccaatgttctgaccagcttggctctgataaagaaagtgcatgtaacagaagagcgaggtcgtaaaccagccttcaagtggatcgggcctgtggacttcagctcaagtgatgaagaactggtggatgtttctgcatctgtcttaccagaattgaaaagagaaacatatggccagattcaagtctgtgcaaaacagaagctggctcgccatggttcttttaacacagttcaggcttctgagaggatccagaggaaagtgaactcagaaccgagcagcccgtacagagaagaacaaggatcaggtggctactctttagaaattggaagcctggcagctgtctatagacagaaaatagaagacaattcacagggaaaagcctttgccagtaagagagtggtgcctccatcaagcagcttggaccctgttgctcctttccctgtcctctctgttgacccagaatattgtgttaatcctttagcccacccagtattttctgttgctcagacggacctgcaggcattctccatgcagaacggtctgaatggacaagtggatgtctcacttgcttctgcagcctctgctgtggagagcctgaagccagcactccttgctggccagcctctagtgtatgtgccctctgcctcactgttcatgctgtatggaagtctgcaggagggaccagcgtcagggtcagggtcagagagggatgacagaagctcagaagccccagccacagtagagctgtcatctgcaccctcagctcagaagcgcctctgtgaggagaggaaacctcaggaggaggatgagccagccactaaaaggcaaagtagggaatatgaagacggcccgctgtcgcttgtcatgcccaagaaaccctcagattccacagaccttgcctctcccaagactatgggtaacagggcatctatacccctcaaagacattcatgtgaatggccaactccctgctgcagaagagatttcaggaaaggcaacagcaaactctcttgtttcttctgagtggggaaatccttcaagaaatacagatgttgaaaagccttcaaaagaaaatgaaagcaccaaagagccttctttgctacaatatctttgtgtgcagtctcctgcaggattaaatggtttcaatgtacttttatctggcagtcaaaccccccctactgtgggcccgtcctcaggtcagctgccgtctttcagtgtcccttgcatggtcttaccatctccacctctgggcccttttcctgttctctattctcctgcaatgccgggcccggtttcttctactcttggtgctctcccaaacacaggacctgtgaatttcagcttgcctggccttggatcaatagcccagcttctcgtcggccccacagctgtggttaatccaaagtcgtccacactcccttctgcagaccctcagcttcagagtcagccctcactaaacctaagtccagtgatgtcaaggtcacacagtgtcgtccaacaacctgagtcccccgtttacgtgggacatccagtctcagtagtaaaattacatcagtcaccagttccagtgacccccaagagcatccaacgcacacatcgtgagacgtttttcaagacacccggcagccttggagaccctgtcctgaagagaagagaaaggaaccagtcacgaaacaccagctcggcccagaggagactagaaatccccagcggcggcgctgactaacctgccgctttgccaggtgggggtgggatcaaacgccctgagagtcccggatgtccgaggcgggatgcaaaccatcccgtcctgagcacgggtccttcctctctctttcatccacacttctgttaacttcccaccaccatcaatcatctgatttcctgaaagtaattaattgtgcatttaataccagttagagttccgactctgcatggtgtcacagtgaaagcgccgactgacttatggttttgattcaagaatcgtcttattctggaagtagatctgaataggctaccggagccttgtttttctaaaggggggcgctgtctagcacttaactagggtaagcattcttaacatgtatttccacttgccctgagtaaatctgtggtgagagaagcttcctttctgcagtttaaaaaagctactgcttccttaggcttcatcaggaagccaccttcagttgtgaatcctatggtgttatttattttgttcctgaaatgggatttagtgcaaaaagtttacaactacagtctttaacacatttttttcagggtatgacgacttgaatgtttatacttttattctataatttgccctgcacttattttacaacctagtaataatgtggataaatgtatctacatgacacatgtcaagaccaaaataactgtgaatgacacaccttgctgtaaatgaactgtgctaaccctgactgtgggcttgagaacaaagatgaactctagaactctagcagcctaactgctgcttctcaaataactgtgtgaacagtgagatattactgtttgtttctaaaaatcctactgtgcccagtttccttcactacatgccctgcattttttatttaaatatttagctgtagcgccatcagatatggatgccttctaacaattgctgtttgtaaaataaatcaggatggtagaaagtgattatatggaaaattggaacctggatgagaccttttcgttgaattctgaagagtaatgatgtgaaaattgatacagggcaagagatgattcttttgtttttcttctacttcatgtccagaagagtaagagggaaaatggacatatgtttcatatccaagggtattcaaactgtagttagttggtacctctgaaaaatgagaatggtgagcgcacgggttggttgttctagcatgaatacaattctggaaactgttatgcaatttcccttttttaacccacattactttaggggtgcattaagtcgccaaactatactagttctttgtattcctagacttgctgatatttacctctctcttgtctcttcagagtaaatggttcccttctttccttcctactttccttcattctctcttccttccctccttcctacttcttttcttccttcctcttcctctcttaaaactatcttagatgtagaatcctggtgtagggttttattttatttttattttttgacccaataaaatgttatatgaaagaatgaaaatattaatttaagagactctgggagtctgaataaagtagctttatattaactacaggataatattagccttattacccccacaagattttttaaaacttgaggtaggtagctacattaaataaatttgctacttatataaaaatttttatcaacactaaacttttaaagtttacaagttttttttttcttttttacagtcttctatagagttaggttaaaaatgtggttctaaccatcaacaattgcatggttaaatgaccctgaactaaaactgatgggttccctatcaaaacaaataaaaatatacctttttcaggtttcaatctgtgcagggtatatgcatgttaattctaccatgcttaagaacttccacaaaatatttcatggagaggtctgcatttagacggaaacagaaattgcttttcccctcactgttcctgaatgctctatacttgttttaacatttttgctatctttttttattattctgatcatgatatgaccatttaacctcagaattcataattcctgaggggtgttaagaagcagtcccattggtgaggatattatgacttggtgaccattcttaggagtagaaaaccaaggacaattgcttctgtattcagtatccacttcttaatgtggctttatatgtaaaaataataatgcagtggttgtttctgtcaggaaaataaatcttacagaacaactggtggaattgaagctgctgcgctagacttggatattttgggtagtgaagaagcaatggcaatcttgagtctattattgtataatttagtaaaagaaaaaaataatcgttggtggtcctactaagagaatgcagcttttttgagttgtcacagaggctgtgtgtgccctacactgaccagggtttgtaaaaccctttcattctggtacaagagtcgggggtataacttttatacttgaatctacctaccaagtttacatttctcaattcctttttgtaaggtgctatttctgtatttaaataactttcttttaacgtaaagctgctttctgcttatcttattgcactgctagttgtatgtaggtattaattttattgctgcttactgcttttgttttcttattatttagctctgctctttttcctaatggctatattatctatagctatttacttgtaactgtactacatgtaaactgattttttgttctgattttttttctaatatttttaggaaaatattaagctttataaaatagcaataaaaaataattcatttaagaag

SEQ ID NO: 263169 - DNA, 5297 bp, Artificial Sequence
  derived and/or modified sequence
gatccaggctggagttgcgctcggccggtctgagcgctggcgctgcccggacgccgcggggtccccgccagcccagggcactcggcgcggggatctgcgcgcctcgctctcccttcccgatgccgccgcccggctgctgatcgccgcaccaccttccctcatcggcttgggtccgtggaggtccctgcagaggcaggaagcctccttaggaaagcagggatggaggtaaattgtttaacactaaaagacctgatcagccccaggcagcccagactagattttgcagttgaagatggggaaaatgcacaaaaggaaaatatatttgttgatcgatcaaggatggccccgaagactccaataaaaaatgaaccaattgatttatcgaagcaaaaaaaatttactccagaaagaaatcccattactccagttaagtttgttgacagacagcaagcggaaccatggacacccacagctaacctgaagatgctcattagtgctgccagcccagatataagggaccgggagaagaaaaagggactattccgacccattgaaaacaaggacgatgcatttacagattctctacagcttgatgttgttggggacagtgctgtggacgaatttgaaaagcaaaggccaagcagaaaacagaaaagtttaggactcctgtgccagaagtttctagctcgctatccaagttatcccttgtcaactgagaaaactaccatctccctagatgaagttgctgtcagtcttggtgtggaaaggagacgcatctatgacattgtaaatgtgctggagtcgctgcatctggtcagccgggtggctaagaatcagtatggctggcatggacggcacagcctgccaaaaaccctgaggaacctccagagactaggagaggagcagaaatatgaagagcaaatggcctacctccaacagaaagagctggacctgatagattataaatttggagaacgtaaaaaagatggtgatccagattcccaggaacaacagttactggatttctctgaacccgactgtccctcttcatctgcaaacagtagaaaagacaagtctctgagaattatgagccagaagtttgtcatgctgttcctcgtctccaaaaccaagattgtcactctggatgtggctgccaaaatactgatagaagaaagccaagatgccccagaccatagtaaatttaaaacaaaggtacgacgcctctatgacatagccaatgttctgaccagcttggctctgataaagaaagtgcatgtaacagaagagcgaggtcgtaaaccagccttcaagtggatcgggcctgtggacttcagctcaagtgatgaagaactggtggatgtttctgcatctgtcttaccagaattgaaaagagaaacatatggccagattcaagtctgtgcaaaacagaagctggctcgccatggttcttttaacacagttcaggcttctgagaggatccagaggaaagtgaactcagaaccgagcagcccgtacagagaagaacaaggatcaggtggctactctttagaaattggaagcctggcagctgtctatagacagaaaatagaagacaattcacagggaaaagcctttgccagtaagagagtggtgcctccatcaagcagcttggaccctgttgctcctttccctgtcctctctgttgacccagaatattgtgttaatcctttagcccacccagtattttctgttgctcagacggacctgcaggcattctccatgcagaacggtctgaatggacaagtggatgtctcacttgcttctgcagcctctgctgtggagagcctgaagccagcactccttgctggccagcctctagtgtatgtgccctctgcctcactgttcatgctgtatggaagtctgcaggagggaccagcgtcagggtcagggtcagagagggatgacagaagctcagaagccccagccacagtagagctgtcatctgcaccctcagctcagaagcgcctctgtgaggagaggaaacctcaggaggaggatgagccagccactaaaaggcaaagtagggaatatgaagacggcccgctgtcgcttgtcatgcccaagaaaccctcagattccacagaccttgcctctcccaagactatgggtaacagggcatctatacccctcaaagacattcatgtgaatggccaactccctgctgcagaagagatttcaggaaaggcaacagcaaactctcttgtttcttctgagtggggaaatccttcaagaaatacagatgttgaaaagccttcaaaagaaaatgaaagcaccaaagagccttctttgctacaatatctttgtgtgcagtctcctgcagtcaccagttccagtgacccccaagagcatccaacgcacacatcgtgagacgtttttcaagacacccggcagccttggagaccctgtcctgaagagaagagaaaggaaccagtcacgaaacaccagctcggcccagaggagactagaaatccccagcggcggcgctgactaacctgccgctttgccaggtgggggtgggatcaaacgccctgagagtcccggatgtccgaggcgggatgcaaaccatcccgtcctgagcacgggtccttcctctctctttcatccacacttctgttaacttcccaccaccatcaatcatctgatttcctgaaagtaattaattgtgcatttaataccagttagagttccgactctgcatggtgtcacagtgaaagcgccgactgacttatggttttgattcaagaatcgtcttattctggaagtagatctgaataggctaccggagccttgtttttctaaaggggggcgctgtctagcacttaactagggtaagcattcttaacatgtatttccacttgccctgagtaaatctgtggtgagagaagcttcctttctgcagtttaaaaaagctactgcttccttaggcttcatcaggaagccaccttcagttgtgaatcctatggtgttatttattttgttcctgaaatgggatttagtgcaaaaagtttacaactacagtctttaacacatttttttcagggtatgacgacttgaatgtttatacttttattctataatttgccctgcacttattttacaacctagtaataatgtggataaatgtatctacatgacacatgtcaagaccaaaataactgtgaatgacacaccttgctgtaaatgaactgtgctaaccctgactgtgggcttgagaacaaagatgaactctagaactctagcagcctaactgctgcttctcaaataactgtgtgaacagtgagatattactgtttgtttctaaaaatcctactgtgcccagtttccttcactacatgccctgcattttttatttaaatatttagctgtagcgccatcagatatggatgccttctaacaattgctgtttgtaaaataaatcaggatggtagaaagtgattatatggaaaattggaacctggatgagaccttttcgttgaattctgaagagtaatgatgtgaaaattgatacagggcaagagatgattcttttgtttttcttctacttcatgtccagaagagtaagagggaaaatggacatatgtttcatatccaagggtattcaaactgtagttagttggtacctctgaaaaatgagaatggtgagcgcacgggttggttgttctagcatgaatacaattctggaaactgttatgcaatttcccttttttaacccacattactttaggggtgcattaagtcgccaaactatactagttctttgtattcctagacttgctgatatttacctctctcttgtctcttcagagtaaatggttcccttctttccttcctactttccttcattctctcttccttccctccttcctacttcttttcttccttcctcttcctctcttaaaactatcttagatgtagaatcctggtgtagggttttattttatttttattttttgacccaataaaatgttatatgaaagaatgaaaatattaatttaagagactctgggagtctgaataaagtagctttatattaactacaggataatattagccttattacccccacaagattttttaaaacttgaggtaggtagctacattaaataaatttgctacttatataaaaatttttatcaacactaaacttttaaagtttacaagttttttttttcttttttacagtcttctatagagttaggttaaaaatgtggttctaaccatcaacaattgcatggttaaatgaccctgaactaaaactgatgggttccctatcaaaacaaataaaaatatacctttttcaggtttcaatctgtgcagggtatatgcatgttaattctaccatgcttaagaacttccacaaaatatttcatggagaggtctgcatttagacggaaacagaaattgcttttcccctcactgttcctgaatgctctatacttgttttaacatttttgctatctttttttattattctgatcatgatatgaccatttaacctcagaattcataattcctgaggggtgttaagaagcagtcccattggtgaggatattatgacttggtgaccattcttaggagtagaaaaccaaggacaattgcttctgtattcagtatccacttcttaatgtggctttatatgtaaaaataataatgcagtggttgtttctgtcaggaaaataaatcttacagaacaactggtggaattgaagctgctgcgctagacttggatattttgggtagtgaagaagcaatggcaatcttgagtctattattgtataatttagtaaaagaaaaaaataatcgttggtggtcctactaagagaatgcagcttttttgagttgtcacagaggctgtgtgtgccctacactgaccagggtttgtaaaaccctttcattctggtacaagagtcgggggtataacttttatacttgaatctacctaccaagtttacatttctcaattcctttttgtaaggtgctatttctgtatttaaataactttcttttaacgtaaagctgctttctgcttatcttattgcactgctagttgtatgtaggtattaattttattgctgcttactgcttttgttttcttattatttagctctgctctttttcctaatggctatattatctatagctatttacttgtaactgtactacatgtaaactgattttttgttctgattttttttctaatatttttaggaaaatattaagctttataaaatagcaataaaaaataattcatttaagaa

SEQ ID NO: 263170 - protein, 289 aa, Artificial Sequence
  derived and/or modified sequence
MYFLTPILVAILCILVVWIFKNADRSMEKKKGEPRTRAEARPWVDEDLKDSSDLHQAEEDADEWQESEENVEHIPFSHNHYPEKEMVKRSQEFYELLNKRRSVRFISNEQVPMEVIDNVIRTAGTAPSGAHTEPWTFVVVKDPDVKHKIRKIIEEEEEINYMKRMGHRWVTDLKKLRTNWIKEYLDTAPILILIFKQVHGFAANGKKKVHYYNEISVSIACGILLAALQNAGLVTVTTTPLNCGPRLRVLLGRPAHEKLLMLLPVGYPSKEATVPDLKRKPLDQIMVTV

SEQ ID NO: 263171 - DNA, 870 bp, Artificial Sequence
  derived and/or modified sequence
atgtattttctgacaccgatcctggtggctatcctctgtattctcgtggtctggatctttaaaaacgccgatagatccatggagaagaagaaaggagaacctaggaccagggccgaagcccggccatgggtggacgaagatctgaaagatagctccgatctgcaccaggccgaggaggatgcggacgaatggcaggagtctgaggagaacgtggaacacatcccgttttcgcacaatcattaccctgagaaagagatggtaaagcgctcccaagagttttacgaattgctcaacaagagacgatccgtccgattcatttcaaacgagcaggtcccaatggaagttatcgacaacgttatccgtacagctggaacagcccccagcggcgcgcataccgagccatggaccttcgtcgtagtcaaagaccctgacgtgaaacataagattaggaaaattattgaggaggaagaggagatcaattacatgaagcgcatgggccatagatgggtaaccgatttgaaaaaattgcgtaccaattggattaaggagtatttagataccgcgccaattctgatactcatcttcaagcaagtgcacggcttcgctgcgaatgggaagaagaaggttcattattataatgagatctcagtgtctatcgcctgtggtattctgttggccgcactgcagaatgccgggttagtcactgttaccacaactccacttaactgtgggccccggctgagggtgctgttggggagaccagcacacgaaaaattgctcatgctcctccccgtgggttatccgtccaaggaggccacggtgccagatcttaaaagaaagcccttggaccagatcatggtgactgtgtag

SEQ ID NO: 263172 - DNA, 8742 bp, Artificial Sequence
  derived and/or modified sequence
gaagagttctgcactttgttccttccctggcacacctgtgtctgcattccttctatctcccggcattctccactcctgtctctgtgtgtttaaaaaccggtgtgggaagtgtgcacgcctgtgacgtcagactccagaccatgtatttcctgactcccatcttggtagccattctctgcattttggttgtgtggatctttaaaaatgccgacagaagcatggagaaaaagaagggggagcctagaaccagggccgaagctcgcccctgggtggatgaagacttaaaagacagcagtgacctgcaccaagcagaagaagatgctgatgaatggcaagaatcagaagaaaatgttgaacacatccccttctctcataaccactatcctgagaaggaaatggttaagaggtctcaggaattttatgaacttctcaataagagacggtcagtcaggttcataagtaatgagcaagtcccaatggaagtcattgataatgtcatcagaacggcaggaacagccccgagtggggctcacacagagccctggaccttcgtggttgtgaaggacccagacgtgaagcacaagattcgaaagatcattgaggaggaagaggagatcaactacatgaaaaggatgggacatcgctgggtcacagacctcaagaaactgagaaccaactggattaaagagtacttggatactgcccctattttgattctcattttcaaacaagtacatggtttcgccgcaaatggcaagaaaaaagtccactactacaatgagatcagtgtttccatcgcttgtggcatcctgctagctgccctgcagaatgcaggtctggtgactgtcactaccactcctctcaactgtggccctcgactgagggtgctcctgggccgccccgcacatgaaaagctgctgatgctgctccccgtggggtaccccagcaaggaggccacggtgcctgacctcaagcgcaaacctctggaccagatcatggtgacagtgtaggcagggccccccaagggagtggcagggagatggcgcccctgcttttccctgagcctctcgcctgctcctcttgggtctcttggctgctctttctccaggtgtcaggtcccctcattgctcttctcaggtggccacactatgtcaagaagcctctccacactctgtggcacttccagtcccataaatcctgtttcttatccactttggaaatgcatgaacactttacaaagaacatgcccgggtttttacattttaaaagttattctagacaatcactattggcttttttcttttatttttaaaaaactcacatagaggagacaatcagaaatttaccatagtcccaagaattcagctacatgatgactcgaatttaaatttagattaatcaaatggtctcctgttctctgatttctggtggcttttagacactaatttttgagaactacttttttttttttaccaaacttcagggacactctgctagttttgaataagtaaccatcaaagttactaaaacatggccaggcgcagtggctcatgcctgtaatcccagcactttgggaggccgaggtgggcagattgcctgagctcaagagttcgagaccagcctggccaacatggtgaaaccccatctctactaaaaatacaaaaaattagctgggcatgcacttgtaattccagctactcaggaggctgaggcaagagaactgcttgaatccgggaggtagagattgcagtgagtcaagatgctgagatgccaccactgcactccagcctgggcaacagagcgagaacctgtctcaaaaaaaacaaaaacaaagttactaaaatgtcaccttcacagaacaggacagggtacccttgggtcgcacgggcctggctggcatgtaaacggtcagttgcactgcctagtggtttggtagatctgacttgtaagcagttcatagaagctgctcaatactcaagaatcttgcaagacagttattaaacattcatagcttgaaattgcccatggtgggagagtttacatcacaaccactacaaatcagcacttgctttcttcttcttaaagagagctgcttaccatacatagcacccacagtgtctcccttctcttctaccccaacccctgaaacacactgacccctattctccagatgacagcacagctgtttgggactgatagggtcacagttgccaggttgggaatgctagatgtagtcttcacccatcaccttctgtcgtcctcccaggggtgtcatatttacagaggcaaactcttacagcttggatgatttctcatcaagcaactctactcacctctttttcccctttccctgtgcgtttcttcttcttgtcctcattttccttgagaaaactctctctataaaaaatttccatagagtatgtggctgataaacaacagaaatttgtttctcacagttctggaggctggaagtccaaggtcggggtgccctcatggtcaggtgctggtgaggaccctgatctgggttgcagactgctgacttcttattgtgtcctcgtggtagaaagagggttagagcctctggcatgccttttataagggtactaatcccatcatgaggccccgtccttatgacctcatcacctcccaaaggaccccctcctaataccatcacattgggggttagggtttcaacatatgaattgcgggggacacaaacattccgtccatggcacctacttcatagggtttggcatgctgctcggtacatggttaacattcataaatggtgggggcccttactgtggtagaaaccattgtcactgcaaggcagccctgcttgggattcaggtgaacaaatgtaacgtgggtgggtgagggactccctcctcttcagagaagccctcctgtggctcaggggcagctgcagggccagatggagttggcctgcagggagtcagccttaccccatcagagaccaacttgaaagatttttttctctgtgtagttcgtgttatcaatctgatctgcagccaggttatttacttctgaagcattggagttatcgattgccattgccccatggttctcactctttgcaggcactcttcaaatttttattttaaaaattataatgcaaacatctggccatcaccttaaccaagtgacaaagtcctagcacaccattaatggtaggataactgacattaagtgttcctgctgggatgaattatgaagtattccttccaaagatgtcaatggaaactaatcgagtcttacacctaattttcagtttacagtaaatacagaggataaagaagttaatggcatggtggaataaccaaaatgtgtatcattctacaaaaaaataggcctggactatttaaggagtgagtgtcactgtgggaagaataagagggggactgtcttgtccttgctactcaaagagtggtcctgggcctgtatcatcattgggaccacctgggcgcttgttagaatcaaagactctcaggcctcacctagacatccagaatcaaaatctgcattttaacaagatgcccaggtgatctgcatgcctgttaaagtctgagctctgttgcagataaccagagacccaacaaccaaaggcaaagcgtaagccttgattggattttggtttaggaaaaatctcataggtataaaagacaactgggaatgttgaatgtggatctggtggtaggtgatattgttagtgatgtgagtgatgcctgctgaagtactgagagatgaagcatcatattgacaacttactccaggaaaaaaggtgtgtgtataggtgtgtgtttggagagtgtgagcgagaactaacatggtaaaatgttaggtggagcatatacagttctcattatactcttattttaaatttatatttgaacacagtcaaatctgaatggaaatacatttaaataagcatttctttcagtcatataagtaatttgcctaaaaatgccctctaagtccatcattaggttaagcgatttactgaaggtgcagatatcatgcttatttcattgggttgttttggaatgtcccccacttggagagtttgaggaatggaaatgagaatcggaggagaaataaggccagaggctcacattgcttgcagggaaccgactgagtaatgaagaagaggaaggaagcccttggaaggaacgtaaaatccatttcagcctgccgccccttggaatggagggtcttctagggaccagaaacaccagacacttcttctgccccaagcacaccccacactaatttctgctgcagcatcacgatcagggcaaatcagcacagccccccagccatcagtggtgtctagaaaagtaaggataattttcttccttctcactgcagccccaagctcttattaaccttcttttatgtgttcattaaatgcagtcatgtgacaactgtgttcaaagttagaaatagtggtcggggaggcttatagatcctcttgctgttctgaggccttaaaaccaaaaaaataatggaatgattgcatcactgcgaggaagtatacttaattaagaaagttgaaaatggtttgtgtcttactaataggactcacctgaagactctactttgccaagagggaatttttaactcaaagttgtgtcagccagcacggggtagagccatggtcctcatacttgctggcatccctcatctggtggtctgttaaagcacagattgctgggccgcaccctcagggtgtgtgattgtgtgattcagtattgctgggtggtgcccaaatgctccagttctaatgtattcccaggtgttgctgatgctggtgattgggtaccacattttgagaaccatggggcattggcaatcaacaaatgcaatgcttgtgacttgacgtgataaaagttcatttattgggcaggcaaagtcctctgcaggcctggaaaccctccgagacaattacttgcatggggtaacccagtaatactgtgggatgcaacttctagggcatggctgcctccttcctagaggcagcagggggagaaaacactggaagaggtcaccccaacaattccatcgtaccttggcctaggagtgacctcctcagtctcacaaccctttggctagaactagtcatgtgacctcacaggaggtggagcagtgtcgtcaatgttatcatccccctgcacctgcaaggaaggaggcccagatgtgtgtaggtgctggatgtctcttccccaaaacatataactctggatttggaaaacaaaactggatataacagaaaagaaaaggaggggagaaggaaagttgaagaaattggtgaaatcagaataggacagtgaaaggcataaagattttcttctgaaacgctaagatcggttgatatttgtctaatacagctttaaatagagtatcactttgggccaaagaaaattgatataaacatacataaagtggaactaagattgacttcttcctagacatctctgcctctgtccacaaaatggaaacttccatcaaggagtactggaggacagttcagtatttcttcttatttgctcctccctatgaaaggaagagtgacttctctgctgcatgatattgggggtaaatagttattgcacatttgctcaaaccccagcaaagtgcaccccattttaagccaaatttacaaacttacaaagatgatccaccaatagttttctctatttactttattcttgctctgtcacccaggctagaatgcagtggtgtgattatagctcactgcagcctccaacttctggactcaagtgatcctcccaccttagcttcccaggtagctgggatacaggtgcacgccaccacacccaggctagtttttctaaatattggagttcccaaagagtattcaaactgatgtgatattttaaaagacattttgtaagcatcttttaggaatatcagtaagtggaagaaaaacacatagttatcagtggatattatgccagagaggcatgagaaatataattttattttgctaggtatcagcagagtgccctcttataatttgtgtgaaatggaaacaaaggtaacatcgtgttttcaattcacacatatatacaagtaatgagaggtccagaagaaatgtggcttcagctctgctgctactgtgcctcccttctcctgccccactcagcccacaaaataggctggacactcaaaaaacgttgcgtttatctaccttttagagagggtgaatagcagagaactggaggtgggaatggtaaggaactcccagcagggtagtggagggaatgggctgacgcatctaaggctgatgccaggtctgctccctatctgggtggcctcagcaaatgacgtccagcacatccaggggcaggctcaagggagaacagcccccaaagctaagatcctgccaagctaaatacagtagttctaatgaaatgtgagaggctataatcccatttgggaaattcctaaaaagtcatgaggcaggggattggtttatgttattatcatgacctgagagtcatggctcagagccaaatgttcaggattgaattcaacagcatttaaatgtctttagagcaggatggaaatatgttagcaatgcctgcagagtgccaagtaaacgcaaaagccaatgagatcataaaggaagttgttagctaacctaggtggagtcgccaacttccttctactctaataattaaaaataaaaataatacttgggaggtaactggaataaaggttctaaaatcaaaaccctctgaagggtgaaaactgggagcctcctgttcccatagtaaccacagcactcagggcactgtctcccagcgctggagtactgtcttatgaccagagatcctaagcaacctctgctcatctgagttgtccaccatattgtgggcatgagtccttgacaatagtaaatagcacctctgttcccttattgggtaaatgattttccaactctgggaatgtgtagaattcattatggaaataatgcaataattcaaatccataatattgatactttcatgttaagtttaggactaatcttgtgtatgctccttaagtgatttgaatctttaaaaagcttatgattccaatttgaaatgtgaaattgattttacgtttgtgatttgaagttgaaaggtataagaatatttaacttagctcatgaaaagtattagactagatttactataagtttaatgtattagatttacaagagatgcttaaatatatgagaatgttttgtcttaattggttataatcttgtcatatcaatgatttgaagtgctaaaatagaaaattaaatatgataaattacacaagaagtttagaatgtttaaaagattttaataaacaaagcctataactaagactgatgctttaagggagtttggcttattcaacttgagttaatcaaacattaattaaagccccccttccccaaagagatttgttttatttatttgtttactagttttataaataggataataaaatgtgtgtatgaggtcagaatgcttttgacagaagtaatacaaacaaaaaaacctcactataacccaaacaaataagggattatttttccctcctagtgagaagtctggaggtagatattagatgctggtctattgcttcaatgaagttagtgccaaagtctcagtggttctcttggtctttcttcataaccaccggatgctgttatagcttcaccaatcacaacaagcacagtgcttggaacataataggtgctcaataaatattcagtacatattgaatgtgtgcagaaatatatctcaatctagtcataaaattttagaatgcaagatctgaaagggacatgggaatctgtgtttttaacgtgttccaggtgattctgctgaccaggtgagtatggtaaatgtggcaagtattctcaagtgagctcatcagtcccagggctgttagcaccttccatctgccaggccctccctggtctagaccttcagccttgaccttgccctgaaacgccaaactcttactcccagctgctttctctgtccctccacttagatgttagtaggcaccacaaccttttaatgctcaaaatactacttttgagtcctttccaccccttacttggcccctcaattcatactttttgggatggagcctcaaatccagaaatcttctgtattagtccattctcacactgctaataaagaatacctgagactgagtaatttataaaggaaggaggtttaattgattcacagttcagcatggctggggaggcctcaggaaacttacaatcatggcagaaagaaaagcaaacatgcccttcttcacatggtgacaggaagcagaagaatgacaactgagtgaatggggaaaccccttataaagccatcagatctcatgagaactcactcattctcatgagaataacatgggggaaactgcccccattattcaattatcccccatcagttctctcccatgacatgtggggattatgggaactacaatgcaagatgagatttgggtgaagacatagccaaaccatatcatcatcttaaatttctgtgattcttttattctgcacatccaaatccatgagcaagttatactgactttatctctgaatattgaccatgggaggggaacaaggagaagcagtgtgaacaggaaaagcatgctgcctgctgctgtgaataataacatatcttgctctga

SEQ ID NO: 263173 - DNA, 870 bp, Artificial Sequence
  derived and/or modified sequence
atgtacttcctgacccccatcctggtggccatcctgtgcatcctggtggtgtggatcttcaagaatgctgaccgctccatggagaagaagaagggggagcccaggaccagggctgaggcccggccctgggtggatgaggacctgaaggacagcagtgacctgcaccaggccgaggaggatgctgatgagtggcaggagagtgaagaaaatgtggagcacatccccttcagccacaaccactacccagagaaggagatggtgaagaggagccaggagttctatgagctgctgaacaagagaagatctgtgcgcttcatcagcaatgagcaggtgcccatggaggtgattgacaacgtcatcagaacagctggaacagcccccagcggggcccacacagagccctggacctttgtggtggtgaaggaccctgatgtgaagcacaagatcaggaagatcatcgaggaggaggaggagatcaactacatgaagaggatgggccaccgctgggtgacagacctgaagaagctgcggaccaactggatcaaggagtacctggacacagcccccatcctgatcctgatcttcaagcaggtgcacggctttgctgccaacgggaagaagaaggtgcactactacaatgagatctctgtgtccatcgcctgtggcatcctgctggccgccctgcagaatgccggcctggtgacagtgaccaccacccccctgaactgtggcccccggctgcgggtgctgctgggccggcctgcccacgagaagctgctgatgctgctgcctgtgggctaccccagcaaggaggccaccgtgcctgacctgaagaggaagcccctggaccagatcatggtgacagtgtag

SEQ ID NO: 263174 - DNA, 870 bp, Artificial Sequence
  derived and/or modified sequence
atgtacttcctgacccccatcctggtggccatcctgtgcatcctggtggtgtggatcttcaaaaatgccgaccgaagcatggagaagaagaagggagaaccacggacacgagcggaagcgcggccttgggttgatgaggatctcaaggatagttcggacctgcaccaagctgaggaggatgctgacgagtggcaggaaagtgaagagaatgtggagcacattccatttagtcataatcactacccagagaaggagatggttaagaggtctcaagaattttacgagcttttaaacaagcggagatccgtccgatttatctccaatgagcaggttccaatggaagtgattgacaacgtcattcgcacagccggcaccgcaccctcaggggcccatactgagccgtggacatttgtcgtggtgaaagaccctgacgtcaaacacaaaattcgcaaaattatagaagaggaggaagaaataaactatatgaaaaggatgggccaccggtgggtgactgatctgaagaaacttcgcaccaattggatcaaggagtacctggatacagcaccaatccttatcctgatattcaagcaggtccacggcttcgcggcgaatggtaagaaaaaggtgcactattataatgaaatttcagtcagcattgcctgcggcattctactggccgcactgcagaatgccggactggtgaccgttactaccaccccccttaattgcgggcccaggttgcgggtgttactgggcagacctgcccatgaaaagctgttgatgttactgccagtggggtatccctccaaagaagcaaccgtccctgatcttaaaagaaaaccactcgaccagatcatggtgactgtctag

SEQ ID NO: 263175 - DNA, 870 bp, Artificial Sequence
  derived and/or modified sequence
atgtattttctgactcctattctcgtggcaattttatgtatcctggtcgtgtggatcttcaagaacgccgatcgctccatggaaaaaaaaaaaggagaacccagaactcgggcagaggccagaccgtgggtggacgaagacctgaaggatagctcagacctgcaccaggccgaggaagacgccgatgagtggcaggaatctgaggaaaatgttgaacatatccccttttcccacaaccattaccctgaaaaggagatggtgaagagatctcaagagttctacgaactgctaaataagcggcgatcggtgcgtttcatttctaacgagcaagtgcccatggaggttatagacaacgtgataagaacagcaggcactgcacccagcggagcccacacggagccatggaccttcgtcgtggtgaaagatcccgatgttaaacacaaaatccggaaaattatagaggaagaagaagagatcaactatatgaagcgcatgggccacaggtgggttactgaccttaaaaagcttaggactaactggataaaggagtaccttgatacagcccctattctaatcctaattttcaagcaggtccacggcttcgccgctaatgggaaaaagaaagtccattattataatgaaatttctgtgtccatcgcttgtggtatactcctcgctgcactgcagaacgccggactcgtcactgttactaccacaccacttaactgcggtcctcgcctcagagtgctgctggggaggccagcccatgagaaactgctgatgcttctccccgtgggatacccttcgaaggaggccaccgtgccagatctgaagcgcaagcccctggatcagatcatggttaccgtctag

SEQ ID NO: 263176 - DNA, 870 bp, Artificial Sequence
  derived and/or modified sequence
atgtacttcctgacccccatcctggtggccatcctgtgcatcctggtggtgtggatcttcaagaacgccgacagaagcatggagaagaagaagggcgagcccagaaccagagccgaggccagaccctgggtggacgaggacctgaaggacagcagcgacctgcaccaggccgaggaggacgccgacgagtggcaggagagcgaggagaacgtggagcacatccccttcagccacaaccactaccccgagaaggagatggtgaagagaagccaggagttctacgagctgctgaacaagagaagaagcgtgagattcatcagcaacgagcaggtgcccatggaggtgatcgacaacgtgatcagaaccgccggcaccgcccccagcggcgcccacaccgagccctggaccttcgtggtggtgaaggaccccgacgtgaagcacaagatcagaaagatcatcgaggaggaggaggagatcaactacatgaagagaatgggccacagatgggtgaccgacctgaagaagctgagaaccaactggatcaaggagtacctggacaccgcccccatcctgatcctgatcttcaagcaggtgcacggcttcgccgccaacggcaagaagaaggtgcactactacaacgagatcagcgtgagcatcgcctgcggcatcctgctggccgccctgcagaacgccggcctggtgaccgtgaccaccacccccctgaactgcggccccagactgagagtgctgctgggcagacccgcccacgagaagctgctgatgctgctgcccgtgggctaccccagcaaggaggccaccgtgcccgacctgaagagaaagcccctggaccagatcatggtgaccgtgtag

SEQ ID NO: 263177 - protein, 292 aa, Artificial Sequence
  derived and/or modified sequence
MERGPVVGAGLGAGARIQALLGCLLKVLLWVASALLYFGSEQAARLLGSPCLRRLYHAWLAAVVIFGPLLQFHVNPRTIFASHGNFFNIKFVNSAWGWTCTFLGGFVLLVVFLATRRVAVTARHLSRLVVGAAVWRGAGRAFLLIEDLTGSCFEPLPQGLLLHELPDRRSCLAAGHQWRGYTVSSHTFLLTFCCLLMAEEAAVFAKYLAHGLPAGAPLRLVFLLNVLLLGLWNFLLLCTVIYFHQYTHKVVGAAVGTFAWYLTYGSWYHQPWSPGSPGHGLFPRPHSSRKHN

SEQ ID NO: 263178 - DNA, 879 bp, Artificial Sequence
  derived and/or modified sequence
atggagagaggccccgtggtgggcgccggcctgggcgccggcgccagaatccaggccctgctgggctgcctgctgaaggtgctgctgtgggtggccagcgccctgctgtacttcggcagcgagcaggccgccagactgctgggcagcccctgcctgagaagactgtaccacgcctggctggccgccgtggtgatcttcggccccctgctgcagttccacgtgaaccccagaaccatcttcgccagccacggcaacttcttcaacatcaagttcgtgaacagcgcctggggctggacctgcaccttcctgggcggcttcgtgctgctggtggtgttcctggccaccagaagagtggccgtgaccgccagacacctgagcagactggtggtgggcgccgccgtgtggagaggcgccggcagagccttcctgctgatcgaggacctgaccggcagctgcttcgagcccctgccccagggcctgctgctgcacgagctgcccgacagaagaagctgcctggccgccggccaccagtggagaggctacaccgtgagcagccacaccttcctgctgaccttctgctgcctgctgatggccgaggaggccgccgtgttcgccaagtacctggcccacggcctgcccgccggcgcccccctgagactggtgttcctgctgaacgtgctgctgctgggcctgtggaacttcctgctgctgtgcaccgtgatctacttccaccagtacacccacaaggtggtgggcgccgccgtgggcaccttcgcctggtacctgacctacggcagctggtaccaccagccctggagccccggcagccccggccacggcctgttccccagaccccacagcagcagaaagcacaactag

SEQ ID NO: 263179 - DNA, 1194 bp, Artificial Sequence
  derived and/or modified sequence
ggaactggaacatggtcggagccaaggacacaggactaacaggaaaggacacagactgctgtcaggacacatactaccacacacccgaggccaggaccctgctgacgtggcagacctccaccctggccccttactgccccccgcccctctcccccacctgccagctgccaacagggctctgccttgtgtctgccacacctgtcactgcctatccttgtccagggggggccccatcagcccctcctcagctgcccagcaaagcaagcagttagtggggaggggagggaacatggagcgggggccggtggtgggggcaggactgggggccggggcccgaatccaggcactgctgggctgcctgctcaaggtgctgctctgggtggcctctgccttgctgtactttggaagcgaacaggccgcccgccttctgggcagcccctgcttacggcgcctctaccatgcctggctggcagcagtggtcatctttgggccgcttctgcagttccatgtcaaccctcggactatcttcgccagccacggcaacttcttcaacataaaatttgtgaattcagcctggggctggacatgcactttcttagggggctttgtgttgctggtggtgttcctggctacacggcgcgtggcagtaactgccagacacctgagccgactggtagtaggggcagccgtgtggcggggagccggccgggccttcctgctcatcgaggacctgactggctcctgcttcgagccactgccccagggtctgctgctccacgagctgcctgaccgccgcagctgcctggcagccggccaccagtggcgaggctacaccgtctcctcccacaccttcctgctcaccttttgctgcctgctcatggcagaggaagcagctgtgttcgccaagtacctggcccatgggcttcctgccggcgccccactgcgccttgtcttcctgctgaacgtgctgctgctgggcctctggaacttcttgctgctctgtaccgtcatctatttccaccagtacactcacaaggtggtgggcgccgcagtgggcacctttgcctggtacctcacctatggcagctggtatcatcagccctggtctccagggagcccaggccatgggctcttcccccgtccccactccagccgcaagcataactgaaagaaataaaaaccatcgggcctggc

SEQ ID NO: 263180 - DNA, 879 bp, Artificial Sequence
  derived and/or modified sequence
atggagagagggcctgtggtgggggctggattgggagcaggtgcccgcattcaagccctactgggctgtttgctgaaggtccttttatgggtcgcatccgcactgttgtattttggcagtgagcaagctgcgcgccttcttggaagcccttgtctacggagactataccacgcgtggctcgcggccgtggtcattttcggccctctgctccagtttcacgtgaacccgaggacgattttcgcctctcatggtaacttctttaatatcaaattcgtgaactctgcttggggctggacctgcaccttccttggtggcttcgtgctgctcgtagtgtttctggccacacggcgtgtggcggttacagctagacatctcagtcggctagtggtcggcgcggcagtttggaggggcgcgggccgcgcctttttgctgattgaggacctgaccggttcctgcttcgagccactgccccaaggactgctcttgcatgaattgcccgaccgtcgatcgtgcctcgccgcaggccaccagtggaggggatatacagtctcatcacacaccttccttctgactttctgctgcctgttgatggcagaagaagcagcagtgttcgcaaaatacttggctcatggactgcctgctggagccccattgcgccttgtcttcctgctgaatgttctccttctgggactctggaacttcttactgctctgtaccgtgatttacttccatcagtacacacacaaggtggtgggcgctgcagtaggcacctttgcctggtaccttacctatgggagctggtaccatcagccctggtctccggggtcaccaggacatggattgtttccccgccctcacagttcccggaaacacaactag

SEQ ID NO: 263181 - DNA, 879 bp, Artificial Sequence
  derived and/or modified sequence
atggagcggggccctgtggtgggcgccggcctgggcgctggggcccgcatccaggccctgctgggctgcctgctgaaggtgctgctgtgggtggccagcgccctgctgtacttcggcagcgagcaggccgcccggctgctgggcagcccctgcctgcggcggctgtaccacgcctggctggccgctgtggtgatcttcggccccctgctgcagttccacgtgaaccccaggaccatctttgccagccacggcaacttcttcaacatcaagtttgtgaacagcgcctggggctggacctgcaccttcctgggcggctttgtgctgctggtggtgttcctggccacccggcgggtggccgtgacagcccggcacctgagccggctggtggtgggcgctgctgtgtggaggggggccggccgggccttcctgctgattgaggacctgaccggcagctgctttgagcccctgccccagggcctgctgctgcacgagctgcctgaccggcgcagctgcctggccgccggccaccagtggaggggctacacagtgagcagccacaccttcctgctgaccttctgctgcctgctgatggccgaggaggccgctgtgtttgccaagtacctggcccacggcctgcctgctggggcccccctgcggctggtgttcctgctgaatgtgctgctgctgggcctgtggaacttcctgctgctgtgcaccgtcatctacttccaccagtacacccacaaggtggtgggcgctgctgtgggcacctttgcctggtacctgacctacggctcctggtaccaccagccctggagccctggcagccctggccacggcctcttcccccggccccacagcagcaggaagcacaactag

SEQ ID NO: 263182 - DNA, 879 bp, Artificial Sequence
  derived and/or modified sequence
atggagcggggccccgtggtgggcgccggcctgggcgccggcgccaggatccaggccctgttgggctgtctgcttaaagtcctactatgggtggcgtcagctctcctgtacttcggctcagagcaggcagcccgactccttggttcaccctgcctgcggagactgtaccacgcttggcttgccgccgtagttatcttcgggcccctgttacagtttcatgtcaacccccgcacaatcttcgcatcccacggcaatttctttaacataaagttcgttaattccgcctggggttggacttgcacctttctggggggtttcgtcctcctcgtggttttcctggccacccgccgggtggctgttacagccagacacctctccagactggtggtcggcgccgcggtgtggagaggcgctgggcgcgcatttttgctgattgaggatctaactggatcatgtttcgaacccctgccccaaggattgttgcttcacgagcttccggaccggcgctcctgtctggctgctggacatcagtggaggggctacacggtatcctctcatacctttctgcttaccttctgttgcctgttaatggcggaagaggccgccgtgtttgctaagtatctggcgcatggcttgcccgccggcgcccccctccgcctcgtgttccttctcaacgtcctcctcctgggcctgtggaacttcctgctactttgcactgttatttatttccatcaatacacccacaaggtggttggcgccgctgttggaacatttgcatggtacttaacatatggttcgtggtaccaccagccttggtcccccggcagtcccgggcatggtctgttccctcggccccacagctctcggaagcacaactag

SEQ ID NO: 263183 - DNA, 879 bp, Artificial Sequence
  derived and/or modified sequence
atggagagggggcctgtggtcggtgccggattgggcgctggggctcggattcaggctctgcttggatgccttctaaaagtactcttatgggttgcatcagcactcctgtactttggaagtgagcaggcagcacggcttttgggcagtccttgtttgcggaggctgtaccacgcttggctggctgcggtggtgatattcggaccactgctccaattccatgtcaatcccaggacaatcttcgctagccatggcaatttctttaatattaaattcgtcaatagtgcttggggctggacctgtaccttccttggaggcttcgtgctgctggtagtcttcctcgctactcgccgagtcgccgtgaccgcacgtcacctcagccgactggttgttggggcagctgtgtggaggggtgcgggtagggctttcctccttatcgaagacctgacaggcagttgttttgaaccgctcccccaggggttacttctgcatgaacttcccgataggcgaagttgtctggccgctggccaccagtggcggggatacacagtctcatcacacacattcctgctgaccttttgttgcctactcatggcggaagaggctgccgtgtttgcgaagtacctggcccacgggctgccagccggagcgcctctgcggttagtctttttgttgaacgttctactgctgggcctgtggaacttcttgctgctctgcactgttatatatttccaccaatacactcacaaagtggtcggggctgccgtgggcaccttcgcgtggtacctgacgtacgggagctggtaccatcagccatggtcgcccggtagtcccggacatggcttgttccccagacctcacagttcaagaaaacacaactag

SEQ ID NO: 263184 - protein, 228 aa, Artificial Sequence
  derived and/or modified sequence
MEDSPLPDLRDIELKLGRKVPESLVRSLRGEEPVPRERDRDPCGGSGGGGGGGGGCSSSSSYCSFPPSLSSSSSSSPTSGSPRGSHSSALERLETKLHLLRQEMVNLRATDVRLMRQLLVINESIESIKWMIEEKATITSRGSSLSGSLCSLLESQSTSLRGSYNSLHDGSDGLDGISVGSYLDTLADDVPGHQTPSDLDQFSDSSLIEDSQALHKRPKLDSEYYCFG

SEQ ID NO: 263185 - DNA, 687 bp, Artificial Sequence
  derived and/or modified sequence
atggaggacagccccctgcccgacctgagagacatcgagctgaagctgggcagaaaggtgcccgagagcctggtgagaagcctgagaggcgaggagcccgtgcccagagagagagacagagacccctgcggcggcagcggcggcggcggcggcggcggcggcggctgcagcagcagcagcagctactgcagcttcccccccagcctgagcagcagcagcagcagcagccccaccagcggcagccccagaggcagccacagcagcgccctggagagactggagaccaagctgcacctgctgagacaggagatggtgaacctgagagccaccgacgtgagactgatgagacagctgctggtgatcaacgagagcatcgagagcatcaagtggatgatcgaggagaaggccaccatcaccagcagaggcagcagcctgagcggcagcctgtgcagcctgctggagagccagagcaccagcctgagaggcagctacaacagcctgcacgacggcagcgacggcctggacggcatcagcgtgggcagctacctggacaccctggccgacgacgtgcccggccaccagacccccagcgacctggaccagttcagcgacagcagcctgatcgaggacagccaggccctgcacaagagacccaagctggacagcgagtactactgcttcggctag

SEQ ID NO: 263186 - DNA, 1753 bp, Artificial Sequence
  derived and/or modified sequence
atgacttggatcaaacagcctaaatgggaagaaggacatttttgctgcatcaaggaagccgttaaactcctgctaagctaactagctcttttttatgggtccatgcacacgaccgaactcctctttcactgaccagagattatttctgacaacccaggatatcccgaaagcttggaggcatatggctggaaaatgaaacgacccaggacatcgtttctggctgcatcattattttgtgtcgcgtagtaccagatgggcagtcagtgagcggcgcagggatgtgaacggacggttttataatgtgaaaattttcccttggtaaagctaaaacagatttaatttccctctcttttctttcactacttccccctctttattccccctctgtctgcaatatcagtgaactcaactttgcagtgaggtggccaaaaagagagagaatgaggagatcttgatcatcttagtgtcggaggagtcgcagcggactgggaactgcagctgcgaccccccgcgtcctgtgcggatttcagggctgataccgcataggcggttatggaaaggacggtacaccggagcggcggaggatagagaccctggcccccggagaggtctgctgatttcgcagcagccttcgaagccgtggctgcctttcatctgctgcgttttattactattatcgccgttccggaaaagtcatggaagacagcccgctgccagacctcagagacatcgagctgaagctggggcgcaaagtacccgagagtctagtgcgctctctccgtggggaggagccggttcccagggaaagggacagggacccctgcggggggagcggtggtggtggcggcggcggcggcggctgcagtagcagcagcagctactgcagcttccctccctccttgtcgtcctcctcttcgtcctccccaacctctggctccccacgaggtagccactctagcgccctggagaggctagaaaccaagcttcacctcctcaggcaagagatggttaacctcagagccacagacgtcaggctcatgcgccagttgcttgtaatcaatgagagcatcgagtccatcaagtggatgatcgaagaaaaagccaccattaccagcagaggcagcagcctcagtggcagcctgtgcagtttgttggagagtcagagcacctccttacgtggcagctacaacagcctacacgatggcagtgatgggctggatggcatttccgtgggaagttatctggacacgttggcggatgatgtcccaggccatcagaccccttcagacttggaccaattcagtgacagctccctcatagaggactcacaggcactacacaagcgtcctaaattggattctgaatactactgctttggctagtgacagttttttgcatgggactggtgtgcaatgaacttgtatttatccttcttctccgctgctatatttttggtgtgatttttattttaataagatgacctttttaaaagaagctgattttgaaactgcttaatggtattgctgttgctcctaatacttctcatctgagctgatttatttttctctgttacatctctattttttatttattacaatgattttctcccttcttttacagtagcacaaacaaagtagggggaaaagaataagcaataattatgtttttgcttttgttttcagagcaatgggtcagggattacaagaaaaactttgctaaattttacaataaaccaaagtctgataacagttaa

SEQ ID NO: 263187 - DNA, 687 bp, Artificial Sequence
  derived and/or modified sequence
atggaggatagcccactgccagacctgcgggatatcgagttaaaactcgggcgcaaagttccagagtcactggttcgctcactgaggggtgaggagcctgtgcccagagaaagagaccgagacccatgtggcgggagtggaggcggaggcggtggcggcggaggatgcagtagctcttcctcttactgttcattcccgccttcactgagtagcagctcgagctcatctcctacaagcggctcccctaggggatcacacagcagcgcactcgagcgtctggaaaccaagcttcatcttctccgacaggagatggtcaacttaagagctactgacgttcgcttgatgcgccaactgctggttataaatgaaagcattgaaagcattaagtggatgatagaagaaaaggcaactattacgagccgaggcagctctctgtcaggctccctgtgctccttgctggaatcacaatccacctcactcaggggatcgtacaactcactccacgacggaagcgacggtttggacggcattagcgtgggaagctatttagacactctcgccgacgacgtacccggacaccaaacccccagtgatctggaccagttttcagacagctctctcattgaggatagtcaggctctgcataagaggcccaagttagattccgagtattactgcttcgggtag

SEQ ID NO: 263188 - DNA, 687 bp, Artificial Sequence
  derived and/or modified sequence
atggaggacagccccctgcctgacctgcgggacatcgagctgaagctgggcaggaaggtgcctgagagcctggtgcgcagcctgcggggggaggagcctgtgccccgggagcgggaccgggacccctgtggcggcagcggcggcggcggcggcggcggcggcggctgcagcagcagcagcagctactgcagcttcccccccagcctgagcagcagcagcagcagcagccccaccagcggcagcccccggggcagccacagcagcgccctggagcggctggagaccaagctgcacctgctgcggcaggagatggtgaacctgcgggccacagatgtgcggctgatgaggcagctgctggtgatcaatgaaagcattgagagcatcaagtggatgattgaggagaaggccaccatcaccagccggggcagcagcctgagcggcagcctgtgcagcctgctggagagccagagcaccagcctgcggggcagctacaacagcctgcatgatggcagtgatggcctggatggcatctctgtgggcagctacctggacaccctggctgatgatgtgcccggccaccagacccccagcgacctggaccagttcagtgacagcagcctgattgaggacagccaggccctgcacaagaggcccaagctggacagcgagtactactgctttggatag

SEQ ID NO: 263189 - DNA, 687 bp, Artificial Sequence
  derived and/or modified sequence
atggaggacagccccctgcccgacctgcgggacatcgagctgaagctggggcgtaaggtgcccgagagtctggtgcgttccctgaggggcgaggaacccgttccacgtgagcgggacagggacccttgcggtggctccggcggcgggggcggaggaggcgggggctgttccagttcctcatcctactgtagtttccctccatcactgtcctcttcctccagttcctccccaaccagcggaagtcctcgcggttcgcattcatctgccttggaacggttggagactaaacttcatttgctacggcaggaaatggtcaacctgcgcgcgacagacgtgaggttgatgagacagttattagttatcaatgagagtatcgagtccattaaatggatgattgaagagaaagctaccattacaagtaggggcagcagcctgtccgggtcactgtgttcactgttagagagccaatcgacgtcacttcgtggcagctacaactccctgcacgacggcagcgacggcctggatggtatctccgtgggctcgtacttagacaccctggctgatgacgtgccaggccaccagaccccaagtgatttggaccagttctcagatagctcactgatcgaagatagccaggcactccacaaacgtcctaaactggactccgaatactactgcttcggttag

SEQ ID NO: 263190 - DNA, 687 bp, Artificial Sequence
  derived and/or modified sequence
atggaggactcgccgctgcctgacctccgcgatatcgaattgaaactgggacggaaagtgcccgaatcgcttgtgcggtcactgagaggggaggaaccagtcccccgagagcgcgatagggatccctgcggcggaagcggcggaggaggcggtgggggtggcggatgctcaagcagttcttcttattgcagtttccctcccagcctctcaagcagctcctcttcttcacctacatcaggtagtccacgtggtagtcactcttcggctctagaacggctagaaacaaagctgcatctgctgcgtcaagagatggtgaacctgcgcgcaacagacgtacgccttatgcggcaactcttggtgatcaacgagtccatagaatccattaagtggatgatagaggaaaaagcaacgatcacatccagagggtccagcctgtctggctccttgtgctctctgcttgagtcccagagcacgtctctcaggggatcatacaattctttgcacgatggttccgacgggctggatggcatatctgtgggttcttacttagacacgctagccgacgatgtccctggccatcagactccatccgacttagaccagtttagcgactcctccttgatagaagatagccaggctctgcacaagcgaccaaaactggattccgagtactactgttttgggtag

SEQ ID NO: 263191 - protein, 503 aa, Artificial Sequence
  derived and/or modified sequence
MATQSDMEKEQKHQQDEGQGGLNNETALASGDACGTGNQDPAASVTTVSSQASPSGGAALSSSTAGSSAAAATSAAIFITDEASGLPIIAAVLTERHSDRQDCRSPHEVFGCVVPEGGSQAAVGPQKATGHADEHLAQTKSPGNSRRRKQPCRNQAAPAQKPPGRRLFPEPLPPSSPGFRPSSYPCSGASTSSQATQPGPALLSHASEARPATRSRITLVASALRRRASGPGPVIRGCTAQPGPAFPHRATHLDPARLSPESAPGPARRGRASVPGPARRGCDSAPGPARRGRDSAPVSAPRGRDSAPGSARRGRDSAPGPALRVRTARSDAGHRSTSTTPGTGLRSRSTQQRSALLSRRSLSGSADENPSCGTGSERLAFQSRSGSPDPEVPSRASPPVWHAVRMRASSPSPPGRFFLPIPQQWDESSSSSYASNSSSPSRSPGLSPSSPSPEFLGLRSISTPSPESLRYALMPEFYALSPVPPEEQAEIESTAHPATPPEP

SEQ ID NO: 263192 - DNA, 1512 bp, Artificial Sequence
  derived and/or modified sequence
atggccacccagagcgacatggagaaggagcagaagcaccagcaggacgagggccagggcggcctgaacaacgagaccgccctggccagcggcgacgcctgcggcaccggcaaccaggaccccgccgccagcgtgaccaccgtgagcagccaggccagccccagcggcggcgccgccctgagcagcagcaccgccggcagcagcgccgccgccgccaccagcgccgccatcttcatcaccgacgaggccagcggcctgcccatcatcgccgccgtgctgaccgagagacacagcgacagacaggactgcagaagcccccacgaggtgttcggctgcgtggtgcccgagggcggcagccaggccgccgtgggcccccagaaggccaccggccacgccgacgagcacctggcccagaccaagagccccggcaacagcagaagaagaaagcagccctgcagaaaccaggccgcccccgcccagaagccccccggcagaagactgttccccgagcccctgccccccagcagccccggcttcagacccagcagctacccctgcagcggcgccagcaccagcagccaggccacccagcccggccccgccctgctgagccacgccagcgaggccagacccgccaccagaagcagaatcaccctggtggccagcgccctgagaagaagagccagcggccccggccccgtgatcagaggctgcaccgcccagcccggccccgccttcccccacagagccacccacctggaccccgccagactgagccccgagagcgcccccggccccgccagaagaggcagagccagcgtgcccggccccgccagaagaggctgcgacagcgcccccggccccgccagaagaggcagagacagcgcccccgtgagcgcccccagaggcagagacagcgcccccggcagcgccagaagaggcagagacagcgcccccggccccgccctgagagtgagaaccgccagaagcgacgccggccacagaagcaccagcaccacccccggcaccggcctgagaagcagaagcacccagcagagaagcgccctgctgagcagaagaagcctgagcggcagcgccgacgagaaccccagctgcggcaccggcagcgagagactggccttccagagcagaagcggcagccccgaccccgaggtgcccagcagagccagcccccccgtgtggcacgccgtgagaatgagagccagcagccccagcccccccggcagattcttcctgcccatcccccagcagtgggacgagagcagcagcagcagctacgccagcaacagcagcagccccagcagaagccccggcctgagccccagcagccccagccccgagttcctgggcctgagaagcatcagcacccccagccccgagagcctgagatacgccctgatgcccgagttctacgccctgagccccgtgccccccgaggagcaggccgagatcgagagcaccgcccaccccgccaccccccccgagccctag

SEQ ID NO: 263193 - DNA, 1921 bp, Artificial Sequence
  derived and/or modified sequence
ggactggctgggctccacccaccttcttgctctaccagttcgcgctctcctccggcagaagtagcagctgcgctcttgctctctgggggagaacctggcgttatggccactcagtcagacatggagaaggagcagaagcaccagcaggacgaggggcagggagggctgaacaacgaaaccgcccttgcctccggggatgcctgcgggaccgggaatcaagatcctgctgcttccgtcaccacagtctccagccaagcatctccctcgggcggcgccgccctaagcagcagcacagccggttcttccgctgcagccgccacctccgccgccattttcatcaccgatgaggcctcggggctgccaatcatagctgctgtgctgacggagaggcattctgaccgccaggactgccgcagtcctcacgaagtttttgggtgtgtggtgcccgaggggggcagccaggccgctgtggggccccagaaggccactggccacgccgacgagcacctggcccagaccaagagccccgggaacagccgtcgtaggaagcagccctgccgcaaccaggctgccccggctcagaagcctccagggcggcgtctgtttcctgagcctttgccgccatcttctccagggttccggcccagcagctatccctgttccggggcttctacgtcgagtcaggcaacccagccaggccctgcactcctaagccacgcatctgaggcaaggcctgctacccgaagccgcatcaccctggtagcttctgctctccgcagacgtgcatctggtccaggccctgtcatccgaggctgcaccgcccagccaggccctgcttttccacaccgcgccactcatctagaccctgctcgtctaagccctgaatctgcgccaggccctgcccgccgaggccgtgcatctgtgccaggccctgcccgccgaggctgcgattctgcgccaggccctgcccgccgaggccgcgattctgcgccagtctctgccccccgaggccgcgattctgcgccaggctctgcccgccgaggccgcgattctgcgccaggccctgcccttcgcgtccgcacagcaaggtcagacgccggtcatcgcagcaccagcacgacgccaggcactggcctccggagccgttccacccagcaaagatcagcccttctcagccgccgctctctgtctgggtcagctgatgagaatccttcctgtgggactggctcagaaaggcttgcctttcagagcagatcaggctctcctgatcctgaggtcccaagccgtgcttccccgcctgtttggcatgcagtccgtatgcgtgcctcctcaccctcaccccctgggaggttcttccttcccatccctcagcagtgggatgagagctcctcctcctcctatgcttccaactcctcctccccgagtaggtctcctggcctaagcccctcatccccttcccctgagtttttgggcctgagatctatctccactcctagccctgaaagccttaggtatgctttgatgcctgagttttatgctctgagccctgtccctccagaagagcaggcagaaatagagagcacagctcaccccgcaacaccgcctgagccgtgaccctctataagcatcctctaagacccacagaaggaatcaacatttacccactttgtgaatgggctgcctgccctgtagttagctgcgaggtctcccaaagttccagccgttaaccaacatcctgagtagtttagaagcctctcctccccatgactccaccacctagcacttaacctgctgttggcctttgattctgggccaccttcttcctcaagagtttgcctttgcccttgagctgagatttctgttttccaagttgcttttctgttatgaaatgttttaattagtaaaataaattgttttgttt

SEQ ID NO: 263194 - DNA, 1512 bp, Artificial Sequence
  derived and/or modified sequence
atggccacccagtccgatatggagaaagagcaaaaacatcagcaagatgaaggacaaggcggtctcaacaacgaaacggcccttgcatctggcgatgcatgtggcactggaaaccaggacccagccgcaagcgttacaactgtgagctcacaagcctcgccttcgggcggcgcagctttgagcagttcaaccgccggctcaagcgccgcagctgcaacaagtgccgccatctttattaccgatgaggccagcggccttcccatcatcgcagcagttcttaccgagcgacattccgataggcaagactgccggtccccacatgaagtgtttggatgcgtcgtccccgaaggcggctcacaagctgcagtcgggccacagaaggccacaggtcacgccgacgagcatctggctcagaccaagtctcctggaaattctagaagacgtaaacagccttgccggaaccaggccgctcccgcccaaaagcccccaggcaggcgtctgtttccggagcctcttccccctagcagtcccggcttccgaccatcgagttatccctgttcaggagcctctacttcgagtcaagcaacacagccaggtcctgcattgctctctcatgcctccgaggcccgtccagcgacccgaagccgcatcaccctggttgctagcgccctgcgaagacgcgcttcgggtcctggtcccgtcatccggggctgcaccgcccagccaggaccggccttcccacatagagcgactcatctggatcccgcccgtctatcacctgaaagtgctccaggcccagctaggaggggacgcgccagcgtgccagggcccgctcgacgaggctgtgactcagctcctggaccagcccgcaggggccgtgattccgctccagtttcagctccccgcggtagagactctgcaccgggctctgcacggagaggacgggattcggctcccggacctgcgctcagggttcgaacagcccgttcagacgcaggccaccggtctactagcacaacccccggcacaggattgcgtagccggtccacccaacagcggagcgctctgttgtctaggagatctctgtctggctctgcagatgagaatccgtcttgtggcaccggatcggaacggttggcctttcagtcaaggtcaggctcacccgatccagaggtcccctctagggcttccccaccagtgtggcacgctgtccgcatgagggcttcttccccttctccaccaggccggttcttcctgccaatccctcagcagtgggacgaaagcagctcaagtagctatgcctctaattcaagttcaccttctagatcccctgggctgagcccatcgagtccatccccagaattcctgggcttgcgaagtatttcgactccaagtcctgaaagcctcagatatgctcttatgcccgaattctacgcactgtcccccgtgcctccggaagagcaagcggaaattgagagcacggctcaccctgctaccccccccgagccctag

SEQ ID NO: 263195 - DNA, 1512 bp, Artificial Sequence
  derived and/or modified sequence
atggccacccagagcgacatggagaaggagcagaagcaccagcaggatgagggccagggcggcctgaacaatgaaacagccctggccagcggagatgcctgtggcaccggcaaccaggaccctgctgcctctgtgaccaccgtgagcagccaggccagccccagcggcggggccgccctgagcagcagcacagctggcagcagcgctgctgctgccaccagcgctgccatcttcatcacagatgaggccagcggcctgcccatcatcgctgctgtgctgacagagcggcacagcgaccggcaggactgccgcagcccccatgaggtgtttggctgtgtggtgcctgagggcggcagccaggccgctgtgggcccccagaaggccactggacatgctgatgagcacctggcccagaccaagagccctggcaacagcagaagaaggaagcagccctgcaggaaccaggccgccccagcccagaagcccccaggaagaagactcttccctgagcccctgccccccagcagccctggcttccggcccagcagctacccctgcagcggggccagcaccagcagccaggccacccagcccggccctgccctgctgagccacgccagcgaggcccggcctgccaccaggagccgcatcaccctggtggccagcgccctgcggcggcgggccagcggccctggccctgtgatccggggctgcacagcccagcccggccctgccttcccccaccgggccacccacctggaccctgcccggctgagccctgagagcgcccctggccctgcccggcggggccgggcctctgtgcccggccctgcccggcggggctgtgacagcgcccctggccctgcccggcggggccgggacagcgcccctgtgtctgccccccggggccgggacagcgcccctggcagcgcccggcggggccgggacagcgcccctggccctgccctgcgggtgaggacagcccggagtgatgctggccacaggagcaccagcaccaccccaggcaccggcctgcggagccgcagcacccagcagaggtctgccctgctgagcagaagaagcctgagcggcagcgcagatgagaaccccagctgtggcaccggcagcgagcggctggccttccagagccgcagcggcagcccagaccctgaggtgcccagccgggccagcccccctgtgtggcatgctgtgaggatgagggccagcagccccagccccccaggccgcttcttcctgcccatcccccagcagtgggatgagagcagcagcagcagctatgccagcaacagcagcagccccagccgcagccctggcctgagccccagcagccccagccctgagttcctgggcctgcggagcatcagcacccccagccctgagagcctgcgctatgccctgatgcctgagttctacgccctgagccctgtgcccccagaggagcaggccgagattgagagcacagcccacccagccaccccacctgagccctag

SEQ ID NO: 263196 - DNA, 1512 bp, Artificial Sequence
  derived and/or modified sequence
atggccacccagagcgacatggagaaggagcagaagcaccagcaggacgagggtcaggggggcctcaacaatgagactgcattagcaagtggagatgcctgcgggacgggaaaccaagatccagctgcatctgtgaccacggtctctagtcaggcatccccatccggaggggctgccttgtctagttccacagccggcagcagtgccgctgctgctaccagcgctgccattttcattaccgatgaggcatccggattacccattatcgccgcagtgctaacagaaagacactctgaccgccaggattgccgctccccacatgaggtgttcgggtgcgtcgtaccagaggggggctctcaggccgctgtcgggccccagaaagccactggccatgccgacgagcatttggcacagaccaaatctcctggcaatagtcgacgccggaaacagccttgcaggaatcaggcagctcctgcccagaagcctccagggagacgcctgttcccagaaccccttccccccagctctcccgggttcaggccctcctcgtatccttgctccggagcttcaacttcatcacaggccacacagcctggccctgcccttctgtcgcacgccagcgaggcccgcccagccaccaggagcaggatcacactggtagcctccgcactgagacgtcgagctagcgggccggggccagtgatccgcggatgcactgcccagcctggaccggcctttccgcatagggctacccacttagatcccgctcgactgtctcctgagtcagcaccaggcccggcacgacgggggcgagcaagcgtgcccggtccggcacgccgtggctgtgacagtgcacccggacctgcccgaaggggacgggacagcgcacccgtgtcagctcccagggggcgggattccgctccaggctccgcccggcgggggcgtgattctgctcccggtcccgcccttagggtgcgcaccgctcgttccgacgcaggtcacagatctacgtcaaccactcccggaacaggattgaggtctcgatccacacaacagcggtccgcactgctgtccagacgttcactgtcaggcagcgccgatgaaaatccctcctgcggcaccgggagcgagagactggctttccagtcacgctctggcagtcccgacccagaggtccccagtagagctagtcctcctgtatggcatgccgtgcgaatgagggcgtcgagccctagccctccagggagattcttcctcccaatccctcagcagtgggatgagtcatcaagctcttcttacgcatctaattccagcagccctagcaggtcaccaggactgtccccttcttccccctcaccagaatttttgggactgaggtctatcagcaccccgtcacctgaaagtctcagatacgccctaatgcccgagttttacgccttaagccctgtaccgcccgaggagcaggctgagatcgagtctaccgcacaccctgctactccccccgagccgtag

SEQ ID NO: 263197 - DNA, 1512 bp, Artificial Sequence
  derived and/or modified sequence
atggcaacacaatctgacatggaaaaggagcagaagcaccagcaggatgaggggcagggtgggttaaacaatgaaaccgccctcgcctctggcgatgcctgcggaaccggcaatcaggaccctgctgcttccgtgaccacagttagctcccaggcctcaccttccgggggagcggcattatccagcagcaccgctgggtccagcgcggctgcggcaacctctgcggcaatcttcatcacggacgaggcctcaggcctgcctatcatcgctgctgtactgaccgagagacactccgatagacaggactgtaggtccccccatgaggtatttggatgcgtcgtgccagaaggcggatcgcaggccgcagtgggtcctcagaaggccactggccatgccgatgagcacttagcccagactaaatcccccggtaacagccgtcggaggaagcagccctgtcggaaccaggccgctcctgcccagaagcccccaggcagaagattgtttcccgagcctctgcccccttcatctccagggtttaggcccagtagctatccatgctccggggcttccaccagcagccaggcaactcaaccaggcccagctctcctcagccacgcatccgaagcccgtcctgcaactagaagccggattacacttgtagcgagtgccctgcgcaggcgcgcttcaggcccaggacccgtaatcaggggttgtacagcccagccgggtcccgcttttccccacagggccactcatctggaccctgccaggctctccccggagagtgcacccggtccagcaaggagaggaagagcaagcgttcctggaccagccaggcggggatgtgattcagcaccaggaccagcgcgaaggggtcgggacagtgcccctgtctctgcgcctcgagggcgagactccgctcccggtagcgccaggcgcggacgcgattcagctcctggcccagcgctgagagtgaggacagcccgatcagatgctggtcaccgctccacctcaacaactcccggtacaggcctacgcagcaggtcgacacaacaacggagtgccttgctgagcagaaggagcctcagcggctcagcagacgaaaaccctagctgtggcacaggaagtgaacgcttagcttttcagtcccgatctggatcacctgaccctgaagtgccatctagagcatctcccccagtgtggcacgccgttagaatgagagccagctcaccctccccacctggtagatttttcctaccgatcccacagcagtgggatgaatcctcaagctccagctatgcttccaacagctcaagtcctagtcgctcacctggtctcagcccatctagccctagcccggaattcctggggttgcgatccataagcactcctagtcccgaatctcttaggtacgccctcatgcctgaattctacgccctgtcacccgtcccacctgaggaacaggctgagatagagtccacggcccatcccgcaaccccccctgaaccatag

SEQ ID NO: 263198 - protein, 159 aa, Artificial Sequence
  derived and/or modified sequence
MADVPGAQRAVPGDGPEPRDPLDCWACAVLVTAQNLLVAAFNLLLLVLVLGTILLPAVTMLGFGFLCHSQFLRSQAPPCTAHLRDPGFTALLVTGFLLLVPLLVLALASYRRLCLRLRLADCLVPYSRALYRRRRAPQPRQIRASPGSQAVPTSGKVWV

SEQ ID NO: 263199 - DNA, 480 bp, Artificial Sequence
  derived and/or modified sequence
atggccgacgtgcccggcgcccagagagccgtgcccggcgacggccccgagcccagagaccccctggactgctgggcctgcgccgtgctggtgaccgcccagaacctgctggtggccgccttcaacctgctgctgctggtgctggtgctgggcaccatcctgctgcccgccgtgaccatgctgggcttcggcttcctgtgccacagccagttcctgagaagccaggcccccccctgcaccgcccacctgagagaccccggcttcaccgccctgctggtgaccggcttcctgctgctggtgcccctgctggtgctggccctggccagctacagaagactgtgcctgagactgagactggccgactgcctggtgccctacagcagagccctgtacagaagaagaagagccccccagcccagacagatcagagccagccccggcagccaggccgtgcccaccagcggcaaggtgtgggtgtag

SEQ ID NO: 263200 - DNA, 480 bp, Artificial Sequence
  derived and/or modified sequence
atggcggatgtacctggtgctcagagagccgtccccggggatggtcctgaaccacgggatccccttgactgctgggcttgcgccgtcctggtgactgcgcagaatctgctggttgctgcatttaacctcttacttctagttctcgttttggggactatactgctccccgcagtgaccatgcttggctttgggttcctgtgtcattctcaattcttaagaagccaggcgcccccctgtacggctcatcttagagatccaggatttaccgccttgttagttaccggcttccttctgctcgtgccactgttagttctggctctggcaagctaccggagactgtgtctccgtctgcggctggcggactgcttggtcccctattctcgtgctctgtacaggagaaggcgcgcgccccagccccggcaaatcagagcttctcctggaagccaggccgttcccacatcaggcaaagtgtgggtttag

SEQ ID NO: 263201 - DNA, 480 bp, Artificial Sequence
  derived and/or modified sequence
atggctgatgtgcctggggcccagagagctgtgcctggagatggccctgagccccgggaccccctggactgctgggcctgtgctgtgctggtgacagcccagaacctgctggtggccgccttcaacctgctgctgctggtgctggtgctgggcaccatcctgctgcctgctgtgaccatgctgggcttcggcttcctgtgccacagccagttcctgcggagccaggccccaccctgcacagcccacctgcgggaccccggcttcaccgccctgctggtgacaggcttcctgctgctggtgcccctgctggtgctggccctggccagctacagaaggctgtgcctgcggctgcggctggccgactgcctggtgccctacagccgggccctgtacagaagaagaagagccccccagccccggcagatccgggccagccctggcagccaggccgtgcccaccagcggcaaggtgtgggtgtag

SEQ ID NO: 263202 - DNA, 480 bp, Artificial Sequence
  derived and/or modified sequence
atggccgacgtgcccggcgcccagcgggccgtgcccggcgacggccctgagccgcgcgatccgctagactgttgggcctgtgccgtgctggttactgcccagaacttgctggtggccgcctttaacctcttattgctggtcctggtcctaggaactatcctgcttcccgcagtgaccatgctcggatttgggtttctgtgccacagtcaattcttacgttctcaggctcccccttgcacagcgcacctccgagaccctgggttcacagccctcctggtaacaggatttttactgctcgtaccactgttggtgttggctctcgccagttatcgccgactgtgtctgaggttaaggctggcagattgtctggtaccttattcccgcgccctgtaccgaaggcgaagggctccgcaacctagacagattcgggcgagccctggcagtcaggctgttcccacaagcggcaaggtgtgggtgtag

SEQ ID NO: 263203 - DNA, 480 bp, Artificial Sequence
  derived and/or modified sequence
atggccgatgtgccaggtgcacagagggctgtgcctggggacggccctgaaccccgagaccccctggactgttgggcctgtgctgtattggtcaccgcccagaatttgctggtagcagccttcaatctcttgctcttagtcctggtcttgggaacgatactgctgcccgcagtaactatgctcggttttggattcttatgccactctcaattcctccgctcacaagctcctccctgtacggcccatttgcgcgaccccggatttactgccctgctggttaccggcttcctccttctcgtccccctgctggtcctcgcacttgcgtcttaccgaagattatgcctgagactgaggctggccgactgccttgtgccttatagtcgggcactttatagaaggcgaagagcccctcaacctagacagattcgcgcttctcccggatctcaggcggttcccacgtccggaaaggtttgggtgtag

SEQ ID NO: 263204 - DNA, 872 bp, Artificial Sequence
  derived and/or modified sequence
aggcgggccatggcggatgtccccggggcacagcgagcggttcctggtgacggcccagagccccgggaccccctggactgttgggcctgcgctgttcttgtaacagcccagaatctgctggtggctgccttcaatcttctcctgctggtgctggtgctagggaccatcttgctacccgctgtcaccatgctgggcttcggcttcctctgccactctcagttcctgcgctcccaggcacccccttgcaccgcgcacctgcgggaccccggtttcacggccctactggtcaccggattcctgctcctcgtgccgctgctcgtgcttgctctggccagctaccgccgcctctgcctgcgcctccgcctagccgattgcctcgtgccctacagccgagccctttatcggcgtcggcgcgccccgcagccgcggcaaatccgggcctcaccagggtcccaggccgttcccacatcaggaaaggtctgggtctaatgaccctcgagtcaagaacaaccctgacggctgccctccctcttattcggcccaaggacttgaagcccggcatcttccgacctgccctgcccccacccctgcctgagcggagtcctagcatccccttgggagcagcagcgtcagtggacccagtgctgagaaaagcccccacatcccggaaaacccactttcctttcacgacccacatctcaatcctgaacatctaggctggaacctgcacacctccccctcagctccgtcgtgaatgggacaacaatctcgtgccctcgttttatggtgcagcttctctagtatttctggggctggggggcggggctggaggggaaggagtgtccacgcatcaataaagatttaacgaactg

SEQ ID NO: 263205 - protein, 1121 aa, Artificial Sequence
  derived and/or modified sequence
MSKLRMVLLEDSGSADFRRHFVNLSPFTITVVLLLSACFVTSSLGGTDKELRLVDGENKCSGRVEVKVQEEWGTVCNNGWSMEAVSVICNQLGCPTAIKAPGWANSSAGSGRIWMDHVSCRGNESALWDCKHDGWGKHSNCTHQQDAGVTCSDGSNLEMRLTRGGNMCSGRIEIKFQGRWGTVCDDNFNIDHASVICRQLECGSAVSFSGSSNFGEGSGPIWFDDLICNGNESALWNCKHQGWGKHNCDHAEDAGVICSKGADLSLRLVDGVTECSGRLEVRFQGEWGTICDDGWDSYDAAVACKQLGCPTAVTAIGRVNASKGFGHIWLDSVSCQGHEPAIWQCKHHEWGKHYCNHNEDAGVTCSDGSDLELRLRGGGSRCAGTVEVEIQRLLGKVCDRGWGLKEADVVCRQLGCGSALKTSYQVYSKIQATNTWLFLSSCNGNETSLWDCKNWQWGGLTCDHYEEAKITCSAHREPRLVGGDIPCSGRVEVKHGDTWGSICDSDFSLEAASVLCRELQCGTVVSILGGAHFGEGNGQIWAEEFQCEGHESHLSLCPVAPRPEGTCSHSRDVGVVCSRYTEIRLVNGKTPCEGRVELKTLGAWGSLCNSHWDIEDAHVLCQQLKCGVALSTPGGARFGKGNGQIWRHMFHCTGTEQHMGDCPVTALGASLCPSEQVASVICSGNQSQTLSSCNSSSLGPTRPTIPEESAVACIESGQLRLVNGGGRCAGRVEIYHEGSWGTICDDSWDLSDAHVVCRQLGCGEAINATGSAHFGEGTGPIWLDEMKCNGKESRIWQCHSHGWGQQNCRHKEDAGVICSEFMSLRLTSEASREACAGRLEVFYNGAWGTVGKSSMSETTVGVVCRQLGCADKGKINPASLDKAMSIPMWVDNVQCPKGPDTLWQCPSSPWEKRLASPSEETWITCDNKIRLQEGPTSCSGRVEIWHGGSWGTVCDDSWDLDDAQVVCQQLGCGPALKAFKEAEFGQGTGPIWLNEVKCKGNESSLWDCPARRWGHSECGHKEDAAVNCTDISVQKTPQKATTGRSSRQSSFIAVGILGVVLLAIFVALFFLTKKRRQRQRLAVSSRGENLVHQIQYREMNSCLNADDLDLMNSSGGHSEPH

SEQ ID NO: 263206 - DNA, 2082 bp, Artificial Sequence
  derived and/or modified sequence
agcctgccccagagcgaggcccagggccaggccgtggacctgagaacccccgtgagctgcctgagaggcagactgccccccggccacaccgaggccagactggtgggcggcgagcacccctgcgccggcagactggaggtgacctggggcaccgtgtgcgacgccgccctggacctggccaccgcccacgtggtgtgcagagagctgcagtgcggcgccgtggtgagcacccccgagggcgccagattcggcagaggcagcggccccgtgtggaccgaggccttcagatgcgccggcaacgagagcctgctgttccactgccccagaggcagaggcagccagtgcggccacggccacgacgccggcctgagatgcagcgagttcagaatggtgaacggcagcagcagctgcgagggcagagtggagttccaggtgcagggcagctgggcccccctgtgcgccacccactgggacatcgccgacgccaccgtgctgtgccaccagctgaactgcggcaacgccgtggccgcccccggcggcggccacttcggcgacggcgacgccgccatctggcccgacgccttccactgcgagggcaccgagagctacctgtggaactgccccgtgagcaccctgggcgcccccgcctgcgcccccggcaacaccgccagcgccgtgtgcagcggcctggcccacgccctgagactgagagagggccagagcagatgcgacggcagagtggaggtgagcctggacggcgtgtggggcagagtgctggacgacgcctgggacctgagaggcgccggcgtggtgtgcagacagctgggctgcagaggcgcccagcaggcctacgacgcccccgcccccagcagaggcagcgtgcaggtggccctgagcagagtgagatgcctgggcaccgagaccagactgacccagtgcaacgtgagcgccaccctgcaggagcccgccggcaccagcagagacgccggcgtggtgtgcagcggcgaggtgggcaccgccagccccatggccagaagacacggcatccccggcgccctgaccctgagcctgcacagagagccccagggcgccgccggcagaggcgccggcgccctgcacggcggcgcctggggcaccgtgtgcgacgacgcctgggacctgagagacgcccacgtggtgtgcagacagctgggctgcggcagagccctgagccccggcggcagaaccctgagaagcagaggcagagcccacctggccggcagagccggcctgcccggccccagagtgtgcgccgtggccgtgcccgtgggcggcctgggcgccgccagactggaggcccagggcggcagaagaagactgctgctgagagtgggcggcagcgaggccgccagatgggacctgctgctgtgctgggtggccggcagagtgctgcagtgggacctgggcagacacgtgcagcagtgccccgagggccccctgctggtgcaccacctgcaggccgccggcgtgtggggcgtgggcctggccggcgagcaggccctgcccctgtgcggccacagagacagactgggcggccagcacagagtgccccaggccgcccagctgcacagcgtggccatgcccttcccccccatggcccccgccctgctgagacccagcagagccggcctggactacctgtgcagaatcgtgagaggccaggccaccggctgctggggcgccccccagctgctgctgctggccagactgcccagaggcggcagaaccgccagagccagaggcagaggccccctgctgagagccagaggcgccctggccagaggcctgctgggccacagagtgagaagatggctgggccccggcggcagaggcggcagagtgccccccgccggcctgtggagcggcagaagaagacccggcggcagaagactgtggccctggctgagagccagagtggccggcagaggcggcgtgcccggccagagaggcgtgcccgtgggcctgcccagaagcggcggcgacgccgagaccgccagaaccagaagaaccagagcctgcgccgccggcaagaccaacagctag

SEQ ID NO: 263207 - DNA, 2082 bp, Artificial Sequence
  derived and/or modified sequence
tcactcccccagtccgaagcccaggggcaggccgtcgacctgaggacccccgtctcatgcctgagaggtaggctcccaccagggcacaccgaggcgaggctggtgggcggcgagcacccttgcgcagggagacttgaggtcacctggggaacggtgtgcgacgccgctcttgacctggcaaccgcccacgtcgtctgtcgagaactgcaatgcggcgccgtggtgtctacaccagagggcgccaggttcggtcgtggctctggccctgtgtggactgaggctttccgctgtgccggtaatgagagtctgctctttcattgcccacggggccgtggcagtcaatgcggtcacggccatgatgcaggactgcggtgttccgagttcaggatggtcaacggaagcagctcatgcgagggccgcgtggaattccaggtccagggctcctgggccccgctgtgtgcaacccactgggacatcgccgatgcgacggtcctatgccatcagctcaattgtggtaatgccgtggctgcacctggaggtgggcactttggggatggcgatgctgcaatctggccagacgctttccattgcgagggcactgagagctacctctggaattgcccagtgagtaccctcggcgcacccgcctgcgcgcccggaaataccgcctccgccgtctgttccggattggcccacgctcttcgactccgagaaggacagtctcgttgtgacggccgtgttgaggtgtccctcgacggagtttgggggagagtactggatgacgcctgggatctccgcggtgccggagtggtgtgccgtcaactaggatgtagaggagcccaacaggcctatgatgctcccgctcctagtcgcggctccgtccaggtggctctatcacgcgtgagatgtctgggaacagagaccaggctgacacagtgcaacgtgtcagccactcttcaggagcctgcaggtacgagcagagatgccggagtggtgtgttcaggcgaagttgggaccgctagcccgatggcacggagacacggaattcccggcgctctcactctgtcactgcacagagaaccccaaggagctgctggcaggggcgctggtgccctgcatggaggcgcttggggcacagtgtgcgatgatgcctgggatctccgggacgcccatgtcgtatgccgccaattgggctgcggaagggcgctgtcccctggcggaaggaccctccgctcacgtggaagggcgcacctcgccggtcgagctgggctgcccgggcctagagtttgtgcggtggccgtgccagtcggcggactgggcgccgcccgtctggaggcccagggcgggagacgcagactcctccttcgcgtgggcgggagtgaagccgcccgttgggatcttctgctgtgttgggtcgcgggaagggtcctccaatgggatttaggcaggcacgttcagcagtgtcccgagggcccattgcttgttcaccatctgcaggctgcgggggtctggggggtggggctagccggtgagcaggcactccccctctgcggccatcgggaccgcctgggcgggcaacaccgggttcctcaggccgcacaattgcacagcgtcgctatgccattcccccccatggctcccgctcttctaagaccctctcgagcgggccttgattatctgtgcaggatagttcgcggccaggctactggctgttggggggctcctcagctgctcctattggccaggctgccccgcggggggagaactgcacgggcccgaggcaggggacctctcttgcgggcaaggggagccctcgcccgtggactgttggggcaccgcgtgcgacggtggctcggacccggcggccggggaggccgtgttccaccagccgggctgtggtctgggaggcggcgtcccggcggtcgtagactgtggccgtggctcagagctagggtggccgggcgcgggggtgtacccggtcagcgcggcgtgcccgtgggactgcctaggagtggcggagatgcagagaccgccaggacccgcaggacccgcgcttgtgctgcaggcaagaccaattcttag

SEQ ID NO: 263208 - DNA, 2082 bp, Artificial Sequence
  derived and/or modified sequence
agcctgccccagagcgaggcccagggccaggccgtggacctgcggacccctgtgtcctgcctgcggggccgcctgcccccaggccacacagaggcccggctggtgggcggggagcacccctgtgccggccgcctggaggtgacctggggcaccgtgtgtgatgctgccctggacctggccacagcccacgtggtgtgccgggagctgcagtgtggggctgtggtgtccaccccagagggcgccaggtttggccggggcagcggccctgtgtggacagaggccttccgctgtgctggaaatgaaagcctgctcttccactgcccccggggccggggcagccagtgtggccacggccatgatgctggcctgcgctgcagcgagttcaggatggtgaatggcagcagcagctgtgagggccgggtggagttccaggtgcagggctcctgggcccccctgtgtgccacccactgggacattgctgatgccaccgtgctgtgccaccagctgaactgtggaaatgctgtggccgcccctgggggcggccactttggagatggagatgctgccatctggccagatgccttccactgtgagggcacagagagctacctgtggaactgccctgtgtccaccctgggcgccccagcctgtgcccctggcaacacagccagcgctgtgtgcagcggcctggcccacgccctgcggctgcgggagggccagagccgctgtgatggccgggtggaggtgtccctggatggagtgtggggccgggtgctggatgatgcctgggacctgcggggggccggcgtggtgtgccggcagctgggctgccgcggggcccagcaggcctatgatgccccagcccccagccggggctctgtgcaggtggccctgagccgggtgcgctgcctgggcacagagacccggctgacccagtgcaatgtgtctgccaccctgcaggagcctgctggcaccagcagagatgctggggtggtgtgcagcggggaggtgggcacagccagccccatggccaggagacatggcatccctggggccctgaccctgagcctgcaccgggagccccagggcgctgctggaagaggagctggggccctgcatggaggagcctggggcaccgtgtgtgatgatgcctgggacctgagagatgcccacgtggtgtgccggcagctgggctgcggccgggccctgagccctgggggccgcaccctgcggagccggggccgggcccacctggccggccgggccggcctgcccggcccccgggtgtgtgctgtggccgtgcctgtgggcggcctgggcgccgcccggctggaggcccagggcggcagaagaaggctgctgctgcgggtgggcggcagcgaggccgcccgctgggacctgctgctgtgctgggtggccggccgggtgctgcagtgggacctgggccgccacgtgcagcagtgcccagagggccccctgctggtgcaccacctgcaggccgccggcgtgtggggcgtgggcctggccggggagcaggccctgcccctgtgtggccaccgggaccggctgggcggccagcaccgggtgccccaggccgcccagctgcacagcgtggccatgcccttcccccccatggccccagccctgctgcggcccagcagagctggcctggactacctgtgcagaattgtgcggggccaggccaccggctgctggggcgccccccagctgctgctgctggcccggctgccccggggcggccgcacagcccgggcccggggccggggccccctgctgcgggcccggggggccctggcccggggcctgctgggccaccgggtgcggcgctggctgggccctgggggccggggcggccgggtgcccccagctggcctgtggagcggcagaagaagacctgggggccggcggctgtggccctggctgcgggcccgggtggccggccggggcggcgtgcccggccagaggggcgtgcctgtgggcctgcccaggtctggaggagatgctgagacagcccggaccaggaggacccgggcctgtgccgccggcaagaccaacagctag

SEQ ID NO: 263209 - DNA, 2082 bp, Artificial Sequence
  derived and/or modified sequence
agcctgccccagagcgaggcccagggccaggccgtggacctgcggacacctgtctcctgccttcgggggcggctacctcccggccataccgaggcgaggctggttggtggagagcacccttgcgctggccgtctggaagtgacctggggaactgtttgtgacgcagctcttgatctggccacagcccatgttgtgtgtagggagctgcaatgtggagccgtggtctctactcccgaaggagcccgtttcggacgcgggtctgggcctgtttggaccgaagccttccgctgtgctggcaatgagagtctactgtttcattgcccccgcggtaggggctcccagtgtggacatggacatgatgccgggttgcgctgctccgaatttcgtatggtcaacggtagctcctcttgtgagggccgtgtggagtttcaagtccaagggagttgggcacctttgtgcgccacccattgggacattgccgatgccacagtattgtgtcaccaactcaactgcgggaacgcagtggctgcccctgggggcgggcattttggtgacggcgatgcggccatctggcccgacgccttccactgcgaaggcactgaaagttacttgtggaactgcccggtgtccactctcggtgcccctgcctgtgcaccaggcaacacagccagtgcagtgtgcagcggccttgcccatgcattgagacttcgagaaggccagtcgaggtgcgatgggcgcgtcgaggtaagcctggacggcgtctggggacgagtcttggatgatgcctgggacctccgcggcgctggggtggtatgtagacaactgggttgtaggggggcccaacaggcgtacgatgcgcccgcaccctcacggggctccgttcaagtggcattgagtcgagtcagatgcctgggtaccgagactaggctgacgcagtgtaacgtgtcagcaaccttgcaagaacctgcgggcacctctagagatgctggcgtcgtgtgttctggtgaggtgggcaccgccagccctatggcccgtcgccacgggatccctggcgccttgacacttagcttacatcgggaaccccagggcgcggcaggccgcggagccggcgccctgcacggcggggcttggggaaccgtctgcgatgacgcctgggatctcagggacgcacacgtcgtatgtaggcagctcggatgtggaagagcactaagccctggggggagaacattacgcagtcgcggacgggcccacctggctggtagagcgggccttcccggtccccgagtttgtgctgttgcagtgcccgtgggggggcttggagccgccaggctcgaggcacaggggggcagacggagactattgctgagagttggcgggtccgaagccgcaagatgggacctgctgctttgttgggtggcaggcagggtactgcagtgggatttaggacgtcatgtgcagcaatgtcccgagggtcccctattggtacatcacttacaagcggctggtgtttggggggttgggttagctggcgagcaagccctgcctctctgtggacaccgggaccgcctggggggtcagcaccgagtgccacaggcagcccagctgcactccgtggccatgccctttccacctatggctcctgcactcctgcggccttcccgggctggcctggattacctgtgtagaatcgtgaggggccaagcgactggatgttggggagccccgcagctcttgttgttggcgagactgccgcgtggaggacgcacagcgagagccagggggcggggccctctcctgagggctcggggcgcgctcgctcgcggactgctcggtcacagggtgagacgatggctgggtcccgggggccggggtggccgcgtgcctccggcagggctttggtctggtagacgacgcccaggcgggaggcgcctctggccttggctcagggctcgggtggccggaagagggggggtccctggtcagcggggagtccctgtgggcctgccacgttcaggcggcgatgctgagacagcccgtacacggcgaactcgtgcgtgtgcagccggcaaaacgaattcatag

SEQ ID NO: 263210 - DNA, 2082 bp, Artificial Sequence
  derived and/or modified sequence
agcctgcctcagtccgaggcacaggggcaagccgtggatttgcgcacccccgtgtcatgtctcaggggtagacttccaccgggacatactgaggccagactggtgggcggagaacacccctgtgcgggacggctcgaagttacctggggcacagtatgtgacgctgctcttgacctggcaactgcacatgttgtatgtcgtgaattacagtgtggcgctgttgtgagtacacctgagggagcgcgatttggcaggggatctggacctgtttggaccgaagcatttaggtgcgccggaaacgaatccttattgtttcactgtcctcggggacggggaagtcagtgcgggcacggccacgacgccggtctcagatgctctgaatttcgaatggtgaacggttcgtcatcctgcgaaggcagggttgagtttcaggtgcagggatcttgggcacccctctgtgctacccattgggatatcgcagacgccacagttctctgccaccaattaaactgcggaaacgccgtagcagcccctggaggaggccatttcggtgatggcgacgcagctatctggcctgatgccttccactgcgagggtaccgagagctatttgtggaactgtcccgtgtccacactgggcgcacctgcatgtgctcccggaaacacggcatcagcagtttgcagcggattggcgcacgcattacgccttcgggagggccagagtcgatgtgacggacgcgtggaggtcagtctggatggtgtctggggacgcgtcctggacgatgcctgggatctccgcggagcgggagtggtctgtagacagctgggatgcaggggcgctcagcaagcttatgacgcgcctgctcccagccgaggatccgtgcaagtggcactctccagggtgcgctgcctaggaaccgaaacaagactgacgcagtgcaatgtgtccgctactcttcaggaaccagccggaacaagtagggacgccggagtcgtctgttccggggaagtcggtaccgcatccccgatggccagaaggcatgggataccaggcgcactgaccctgtctcttcaccgcgagcctcagggggcagccggacgcggagccggtgcactgcacggaggggcatgggggaccgtttgcgacgacgcctgggatctacgagacgcccacgtggtctgtcgccagttgggttgtggacgggcattaagtcccggaggaaggacgctgagaagccggggacgggcacacctagccggaagggcgggacttccaggccctagagtatgtgcagtggctgtgcctgtaggaggactgggagcagcacgcctggaagctcagggcggtcgcaggcgactccttctgagggtgggcggatccgaggcagcccgttgggacctgctactttgttgggtggccggtagggtactccaatgggatttggggagacacgtacagcagtgcccagagggaccgctcctcgtacatcacctgcaggcagctggtgtgtggggcgttggactggccggagaacaagcactgccactgtgcggtcacagagatcggctgggcggacagcaccgcgtgccccaagccgctcaactgcattcagtggccatgccttttccccctatggcccctgctctcctgcggccaagccgggctgggttggattacctatgccggatagttaggggtcaggctacaggctgctggggtgctccacaattgctcctgcttgctcgactgcctcggggtggtaggactgcaagagccagagggcgaggccctctgctgagagccaggggagcactggcgcgagggctccttgggcaccgagtgagacgttggctgggacctggcggtcggggaggccgagtgccacccgcagggctttggtcgggacggcgacgcccaggtgggcgtaggctttggccctggctgcgcgctagagttgcgggtagagggggagtgcctgggcaacgtggtgtgcccgtagggttgccaaggtcaggaggggatgccgagactgcaagaacaagacggacccgcgcatgtgccgcagggaaaaccaatagctag

SEQ ID NO: 263211 - DNA, 375 bp, Artificial Sequence
  derived and/or modified sequence
atgaccctaaatgaacacgctgccttcaagcacttgtttaacaaggcacatctggcgcctccgcttatacacctgaccttgagtggccactccacttgctttagggagcaccgggttggtggaaaagtgaccgatcagcaggatcctaaggcagaggaatttttcctagtgcaaaacaagatgaaatcactgccttgcctgttgctcagcactcagacacgccagcccagcgacttttctattttcagcccgcctttcccacctgtctatagcacaaaacctcctctgagctcatggcccgtgctcaacgaactgctcgggacacccccacgtcggggagggggaagagctgagggcttgctgacatcccagtag

SEQ ID NO: 263212 - DNA, 375 bp, Artificial Sequence
  derived and/or modified sequence
atgacacctaacgaacatcctgcattcaagcacctgtttaacaaggcacaccttgctcccccattaatccatttgacactttcaggacactccacgtgcttcagagaacaccgcgtcgggggaaaagtgactgaccagcaggaccctaaggcagaagaattcttcctcgtgcagaacaaaatgaagagtttaccctgtctgttgctgagtacacagacccggcagccatcagacttctctatcttcagccccccattcctccctttttattcaaccaagccccctctgtctagctggccagtactgaatgagctgcttggcacccctcccaggcgcggtgggggacgcgcagagggcctcctaacatcacagtag

SEQ ID NO: 263213 - DNA, 3366 bp, Artificial Sequence
  derived and/or modified sequence
atgtctaaactcaggatggttctactggaggactctggttccgccgactttagacgccacttcgtgaatctgtcccctttcacaataacggtcgttttgttgcttagtgcgtgtttcgtcactagctctctgggcggcacagataaagaactgcgactggtggatggtgaaaacaagtgttctggtcgcgtggaagtcaaagtgcaagaggaatgggggactgtgtgcaataatggctggagtatggaagcagtctccgttatctgtaaccagttgggttgccccacggctatcaaagcccccgggtgggccaactcaagcgccgggagcggcagaatctggatggatcatgtgagttgccgagggaatgaatcagccctgtgggattgtaaacacgatggttggggtaagcactccaattgcactcaccagcaggacgcaggagtcacctgcagcgacgggtccaatctggagatgcgccttaccaggggtggaaacatgtgttcaggacggatcgaaattaagttccagggccgctggggtaccgtatgcgatgataacttcaacattgatcacgcctcagtaatctgtaggcaacttgagtgtggctctgctgtgagcttctcaggtagctcaaatttcggagagggaagtggtccaatatggttcgatgacctcatttgcaatgggaatgagagcgcactgtggaactgtaaacatcagggctgggggaaacacaactgcgaccacgctgaagacgcaggtgtgatctgtagtaagggagccgatctgtccctccggctggtggatggtgtgacagagtgttcgggcagattagaggtgagatttcagggcgagtggggtaccatctgtgatgatggctgggacagctacgatgccgctgtcgcctgcaaacagttgggctgcccaactgccgttactgcaataggacgggttaatgcaagcaagggattcgggcatatttggctggacagcgtcagctgtcagggtcatgaacccgctatctggcaatgtaagcatcatgaatgggggaaacactattgcaaccataatgaggatgccggagtaacgtgctcagatgggtctgatctcgagctgcgactccggggggggggttctcggtgtgcgggaacagtcgaggtggagattcaaaggctgttgggaaaggtctgcgacagaggatggggcctgaaagaggcagacgtagtctgcaggcagctgggttgcggcagtgctctcaagacatcctatcaagtatacagtaagatccaagccaccaacacttggctgtttttgagctcctgcaatggaaatgagacctcactgtgggactgcaagaattggcagtggggtggactcacctgtgatcattatgaggaggcaaaaattacatgctcagcccatagggagccaaggctggttggtggagacatcccttgttccgggagagttgaggtgaagcacggtgacacctggggttccatttgcgattcagacttcagcctggaggctgcaagcgtgttatgccgcgaattacaatgtggaactgttgtttctatcctaggaggagcgcacttcggagaaggaaatggccagatatgggcggaagagttccaatgcgaggggcacgaaagccacctttccctctgtcctgtggcgcccaggccagaagggacatgttcccactctagagacgtgggcgtggtatgtagtaggtacacggagatcagactagtcaatggtaagaccccttgcgagggcagagttgagctgaagactcttggagcatggggcagtctgtgcaactcacattgggacattgaggacgcacacgtcctctgccagcagttaaaatgtggagttgccctgtccactcccggcggtgcacggtttgggaaagggaacgggcagatatggcgccacatgttccactgtacaggaactgagcagcacatgggggactgcccagtaaccgccttaggagccagtctttgccccagcgaacaggttgccagcgtaatttgttcaggaaaccagtcacagacactgtcttcatgtaattcttcatccctgggcccaacgcgacccacgatacctgaggaaagcgctgtcgcctgtattgagtccggacagctgagactagttaatggcggcgggcgctgcgctggcagggtggagatttatcacgagggcagttggggtaccatttgtgacgattcatgggatctcagtgacgcccatgttgtgtgtcggcagttaggctgtggggaggcaatcaacgctactggctcagcccactttggtgagggcactggcccgatttggctggatgaaatgaaatgcaatggtaaagagtctcgcatctggcagtgccactcccatggctgggggcagcagaattgtcgacacaaggaggatgctggggttatttgtagtgaatttatgagtctgagactcacaagcgaggcctccagagaagcctgtgccgggagacttgaggtgttctacaatggggcctggggcaccgtggggaaatcttctatgagcgagactacagtgggagtggtttgccggcaactcgggtgcgctgacaaaggaaaaattaatccagcctcactggataaggctatgtcaatcccaatgtgggtggacaacgtacagtgcccaaagggacctgacacgctctggcaatgcccctcctccccttgggaaaaaaggctggcctcaccctctgaggaaacctggatcacatgtgataataagatccggctgcaggaaggacccactagctgttctggacgcgtcgagatctggcacggtgggtcatgggggacagtgtgcgatgactcttgggaccttgacgacgctcaggtggtttgtcagcagttgggctgtgggccagccctcaaggctttcaaggaggccgagttcggccagggcaccggacctatttggctcaacgaagtcaagtgtaagggaaatgagtcctcactgtgggattgccccgctaggagatggggccatagtgagtgcggtcacaaagaagatgccgccgttaattgcacagatatttccgtgcagaaaactccccagaaagcaactactggtcgcagcagtagacagtcgtcatttattgcagtcggtattcttggggttgtcctactggctatatttgtggccctttttttcctcacaaagaagcgcaggcagcgccagcgcctggccgtgtcttccagaggcgagaacttggtccatcagatccagtatcgggagatgaactcctgcttaaatgccgatgacctggacctgatgaattcaagtggaggtcactccgagccgcactag

SEQ ID NO: 263214 - DNA, 3366 bp, Artificial Sequence
  derived and/or modified sequence
atgagcaagctgaggatggtgctgctggaggacagcggcagcgctgacttccgccgccactttgtgaacctgagccccttcaccatcaccgtggtgctgctgctgagcgcctgctttgtgaccagcagcctgggcggcacagacaaggagctgcggctggtggatggagaaaataaatgttctggccgggtggaggtgaaggtgcaggaggagtggggcaccgtgtgcaacaacggctggagcatggaggccgtgtctgtcatctgcaaccagctgggctgccccacagccatcaaggcccctggctgggccaacagcagcgctggcagcggccgcatctggatggaccacgtgtcctgcagaggaaatgaaagtgccctgtgggactgcaagcatgatggctggggcaagcacagcaactgcacccaccagcaggatgctggggtgacctgcagtgatggcagcaacctggagatgaggctgacccggggcggcaacatgtgcagcggccgcatcgagatcaagttccagggccgctggggcaccgtgtgtgatgacaacttcaacatcgaccacgccagcgtcatctgccggcagctggagtgtggcagcgctgtgtccttcagcggcagcagcaactttggagagggcagcggccccatctggtttgatgacctgatctgcaatggaaatgaaagtgccctgtggaactgcaagcaccagggctggggcaagcacaactgtgaccatgctgaagatgctggggtcatctgcagcaaaggagctgacctgagcctgcggctggtggatggagtgacagagtgcagcggccgcctggaggtgcgcttccagggcgagtggggcaccatctgtgatgatggctgggacagctatgatgctgctgtggcctgcaagcagctgggctgccccacagctgtgacagccatcggccgggtgaatgccagcaaaggatttggccacatctggctggacagcgtgtcctgccagggccacgagcccgccatctggcagtgcaagcaccacgagtggggcaagcactactgcaaccacaatgaagatgctggggtgacctgcagtgatggcagtgacctggagctgcggctgcggggcggcggcagccgctgtgccggcaccgtggaggtggagatccagaggctgctgggcaaggtgtgtgaccggggctggggcctgaaggaggctgatgtggtgtgccggcagctgggctgcggcagcgccctgaagaccagctaccaggtgtacagcaagatccaggccaccaacacctggctgttcctgagcagctgcaatggaaatgagaccagcctgtgggactgcaagaactggcagtggggcggcctgacctgtgaccactatgaggaggccaagatcacctgcagcgcccaccgggagccccggctggtgggcggggacatcccctgcagcggccgggtggaggtgaagcatggagacacctggggcagcatctgtgacagcgacttcagcctggaggccgcctctgtgctgtgccgggagctgcagtgtggcaccgtggtgtccatcctgggcggggcccactttggagagggcaatggccagatctgggccgaggagttccagtgtgagggccacgagagccacctgagcctgtgccctgtggcccccaggcctgagggcacctgcagccacagcagagatgtgggcgtggtgtgcagccgctacacagagatccggctggtgaatggcaagaccccctgtgagggccgggtggagctgaagaccctgggcgcctggggcagcctgtgcaacagccactgggacattgaagatgcccacgtgctgtgccagcagctgaagtgtggggtggccctgagcaccccaggaggagccaggtttggaaaaggaaatggccagatctggaggcacatgttccactgcacaggaacagagcagcacatgggagactgccctgtgacagccctgggcgccagcctgtgccccagcgagcaggtggccagcgtcatctgcagcggcaaccagagccagaccctgagcagctgcaacagcagcagcctgggccccacccggcccaccatccctgaggagagcgctgtggcctgcatcgagagcggccagctgcggctggtgaatggaggcggccgctgtgccggccgggtggagatctaccacgagggctcctggggcaccatctgtgatgacagctgggacctgagtgatgcccacgtggtgtgccggcagctgggctgtggggaggccatcaatgccactggaagtgcccactttggagagggcaccggccccatctggctggatgagatgaagtgcaatggcaaggagagccgcatctggcagtgccacagccacggctggggccagcagaactgccgccacaaggaggatgctggggtcatctgcagcgagttcatgagcctgcggctgaccagcgaggccagccgggaggcctgtgccggccgcctggaggtgttctacaacggggcctggggcaccgtgggcaagagctccatgtctgagaccaccgtgggcgtggtgtgccggcagctgggctgtgccgacaagggcaagatcaacccagccagcctggacaaggccatgagcatccccatgtgggtggacaacgtgcagtgccccaagggccctgacaccctgtggcagtgccccagcagcccctgggagaagaggctggccagccccagcgaggagacctggatcacctgtgacaacaagatccggctgcaggagggccccaccagctgcagcggccgggtggagatctggcacggcggctcctggggcaccgtgtgtgatgacagctgggacctggatgatgcccaggtggtgtgccagcagctgggctgcggccctgccctgaaggccttcaaggaggccgagtttggccagggcaccggccccatctggctgaatgaggtgaagtgcaagggaaatgaaagcagcctgtgggactgcccagcccggcgctggggccacagtgaatgtggccacaaggaggatgctgctgtgaactgcacagacatctctgtgcagaagaccccccagaaggccaccaccggccgcagcagccggcagagcagcttcatcgctgtgggcatcctgggcgtggtgctgctggccatctttgtggccctcttcttcctgaccaagaagaggcggcagaggcagaggctggccgtgagcagcagaggagagaacctggtgcaccagatccagtaccgggagatgaacagctgcctgaatgctgatgacctggacctgatgaacagcagcggcggccacagcgagccccactag

SEQ ID NO: 263215 - DNA, 3366 bp, Artificial Sequence
  derived and/or modified sequence
atgagcaagctgcggatggtgctgctggaggacagcggcagcgccgatttccggaggcattttgtaaatcttagtcccttcacaataacggtggttctgctacttagtgcctgtttcgtcacatcttcactgggaggaactgataaggagttacgtttggtggatggagaaaataagtgctccggacgggtggaggtgaaggtgcaggaggagtggggaaccgtgtgcaacaatggttggagtatggaagccgtgtcagtgatctgcaatcagctgggctgcccaaccgctatcaaagctccaggctgggccaattcatctgctggtagtggccgcatttggatggaccacgtctcatgtagaggcaacgagtcagccctttgggactgcaaacacgatggttggggaaagcattctaattgcactcaccagcaagacgctggggtgacatgtagtgatggttccaatttggagatgaggctcacccgaggcggcaatatgtgtagcggtcgaattgaaattaagtttcaagggcgctggggaacagtttgcgatgacaattttaacatcgatcatgcaagtgtgatctgtcgccagctcgagtgtggcagtgctgtttccttttcgggatccagcaactttggagaaggaagtggaccgatttggttcgatgaccttatctgcaacggaaacgagagtgctctatggaactgtaagcaccagggttggggaaagcataattgtgaccacgcggaggatgctggcgttatctgctcaaaaggcgccgacttgtccttgcggctggtggacggcgttaccgagtgctccggccgactcgaagtgcggttccagggtgagtgggggacaatctgcgacgatggttgggattcctacgatgcagcagtggcctgtaaacagttgggatgccccaccgcggtgacagccatcgggagagtgaatgctagcaaaggcttcgggcacatctggttagactccgtgtcttgccagggacacgagcccgccatctggcagtgtaagcaccacgagtgggggaaacactactgcaatcacaacgaagacgccggggtgacttgttcagatggttccgatctcgaactccggctcagaggcggcgggagccggtgtgccgggactgtggaagttgaaattcaaaggctgctgggcaaagtttgcgaccggggttggggtctgaaagaggccgatgtagtttgtagacagttaggatgcggaagcgccctgaagacatcctatcaggtgtactctaaaatccaagcgactaatacgtggctcttcctgagttcttgtaacggcaacgaaactagtttatgggactgcaaaaactggcaatggggaggtctgacttgtgaccactacgaggaggccaagattacttgcagtgcccatcgtgagcctcgactggtgggaggtgatataccctgttccggtcgggtggaagtcaagcacggcgatacctggggctccatctgcgatagcgatttctcattagaggcagcctccgtcttgtgtagggaacttcagtgtgggaccgtggtgagcattctgggcggggctcacttcggcgaaggtaatggccaaatctgggccgaggagttccaatgcgagggacatgaatcgcatctgtctttatgtcctgtggctccaaggccagaagggacctgctcacactccagagacgtcggcgttgtgtgttcacggtacacggaaattagactggtcaacggcaagactccatgcgagggccgcgtggaattgaaaactcttggtgcatggggcagtctgtgtaatagtcattgggatattgaggatgctcatgtgctttgccagcagttaaaatgtggggtcgcgctttcaactccaggaggcgcccggtttggcaaaggcaacggccagatttggagacacatgttccactgcactggcactgagcagcatatgggcgattgtcccgttactgcccttggggctagtttgtgtccttccgagcaggttgctagtgtgatctgtagcggcaaccagagtcagacgctcagctcgtgtaacagctcatcactcgggccgacgagaccaacaatcccagaggaatccgccgttgcctgtatagagtctgggcagctccggcttgtgaacgggggcggcaggtgtgccgggagggtggaaatttatcacgagggttcttggggaacaatctgtgatgacagctgggatttatcagacgctcacgtcgtctgtagacagcttggatgcggcgaagccataaacgccaccggatctgctcacttcggagaggggactggcccaatttggctggacgaaatgaagtgtaatggcaaggaaagtcgaatttggcagtgccattctcacggttgggggcagcagaactgccgccacaaggaagacgctggtgtgatatgttccgaatttatgtcactccgtctgactagcgaggcatcaagagaggcctgtgctgggaggctggaggtgttctacaatggcgcctgggggaccgtgggtaagtcatctatgagtgaaacaacagtgggagttgtttgccggcaactgggatgtgctgataaaggtaagatcaacccagcatccttggataaagccatgagcatccccatgtgggtcgataatgtccagtgtccgaaaggccccgacacactttggcagtgtcccagctccccctgggagaagcggctggcttctccgagtgaagaaacttggattacttgtgacaacaaaattcgcctccaggaaggaccaacaagttgtagcggacgagtggagatctggcacggcggaagctggggcacagtgtgcgacgactcttgggatctggacgatgcccaggttgtctgccagcaattgggttgcgggcctgctttgaaagcattcaaagaagccgaatttggccaagggactggccctatttggctgaacgaggtgaagtgcaaaggcaacgaatccagcctctgggactgcccagctcgtcgctgggggcatagcgagtgtggtcacaaagaagacgccgcagtgaattgcactgacattagcgttcagaagacaccccaaaaagcgaccacggggcgctcttcccgccagtcctcattcatcgctgtcgggatattaggtgtcgttttactggctattttcgtggctctcttctttctgacgaaaaagcgtaggcagcgccagaggctcgcagtgagcagccggggcgagaacctcgtccaccaaatccagtaccgggagatgaattcctgccttaacgcagatgatctagacctcatgaacagctccggaggacattccgaacctcactag

SEQ ID NO: 263216 - DNA, 3366 bp, Artificial Sequence
  derived and/or modified sequence
atgtctaagttacggatggtgctccttgaggattctggcagtgctgacttccgacggcatttcgtcaatctatcgccatttacaatcaccgtggtcttgctcctaagcgcatgttttgtcacatcaagtttgggaggcactgacaaggagctacgcctcgttgatggagaaaataagtgctccggtagagtggaagtgaaagtccaggaagagtggggtaccgtgtgtaataatgggtggagcatggaagccgtgagcgtcatctgtaatcagcttggctgtcctaccgccattaaagcccctgggtgggctaatagttccgcaggctctggcagaatatggatggatcacgtctcttgccgcggaaacgagagcgccctgtgggactgcaaacacgatgggtggggaaagcatagtaactgtacccatcagcaggacgctggcgtgacttgttcggacggaagcaatctagagatgagactgacccgagggggaaatatgtgttctgggagaatcgagataaaattccaggggaggtgggggactgtttgcgacgacaattttaacatagaccacgcctccgtgatctgccgccagctggaatgtgggtccgcggtttcttttagtgggtcctcaaattttggcgaagggagcgggcctatctggtttgatgacttaatctgtaacggaaatgagagcgccctttggaactgcaagcatcaaggctgggggaaacataattgcgatcacgccgaagatgccggtgtgatatgctctaagggggctgatttaagcctcagacttgtagatggcgttactgaatgctcaggaagactcgaggtgaggtttcagggcgaatgggggacaatttgcgacgacggctgggattcatacgacgctgctgttgcttgtaagcagcttggctgtccaactgcagtcactgctatcggtcgcgtgaatgcttccaaaggctttggtcacatttggttggattcagtttcctgccaaggccatgaaccggctatctggcagtgcaaacaccacgaatggggaaagcactattgcaaccataatgaggatgctggggtgacgtgtagtgacggttcagacctcgaactgcggctgagaggagggggatcaagatgtgccggaacagtcgaagtggagatccagcggcttttaggtaaagtctgcgatcggggttggggactgaaggaggccgacgtcgtgtgcaggcaactcggctgtggcagcgccctaaagaccagctaccaggtgtacagcaagattcaggccaccaatacttggctcttcctttcaagttgtaacggcaatgagactagtctttgggactgcaaaaactggcagtggggtggcctgacctgtgatcattacgaggaggctaagattacgtgttccgcacacagggagccacggctcgtcggaggtgatattccttgttcgggaagggtggaagtcaaacatggcgacacctggggctctatctgcgattctgacttctcactggaggccgctagtgtgttatgccgtgaattacagtgcggcactgtggtatccattctcggtggggctcactttggcgagggcaatggacagatttgggccgaggaattccagtgcgagggccacgaatctcatctcagcctgtgtccagtggctcctagacccgaaggcacctgttctcacagcagggacgtaggcgtcgtgtgcagtcgatacacagagattaggttagtgaatggcaaaactccttgtgagggtagagtcgagctcaagacactgggcgcatggggctcactctgcaattctcactgggacattgaagatgctcatgtcctgtgccagcaactcaagtgtggagtcgccctgagcaccccaggaggggctcgcttcggcaagggcaacggtcagatctggcgccacatgtttcattgtaccggaacagaacagcatatgggcgactgtcccgtgacagctttgggcgctagtttgtgccccagcgaacaagttgcctcggtgatttgctctggcaatcagtcccagacactcagtagctgtaatagttccagtctgggcccaaccaggccgaccatccccgaagagtctgcagtcgcttgtatcgagtccggacaattgcggctcgtaaacgggggtggacgctgtgccggaagggtcgagatttatcacgagggctcatggggcactatttgcgacgatagctgggatctgtccgacgcccatgtcgtgtgtcgccagctgggctgcggggaggctataaacgcaaccgggtctgctcatttcggcgaggggaccgggccaatctggctcgacgagatgaagtgcaatggaaaagagagcaggatttggcagtgccacagccatggctggggtcagcaaaactgtcggcacaaggaggacgctggcgtgatctgtagcgaatttatgagtctgagactgacctctgaagcctcaagggaagcctgtgccggtcgcttggaagtgttctacaacggcgcttggggcacagttgggaagtcttccatgtctgagacaactgttggcgttgtctgtaggcagttaggctgtgccgacaagggtaagatcaatccagcaagcctggacaaggccatgtctatccccatgtgggttgataatgtccagtgtccaaagggtccagataccctgtggcagtgccccagttcaccctgggagaaacgcctagcatctccctcagaagaaacatggatcacctgcgacaacaagattaggctgcaggagggccctaccagctgctccggccgagtcgaaatctggcatggaggcagctggggtactgtatgtgatgacagctgggatttggacgacgcccaggtggtgtgtcagcagctagggtgcggcccagccttgaaagctttcaaagaagccgagttcggacaagggactgggcctatctggctcaacgaagtgaagtgtaaggggaatgagtcttctctatgggactgtcccgcacgcaggtggggccactcagagtgcggacataaggaagacgctgctgtgaattgcactgatatatcagtccaaaaaactccccaaaaggcaactactggacgttctagtaggcagtccagctttatcgctgtgggtattcttggagtcgtccttctggcaattttcgtggctctgttcttccttacaaagaaacggagacaacggcagaggttagcagtttcaagccgcggagaaaatctcgtgcatcagattcagtaccgggagatgaatagttgtcttaacgctgatgacttggacctgatgaactccagcggaggtcatagcgagccacactag

SEQ ID NO: 263217 - DNA, 3701 bp, Artificial Sequence
  derived and/or modified sequence
gaattcttagttgttttctttagaagaacatttctagggaataatacaagaagatttaggaatcattgaagttataaatctttggaatgagcaaactcagaatggtgctacttgaagactctggatctgctgacttcagaagacattttgtcaacttgagtcccttcaccattactgtggtcttacttctcagtgcctgttttgtcaccagttctcttggaggaacagacaaggagctgaggctagtggatggtgaaaacaagtgtagcgggagagtggaagtgaaagtccaggaggagtggggaacggtgtgtaataatggctggagcatggaagcggtctctgtgatttgtaaccagctgggatgtccaactgctatcaaagcccctggatgggctaattccagtgcaggttctggacgcatttggatggatcatgtttcttgtcgtgggaatgagtcagctctttgggattgcaaacatgatggatggggaaagcatagtaactgtactcaccaacaagatgctggagtgacctgctcagatggatccaatttggaaatgaggctgacgcgtggagggaatatgtgttctggaagaatagagatcaaattccaaggacggtggggaacagtgtgtgatgataacttcaacatagatcatgcatctgtcatttgtagacaacttgaatgtggaagtgctgtcagtttctctggttcatctaattttggagaaggctctggaccaatctggtttgatgatcttatatgcaacggaaatgagtcagctctctggaactgcaaacatcaaggatggggaaagcataactgtgatcatgctgaggatgctggagtgatttgctcaaagggagcagatctgagcctgagactggtagatggagtcactgaatgttcaggaagattagaagtgagattccaaggagaatgggggacaatatgtgatgacggctgggacagttacgatgctgctgtggcatgcaagcaactgggatgtccaactgccgtcacagccattggtcgagttaacgccagtaagggatttggacacatctggcttgacagcgtttcttgccagggacatgaacctgctatctggcaatgtaaacaccatgaatggggaaagcattattgcaatcacaatgaagatgctggcgtgacatgttctgatggatcagatctggagctaagacttagaggtggaggcagccgctgtgctgggacagttgaggtggagattcagagactgttagggaaggtgtgtgacagaggctggggactgaaagaagctgatgtggtttgcaggcagctgggatgtggatctgcactcaaaacatcttatcaagtgtactccaaaatccaggcaacaaacacatggctgtttctaagtagctgtaacggaaatgaaacttctctttgggactgcaagaactggcaatggggtggacttacctgtgatcactatgaagaagccaaaattacctgctcagcccacagggaacccagactggttggaggggacattccctgttctggacgtgttgaagtgaagcatggtgacacgtggggctccatctgtgattcggacttctctctggaagctgccagcgttctatgcagggaattacagtgtggcacagttgtctctatcctggggggagctcactttggagagggaaatggacagatctgggctgaagaattccagtgtgagggacatgagtcccatctttcactctgcccagtagcaccccgcccagaaggaacttgtagccacagcagggatgttggagtagtctgctcaagatacacagaaattcgcttggtgaatggcaagaccccgtgtgagggcagagtggagctcaaaacgcttggtgcctggggatccctctgtaactctcactgggacatagaagatgcccatgttctttgccagcagcttaaatgtggagttgccctttctaccccaggaggagcacgttttggaaaaggaaatggtcagatctggaggcatatgtttcactgcactgggactgagcagcacatgggagattgtcctgtaactgctctaggtgcttcattatgtccttcagagcaagtggcctctgtaatctgctcaggaaaccagtcccaaacactgtcctcgtgcaattcatcgtctttgggcccaacaaggcctaccattccagaagaaagtgctgtggcctgcatagagagtggtcaacttcgcctggtaaatggaggaggtcgctgtgctgggagagtagagatctatcatgagggctcctggggcaccatctgtgatgacagctgggacctgagtgatgcccacgtggtttgcagacagctgggctgtggagaggccattaatgccactggttctgctcattttggggaaggaacagggcccatctggctggatgagatgaaatgcaatggaaaagaatcccgcatttggcagtgccattcacacggctgggggcagcaaaattgcaggcacaaggaggatgcgggagttatctgctcagaattcatgtctctgagactgaccagtgaagccagcagagaggcctgtgcagggcgtctggaagttttttacaatggagcttggggcactgttggcaagagtagcatgtctgaaaccactgtgggtgtggtgtgcaggcagctgggctgtgcagacaaagggaaaatcaaccctgcatctttagacaaggccatgtccattcccatgtgggtggacaatgttcagtgtccaaaaggacctgacacgctgtggcagtgcccatcatctccatgggagaagagactggccagcccctcggaggagacctggatcacatgtgacaacaagataagacttcaggaaggacccacttcctgttctggacgtgtggagatctggcatggaggttcctgggggacagtgtgtgatgactcttgggacttggacgatgctcaggtggtgtgtcaacaacttggctgtggtccagctttgaaagcattcaaagaagcagagtttggtcaggggactggaccgatatggctcaatgaagtgaagtgcaaagggaatgagtcttccttgtgggattgtcctgccagacgctggggccatagtgagtgtgggcacaaggaagacgctgcagtgaattgcacagatatttcagtgcagaaaaccccacaaaaagccacaacaggtcgctcatcccgtcagtcatcctttattgcagtcgggatccttggggttgttctgttggccattttcgtcgcattattcttcttgactaaaaagcgaagacagagacagcggcttgcagtttcctcaagaggagagaacttagtccaccaaattcaataccgggagatgaattcttgcctgaatgcagatgatctggacctaatgaattcctcaggaggccattctgagccacactgaaaaggaaaatgggaatttataacccagtgagttcagcctttaagataccttgatgaagacctggactattgaatggagcagaaattcacctctctcactgactattacagttgcatttttatggagttcttcttctcctaggattcctaagactgctgctgaatttataaaaattaagtttgtgaatgtgactacttagtggtgtatatgagactttcaagggaattaaataaataaataagaatgtta

SEQ ID NO: 263218 - DNA, 3366 bp, Artificial Sequence
  derived and/or modified sequence
atgagcaagctgagaatggtgctgctggaggacagcggcagcgccgacttcagaagacacttcgtgaacctgagccccttcaccatcaccgtggtgctgctgctgagcgcctgcttcgtgaccagcagcctgggcggcaccgacaaggagctgagactggtggacggcgagaacaagtgcagcggcagagtggaggtgaaggtgcaggaggagtggggcaccgtgtgcaacaacggctggagcatggaggccgtgagcgtgatctgcaaccagctgggctgccccaccgccatcaaggcccccggctgggccaacagcagcgccggcagcggcagaatctggatggaccacgtgagctgcagaggcaacgagagcgccctgtgggactgcaagcacgacggctggggcaagcacagcaactgcacccaccagcaggacgccggcgtgacctgcagcgacggcagcaacctggagatgagactgaccagaggcggcaacatgtgcagcggcagaatcgagatcaagttccagggcagatggggcaccgtgtgcgacgacaacttcaacatcgaccacgccagcgtgatctgcagacagctggagtgcggcagcgccgtgagcttcagcggcagcagcaacttcggcgagggcagcggccccatctggttcgacgacctgatctgcaacggcaacgagagcgccctgtggaactgcaagcaccagggctggggcaagcacaactgcgaccacgccgaggacgccggcgtgatctgcagcaagggcgccgacctgagcctgagactggtggacggcgtgaccgagtgcagcggcagactggaggtgagattccagggcgagtggggcaccatctgcgacgacggctgggacagctacgacgccgccgtggcctgcaagcagctgggctgccccaccgccgtgaccgccatcggcagagtgaacgccagcaagggcttcggccacatctggctggacagcgtgagctgccagggccacgagcccgccatctggcagtgcaagcaccacgagtggggcaagcactactgcaaccacaacgaggacgccggcgtgacctgcagcgacggcagcgacctggagctgagactgagaggcggcggcagcagatgcgccggcaccgtggaggtggagatccagagactgctgggcaaggtgtgcgacagaggctggggcctgaaggaggccgacgtggtgtgcagacagctgggctgcggcagcgccctgaagaccagctaccaggtgtacagcaagatccaggccaccaacacctggctgttcctgagcagctgcaacggcaacgagaccagcctgtgggactgcaagaactggcagtggggcggcctgacctgcgaccactacgaggaggccaagatcacctgcagcgcccacagagagcccagactggtgggcggcgacatcccctgcagcggcagagtggaggtgaagcacggcgacacctggggcagcatctgcgacagcgacttcagcctggaggccgccagcgtgctgtgcagagagctgcagtgcggcaccgtggtgagcatcctgggcggcgcccacttcggcgagggcaacggccagatctgggccgaggagttccagtgcgagggccacgagagccacctgagcctgtgccccgtggcccccagacccgagggcacctgcagccacagcagagacgtgggcgtggtgtgcagcagatacaccgagatcagactggtgaacggcaagaccccctgcgagggcagagtggagctgaagaccctgggcgcctggggcagcctgtgcaacagccactgggacatcgaggacgcccacgtgctgtgccagcagctgaagtgcggcgtggccctgagcacccccggcggcgccagattcggcaagggcaacggccagatctggagacacatgttccactgcaccggcaccgagcagcacatgggcgactgccccgtgaccgccctgggcgccagcctgtgccccagcgagcaggtggccagcgtgatctgcagcggcaaccagagccagaccctgagcagctgcaacagcagcagcctgggccccaccagacccaccatccccgaggagagcgccgtggcctgcatcgagagcggccagctgagactggtgaacggcggcggcagatgcgccggcagagtggagatctaccacgagggcagctggggcaccatctgcgacgacagctgggacctgagcgacgcccacgtggtgtgcagacagctgggctgcggcgaggccatcaacgccaccggcagcgcccacttcggcgagggcaccggccccatctggctggacgagatgaagtgcaacggcaaggagagcagaatctggcagtgccacagccacggctggggccagcagaactgcagacacaaggaggacgccggcgtgatctgcagcgagttcatgagcctgagactgaccagcgaggccagcagagaggcctgcgccggcagactggaggtgttctacaacggcgcctggggcaccgtgggcaagagcagcatgagcgagaccaccgtgggcgtggtgtgcagacagctgggctgcgccgacaagggcaagatcaaccccgccagcctggacaaggccatgagcatccccatgtgggtggacaacgtgcagtgccccaagggccccgacaccctgtggcagtgccccagcagcccctgggagaagagactggccagccccagcgaggagacctggatcacctgcgacaacaagatcagactgcaggagggccccaccagctgcagcggcagagtggagatctggcacggcggcagctggggcaccgtgtgcgacgacagctgggacctggacgacgcccaggtggtgtgccagcagctgggctgcggccccgccctgaaggccttcaaggaggccgagttcggccagggcaccggccccatctggctgaacgaggtgaagtgcaagggcaacgagagcagcctgtgggactgccccgccagaagatggggccacagcgagtgcggccacaaggaggacgccgccgtgaactgcaccgacatcagcgtgcagaagaccccccagaaggccaccaccggcagaagcagcagacagagcagcttcatcgccgtgggcatcctgggcgtggtgctgctggccatcttcgtggccctgttcttcctgaccaagaagagaagacagagacagagactggccgtgagcagcagaggcgagaacctggtgcaccagatccagtacagagagatgaacagctgcctgaacgccgacgacctggacctgatgaacagcagcggcggccacagcgagccccactag

SEQ ID NO: 263219 - protein, 197 aa, Artificial Sequence
  derived and/or modified sequence
MHFRNFNYSFSSLIACVANSDIFSESETRAKFESLFRTYDKDITFQYFKSFKRVRINFSNPFSAADARLQLHKTEFLGKEMKLYFAQTLHIGSSHLAPPNPDKQFLISPPASPPVGWKQVEDATPVINYDLLYAISKLGPGEKYELHAATDTTPSVVVHVCESDQEKEEEEEMERMRRPKPKIIQTRRPEYTPIHLS

SEQ ID NO: 263220 - protein, 117 aa, Artificial Sequence
  derived and/or modified sequence
MKLYFAQTLHIGSSHLAPPNPDKQFLISPPASPPVGWKQVEDATPVINYDLLYAISKLGPGEKYELHAATDTTPSVVVHVCESDQEKEEEEEMERMRRPKPKIIQTRRPEYTPIHLS

SEQ ID NO: 263221 - DNA, 594 bp, Artificial Sequence
  derived and/or modified sequence
atgcacttccgaaactttaactacagttttagttcattgatcgcatgtgtggctaattcagatatattctccgaatcggagaccagggccaaattcgaatccctgttccgaacctatgataaggatattacatttcagtattttaagagcttcaaacgcgtccgcataaacttctctaatcccttctcagccgccgatgctcgcctgcaattacataaaacggagtttcttggaaaagagatgaaactgtatttcgcacagacccttcatatcggatcttcccacttggcaccccctaaccccgacaagcaattcttgatcagccctcctgcatcaccacctgttggctggaagcaggtggaagacgccactcccgtgatcaactacgatttgttgtacgccattagcaaactcggccccggcgagaaatatgagctgcacgccgctactgacacaactccatccgtagttgttcatgtgtgcgagtccgatcaggaaaaggaggaggaagaggaaatggagcgcatgcgccggccaaaacccaaaataatccagaccagaagacctgaatacaccccaattcatctgtcatag

SEQ ID NO: 263222 - DNA, 594 bp, Artificial Sequence
  derived and/or modified sequence
atgcacttcaggaacttcaactacagcttcagcagcctcatcgcctgtgtggccaacagcgacatcttcagcgagagcgagacccgggccaagtttgagagcctcttccgcacctatgacaaggacatcaccttccagtacttcaagagcttcaagagggtgcgcatcaacttcagcaaccccttctctgctgctgatgcccggctgcagctgcacaagacagagttcctgggcaaggagatgaagctgtactttgcccagaccctgcacatcggcagcagccacctggccccacccaacccagacaagcagttcctgatcagccccccagccagcccccctgtgggctggaagcaggtggaggatgccacccctgtgatcaactatgacctgctgtatgccatcagcaagctgggccctggagagaagtatgagctgcacgccgccacagacaccaccccatctgtggtggtgcacgtgtgtgagagtgaccaggagaaggaggaggaggaggagatggagaggatgagaagacccaagcccaagatcatccagaccaggaggcctgagtacacccccatccacctgtcctag

SEQ ID NO: 263223 - DNA, 594 bp, Artificial Sequence
  derived and/or modified sequence
atgcacttccggaacttcaactacagcttcagcagcctgatcgcctgcgtggctaattcggacattttctctgagagtgaaacccgagccaaattcgagtccctattccgtacatatgacaaggacattaccttccaatattttaagtctttcaaaagagtgcggatcaatttcagcaaccctttttcggccgctgatgcccgcttacagttgcacaaaactgaattccttgggaaggagatgaagctttatttcgctcagacattgcatattgggtcttctcacctggctccccctaatcctgataagcaatttctgatctctccccccgctagcccccctgttggttggaaacaggtggaagatgctaccccagttataaattatgacctgctttatgccatttctaaactagggccaggagagaaatacgagttgcatgcggcaacagacacaacccccagtgttgttgtccatgtgtgcgagtcagaccaggagaaagaggaagaggaggagatggagaggatgcgacgccccaagcctaagattattcaaacgagacggcccgaatacactcccatccacctcagttag

SEQ ID NO: 263224 - DNA, 594 bp, Artificial Sequence
  derived and/or modified sequence
atgcactttcgaaactttaattatagcttctctagtctcatagcttgtgtagcgaactctgacatctttagtgagagcgaaacacgcgcaaagtttgaaagtctttttaggacatatgacaaggacataacctttcagtactttaaaagcttcaagcgagtcaggattaacttttccaaccccttttctgccgctgatgctagactgcagctccacaagaccgagttcctgggcaaagaaatgaagttatacttcgcccagacactgcatattgggagctctcacctcgctccaccgaatcctgacaaacaatttctgatctcacccccagcttctcctcccgttggctggaagcaggtggaagacgccacacccgtcatcaattatgacctgctgtacgcgatttctaagctggggcctggagaaaagtatgaattgcacgctgcaacagataccacgccttctgtggtggtacatgtgtgtgaaagcgatcaagagaaagaagaggaagaggaaatggagcggatgcgaaggccaaagcctaagattatacagacacggaggccggagtacacccccattcacttgtcgtag

SEQ ID NO: 263225 - DNA, 2408 bp, Artificial Sequence
  derived and/or modified sequence
tgtctgcctgcaagcatgcaggacttgactcaggaatttgctgtccaaacaggatgctgtggaagctgcactttttttttccccagggagtgggggctggcccttactgctttataagcaccagctcaagaaggaacctacagcctcttggaaaggaatctcactaggggcttgactgcgtgggtctgtagcgctttcactgtaagaaagcaagatgcattttagaaactttaactacagttttagctccctgattgcctgtgtggcaaacagtgatatcttcagcgaaagtgaaaccagggccaaatttgagtccctctttaggacgtatgacaaggacatcacctttcagtattttaagagcttcaaacgagtcagaataaacttcagcaaccccttctccgcagcagatgccaggctccagctgcataagactgagtttctgggaaaggaaatgaagttatattttgctcagaccttacacataggaagctcacacctggctccgccaaatccagacaagcagtttctgatctcccctcccgcctctccgccagtgggatggaaacaagtggaagatgcgaccccagtcataaactatgatctcttatatgccatctccaagctggggccaggggaaaagtatgaattgcacgcagcgactgacaccactcccagcgtggtggtccatgtatgtgagagtgatcaagagaaggaggaagaagaggaaatggaaagaatgaggagacctaagccaaaaattatccagaccaggaggccggagtacacgccgatccacctcagctgaactggcacgcgacgaggacgcattccaaatcatactcacgggaggaatcttttactgtggaggtggctggtcacgacttcttcggaggtggcagccgagatcggggtggcagaaatcccagttcatgttgctcagaagagaatcaaggccgtgtccccttgttctaatgctgcacaccagttactgttcatggcacccgggaatgacttgggccaatcactgagtttgtggtgatcgcacaaggacatttgggactgtcttgagaaaacagataatgatagtgttttgtacttgttcttttctggtaggttctgtctgtgccaagggcaggttgatcagtgagctcaggagagagcttcctgtttctaagtggcctgcaggggccactctctactggtaggaagaggtaccacaggaagccgcctagtgcagagaggttgtgaaaacagcagcaatgcaatgtggaaattgtagcgtttcctttcttccctcatgttctcatgtttgtgcatgtatattactgatttacaagactaacctttgttcgtatataaagttacaccgttgttgttttacatcttttgggaagccaggaaagcgtttggaaaacgtatcacctttcccagattctcggattctcgactctttgcaacagcacttgcttgcggaactcttcctggaatgcattcactcagcatccccaaccgtgcaacgtgtaacttgtgcttttgcaaaagaagttgatctgaaattcctctgtagaatttagcttatacaattcagagaatagcagtttcactgccaacttttagtgggtgagaaattttagtttaggtgtttgggatcggacctcagtttctgttgtttcttttatgtggtggtttctatacatgaatcatagccaaaaacttttttggaaactgttggttgagatagttggttcttttaccccacgaagacatcaagatacacttgtaaataaagctgatagcatatattcatacctgttgtacacttgggtgaaaagtatggcagtgggagactaagatgtattaacctacctgtgaatcatatgttgtaggaaaagctgttcccatgtctaacaggacttgaattcaaagcatgtcaagtggatagtagatctgtggcgatatgagagggatgcagtgcctttccccattcattcctgatggaattgttatactaggttaacatttgtaatttttttctagttgtaatgtgtatgtctggtaaataggtattatattttggccttacaataccgtaacaatgtttgtcattttgaaatacttaatgccaagtaacaatgcatgctttggaaatttggaagatggttttattctttgagaagcaaatatgtttgcattaaatgctttgattgttcatatcaagaaattgattgaacgttctcaaaccctgtttacggtacttggtaagagggagccggtttgggagagaccattgcatcgctgtccaagtgtttcttgttaagtgcttttaaactggagaggctaacctcaaaatattttttttaactgcattctataataaatgggcacagtatgctccttacagaaaa

SEQ ID NO: 263226 - DNA, 594 bp, Artificial Sequence
  derived and/or modified sequence
atgcacttcagaaacttcaactacagcttcagcagcctgatcgcctgcgtggccaacagcgacatcttcagcgagagcgagaccagagccaagttcgagagcctgttcagaacctacgacaaggacatcaccttccagtacttcaagagcttcaagagagtgagaatcaacttcagcaaccccttcagcgccgccgacgccagactgcagctgcacaagaccgagttcctgggcaaggagatgaagctgtacttcgcccagaccctgcacatcggcagcagccacctggccccccccaaccccgacaagcagttcctgatcagcccccccgccagcccccccgtgggctggaagcaggtggaggacgccacccccgtgatcaactacgacctgctgtacgccatcagcaagctgggccccggcgagaagtacgagctgcacgccgccaccgacaccacccccagcgtggtggtgcacgtgtgcgagagcgaccaggagaaggaggaggaggaggagatggagagaatgagaagacccaagcccaagatcatccagaccagaagacccgagtacacccccatccacctgagctag

SEQ ID NO: 263227 - protein, 267 aa, Artificial Sequence
  derived and/or modified sequence
MAATFFGEVVKAPCRAGTEDEEEEEEGRRETPEDREVRLQLARKREVRLLRRQTKTSLEVSLLEKYPCSKFIIAIGNNAVAFLSSFVMNSGVWEEVGCAKLWNEWCRTTDTTHLSSTEAFCVFYHLKSNPSVFGSCPRKNMQITILTCRHVTDYKTSESTGSLPSPFLRALKTQNFKDSACCPLLEQPNIVHDLPAAVLSYCQVWKIPAILYLCYTDVMKLDLITVEAFKPILSTRSLKGLVKNIPQSTEILKKLMTTNEIQSNIYT

SEQ ID NO: 263228 - DNA, 804 bp, Artificial Sequence
  derived and/or modified sequence
atggctgctactttcttcggggaggtggtgaaagccccttgccgggctggcaccgaagacgaagaggaagaagaggagggaaggcgggaaacacccgaggaccgagaagtgcggctgcagttagcccgcaaaagagaggtcaggctgttaaggcgccagaccaagacttccctggaggttagcctgctggagaagtatccttgtagcaaattcatcatcgccattggcaataatgctgtcgccttcctgagcagtttcgtaatgaattcaggagtgtgggaggaggttggttgtgccaagctctggaatgaatggtgtcgcaccaccgacactactcatctgtcctccaccgaggccttttgtgtattctaccacttgaagagtaacccaagtgtgttcgggtcatgccctagaaagaacatgcagattaccatactgacctgtcggcacgtgactgattacaagaccagcgaatcaacagggagtcttcccagtcccttcctgagagcgctgaagacccagaatttcaaggactccgcatgttgcccgttactggagcaaccaaatatcgtgcacgacctcccggcggctgttctctcctattgtcaggtttggaaaatccccgccatcctttatctctgttacactgacgtgatgaagctggacctcattaccgtcgaggcctttaagcctatccttagtacacgctccctgaagggccttgtaaaaaatatcccacaatcaaccgagattcttaaaaaactcatgaccacaaatgaaatccaatcgaacatttacacctag

SEQ ID NO: 263229 - DNA, 804 bp, Artificial Sequence
  derived and/or modified sequence
atggccgccaccttcttcggggaggtggtgaaggccccctgccgggccggcacagaagatgaggaggaggaggaggagggccggcgggagaccccagaagatcgggaggtgcggctgcagctggccaggaagcgggaggtgcggctgctgcggcggcagaccaagaccagcctggaggtgtccctgctggagaagtacccctgcagcaagttcatcatcgccatcggcaacaatgctgtggccttcctgagcagctttgtgatgaacagcggcgtgtgggaggaggtgggctgtgccaagctgtggaatgagtggtgcaggaccacagacaccacccacctgagcagcacagaggccttctgtgtgttctaccacctgaagagcaaccccagcgtgtttggcagctgccccaggaagaacatgcagatcaccatcctgacctgccgccacgtgacagactacaagaccagcgagagcacaggcagcctgcccagccccttcctgcgggccctgaagacccagaacttcaaggacagcgcctgctgccccctgctggagcagcccaacatcgtgcatgacctgcctgctgctgtgctgagctactgccaggtgtggaagatcccagccatcctgtacctgtgctacacagatgtgatgaagctggacctgatcaccgtggaggccttcaagcccatcctgagcaccaggagcctgaagggcctggtgaagaacatcccccagagcacagagatcctgaagaagctgatgaccaccaatgagatccagagcaacatctacacctag

SEQ ID NO: 263230 - DNA, 804 bp, Artificial Sequence
  derived and/or modified sequence
atggccgccaccttcttcggcgaggtggtgaaggccccctgccgggccgggaccgaagacgaggaggaggaggaagagggccgccgggagactccggaggacagggaagttcgcttgcagcttgcccgaaaacgggaagttcggcttctgcgtcgacagaccaagacctctctcgaagtgtcgctgttagaaaagtatccttgcagcaagttcattatcgctatcggtaacaacgccgtggcgtttctgtcaagcttcgtcatgaacagtggcgtgtgggaggaggttggatgcgctaagttgtggaacgagtggtgcagaacaaccgatacgacacatctaagttccaccgaggctttttgtgtattctaccacctcaaaagcaatccttccgtgtttggctcatgcccacgcaagaacatgcagataacgatccttacttgccgacacgtgactgattacaagaccagcgagtcgacggggagcctgccatcccccttcctgcgcgccctgaaaacccaaaattttaaagattcggcctgctgccctctcttagagcagccaaacatagttcacgatctgcccgctgctgtcctatcctattgccaggtctggaagatccctgccattctgtatttgtgctacactgacgtcatgaagttggacctgatcactgttgaagctttcaagcccatacttagcacccggtctctaaaagggctggtgaaaaacatcccgcagtcaaccgagatcttaaaaaaacttatgacaacgaacgaaattcagtccaatatctatacctag

SEQ ID NO: 263231 - DNA, 804 bp, Artificial Sequence
  derived and/or modified sequence
atggcagcaactttcttcggggaagtggtcaaagccccatgcagggccggaaccgaggacgaagaagaggaggaggagggccgaagagaaacccccgaagaccgggaagttcgactacaactcgccaggaagcgagaggttagactgttgcgtaggcaaaccaaaactagtcttgaagtgagccttctggagaagtacccctgtagcaagttcattatcgccattggtaataatgctgttgcctttcttagctcatttgtgatgaatagtggagtatgggaagaggtgggttgcgccaagttgtggaatgaatggtgccggaccacagacactacccatctctccagcacagaggccttctgcgtattttaccacttgaaaagtaaccctagcgtgtttgggtcctgtccccgtaaaaatatgcaaatcaccatcttgacttgccgacacgtgactgactataaaacttctgaatccaccggaagcctacccagcccctttttgcgtgctctgaaaacccaaaactttaaggattctgcttgttgtcccttgcttgagcagccaaacattgtgcatgatctgcccgcagccgtcctgtcttactgtcaggtgtggaagattcccgcaatcctgtacttgtgctacacagacgttatgaagttagatttaattacagtcgaagcctttaaacccatcttgagcactcggtctttgaagggacttgtgaaaaatatccctcagagtacggagatccttaagaagctcatgacaactaacgagatccagtccaatatctatacgtag

SEQ ID NO: 263232 - DNA, 907 bp, Artificial Sequence
  derived and/or modified sequence
ggggcgggacttattgcccgcgcggtgagggagcgtggtctcgcgcaagccggcgtgcggtcccgcggcgctgcagttgtgtccagccggtcacggggcggctatggcggccacgttcttcggagaggtggtgaaggcgccgtgccgagctgggactgaggacgaagaggaggaggaggaggggcggagggagacgcccgaggacagggaggtgcgtctgcagctggcgcggaagagggaagtgcggctccttcgaagacaaacaaaaacatctttggaagtttctttgctagaaaaatatccgtgctccaagtttataattgctataggaaataatgcagtagcatttctgtcatcatttgttatgaattcaggagtctgggaggaagttggttgtgctaaactctggaatgaatggtgtagaacaacagacactacacatctgtcctccacagaggctttttgtgtgttttatcatctaaaatccaatccctcggtttttggctcttgtccaaggaagaacatgcagataactattctcacatgtcgacatgttaccgattataaaacctcagaatccaccggcagccttccttctcctttcctgagagccctaaaaacacagaatttcaaagactcggcgtgttgtccattgctagaacaaccgaatatagtacacgaccttcctgcagcagttctaagctactgtcaagtatggaaaatcccagcaattctgtacttgtgttatactgatgtgatgaaattagacctaatcacagtggaagcttttaagcctatactttctaccagaagcttgaagggtttggttaagaatattccccaaagcactgagatactaaagaaattgatgacaacaaatgagattcagagtaacatttatacatga

SEQ ID NO: 263233 - DNA, 804 bp, Artificial Sequence
  derived and/or modified sequence
atggccgccaccttcttcggcgaggtggtgaaggccccctgcagagccggcaccgaggacgaggaggaggaggaggagggcagaagagagacccccgaggacagagaggtgagactgcagctggccagaaagagagaggtgagactgctgagaagacagaccaagaccagcctggaggtgagcctgctggagaagtacccctgcagcaagttcatcatcgccatcggcaacaacgccgtggccttcctgagcagcttcgtgatgaacagcggcgtgtgggaggaggtgggctgcgccaagctgtggaacgagtggtgcagaaccaccgacaccacccacctgagcagcaccgaggccttctgcgtgttctaccacctgaagagcaaccccagcgtgttcggcagctgccccagaaagaacatgcagatcaccatcctgacctgcagacacgtgaccgactacaagaccagcgagagcaccggcagcctgcccagccccttcctgagagccctgaagacccagaacttcaaggacagcgcctgctgccccctgctggagcagcccaacatcgtgcacgacctgcccgccgccgtgctgagctactgccaggtgtggaagatccccgccatcctgtacctgtgctacaccgacgtgatgaagctggacctgatcaccgtggaggccttcaagcccatcctgagcaccagaagcctgaagggcctggtgaagaacatcccccagagcaccgagatcctgaagaagctgatgaccaccaacgagatccagagcaacatctacacctag

SEQ ID NO: 263234 - protein, 173 aa, Artificial Sequence
  derived and/or modified sequence
MMETRKPAERLALPYSLRTAPLGVPGTLPGLPRRDPLRVALRLDAACWEWARSGCARGWQYLPVPLDSAFEPAFLRKRNERERQRVRCVNEGYARLRDHLPRELADKRLSKVETLRAAIDYIKHLQELLERQAWGLEGAAGAVPQRRAECNSDGESKASSAPSPSSEPEEGGS

SEQ ID NO: 263235 - DNA, 522 bp, Artificial Sequence
  derived and/or modified sequence
atgatggagacaagaaagcccgcggagcgtctcgccctgccctacagtttacggacggcccccctgggcgtccccggcaccctccctggcctcccaaggcgcgatccactacgtgtggctctgcgcctggacgctgcctgttgggagtgggcacggtcgggctgcgctaggggctggcagtacctcccagttcctctggatagcgctttcgagcccgcgtttcttaggaaacgaaatgaacgcgagaggcagagggtaaggtgcgttaatgaaggctatgctcgactccgagaccaccttccacgcgagttagctgacaaaaggctgagcaaggtggagaccttgcgcgcggctattgactacattaagcacctccaagagctgctcgagagacaggcctgggggcttgagggggcagcaggggctgtgccacagagacgcgcggagtgtaacagcgacggggaaagcaaagcctcgtccgccccaagcccatcttcagagcccgaggagggcggtagttag

SEQ ID NO: 263236 - DNA, 522 bp, Artificial Sequence
  derived and/or modified sequence
atgatggagaccaggaagccagctgagcggctggccctgccctacagcctgaggacagcccccctgggcgtgcccggcaccctgcccggcctgccccggcgggaccccctgcgggtggccctgcggctggatgctgcctgctgggagtgggcccggagcggctgtgcccggggctggcagtacctgcctgtgcccctggacagcgcctttgagcccgccttcctgaggaagagaaatgaaagagagcggcagagggtgcgctgtgtgaatgaaggctacgcccggctgcgggaccacctgccccgggagctggccgacaagaggctgagcaaggtggagaccctgcgggccgccatcgactacatcaagcacctgcaggagctgctggagcggcaggcctggggcctggagggcgccgccggggctgtgccccagaggagagctgagtgcaacagtgatggagagagcaaggccagcagcgcccccagccccagcagcgagcctgaggagggcggcagctag

SEQ ID NO: 263237 - DNA, 2260 bp, Artificial Sequence
  derived and/or modified sequence
tatgttggaacataatatgcagacccttatattctttgctacagtctgtatttttcctatacccttcaaacatgcctcattgagtttttaaaagattcggtttggaagaagaaaaacctcaagcctcgccccgggtcttccttgacttgacacattttataaccgcaagagagcagtttttcctttgatgaggctaagaccccagaaatgaaagagcaagtttaagtttgcaaacactctaaaagctccttccattagacctggtcgcgggaaaccacaaaggacagtcaagtgattttcaaggagaaagcctctggtccactttccctccgccgccagatctgcaggttcctgggaggagctcttctcaaatcctgaagattgctaggctcttggcgaacgactcatctcttgaagacctagagtggtggattacaggcattgaaaagcttttggtggctttggaagatgactctggtgtgagctcacctttccaggctgggggaccaggcagaggaaccccctttgttatcttctgaaagaagatcagtggggaagacggggtttgaagtgtggattaggagatcctacgtctttgcctaccacctctgcctaaatcataaaaagatcgaggagtgcaatgaacttcaggaatcatgcaccgtttccctgaagcctgtccaggaacctaacttctggacccagaaacttctgcaaagacagacccactgagccaggcagtctgcaccagcacctctgcttctaagattctgtttcgtcttcttctattgagagattgacctcttgagtgatttgtgtgctttccggcaaatgatggagacgcgtaaaccggcggaacggctggccttgccatactcgctgcgcaccgcgcccctgggcgttccggggaccctgcccggactcccgcggagggaccccctcagggtcgccctgcgtctggacgccgcgtgctgggagtgggcgcgcagcggctgcgcacggggatggcagtacttgcccgtgccgctggacagcgccttcgagcccgccttcctccgcaagcgcaacgagcgcgagcggcagcgggtgcgctgcgtgaacgagggctatgcgcgcctccgagaccacctgccccgggagctggcagacaagcgcctcagcaaagtggagacgctccgcgctgccatcgactacatcaagcacctgcaggagctgctggagcgccaggcctgggggctcgagggcgcggccggcgccgtcccccagcgcagggcggaatgcaacagcgacggggagtccaaggcctcttcggcgccttcgcccagcagcgagcccgaggaggggggcagctagcgagcgcccgaactggccaggacccccgcgcccgccgcacagcgcgcagccgggcgctcaacctaaggtcctcttcgaaggtggtttgcattcttaatctggcatcttctccaggcctaaatcttaagaaaaagaaatgggtgctggggtttgggggatgggggagttgttttgacatttgggaatttctcccctgcccttattggttacgtgcctgcaacttataggtgcttattaaggagactcttttcctatacttctaaaatgcaaactgtttcagattctgagcacctcattgtaaatacgattattctaaaaactcaaagggcgagaacaactggaatttcccaccttccgtggtgtgggtaaatggtatacataaacattaaaccttaaccaaagaagaactttaccgccaccaaaacagaaacaaccccaaacagccaaaaacagtccttaaaaatgagaggaacattttcttgcattccttccttcgggaattgtattcaaaatgtaatggaaagtaattgttgacctcctgctttgggtgaaggagactgtaagctggtacttgagaacgaatttgccagcatgtgctgttgttgactgtgtgaatgatggtgccagggaatccgtggcttggtacacactgtttcatccagtggccacgtggaagctttgtagcattgagcagatagtaaaatatcttagaattaatgatctctttggaagagagcccagatttgtatgaaaacttgtttttcctctcaattgttttgtccactgttttcttcattttccttttctctgcataccccccgccccccaacgtgtagctctccatctaagttttggataaactgaagtggcactgtgactttaaaaataaaaaagaaatctacttgga

SEQ ID NO: 263238 - DNA, 522 bp, Artificial Sequence
  derived and/or modified sequence
atgatggagacccggaagcccgccgagcggctggccctgccctacagcttgagaactgccccactgggtgtcccagggaccctacctggattgcctcgtagggatcccctgagggtcgcactgaggctggatgcagcgtgctgggaatgggcccgctcaggctgtgccaggggatggcagtacctgcccgtgccccttgatagtgcctttgaaccagctttcctgaggaagagaaatgagcgcgagcgccagagggtgcgatgtgtgaacgaaggctacgctcggctgagagaccatctgcctagggaacttgctgacaagagactgagcaaagttgagaccctgagggccgccatcgactatattaagcacttgcaggaacttctcgagcgccaggcctggggactcgagggcgccgccggggcagtgccccagagaagagctgagtgcaatagtgacggcgaaagcaaggcgtccagcgcccccagtccttccagtgagccggaggagggtggcagctag

SEQ ID NO: 263239 - DNA, 522 bp, Artificial Sequence
  derived and/or modified sequence
atgatggagactcgtaaacctgcagaaaggcttgcattaccatattctctacgcacggctccactcggggttcctggaacactgcccggactcccacggcgagaccccctgcgggtcgctttaaggttggatgctgcctgttgggagtgggctaggtcaggttgcgcgcgaggctggcaatatctacccgtcccattggacagcgctttcgagcccgcatttcttcgcaaacgcaatgagagggaaagacagcgagtgagatgtgttaacgaggggtacgcccgactgcgcgaccatctgcctcgggagcttgccgataagagactgagcaaagttgaaaccctccgggctgcgatcgactatatcaaacacctgcaggaactgctcgaaagacaagcgtgggggcttgagggcgctgcaggcgctgttccacagagacgagccgagtgtaactcagatggagaatctaaagcgtcgtcagcaccatcccctagcagcgaacctgaggagggcggttcctag

SEQ ID NO: 263240 - DNA, 522 bp, Artificial Sequence
  derived and/or modified sequence
atgatggagaccagaaagcccgccgagagactggccctgccctacagcctgagaaccgcccccctgggcgtgcccggcaccctgcccggcctgcccagaagagaccccctgagagtggccctgagactggacgccgcctgctgggagtgggccagaagcggctgcgccagaggctggcagtacctgcccgtgcccctggacagcgccttcgagcccgccttcctgagaaagagaaacgagagagagagacagagagtgagatgcgtgaacgagggctacgccagactgagagaccacctgcccagagagctggccgacaagagactgagcaaggtggagaccctgagagccgccatcgactacatcaagcacctgcaggagctgctggagagacaggcctggggcctggagggcgccgccggcgccgtgccccagagaagagccgagtgcaacagcgacggcgagagcaaggccagcagcgcccccagccccagcagcgagcccgaggagggcggcagctag

SEQ ID NO: 263241 - protein, 683 aa, Artificial Sequence
  derived and/or modified sequence
MRLWKAVVVTLAFMSVDICVTTAIYVFSHLDRSLLEDIRHFNIFDSVLDLWAACLYRSCLLLGATIGVAKNSALGPRRLRASWLVITLVCLFVGIYAMVKLLLFSEVRRPIRDPWFWALFVWTYISLGASFLLWWLLSTVRPGTQALEPGAATEAEGFPGSGRPPPEQASGATLQKLLSYTKPDVAFLVAASFFLIVAALGETFLPYYTGRAIDGIVIQKSMDQFSTAVVIVCLLAIGSSFAAGIRGGIFTLIFARLNIRLRNCLFRSLVSQETSFFDENRTGDLISRLTSDTTMVSDLVSQNINVFLRNTVKVTGVVVFMFSLSWQLSLVTFMGFPIIMMVSNIYGKYYKRLSKEVQNALARASNTAEETISAMKTVRSFANEEEEAEVYLRKLQQVYKLNRKEAAAYMYYVWGSGLTLLVVQVSILYYGGHLVISGQMTSGNLIAFIIYEFVLGDCMESVGSVYSGLMQGVGAAEKVFEFIDRQPTMVHDGSLAPDHLEGRVDFENVTFTYRTRPHTQVLQNVSFSLSPGKVTALVGPSGSGKSSCVNILENFYPLEGGRVLLDGKPISAYDHKYLHRVISLVSQEPVLFARSITDNISYGLPTVPFEMVVEAAQKANAHGFIMELQDGYSTETGEKGAQLSGGQKQRVAMARALVRNPPVLILDEATSALDAESEYLCAG

SEQ ID NO: 263242 - DNA, 2052 bp, Artificial Sequence
  derived and/or modified sequence
atgaggttgtggaaagccgtggtggtgacgctggcatttatgagtgtagacatatgtgtgactactgccatctacgtcttttctcatctcgatcggagcctgttagaagacatcagacattttaacatttttgatagcgtccttgatttatgggccgcatgtctctacagatcatgcctactcttgggcgccactatcggagtcgccaaaaattccgccctgggacctcggcgtctgagagccagttggttggtgataactctagtctgcctctttgtgggcatctatgcgatggtaaaactgctattgttttcagaagttcgcagacccatcagagacccctggttttgggccttgtttgtttggacatatattagcctcggggcctcatttcttctgtggtggctgctgtcaacggtccgcccggggacacaggcactggaacccggcgccgccaccgaggccgaggggttccccggatcaggacgccctcccccagaacaagcttcaggagcaactctacaaaagttgcttagctataccaagcctgacgtggcattcctcgttgctgccagcttctttctcatagttgccgcattaggagaaaccttcctcccttactacacaggccgggccatcgacggcattgtgatccagaaatcgatggaccagttttccacggcagttgtgatcgtatgtctgctcgcgatcggtagttcctttgcagcaggtattaggggcgggatttttaccttgatatttgctagactgaatatacggctacgcaactgtcttttccgaagcctggtgagccaggaaacatccttctttgatgagaataggactggcgaccttatttctcgccttaccagtgataccaccatggtttctgacctggtcagccagaatattaacgtcttcctcagaaacactgtaaaggtgacaggtgtggtagtcttcatgttttcgctttcctggcagctgtctttggtaacattcatgggttttccgatcattatgatggtgagtaatatctatgggaagtactacaagaggcttagcaaagaagttcagaacgcccttgctcgggcctccaatacagctgaggagactatctcggccatgaagacagtgcgctcttttgcgaacgaggaagaggaggccgaggtctacttacgtaagctgcagcaggtctacaaactgaaccggaaagaggccgccgcatatatgtactacgtatgggggagcggcctcaccctgctcgtggttcaggtgtcaatcctgtattacggaggccatctcgtgatctcagggcaaatgactagcggtaacctgatcgccttcataatctatgagtttgtcttgggagactgtatggagtctgtcgggtcagtatatagtgggcttatgcaaggagttggcgcagctgagaaggtctttgaattcatagacagacagcctaccatggtgcacgacggctctctggcccccgatcacctcgaagggagagtggacttcgagaacgtgacattcacctatcggacccgaccacacacacaggtgttacagaacgtttccttctccttatcccccgggaaggtcacagcactggtcgggcctagtgggtctggcaagagcagctgtgtgaacattctggagaatttctacccccttgaagggggaagagtgctgcttgatggaaaacccatctccgcatacgaccacaaatacttacatagagtcatctcgttggtcagccaagagcctgtcctcttcgctcggagcattacggacaatatcagctacggcctacctacggtgccctttgaaatggtagtggaggccgctcagaaggcaaatgcccacgggttcattatggaacttcaggatggctactccaccgaaaccggcgagaagggagcccagttgtccggaggtcagaagcagcgtgtggcaatggcgagggccttagtgaggaacccccccgttcttatcctggacgaggccacatccgcgttggacgccgaatcagaatacctgtgtgcaggttag

SEQ ID NO: 263243 - DNA, 2052 bp, Artificial Sequence
  derived and/or modified sequence
atgaggctgtggaaggctgtggtggtgaccctggccttcatgtctgtggacatctgtgtgaccacagccatctacgtgttcagccacctggacaggagcctgctggaggacatccgccacttcaacatctttgacagcgtgctggacctgtgggccgcctgcctgtaccgcagctgcctgctgctgggcgccaccatcggcgtggccaagaacagcgccctgggcccccggcggctgcgggcctcctggctggtgatcaccctggtgtgcctgtttgtgggcatctatgccatggtgaagctgctgctcttcagcgaggtgcggcggcccatccgggacccctggttctgggccctgtttgtgtggacctacatcagcctgggcgccagcttcctgctgtggtggctgctgagcacagtgcggcccggcacccaggccctggagcctggagctgccacagaagctgagggcttccctggcagcggccggcccccacctgagcaggccagcggggccaccctgcagaagctgctgagctacaccaagccagatgtggccttcctggtggccgccagcttcttcctgattgtggccgccctgggggagaccttcctgccctactacacaggccgggccattgatggcatcgtcatccagaagtccatggaccagttcagcacagctgtggtgattgtgtgcctgctggccatcggcagcagctttgctgctggcatccggggcggcatcttcaccctcatctttgcccggctgaacatccggctgaggaactgcctcttccgcagcctggtgtcccaggagaccagcttctttgatgaaaatagaactggagacctgatcagccggctgaccagtgacaccaccatggtgtctgacctggtgtcccagaacatcaacgtgttcctgaggaacacagtgaaggtgactggagtggtggtgttcatgttcagcctgtcctggcagctgagcctggtgaccttcatgggcttccccatcatcatgatggtgagcaacatctacggcaagtactacaagaggctgagcaaggaggtgcagaatgccctggcccgggccagcaacacagctgaggagaccatcagcgccatgaagacagtgcgcagctttgccaatgaggaggaggaggccgaggtgtacctgaggaagctgcagcaggtgtacaagctgaacaggaaggaggccgccgcctacatgtactacgtgtggggcagcggcctgaccctgctggtggtgcaggtgtccatcctgtactacggcggccacctggtgatcagcggccagatgaccagcggcaacctgattgccttcatcatctatgaatttgtgctgggggactgcatggagagcgtgggctctgtgtacagcggcctgatgcagggcgtgggcgctgctgagaaggtgtttgagttcatcgaccggcagcccaccatggtgcatgatggcagcctggccccagaccacctggagggccgggtggactttgaaaatgtgaccttcacctaccgcacccggccccacacccaggtgctgcagaatgtgtccttcagcctgagccctgggaaggtgacagccctggtgggccccagcggcagcggcaagagcagctgtgtgaacatcctggagaacttctaccccctggagggcggccgggtgctgctggatggcaagcccatcagcgcctatgaccacaagtacctgcacagggtcatcagcctggtgtcccaggagcctgtgctgtttgcccggagcatcacagacaacatctcctatggcctgcccaccgtgccctttgagatggtggtggaggccgcccagaaggccaatgcccacggcttcatcatggagctgcaggacggctacagcacagagaccggggagaagggggcccagctgagcggcggccagaagcagagggtggccatggcccgggccctggtgagaaatcctcctgtgctgatcctggatgaggccaccagcgccctggatgctgagagcgagtacctgtgtgccggctag

SEQ ID NO: 263244 - DNA, 2052 bp, Artificial Sequence
  derived and/or modified sequence
atgcggctgtggaaggccgtggtggtgaccctggccttcatgagcgtggacatctgtgtgaccaccgccatctacgtgttctctcacctcgatcggtcactgctggaagacatacgccacttcaacatctttgacagtgttcttgacctgtgggctgcatgtttatacaggagctgcctgcttctcggtgccaccatcggcgtggctaagaacagcgcactgggtcctcgccgcttgcgcgcctcatggttggtgatcactctggtgtgcctctttgtcgggatttacgccatggtcaagttattgctgttctctgaagtgcggagacccatccgtgacccctggttctgggctctgtttgtttggacttacatcagcctcggggccagctttctgctttggtggctcctcagtacagtccgcccgggtacacaggctctggagcccggcgccgcgacagaggcggaagggtttcctgggagcggtaggcccccgccagagcaggcctctggggctacgctccagaaactgctgagttatactaagccggatgtggcctttctggtggcggcaagttttttcttgatagtcgccgcacttggagagaccttcctcccatactacactggccgcgcgatcgatggaattgtgatacagaagtcgatggatcaattctccacagcggtggttatcgtgtgtttgctggcaatcggtagctcttttgcggcaggcatcagaggtggcatcttcaccctgatcttcgcacgactgaacattaggctgcgtaattgtctctttaggagcctggtgagccaggagactagctttttcgacgaaaaccgtactggggatttaattagtcgtttgaccagtgatactaccatggtctctgatctcgtgagccaaaatataaacgtattcctgaggaacaccgtcaaagttaccggggttgtggttttcatgttcagcttatcctggcagttaagtttggtcacatttatgggatttcccatcattatgatggtatcaaacatctacggaaagtattacaaacgtcttagtaaggaagtgcagaatgctcttgccagagccagtaatactgctgaggaaaccatatccgcgatgaagacagtgcggtctttcgcaaatgaagaggaggaagcagaagtttatcttcgcaaactgcaacaggtgtacaaattgaaccgtaaggaggctgccgcttacatgtattacgtgtggggcagtggcctcacactgctggtggttcaggtgtcaatcctgtattacggtggccacctagtgatctctggtcaaatgacaagcggcaatctcattgcattcatcatatacgaatttgttctgggagactgtatggagtcggtcggctctgtttattcaggcctaatgcaaggcgttggcgccgccgaaaaagtgttcgagtttatcgatcggcaacctactatggtccatgatggtagtttggccccggaccacctggaagggagggtggactttgaaaatgttacattcacctataggacacgcccacacactcaagtgctccaaaatgtgagtttctcgttatctcctggtaaggtgactgctctggttggcccttctggaagtggtaagtcttcctgcgtcaacattctggagaacttctacccgctcgagggcggccgagttctgctcgatggaaaacctatcagtgcctatgatcacaagtacctgcatagagtgatctcgctcgtgagccaggaaccagtgctcttcgccagatctataactgataacattagctacggccttccaacagtgcctttcgagatggtagttgaagctgctcagaaagccaatgcccatgggttcattatggagctgcaggacggctatagtactgagacgggggaaaagggcgcccagcttagcggcggacagaagcaaagagtggctatggctcgcgctctggttaggaatccccccgtgctgattctggatgaagccacatcagcgcttgatgccgaatccgaatacctttgtgcaggctag

SEQ ID NO: 263245 - DNA, 2052 bp, Artificial Sequence
  derived and/or modified sequence
atgcggctttggaaagccgtcgtggttaccctagcctttatgtctgtggacatatgcgtcactacagccatatacgtgttctcccacctagataggagtctgctcgaagatattcgtcactttaatatctttgattcggtgcttgacctgtgggctgcctgtctgtaccggagctgcctcttgcttggggctaccattggcgtggccaagaactctgccttaggtcctagaagactccgggctagttggctcgtgattacactggtgtgtctatttgtgggcatatacgccatggtcaaactgttgctgttcagcgaagtgaggaggcctatcagggacccctggttttgggctttgtttgtgtggacctacatttccctcggcgcatcttttctgctatggtggctgctgtcgacggtgagacctggaacccaggcccttgaaccgggagctgctaccgaggctgaaggattccctggatccgggagaccacctccagagcaggcaagcggggctacattgcagaagctgctatcctataccaagccagatgtcgcattcctggtcgccgctagctttttcctgatcgttgctgccctcggcgaaacattcttgccctattacacaggccgtgccatagacggaattgtgattcagaagagtatggatcaatttagcaccgcagttgtgattgtttgccttctggccattggttccagttttgctgccggaattcgcggaggtatctttacactgatcttcgcccgtctgaacatcagacttcggaattgcctgtttcgaagcctggtgagccaggaaacttccttctttgatgagaaccggacgggtgatctgatttcacgcctgacctccgatactacgatggtgagcgacctggtttcccagaatattaatgttttcctgagaaacacagtgaaggtgaccggcgtggtcgttttcatgttctctttatcatggcagctgagtctggtaacctttatgggttttcccattattatgatggtgagcaatatttatggaaaatactacaagcgcttatccaaagaggtacaaaacgcgctggcacgcgcttcaaacactgccgaagagaccattagtgccatgaaaacagtgagatccttcgcaaatgaagaagaggaggccgaagtgtacctccgaaagctccagcaagtgtataagttgaatcgcaaggaagccgctgcttacatgtattatgtttggggcagcgggctcacattactcgtggtccaggtgagtatcctttattatgggggacatcttgtgataagcgggcagatgaccagcggcaatttaattgcttttattatctatgagttcgtgctgggtgactgcatggagagcgtcggaagcgtttattccggtctcatgcagggcgtcggagccgcagagaaggtgttcgagtttattgaccggcagcccacaatggtgcacgacggttcccttgcaccagatcacctggaaggccgtgtagactttgagaacgtgacgtttacatatagaacacgtccccatactcaggtgctgcagaacgtgagctttagtctctcccccggaaaagtgacagccctcgtcgggccaagtggaagtggcaaatcttcctgcgtgaacatcctggagaatttctatcccctagagggcggacgcgtcctgttagacggaaaacctatttccgcttacgatcacaagtacctacatcgtgttataagcctggtgagccaggaaccggtcttgtttgcccgttcgattacggacaatattagctatgggctcccgaccgtcccatttgagatggtggtcgaggcagcccagaaagcaaacgcgcatggatttataatggaacttcaagacggatactctacagagactggggaaaagggagctcagctgtccggaggacagaaacagcgagtggcaatggccagggctctcgtgcgcaatcccccagtgcttattctcgacgaagccacttcggccctggacgccgaaagtgaatacctgtgtgccggttag

SEQ ID NO: 263246 - DNA, 2587 bp, Artificial Sequence
  derived and/or modified sequence
ctcagctccgaccttgcagcggcgcagcgcgggtgggaggcggggaggagcagcgggaagagcggagcgaggaccgcgtccggcgcagtcttcaatgagcagcgcggaaactgcaccccagacccgagcctgctgcgcgccccctcccagagctcacctggtgccaggtaacaggcctggcctcgccctgtggatgatgatggccttgcccccgtgagctacaacctggccttcagcacccgcccacctccaaccagcaggatgcggctgtggaaggcggtggtggtgactttggccttcatgagtgtggacatctgcgtgaccacggccatctatgtcttcagccacctggaccgcagcctcctggaggacatccgccacttcaacatctttgactcggtgctggatctctgggcagcctgcctgtaccgcagctgcctgctgctgggagccaccattggtgtggccaagaacagtgcgctggggccccggcggctgcgggcctcgtggctggtcatcaccctcgtgtgcctcttcgtgggcatctatgccatggtgaagctgctgctcttctcagaggtgcgcaggcccatccgggacccctggttttgggccctgttcgtgtggacgtacatttcactcggcgcatccttcctgctctggtggctgctgtccaccgtgcggccaggcacccaggccctggagccaggggcggccaccgaggctgagggcttccctgggagcggccggccaccgcccgagcaggcgtctggggccacgctgcagaagctgctctcctacaccaagcccgacgtggccttcctcgtggccgcctccttcttcctcatcgtggcagctctgggagagaccttcctgccctactacacgggccgcgccattgatggcatcgtcatccagaaaagcatggatcagttcagcacggctgtcgtcatcgtgtgcctgctggccattggcagctcatttgccgcaggtattcggggcggcatttttaccctcatatttgccagactgaacattcgccttcgaaactgtctcttccgctcactggtgtcccaggagacaagcttctttgatgagaaccgcacaggggacctcatctcccgcctgacctcggacaccaccatggtcagcgacctggtctcccagaacatcaatgtcttcctgcggaacacagtcaaggtcacgggcgtggtggtcttcatgttcagcctctcatggcagctctccttggtcaccttcatgggcttccccatcatcatgatggtgtccaacatctacggcaagtactacaagaggctctccaaagaggtccagaatgccctggccagagcgagcaacacggcggaggagaccatcagtgccatgaagactgtccggagcttcgccaatgaggaggaggaggcagaggtgtacctgcggaagctgcagcaggtgtacaagctgaacaggaaggaggcagctgcctacatgtactacgtctggggcagcgggctcacactgctggtggtccaggtcagcatcctctactacgggggccaccttgtcatctcaggccagatgaccagcggcaacctcatcgccttcatcatctacgagtttgtcctgggagattgtatggagtccgtgggctccgtctacagtggcctgatgcagggagtgggggctgctgagaaggtgttcgagttcatcgaccggcagccgaccatggtgcacgatggcagcttggcccccgaccacctggagggccgggtggactttgagaatgtgaccttcacctaccgcactcggccccacacccaggtcctgcagaatgtctccttcagcctgtcccccggcaaggtgacggccctggtggggccctcgggcagtgggaagagctcctgtgtcaacatcctggagaacttctaccccctggaggggggccgggtgctgctggacggcaagcccatcagcgcctacgaccacaagtacttgcaccgtgtgatctccctggtgagccaggagcccgtgctgttcgcccgctccatcacggataacatctcctacggcctgcccactgtgcctttcgagatggtggtggaggccgcacagaaggccaatgcccacggcttcatcatggaactccaggacggctacagcacagagacaggggagaagggcgcccagctgtcaggtggccagaagcagcgggtggccatggcccgggctctggtgcggaaccccccagtcctcatcctggatgaagccaccagcgctttggatgccgagagcgagtatctgtgtgctgggtaaaccaggagaaagtaattgcagtcgagggctttgggaacagcacagttggccagagagacagatgaggaaaacaagcagggatgagagagaatgaagaggagcacggcaccccagggctggcttagtcctggcgccaggacttagtttactctgtcattgtttctttcccacattagagtttgtcttcatcactgctgtattccccagtgcctagaacagtggctgacacatagtatgtgctcagtaaacagccattaaagaaatgtttgagctg

SEQ ID NO: 263247 - DNA, 2052 bp, Artificial Sequence
  derived and/or modified sequence
atgagactgtggaaggccgtggtggtgaccctggccttcatgagcgtggacatctgcgtgaccaccgccatctacgtgttcagccacctggacagaagcctgctggaggacatcagacacttcaacatcttcgacagcgtgctggacctgtgggccgcctgcctgtacagaagctgcctgctgctgggcgccaccatcggcgtggccaagaacagcgccctgggccccagaagactgagagccagctggctggtgatcaccctggtgtgcctgttcgtgggcatctacgccatggtgaagctgctgctgttcagcgaggtgagaagacccatcagagacccctggttctgggccctgttcgtgtggacctacatcagcctgggcgccagcttcctgctgtggtggctgctgagcaccgtgagacccggcacccaggccctggagcccggcgccgccaccgaggccgagggcttccccggcagcggcagacccccccccgagcaggccagcggcgccaccctgcagaagctgctgagctacaccaagcccgacgtggccttcctggtggccgccagcttcttcctgatcgtggccgccctgggcgagaccttcctgccctactacaccggcagagccatcgacggcatcgtgatccagaagagcatggaccagttcagcaccgccgtggtgatcgtgtgcctgctggccatcggcagcagcttcgccgccggcatcagaggcggcatcttcaccctgatcttcgccagactgaacatcagactgagaaactgcctgttcagaagcctggtgagccaggagaccagcttcttcgacgagaacagaaccggcgacctgatcagcagactgaccagcgacaccaccatggtgagcgacctggtgagccagaacatcaacgtgttcctgagaaacaccgtgaaggtgaccggcgtggtggtgttcatgttcagcctgagctggcagctgagcctggtgaccttcatgggcttccccatcatcatgatggtgagcaacatctacggcaagtactacaagagactgagcaaggaggtgcagaacgccctggccagagccagcaacaccgccgaggagaccatcagcgccatgaagaccgtgagaagcttcgccaacgaggaggaggaggccgaggtgtacctgagaaagctgcagcaggtgtacaagctgaacagaaaggaggccgccgcctacatgtactacgtgtggggcagcggcctgaccctgctggtggtgcaggtgagcatcctgtactacggcggccacctggtgatcagcggccagatgaccagcggcaacctgatcgccttcatcatctacgagttcgtgctgggcgactgcatggagagcgtgggcagcgtgtacagcggcctgatgcagggcgtgggcgccgccgagaaggtgttcgagttcatcgacagacagcccaccatggtgcacgacggcagcctggcccccgaccacctggagggcagagtggacttcgagaacgtgaccttcacctacagaaccagaccccacacccaggtgctgcagaacgtgagcttcagcctgagccccggcaaggtgaccgccctggtgggccccagcggcagcggcaagagcagctgcgtgaacatcctggagaacttctaccccctggagggcggcagagtgctgctggacggcaagcccatcagcgcctacgaccacaagtacctgcacagagtgatcagcctggtgagccaggagcccgtgctgttcgccagaagcatcaccgacaacatcagctacggcctgcccaccgtgcccttcgagatggtggtggaggccgcccagaaggccaacgcccacggcttcatcatggagctgcaggacggctacagcaccgagaccggcgagaagggcgcccagctgagcggcggccagaagcagagagtggccatggccagagccctggtgagaaacccccccgtgctgatcctggacgaggccaccagcgccctggacgccgagagcgagtacctgtgcgccggctag

SEQ ID NO: 263248 - protein, 1350 aa, Artificial Sequence
  derived and/or modified sequence
MRKRWACWSGSDAPGGCGGGCGRRRRRSRRKRAASEERRMAFSKGFRIYHKLDPPPFSLIVETRHKEECLMFESGAVAVLSSAEKEAIKGTYSKVLDAYGLLGVLRLNLGDTMLHYLVLVTGCMSVGKIQESEVFRVTSTEFISLRIDSSDEDRISEVRKVLNSGNFYFAWSASGISLDLSLNAHRSMQEQTTDNRFFWNQSLHLHLKHYGVNCDDWLLRLMCGGVEIRTIYAAHKQAKACLISRLSCERAGTRFNVRGTNDDGHVANFVETEQVVYLDDSVSSFIQIRGSVPLFWEQPGLQVGSHRVRMSRGFEANAPAFDRHFRTLKNLYGKQIIVNLLGSKEGEHMLSKAFQSHLKASEHAADIQMVNFDYHQMVKGGKAEKLHSVLKPQVQKFLDYGFFYFNGSEVQRCQSGTVRTNCLDCLDRTNSVQAFLGLEMLAKQLEALGLAEKPQLVTRFQEVFRSMWSVNGDSISKIYAGTGALEGKAKLKDGARSVTRTIQNNFFDSSKQEAIDVLLLGNTLNSDLADKARALLTTGSLRVSEQTLQSASSKVLKSMCENFYKYSKPKKIRVCVGTWNVNGGKQFRSIAFKNQTLTDWLLDAPKLAGIQEFQDKRSKPTDIFAIGFEEMVELNAGNIVSASTTNQKLWAVELQKTISRDNKYVLLASEQLVGVCLFVFIRPQHAPFIRDVAVDTVKTGMGGATGNKGAVAIRMLFHTTSLCFVCSHFAAGQSQVKERNEDFIEIARKLSFPMGRMLFSHDYVFWCGDFNYRIDLPNEEVKELIRQQNWDSLIAGDQLINQKNAGQVFRGFLEGKVTFAPTYKYDLFSDDYDTSEKCRTPAWTDRVLWRRRKWPFDRSAEDLDLLNASFQDESKILYTWTPGTLLHYGRAELKTSDHRPVVALIDIDIFEVEAEERQNIYKEVIAVQGPPDGTVLVSIKSSLPENNFFDDALIDELLQQFASFGEVILIRFVEDKMWVTFLEGSSALNVLSLNGKELLNRTITIALKSPDWIKNLEEEMSLEKISIALPSSTSSTLLGEDAEVAADFDMEGDVDDYSAEVEELLPQHLQPSSSSGLGTSPSSSPRTSPCQSPTISEGPVPSLPIRPSRAPSRTPGPPSAQSSPIDAQPATPLPQKDPAQPLEPKRPPPPRPVAPPTRPAPPQRPPPPSGARSPAPTRKEFGGIGAPPSPGVARREMEAPKSPGTTRKDNIGRSQPSPQAGLAGPGPAGYSTARPTIPPRAGVISAPQSHARASAGRLTPESQSKTSETSKGSTFLPEPLKPQAAFPPQSSLPPPAQRLQEPLVPVAAPMPQSGPQPNLETPPQPPPRSRSSHSLPSEASSQPQQEQPSG

SEQ ID NO: 263249 - DNA, 450 bp, Artificial Sequence
  derived and/or modified sequence
atgaagcctgcgggtaacggattcccaagccccttggctggacccggctcccgccgcggttgtgtcccaggcctcaccacctggatccgggcgagagctcgggagactggaagtagaaggggccgaaatgtcttctcccccgagcgtgctgccgggtcaggcggctgtttctgctcaggaagaatcccccgcgtatcagccgtcgatgcgttgagggttgccggtgctcggagagctgcagtctcccgcgggaaagcaggggtacctctgcggtatcgggagcgacatctagaactgagtgagtggcctagaaagcccgctcgcgcccacttccctgccaggaccggatgctggtggttctggtggctgctcagtggtggaactcctgggaccagcaaaggtgggttcatctggctgtatctgacctggcaattcttgctgaacaagtag

SEQ ID NO: 263250 - protein, 1990 aa, Artificial Sequence
  derived and/or modified sequence
MATLPSAERRAFALKINRYSSAEIRKQFTLPPNLGQYHRQSISTSGFPSLQLPQFYDPVEPVDFEGLLMTHLNSLDVQLAQELGDFTDDDLDVVFTPKECRTLQPSLPEEGVELDPHVRDCVQTYIREWLIVNRKNQGSPEICGFKKTGSRKDFHKTLPKQTFESETLECSEPAAQAGPRHLNVLCDVSGKGPVTACDFDLRSLQPDKRLENLLQQVSAEDFEKQNEEARRTNRQAELFALYPSVDEEDAVEIRPVPECPKEHLGNRILVKLLTLKFEIEIEPLFASIALYDVKERKKISENFHCDLNSDQFKGFLRAHTPSVAASSQARSAVFSVTYPSSDIYLVVKIEKVLQQGEIGDCAEPYTVIKESDGGKSKEKIEKLKLQAESFCQRLGKYRMPFAWAPISLSSFFNVSTLEREVTDVDSVVGRSSVGERRTLAQSRRLSERALSLEENGVGSNFKTSTLSVSSFFKQEGDRLSDEDLFKFLADYKRSSSLQRRVKSIPGLLRLEISTAPEIINCCLTPEMLPVKPFPENRTRPHKEILEFPTREVYVPHTVYRNLLYVYPQRLNFVNKLASARNITIKIQFMCGEDASNAMPVIFGKSSGPEFLQEVYTAVTYHNKSPDFYEEVKIKLPAKLTVNHHLLFTFYHISCQQKQGASVETLLGYSWLPILLNERLQTGSYCLPVALEKLPPNYSMHSAEKVPLQNPPIKWAEGHKGVFNIEVQAVSSVHTQDNHLEKFFTLCHSLESQVTFPIRVLDQKISEMALEHELKLSIICLNSSRLEPLVLFLHLVLDKLFQLSVQPMVIAGQTANFSQFAFESVVAIANSLHNSKDLSKDQHGRNCLLASYVHYVFRLPEVQRDVPKSGAPTALLDPRSYHTYGRTSAAAVSSKLLQARVMSSSNPDLAGTHSAADEEVKNIMSSKHFHEELALQMVVSTGMVRETVFKYAWFFFELLVKSMAQHVHNMDKRDSFRRTRFSDRFMDDITTIVNVVTSEIAALLVKPQKENEQAEKMNISLAFFLYDLLSLMDRGFVFNLIRHYCSQLSAKLSNLPTLISMRLEFLRILCSHEHYLNLNLFFMNADTAPTSPCPSISSQNSSSCSSFQDQKIASMFDLTSEYRQQHFLTGLLFTELAAALDAEGEGISKVQRKAVSAIHSLLSSHDLDPRCVKPEVKVKIAALYLPLVGIILDALPQLCDFTVADTRRYRTSGSDEEQEGAGAINQNVALAIAGNNFNLKTSGIVLSSLPYKQYNMLNADTTRNLMICFLWIMKNADQSLIRKWIADLPSTQLNRILDLLFICVLCFEYKGKQSSDKVSTQVLQKSRDVKARLEEALLRGEGARGEMMRRRAPGNDRFPGLNENLRWKKEQTHWRQANEKLDKTKAELDQEALISGNLATEAHLIILDMQENIIQASSALDCKDSLLGGVLRVLVNSLNCDQSTTYLTHCFATLRALIAKFGDLLFEEEVEQCFDLCHQVLHHCSSSMDVTRSQACATLYLLMRFSFGATSNFARVKMQVTMSLASLVGRAPDFNEEHLRRSLRTILAYSEEDTAMQMTPFPTQVEELLCNLNSILYDTVKMREFQEDPEMLMDLMYRIAKSYQASPDLRLTWLQNMAEKHTKKKCYTEAAMCLVHAAALVAEYLSMLEDHSYLPVGSVSFQNISSNVLEESVVSEDTLSPDEDGVCAGQYFTESGLVGLLEQAAELFSTGGLYETVNEVYKLVIPILEAHREFRKLTLTHSKLQRAFDSIVNKDHKRMFGTYFRVGFFGSKFGDLDEQEFVYKEPAITKLPEISHRLEAFYGQCFGAEFVEVIKDSTPVDKTKLDPNKAYIQITFVEPYFDEYEMKDRVTYFEKNFNLRRFMYTTPFTLEGRPRGELHEQYRRNTVLTTMHAFPYIKTRISVIQKEEFVLTPIEVAIEDMKKKTLQLAVAINQEPPDAKMLQMVLQGSVGATVNQGPLEVAQVFLAEIPADPKLYRHHNKLRLCFKEFIM

SEQ ID NO: 263251 - protein, 2099 aa, Artificial Sequence
  derived and/or modified sequence
MATLPSAERRAFALKINRYSSAEIRKQFTLPPNLGQYHRQSISTSGFPSLQLPQFYDPVEPVDFEGLLMTHLNSLDVQLAQELGDFTDDDLDVVFTPKECRTLQPSLPEEGVELDPHVRDCVQTYIREWLIVNRKNQGSPEICGFKKTGSRKDFHKTLPKQTFESETLECSEPAAQAGPRHLNVLCDVSGKGPVTACDFDLRSLQPDKRLENLLQQVSAEDFEKQNEEARRTNRQAELFALYPSVDEEDAVEIRPVPECPKEHLGNRILVKLLTLKFEIEIEPLFASIALYDVKERKKISENFHCDLNSDQFKGFLRAHTPSVAASSQARSAVFSVTYPSSDIYLVVKIEKVLQQGEIGDCAEPYTVIKESDGGKSKEKIEKLKLQAESFCQRLGKYRMPFAWAPISLSSFFNVSTLEREVTDVDSVVGRSSVGERRTLAQSRRLSERALSLEENGVGSNFKTSTLSVSSFFKQEGDRLSDEDLFKFLADYKRSSSLQRRVKSIPGLLRLEISTAPEIINCCLTPEMLPVKPFPENRTRPHKEILEFPTREVYVPHTVYRNLLYVYPQRLNFVNKLASARNITIKIQFMCGEDASNAMPVIFGKSSGPEFLQEVYTAVTYHNKSPDFYEEVKIKLPAKLTVNHHLLFTFYHISCQQKQGASVETLLGYSWLPILLNERLQTGSYCLPVALEKLPPNYSMHSAEKVPLQNPPIKWAEGHKGVFNIEVQAVSSVHTQDNHLEKFFTLCHSLESQVTFPIRVLDQKISEMALEHELKLSIICLNSSRLEPLVLFLHLVLDKLFQLSVQPMVIAGQTANFSQFAFESVVAIANSLHNSKDLSKDQHGRNCLLASYVHYVFRLPEVQRDVPKSGAPTALLDPRSYHTYGRTSAAAVSSKLLQARVMSSSNPDLAGTHSAADEEVKNIMSSKIADRNCSRMSYYCSGSSDAPSSPAAPRPASKKHFHEELALQMVVSTGMVRETVFKYAWFFFELLVKSMAQHVHNMDKRDSFRRTRFSDRFMDDITTIVNVVTSEIAALLVKPQKENEQAEKMNISLAFFLYDLLSLMDRGFVFNLIRHYCSQLSAKLSNLPTLISMRLEFLRILCSHEHYLNLNLFFMNADTAPTSPCPSISSQNSSSCSSFQDQKIASMFDLTSEYRQQHFLTGLLFTELAAALDAEGEGISKVQRKAVSAIHSLLSSHDLDPRCVKPEVKVKIAALYLPLVGIILDALPQLCDFTVADTRRYRTSGSDEEQEGAGAINQNVALAIAGNNFNLKTSGIVLSSLPYKQYNMLNADTTRNLMICFLWIMKNADQSLIRKWIADLPSTQLNRILDLLFICVLCFEYKGKQSSDKVSTQVLQKSRDVKARLEEALLRGEGARGEMMRRRAPGNDRFPGLNENLRWKKEQTHWRQANEKLDKTKAELDQEALISGNLATEAHLIILDMQENIIQASSALDCKDSLLGGVLRVLVNSLNCDQSTTYLTHCFATLRALIAKFGDLLFEEEVEQCFDLCHQVLHHCSSSMDVTRSQACATLYLLMRFSFGATSNFARVKMQVTMSLASLVGRAPDFNEEHLRRSLRTILAYSEEDTAMQMTPFPTQVEELLCNLNSILYDTVKMREFQEDPEMLMDLMYRIAKSYQASPDLRLTWLQNMAEKHTKKKCYTEAAMCLVHAAALVAEYLSMLEDHSYLPVGSVSFQNISSNVLEESVVSEDTLSPDEDGVCAGQYFTESGLVGLLEQAAELFSTGGLYETVNEVYKLVIPILEAHREFRKLTLTHSKLQRAFDSIVNKDHKRMFGTYFRVGFFGSKFGDLDEQEFVYKEPAITKLPEISHRLEAFYGQCFGAEFVEVIKDSTPVDKTKLDPNKAYIQITFVEPYFDEYEMKDRVTYFEKNFNLRRFMYTTPFTLEGRPRGELHEQYRRNTVLTTMHAFPYIKTRISVIQKEEFVLTPIEVAIEDMKKKTLQLAVAINQEPPDAKMLQMVLQGSVGATVNQGPLEVAQVFLAEIPADPKLYRHHNKLRLCFKEFIMRCGEAVEKNKRLITADQREYQQELKKNYNKLKENLRPMIERKIPELYKPIFRVESQKRDSFHRSSFRKCETQLSQGS

SEQ ID NO: 263252 - DNA, 5973 bp, Artificial Sequence
  derived and/or modified sequence
atggctacattacctagtgctgagaggagagcattcgcactcaaaatcaacaggtattcttcagcagagataaggaagcaatttacgttacccccgaacctcggacagtatcatcgtcagtccatttccacttctggcttcccctctctccagttaccccaattttatgatccagtggagccagtggactttgaagggctgttaatgacccacctcaatagcctagatgtgcagttagcgcaggaactaggagatttcacagacgatgacctggacgtggtcttcacgccaaaagagtgcagaacactccagccttcactaccagaggagggagtcgagctggatcctcacgtgagggattgcgtgcagacctatattcgggaatggctcattgtgaacagaaaaaaccagggcagtcccgagatctgcggattcaagaagacgggaagcagaaaggatttccataaaactctgcccaagcagacctttgagtctgaaactctggagtgctcagagcctgctgctcaagccgggcctcgccacctaaatgtgctctgtgatgttagcggtaaggggccagtgaccgcctgcgacttcgatctgcggtcacttcaacccgacaagaggctggaaaatctcctgcagcaggtgtccgctgaagatttcgagaaacagaatgaggaagcccgccgaactaaccgccaggccgagctttttgctctatacccctctgtggatgaagaggatgccgtggagatccgccccgtgccagaatgccccaaggaacacctgggaaatcgtattctggtgaaactgctcactcttaagttcgaaatagaaatcgaacctctctttgcatcaatcgcactttatgacgtgaaagagcggaaaaagatatcggagaatttccactgtgacctgaattcagaccaattcaagggtttcctccgtgctcatacgcccagtgtagctgccagcagccaggcacgaagtgctgttttttccgtcacatatcccagctccgacatatatctcgtggtgaagattgagaaggtgctgcagcaaggagagattggagattgtgccgagccttacacggtaatcaaagagagcgacggcgggaaatcaaaggagaaaatagagaagctgaagctgcaagcagagtctttctgtcagcggttgggaaagtatcgcatgccttttgcttgggcaccaatatccctcagtagcttcttcaacgtgtcaaccctggaaagggaggtcacagacgttgacagtgtggttggtaggtcctctgtcggagaaaggagaacgctcgctcagtccagacgcttgtccgaaagagcactgtccctagaggagaacggagtggggtctaattttaagacttcgacactgtctgtctcttccttcttcaaacaggaaggtgaccgcctatcagacgaagacctgttcaaatttctcgcggactataaacggagtagcagtttgcaaaggcgggtcaagagcatacctgggctgctccgccttgagatctccacagctccagaaatcattaactgctgtctgacgcccgaaatgttgccagtgaagccctttccagagaataggacgagaccccataaggaaattcttgaattccctacacgggaagtgtatgttccgcatactgtgtaccgaaacttactgtatgtatacccacagagactgaacttcgtgaacaagctcgcttcagcccggaatatcacgatcaagatccagtttatgtgtggggaggatgcaagtaacgccatgccagtgatattcgggaaatcctcaggccctgaatttctacaggaagtgtataccgctgtgacatatcataataagagtccagacttttacgaggaggtgaaaattaagctgccagctaaattaaccgtaaaccaccatctgttgttcacattttaccatattagctgtcagcaaaaacagggggcttcggtagagacacttctgggatactcatggctgccaattctactgaatgagagactgcagactggttcctactgccttcccgtcgccttagaaaagttgccacctaactattcgatgcacagtgccgagaaagttcccctccagaatcctcctattaagtgggcagagggccataagggagtctttaacatcgaagtgcaggcagtcagcagcgtgcacactcaagataaccatttggaaaagttttttactctctgccactccttagagtcccaagttacctttcctatacgagttttggatcaaaagatcagtgaaatggctctggaacacgaattaaagcttagtattatctgtttgaactcgtctaggcttgaacccttggtgctatttcttcatctggtgttagataagctgttccagttgtccgtacagcccatggtgattgctgggcagactgcgaacttctcacaatttgcttttgaatcagtggttgccattgctaatagcctgcataactccaaggacctgagcaaagaccagcacggaagaaactgcctattggcatcctacgtacattatgtttttaggttgccagaagtccagcgggatgtgccaaagtcaggcgcccccaccgccctgctggacccacggtcttaccacacctacggtaggactagtgctgccgccgtgtccagcaagctgctgcaggcgcgcgtgatgtctagctctaaccccgatttggctgggacacatagcgctgccgatgaagaggtaaagaacatcatgagctccaagcacttccatgaggagctggcactgcagatggtcgtgagtacaggtatggtcagagagactgtctttaagtatgcgtggttcttctttgagttgcttgttaagagtatggcgcagcacgtgcataatatggataagagagactcttttcgaaggaccagattttccgaccgattcatggacgacatcacaaccatagtgaacgtggttaccagtgaaattgccgcgctgctggtcaagccccagaaggagaatgaacaagccgaaaagatgaatatctctctggcattctttctttatgacttactgtcactcatggataggggattcgtgtttaacctgataaggcattattgcagtcagctcagtgctaaactgagtaacctgcctaccctcatttcaatgcgccttgaattccttaggatcctgtgtagccacgagcactatctaaacctcaatcttttctttatgaacgccgacacagcacctacttccccgtgcccttctatatcgagtcaaaatagtagttcatgcagctcatttcaggaccagaagatcgcaagcatgtttgatctcacgtccgagtaccgtcagcagcatttcctgacgggcttattattcactgagttagctgccgctcttgatgcggagggagaggggatatctaaggtgcaaaggaaggctgtgagcgccatccactccctcctaagttcacacgaccttgaccctaggtgcgtgaagcctgaggtgaaagtcaagattgctgctctctacctgcctctggtcgggatcattctagatgcactaccacagctctgtgactttaccgtagctgataccagaaggtaccggacgagcgggtctgacgaagagcaggaaggcgccggagctatcaaccagaatgtcgcactcgccattgcaggcaacaacttcaacttaaagaccagcggtatcgttctgagctccctgccctataagcagtataatatgttgaatgcagatactacacggaatctgatgatctgctttctttggatcatgaaaaacgccgatcaatctctgattaggaaatggattgcagatctcccctcgacccaattaaataggatcctcgatctgttgttcatttgtgtgctgtgctttgagtataaaggcaagcagtcaagtgataaagtgagcacacaggtcctgcagaagagccgtgacgtgaaagcaaggctggaagaggccctcctccggggtgagggcgcccgaggggaaatgatgaggcgccgtgcgcctggcaacgacagattcccagggcttaacgagaacttacgatggaagaaggaacagacgcactggaggcaggccaacgagaaactggacaaaactaaagcggaactggaccaggaggcgctcatctccggcaatctagccactgaagcccacctcattatactggacatgcaggagaatatcatccaggcatcctctgccctagactgtaaagattctctactcggcggagtcctgcgagtgctcgtgaattcactgaactgtgaccagagcaccacatacttgacgcactgtttcgcaactttaagggctttaatagccaagtttggggatttgctgtttgaggaagaagtggagcagtgctttgacttatgtcaccaagttttgcaccattgtagctcatctatggacgtgacgcgttcgcaggcttgcgcgacactgtatcttctgatgcgattctcctttggagcgacgtccaactttgcccgcgtcaaaatgcaagtcactatgtccctggcatccctcgtgggtcgagcccccgacttcaatgaggaacatctgcgccgaagccttcgcacaattctggcgtactcagaggaggatactgccatgcagatgacaccgtttccaacacaagtggaggaactgctctgtaacctgaactctattttgtacgacactgtgaagatgcgcgagttccaggaggaccctgagatgctcatggatctcatgtatcggatcgccaaatcttatcaggctagccccgaccttcgcctgacctggctgcagaatatggccgagaagcatactaagaaaaagtgttatactgaggccgcaatgtgtctcgtacacgccgccgccctggtggctgaatacctgagcatgctagaagaccatagttacttacccgttggcagcgtaagctttcaaaatatctcaagtaacgtcctcgaagaatctgtagtgtctgaggatactctgtcaccggatgaagacggagtatgtgccggacagtattttacggagtctggcctggttgggctgttggaacaagctgctgagctgttcagcacggggggcctttatgaaaccgtgaatgaagtatacaaattagtcatccctattctcgaggcccacagggaatttcgaaaactcacacttactcacagtaaacttcagcgtgccttcgacagtattgtcaataaagaccacaaaagaatgtttggtacctactttcgcgtgggtttcttcggcagcaaatttggcgatctggacgagcaggagtttgtttataaagagcccgcaataaccaagctgcccgagatctcccatagactggaggcgttctacggccaatgttttggagctgagttcgtggaagtgatcaaagatagcactcctgtggataagacgaaactggatccaaataaggcctacatacagattacctttgtagaaccttattttgatgagtatgaaatgaaggatcgggttacttacttcgagaaaaacttcaatctccgccggtttatgtataccacaccctttacacttgagggcagacctcgaggtgagctgcatgaacaatatagacgcaacacagtcctcaccacaatgcacgctttcccttatatcaagacgcgtatttctgtgattcagaaggaggaattcgtgctgacacctatagaggtggccatcgaagacatgaagaagaaaactttgcagctggccgtggccatcaatcaagaacctcccgatgccaagatgctgcagatggtgctacagggatcagtgggggccacagtgaaccaaggcccactggaagtcgcgcaagtcttcctcgctgaaatacctgcggacccaaaactgtaccgccatcacaataaattaaggctgtgttttaaggaatttataatgtag

SEQ ID NO: 263253 - DNA, 6300 bp, Artificial Sequence
  derived and/or modified sequence
atggccaccctcccgtccgccgaacgccgcgctttcgcacttaaaataaacaggtacagctccgctgagatcagaaaacagttcactttgccgccaaacctgggccagtatcacagacagtccattagcaccagcgggtttccaagcctccagttgcctcagttctatgacccagtggaaccggttgacttcgagggcctgttgatgactcatctcaattctctcgacgtgcaactggcgcaagaacttggggattttacagatgatgacctggatgtcgtgttcacacctaaagagtgcaggaccctgcagcctagcctgcctgaggaaggtgttgaactcgaccctcacgtcagagattgcgtccaaacttatatccgagagtggctgatagtgaacaggaagaaccagggctctccagagatatgcggctttaaaaagacagggtcacgcaaggattttcataagaccttaccgaaacagacattcgagagcgagacccttgaatgttccgaaccagcagcccaagcaggtccaaggcacctcaacgtactgtgcgatgtatcaggcaaggggccagtgaccgcgtgtgatttcgatctccgatcacttcagcctgataagagactggagaacctgttgcagcaggtgtccgccgaggactttgagaagcagaacgaagaagcacggcgaacaaaccggcaggccgaactatttgcactctacccctctgtagatgaggaggacgccgttgagatccgacccgtccccgaatgcccaaaagagcacctaggaaatcgaatcttggtgaaactgctaaccttaaagttcgagatcgagattgagcccttgtttgcaagtatcgctctatacgacgtaaaagaacggaaaaagatatccgagaatttccattgtgatctcaacagtgaccagttcaagggcttccttcgcgcccatactccatccgtggcagcctcgtcacaagccaggagcgcggtgttcagcgttacctatccaagttccgatatttatcttgtggtcaaaatagagaaagtgctacagcaaggcgaaattggtgactgtgcagagccatataccgtgatcaaagagtcagatggggggaaatctaaagagaaaatagaaaaactgaaactccaggccgagagcttctgccagaggctgggcaaatatcgcatgccgttcgcgtgggccccaataagcctttcctccttttttaacgtgtcaacactcgaaagggaagttaccgatgtggatagcgtggtcgggcggtccagcgtaggtgagagaagaactctcgcccagtcaagaagactatccgagcgggcgctgtccctagaagagaacggcgtgggctctaacttcaagacgtccacgctctctgtcagctccttcttcaagcaggagggcgataggttatccgatgaggacctttttaagttcctggcagactacaaaaggtcttcatcattgcagaggcgggtgaaatcaatcccaggcctcctaagacttgaaattagtactgctcccgagataatcaattgttgcctaaccccggaaatgctccccgtgaaacccttcccggagaataggactcggcctcataaggagatcctcgagtttcccacacgggaagtatacgtcccacacacagtgtaccgcaatctgctctacgtttaccctcagcggctgaactttgtgaataagttggcttcagcccgcaacataaccatcaagatccagttcatgtgcggtgaggacgctagcaacgctatgcctgttatcttcggaaaaagctcagggcctgagtttttgcaagaggtgtacactgcagtaacttaccataacaaatccccagacttttatgaggaagttaaaatcaagttacctgctaagctgacagtcaatcaccatttgctctttacattttaccacatctcttgccagcagaaacaaggggcttccgttgaaaccttactgggttactcatggctaccgatcttgctgaacgaaaggcttcagacagggagttactgcctgccagtggctctggaaaagctgccccctaattattctatgcatagcgcagaaaaagtgcctctccagaacccccccataaaatgggccgagggtcacaagggcgtctttaatatcgaagtgcaagcagtatcctcagtccatacccaggacaaccacttggagaagttcttcaccctgtgtcattctctcgagagccaggtaaccttccctattcgcgttcttgaccaaaagatttcagagatggctctggagcacgaattgaaactgagcatcatttgtttgaactcatcccgtctggagccactggttctctttcttcacctggtattggacaagttgttccaactaagcgtccaacccatggtgatcgcaggacagacagcaaacttctcccagtttgcctttgagtccgtggtcgccattgctaattctctgcacaacagtaaagacctgtcaaaggatcagcacggccggaactgtttgttagcatcatacgtccactacgtgttccgactgccagaagttcagcgggatgtgcccaagtccggagcacctaccgctctgctcgatcctcgaagctaccatacttacggaaggacttcagccgctgccgtttcgtcaaagttgcttcaagctagggtaatgtcttcatctaacccagacctggctggcacacattcggccgccgatgaggaagtgaaaaacataatgtcctcaaagattgcagatagaaactgctcccgaatgagctactattgctcgggttcatctgacgctccttctagtcctgcagccccccggcccgcttccaagaagcatttccacgaggaactggccctgcagatggtagtaagcactggaatggttcgggaaaccgtgttcaaatatgcgtggtttttctttgaattgctggtgaagtccatggcgcaacatgtacataatatggacaaacgggactcatttcgcagaaccaggttcagcgacaggttcatggacgatattactactatagtgaacgtcgtaactagtgaaatcgccgctttgttggtgaaaccccagaaagagaatgaacaggccgaaaagatgaacatcagcctggcctttttcttgtatgatctgctctcactcatggatcgcggcttcgtattcaacctgattagacattattgctcacaactttccgccaagttatctaacctgcccacccttatctccatgagactcgagttcctaaggatcctgtgcagccatgagcattatctgaaccttaacttgttttttatgaatgccgacacagcgcctacttcgccctgtcctagtatttccagtcagaacagttcttcatgttcctcatttcaggatcaaaagatcgccagcatgttcgacctgacttcagagtaccggcagcagcacttcttgacgggcttgcttttcactgaattggccgccgccctggacgctgagggagaaggaatttcgaaagtccagcgcaaggccgtgtccgctatccactcgttactgagttctcatgatctcgatccgcgttgtgtaaagcctgaagtaaaagtcaagatcgcagctctgtatctgccgcttgtcggtatcatcctggacgccctgcctcagctgtgtgattttactgttgccgacaccagacggtatcggacatccggtagcgatgaggagcaggaaggcgccggggctattaatcagaacgtcgcccttgctatcgctggtaacaacttcaacttgaaaacttcaggtatagtgctgtcgtctcttccatacaaacagtataatatgctcaacgccgacacgactaggaatctgatgatttgctttctatggattatgaagaacgctgaccagtcgctcattagaaagtggattgcagaccttcctagtacgcagctaaataggattctggacttactgttcatctgtgtcttatgctttgagtataagggcaagcagtcatcggacaaggtgtccactcaggtgttgcagaaatctcgggatgtgaaagctaggctagaagaggcattactgaggggcgagggagcgagaggagaaatgatgcggagacgtgcccccggcaatgatcggtttcctggactcaacgaaaacctccgttggaagaaagagcagacacattggcgacaggccaacgaaaagctggataagactaaagcagaactcgaccaagaggctttgataagtggcaatctggccaccgaagcccacctcataatcctcgatatgcaggagaatattatccaggcgagttctgcactagactgtaaggatagcctgttgggaggcgtgcttagggtgttggtcaattcattgaactgtgaccagagcactacttacctcacccattgctttgctacactccgtgcacttatcgctaaattcggcgatctgcttttcgaggaggaggtggaacagtgcttcgatttgtgtcatcaggtgcttcaccactgctcgtcttctatggatgtgactaggtcacaggcttgcgctactttatacctcctaatgagattctcttttggagccacctccaactttgcccgcgtgaaaatgcaggtgaccatgtcgctggcttccctagtgggccgtgcaccagactttaacgaggagcacctgcggcggtctctgcggaccattctggcctacagtgaagaggacacagccatgcaaatgactccgttccctactcaagtagaggaactcctctgtaacttaaacagtattctctatgacaccgtgaagatgcgtgagttccaagaagaccctgagatgctgatggatctgatgtatcggattgcaaagtcctaccaggcttcacccgacctgaggcttacctggcttcagaacatggctgagaagcacactaagaaaaagtgctataccgaggccgcaatgtgtctggtacatgctgcagcactcgttgccgagtacttgagcatgcttgaagaccactcatacctgcctgttggctctgtgagcttccagaatatatcttctaacgtgctcgaagagtccgtcgtctccgaggatactctctctccagatgaggacggcgtttgcgcaggacagtactttaccgagagcggtttggtggggcttctagagcaagcagccgagctgtttagtacgggtggcctctatgaaacggtgaatgaggtttacaagctcgtgatccccatcctcgaggcccatcgagagttccgcaaactgacgctcacccattccaagctccaacgagctttcgactctatagtcaataaggaccacaaaagaatgtttgggacatactttcgggtggggttcttcgggtctaagttcggagacctggacgaacaggagttcgtctacaaggagcccgctataactaagttgccagagatttcccaccgcttggaggcgttctacgggcaatgcttcggggcagaattcgttgaggtcatcaaagacagcacaccagtggacaaaacaaagctggatccgaataaggcctatatacaaatcacgttcgtggagccatacttcgatgagtacgagatgaaggacagagttacatatttcgaaaagaactttaatttgagacgcttcatgtatacgacccccttcacactggaagggaggcctcgaggagagttgcacgaacaatatcgccgcaacactgtactcacaaccatgcacgcctttccgtatatcaaaacaaggatatctgttattcagaaggaagagttcgtgctcacccctattgaggtagccattgaggatatgaaaaagaaaactttacagcttgcggttgccattaatcaggagcctcctgacgctaaaatgctgcagatggttttgcagggcagcgtaggcgccactgttaatcaaggacctctcgaagtggcccaggttttcctggccgaaattccagctgaccccaagttgtataggcatcataataagctgcgtttatgctttaaagagtttatcatgagatgtggagaggccgtagagaaaaataaaaggctcattaccgctgaccagcgtgaatatcagcaggaactcaaaaagaactacaataagcttaaagagaacctgcggccaatgattgagcgcaaaatccctgagctgtacaaaccaatattcagagtggagtcacagaaaagggatagttttcaccgaagttctttccgtaagtgtgagacacagttgtcccagggatcttag

SEQ ID NO: 263254 - DNA, 5973 bp, Artificial Sequence
  derived and/or modified sequence
atggccaccctgcccagcgctgagcggcgggcctttgccctgaagatcaaccgctacagcagcgctgagatcaggaagcagttcaccctgccccccaacctgggccagtaccaccggcagagcatcagcaccagcggcttccccagcctgcagctgccccagttctatgaccctgtggagcctgtggactttgagggcctgctgatgacccacctgaacagcctggatgtgcagctggcccaggagctgggggacttcacagatgatgacctggatgtggtgttcacccccaaggaatgtaggaccctgcagcccagcctgcctgaggagggcgtggagctggacccccacgtgcgggactgtgtgcagacctacatccgggagtggctgattgtgaacaggaagaaccagggcagccctgagatctgtggcttcaagaagacaggcagcaggaaggacttccacaagaccctgcccaagcagacctttgaaagtgagaccctggagtgcagcgagcctgctgcccaggccggccccaggcacctgaatgtgctgtgtgatgtgtctggaaaaggacctgtgacagcctgtgactttgacctgcggagcctgcagcctgacaagaggctggagaacctgctgcagcaggtgtctgctgaggactttgagaagcagaatgaggaggcccggaggaccaaccggcaggccgagctgtttgccctgtaccccagcgtggatgaggaggatgctgtggagatccggcctgtgcctgagtgccccaaggagcacctgggcaaccgcatcctggtgaagctgctgaccctgaagtttgaaattgaaattgagcccctgtttgccagcatcgccctgtatgatgtgaaggagaggaagaagatcagcgagaacttccactgtgacctgaacagcgaccagttcaagggcttcctgcgggcccacacccccagcgtggccgccagcagccaggcccggtctgctgtgttttctgtgacctaccccagcagtgacatctacctggtggtgaagattgagaaggtgctgcagcagggcgagatcggggactgtgccgagccctacaccgtcatcaaggagagtgatggcggcaagagcaaggagaagattgagaagctgaagctgcaggccgagagcttctgccagaggctgggcaagtacaggatgccctttgcctgggcccccatcagcctgagcagcttcttcaacgtgtccaccctggagcgggaggtgacagatgtggacagcgtggtgggccgcagctctgtgggggagaggaggaccctggcccagagccggcggctgtctgagcgggccctgagcctggaggagaatggagtgggcagcaacttcaagaccagcaccctgtctgtgagcagcttcttcaagcaggagggggaccggctgagtgatgaggacctcttcaagttcctggccgactacaagaggagcagcagcctgcagaggagagtgaagagcatccctggcctgctgcggctggagatcagcacagcccctgagatcatcaactgctgcctgaccccagagatgctgcctgtgaagcccttcccagaaaatagaacccggccccacaaggagatcctggagttccccacccgggaggtgtatgtgccccacacagtgtacagaaacctgctgtatgtgtacccccagaggctgaactttgtgaacaagctggccagcgccaggaacatcaccatcaagatccagttcatgtgtggggaggatgccagcaatgccatgcctgtgatctttgggaagagcagcggccctgagttcctgcaggaggtgtacacagctgtgacctaccacaacaagagcccagacttctatgaggaggtgaagatcaagctgcctgccaagctgactgtgaaccaccacctgctcttcaccttctaccacatcagctgccagcagaagcagggcgcctctgtggagaccctgctgggctacagctggctgcccatcctgctgaatgaaaggctgcagacaggcagctactgcctgcctgtggccctggagaagctgccccccaactacagcatgcacagcgctgagaaggtgcccctgcagaacccccccatcaagtgggccgagggccacaagggcgtcttcaacatcgaggtgcaggccgtgtcctctgtgcacacccaggacaaccacctggagaagttcttcaccctgtgccacagcctggagagccaggtgaccttccccatccgggtgctggaccagaagatcagcgagatggccctggagcacgagctgaagctgagcatcatctgcctgaacagcagccggctggagcccctggtgctcttcctgcacctggtgctggacaagctgttccagctgtctgtgcagcccatggtgattgctggccagacagccaacttcagccagtttgcctttgaatctgtggtggccatcgccaacagcctgcacaacagcaaggacctgagcaaggaccagcacggcaggaactgcctgctggccagctatgtgcactacgtgttccggctgcctgaggtgcagagagatgtgcccaagagcggggcccccacagccctgctggaccccaggagctaccacacctacggccgcaccagcgctgctgctgtgagcagcaagctgctgcaggcccgggtgatgagcagcagcaacccagacctggccggcacccacagcgctgctgatgaggaggtgaagaacatcatgagcagcaagcacttccacgaggagctggccctgcagatggtggtgtccacaggcatggtgcgggagaccgtcttcaagtatgcctggttcttctttgagctgctggtgaagtccatggcccagcacgtgcacaacatggacaagagggacagcttccggaggacccgcttcagtgaccgcttcatggatgacatcaccaccatcgtgaatgtggtgaccagcgagattgctgccctgctggtgaagccccagaaggaaaatgagcaggccgagaagatgaacatcagcctggccttcttcctgtatgacctgctgagcctgatggaccggggctttgtgttcaacctgatccgccactactgcagccagctgagcgccaagctgagcaacctgcccaccctcatctccatgaggctggagttcctgcgcatcctgtgcagccatgagcactacctgaacctgaacctcttcttcatgaatgctgacacagcccccaccagcccctgccccagcatcagcagccagaacagcagcagctgcagcagcttccaggaccagaagatcgcctccatgtttgacctgaccagcgagtaccggcagcagcacttcctgaccggcctgctcttcacagagctggccgccgccctggatgctgagggggagggcatcagcaaggtgcagaggaaggctgtgtctgccatccacagcctgctgagcagccatgacctggacccccgctgtgtgaagccagaggtgaaggtgaagattgctgccctgtacctgcccctggtgggcatcatcctggatgccctgccccagctgtgtgacttcaccgtggccgacacccggcgctaccgcaccagcggcagtgatgaggagcaggagggcgctggggccatcaaccagaatgtggccctggccatcgccggcaacaacttcaacctgaagaccagcggcatcgtgctgagcagcctgccctacaagcagtacaacatgctgaatgctgacaccaccaggaacctgatgatctgcttcctgtggatcatgaagaatgctgaccagagcctcatcaggaagtggattgctgacctgcccagcacccagctgaaccgcatcctggacctgctcttcatctgtgtgctgtgctttgagtacaagggcaagcagagcagtgacaaggtgtccacccaggtgctgcagaagagcagagatgtgaaggcccggctggaggaggccctgctgcggggggagggcgcccggggggagatgatgagaagaagagcccctggaaatgaccgcttccctggcctgaatgaaaacctgcgctggaagaaggagcagacccactggaggcaggccaatgagaagctggacaagaccaaggccgagctggaccaggaggccctgatcagcggcaacctggccacagaggcccacctgatcatcctggacatgcaggagaacatcatccaggccagcagcgccctggactgcaaggacagcctgctgggcggcgtgctgcgggtgctggtgaacagcctgaactgtgaccagagcaccacctacctgacccactgctttgccaccctgcgggccctgattgccaagtttggagacctgctgtttgaggaggaggtggagcagtgctttgacctgtgccaccaggtgctgcaccactgcagcagctccatggatgtgaccaggagccaggcctgtgccaccctgtacctgctgatgaggttctcctttggagccaccagcaactttgcccgggtgaagatgcaggtgaccatgagcctggccagcctggtgggccgggccccagacttcaatgaggagcacctgcggcgcagcctgcggaccatcctggcctacagcgaggaggacacagccatgcagatgacccccttccccacccaggtggaggagctgctgtgcaacctgaacagcatcctgtatgacacagtgaagatgagggagttccaggaggaccctgagatgctgatggacctgatgtaccgcatcgccaagagctaccaggccagcccagacctgcggctgacctggctgcagaacatggccgagaagcacaccaagaagaagtgctacacagaagctgccatgtgcctggtgcacgccgccgccctggtggccgagtacctgtccatgctggaggaccacagctacctgcctgtgggctctgtgtccttccagaacatcagcagcaatgtgctggaggagagcgtggtgtctgaggacaccctgagcccagatgaagatggagtgtgtgccggccagtacttcacagagagcggcctggtgggcctgctggagcaggccgctgagctgttcagcactggaggcctgtatgaaacagtgaatgaggtgtacaagctggtgatccccatcctggaggcccaccgggagttcaggaagctgaccctgacccacagcaagctgcagagggcctttgacagcatcgtgaacaaggaccacaagaggatgtttggcacctacttccgggtgggcttcttcggcagcaagtttggagacctggatgagcaggagtttgtgtacaaggagcccgccatcaccaagctgcctgagatcagccaccggctggaggccttctacggccagtgctttggagctgagtttgtggaggtgatcaaggacagcacccctgtggacaagaccaagctggaccccaacaaggcctacatccagatcacctttgtggagccctactttgatgaatatgagatgaaggacagagtgacctactttgagaagaacttcaacctgcggcgcttcatgtacaccacccccttcaccctggagggccggcccagaggagagctgcacgagcagtacagaagaaacacagtgctgaccaccatgcacgccttcccctacatcaagacccgcatcagcgtcatccagaaggaggagtttgtgctgacccccatcgaggtggccatcgaggacatgaagaagaagaccctgcagctggccgtggccatcaaccaggagcccccagatgccaagatgctgcagatggtgctgcagggctctgtgggcgccaccgtgaaccagggccccctggaggtggcccaggtgttcctggccgagatcccagctgaccccaagctgtaccgccaccacaacaagctgcggctgtgcttcaaggagttcatcatgtag

SEQ ID NO: 263255 - DNA, 6300 bp, Artificial Sequence
  derived and/or modified sequence
atggccaccctgcccagcgctgagcggcgggcctttgccctgaagatcaaccgctacagcagcgctgagatcaggaagcagttcaccctgccccccaacctgggccagtaccaccggcagagcatcagcaccagcggcttccccagcctgcagctgccccagttctatgaccctgtggagcctgtggactttgagggcctgctgatgacccacctgaacagcctggatgtgcagctggcccaggagctgggggacttcacagatgatgacctggatgtggtgttcacccccaaggaatgtaggaccctgcagcccagcctgcctgaggagggcgtggagctggacccccacgtgcgggactgtgtgcagacctacatccgggagtggctgattgtgaacaggaagaaccagggcagccctgagatctgtggcttcaagaagacaggcagcaggaaggacttccacaagaccctgcccaagcagacctttgaaagtgagaccctggagtgcagcgagcctgctgcccaggccggccccaggcacctgaatgtgctgtgtgatgtgtctggaaaaggacctgtgacagcctgtgactttgacctgcggagcctgcagcctgacaagaggctggagaacctgctgcagcaggtgtctgctgaggactttgagaagcagaatgaggaggcccggaggaccaaccggcaggccgagctgtttgccctgtaccccagcgtggatgaggaggatgctgtggagatccggcctgtgcctgagtgccccaaggagcacctgggcaaccgcatcctggtgaagctgctgaccctgaagtttgaaattgaaattgagcccctgtttgccagcatcgccctgtatgatgtgaaggagaggaagaagatcagcgagaacttccactgtgacctgaacagcgaccagttcaagggcttcctgcgggcccacacccccagcgtggccgccagcagccaggcccggtctgctgtgttttctgtgacctaccccagcagtgacatctacctggtggtgaagattgagaaggtgctgcagcagggcgagatcggggactgtgccgagccctacaccgtcatcaaggagagtgatggcggcaagagcaaggagaagattgagaagctgaagctgcaggccgagagcttctgccagaggctgggcaagtacaggatgccctttgcctgggcccccatcagcctgagcagcttcttcaacgtgtccaccctggagcgggaggtgacagatgtggacagcgtggtgggccgcagctctgtgggggagaggaggaccctggcccagagccggcggctgtctgagcgggccctgagcctggaggagaatggagtgggcagcaacttcaagaccagcaccctgtctgtgagcagcttcttcaagcaggagggggaccggctgagtgatgaggacctcttcaagttcctggccgactacaagaggagcagcagcctgcagaggagagtgaagagcatccctggcctgctgcggctggagatcagcacagcccctgagatcatcaactgctgcctgaccccagagatgctgcctgtgaagcccttcccagaaaatagaacccggccccacaaggagatcctggagttccccacccgggaggtgtatgtgccccacacagtgtacagaaacctgctgtatgtgtacccccagaggctgaactttgtgaacaagctggccagcgccaggaacatcaccatcaagatccagttcatgtgtggggaggatgccagcaatgccatgcctgtgatctttgggaagagcagcggccctgagttcctgcaggaggtgtacacagctgtgacctaccacaacaagagcccagacttctatgaggaggtgaagatcaagctgcctgccaagctgactgtgaaccaccacctgctcttcaccttctaccacatcagctgccagcagaagcagggcgcctctgtggagaccctgctgggctacagctggctgcccatcctgctgaatgaaaggctgcagacaggcagctactgcctgcctgtggccctggagaagctgccccccaactacagcatgcacagcgctgagaaggtgcccctgcagaacccccccatcaagtgggccgagggccacaagggcgtcttcaacatcgaggtgcaggccgtgtcctctgtgcacacccaggacaaccacctggagaagttcttcaccctgtgccacagcctggagagccaggtgaccttccccatccgggtgctggaccagaagatcagcgagatggccctggagcacgagctgaagctgagcatcatctgcctgaacagcagccggctggagcccctggtgctcttcctgcacctggtgctggacaagctgttccagctgtctgtgcagcccatggtgattgctggccagacagccaacttcagccagtttgcctttgaatctgtggtggccatcgccaacagcctgcacaacagcaaggacctgagcaaggaccagcacggcaggaactgcctgctggccagctatgtgcactacgtgttccggctgcctgaggtgcagagagatgtgcccaagagcggggcccccacagccctgctggaccccaggagctaccacacctacggccgcaccagcgctgctgctgtgagcagcaagctgctgcaggcccgggtgatgagcagcagcaacccagacctggccggcacccacagcgctgctgatgaggaggtgaagaacatcatgagcagcaagattgctgacaggaactgcagcaggatgagctactactgcagcggcagcagtgatgcccccagcagccctgctgcccccaggcctgccagcaagaagcacttccacgaggagctggccctgcagatggtggtgtccacaggcatggtgcgggagaccgtcttcaagtatgcctggttcttctttgagctgctggtgaagtccatggcccagcacgtgcacaacatggacaagagggacagcttccggaggacccgcttcagtgaccgcttcatggatgacatcaccaccatcgtgaatgtggtgaccagcgagattgctgccctgctggtgaagccccagaaggaaaatgagcaggccgagaagatgaacatcagcctggccttcttcctgtatgacctgctgagcctgatggaccggggctttgtgttcaacctgatccgccactactgcagccagctgagcgccaagctgagcaacctgcccaccctcatctccatgaggctggagttcctgcgcatcctgtgcagccatgagcactacctgaacctgaacctcttcttcatgaatgctgacacagcccccaccagcccctgccccagcatcagcagccagaacagcagcagctgcagcagcttccaggaccagaagatcgcctccatgtttgacctgaccagcgagtaccggcagcagcacttcctgaccggcctgctcttcacagagctggccgccgccctggatgctgagggggagggcatcagcaaggtgcagaggaaggctgtgtctgccatccacagcctgctgagcagccatgacctggacccccgctgtgtgaagccagaggtgaaggtgaagattgctgccctgtacctgcccctggtgggcatcatcctggatgccctgccccagctgtgtgacttcaccgtggccgacacccggcgctaccgcaccagcggcagtgatgaggagcaggagggcgctggggccatcaaccagaatgtggccctggccatcgccggcaacaacttcaacctgaagaccagcggcatcgtgctgagcagcctgccctacaagcagtacaacatgctgaatgctgacaccaccaggaacctgatgatctgcttcctgtggatcatgaagaatgctgaccagagcctcatcaggaagtggattgctgacctgcccagcacccagctgaaccgcatcctggacctgctcttcatctgtgtgctgtgctttgagtacaagggcaagcagagcagtgacaaggtgtccacccaggtgctgcagaagagcagagatgtgaaggcccggctggaggaggccctgctgcggggggagggcgcccggggggagatgatgagaagaagagcccctggaaatgaccgcttccctggcctgaatgaaaacctgcgctggaagaaggagcagacccactggaggcaggccaatgagaagctggacaagaccaaggccgagctggaccaggaggccctgatcagcggcaacctggccacagaggcccacctgatcatcctggacatgcaggagaacatcatccaggccagcagcgccctggactgcaaggacagcctgctgggcggcgtgctgcgggtgctggtgaacagcctgaactgtgaccagagcaccacctacctgacccactgctttgccaccctgcgggccctgattgccaagtttggagacctgctgtttgaggaggaggtggagcagtgctttgacctgtgccaccaggtgctgcaccactgcagcagctccatggatgtgaccaggagccaggcctgtgccaccctgtacctgctgatgaggttctcctttggagccaccagcaactttgcccgggtgaagatgcaggtgaccatgagcctggccagcctggtgggccgggccccagacttcaatgaggagcacctgcggcgcagcctgcggaccatcctggcctacagcgaggaggacacagccatgcagatgacccccttccccacccaggtggaggagctgctgtgcaacctgaacagcatcctgtatgacacagtgaagatgagggagttccaggaggaccctgagatgctgatggacctgatgtaccgcatcgccaagagctaccaggccagcccagacctgcggctgacctggctgcagaacatggccgagaagcacaccaagaagaagtgctacacagaagctgccatgtgcctggtgcacgccgccgccctggtggccgagtacctgtccatgctggaggaccacagctacctgcctgtgggctctgtgtccttccagaacatcagcagcaatgtgctggaggagagcgtggtgtctgaggacaccctgagcccagatgaagatggagtgtgtgccggccagtacttcacagagagcggcctggtgggcctgctggagcaggccgctgagctgttcagcactggaggcctgtatgaaacagtgaatgaggtgtacaagctggtgatccccatcctggaggcccaccgggagttcaggaagctgaccctgacccacagcaagctgcagagggcctttgacagcatcgtgaacaaggaccacaagaggatgtttggcacctacttccgggtgggcttcttcggcagcaagtttggagacctggatgagcaggagtttgtgtacaaggagcccgccatcaccaagctgcctgagatcagccaccggctggaggccttctacggccagtgctttggagctgagtttgtggaggtgatcaaggacagcacccctgtggacaagaccaagctggaccccaacaaggcctacatccagatcacctttgtggagccctactttgatgaatatgagatgaaggacagagtgacctactttgagaagaacttcaacctgcggcgcttcatgtacaccacccccttcaccctggagggccggcccagaggagagctgcacgagcagtacagaagaaacacagtgctgaccaccatgcacgccttcccctacatcaagacccgcatcagcgtcatccagaaggaggagtttgtgctgacccccatcgaggtggccatcgaggacatgaagaagaagaccctgcagctggccgtggccatcaaccaggagcccccagatgccaagatgctgcagatggtgctgcagggctctgtgggcgccaccgtgaaccagggccccctggaggtggcccaggtgttcctggccgagatcccagctgaccccaagctgtaccgccaccacaacaagctgcggctgtgcttcaaggagttcatcatgagatgtggggaggccgtggagaagaacaagaggctcatcacagctgaccagcgggagtaccagcaggagctgaagaagaactacaacaagctgaaggagaacctgcggcccatgattgaaaggaagatccctgagctgtacaagcccatcttccgggtggagagccagaagagggacagcttccacaggagcagcttcagaaaatgtgagacccagctgagccagggcagctag

SEQ ID NO: 263256 - DNA, 5973 bp, Artificial Sequence
  derived and/or modified sequence
atggccaccctgcccagcgccgagcggcgggccttcgccctgaagatcaatcgttatagctccgcagagattcggaagcaatttacgctgccacccaatcttggccagtaccaccgtcaatccatttctacctcagggttcccctctttgcagctacctcagttctacgatcccgtcgagcccgtcgatttcgaaggccttctgatgacgcacctgaacagcttggatgtgcagctagcgcaggagctgggcgactttactgacgatgatcttgatgtggttttcactccgaaggaatgccgcaccttacaaccctcattgccggaagagggagtggagctggaccctcacgtgcgagattgcgttcagacatacattcgagagtggctgatcgtgaaccggaagaaccaggggagccccgagatctgtggattcaagaaaacgggcagccgcaaagacttccacaaaactttgcctaaacagacttttgaatcggaaacactggaatgttccgagcctgcggcccaagccggcccccgccatttgaacgtcttgtgcgatgtgtctggtaagggtcccgttactgcctgtgattttgacctgagaagtctgcagcccgacaagaggctggagaatctccttcagcaggtttccgctgaggatttcgaaaaacagaacgaggaagcccggcgtactaatcgccaggccgaattatttgcactgtatcccagcgtggacgaggaggatgcggtggagatccgacctgtccctgagtgccccaaggagcacctcggcaataggatcctggtgaagctgctcaccctcaaattcgagattgagattgaaccactgttcgccagcatcgccctttacgacgtaaaagagcgcaaaaagataagcgagaactttcactgtgacttaaatagcgaccaattcaaagggttcctccgcgcccacaccccctcggttgccgcgtcctcacaggcccgaagcgcagtgttttccgtcacgtatccctctagcgatatctatctggtggtcaaaatcgagaaggtgctgcagcagggcgaaatcggcgattgtgctgagccctataccgtcatcaaagagtcagacggtgggaaaagtaaggagaaaattgagaagctgaaacttcaggcagaaagtttctgtcagcgcctaggcaaatatcgcatgccgttcgcatgggctccaataagcctcagctcttttttcaatgtcagcacgctggaaagggaagtcaccgacgtggatagtgtcgtcggccgcagttctgtgggagagcggagaaccctcgcgcagtctcggcgcttgagtgaaagagccctttcgcttgaagagaatggtgtggggtcaaactttaaaaccagcaccttgtccgtctcttctttcttcaaacaagaaggcgatcggctgagtgatgaggacctatttaagtttttggcagattataaacgatcctcttcactgcagaggcgtgttaagtcaattccgggtcttctcaggctcgaaatctccaccgccccggagataattaactgctgtttaacacctgagatgctgcccgtgaagccctttcctgaaaacagaaccagacctcacaaggaaatcttggaattcccaacccgggaggtctacgtgccgcatactgtgtaccgcaatttactgtatgtgtacccgcaacgtctgaacttcgttaacaagcttgctagtgcccgtaacatcaccattaaaatccagttcatgtgcggggaggacgcatcaaatgccatgccagtcatctttggaaagtccagcgggccagaattcctgcaggaggtatatactgcagtcacttaccacaacaaaagccctgacttttatgaggaggtgaaaattaagctgcctgccaaacttacagtcaaccaccacctgctcttcaccttttatcatatctcctgtcagcagaaacagggagcgagtgtggagactctcctcggttactcatggctgccaatcctgctaaatgaacggctgcagactggctcctattgcctgcccgtggctctggagaagttgccacctaactatagtatgcactcagctgaaaaggtgcctcttcaaaacccgccaataaagtgggccgaaggacataaaggcgtgttcaatatcgaagtccaggcagtgagtagcgtccacactcaagataatcacctcgagaaattctttaccctctgccactctctggaaagtcaggtgaccttcccgattcgtgtgctggaccagaagatatcagagatggcactggagcacgagctgaagctgtctattatttgcttgaattcctcccgtctagaacccctcgtgttgtttctgcaccttgtgctggataaactgttccaactctccgttcagccaatggtgatcgcagggcaaaccgctaatttttctcagttcgcgttcgaaagcgttgttgcaatcgccaattcccttcataattcaaaagacttatctaaggaccagcatggcagaaactgcctattggcttcatacgttcattacgtgttcaggctccctgaggttcagcgagatgtgccaaagtcgggggcacccaccgccttgctggacccacgctcataccatacctacggtcgtacctcagctgccgccgtgagttcgaaattactccaggctagagtgatgagcagctccaacccagatctagcaggcacacattcagccgctgacgaggaggttaagaacatcatgagctccaagcattttcatgaagaactggctctgcagatggtggtcagcacaggcatggtcagagagacagtgtttaagtatgcttggttcttctttgagctgcttgtgaagtcaatggcccaacatgtgcataatatggacaagcgtgacagcttccgaagaacgaggttttccgatagatttatggatgatattacaacaattgttaacgtggtgacgtctgagattgccgcacttctggttaagccccagaaggaaaatgaacaggctgagaagatgaacattagtttggctttttttctgtacgatctgctgagtctgatggaccggggctttgtgttcaatctcattcgccactactgttcacagctttcagcaaaactcagtaatctgcctactcttatttccatgagactggagttcctgcggattctctgctcccacgaacattacctaaatctgaatctatttttcatgaatgccgacaccgcgcccactagcccatgtccgagcatctctagccagaatagcagcagttgtagcagttttcaggatcaaaagatcgccagcatgttcgatttaacttccgagtatcgccagcaacacttcctgacaggcctactgtttaccgaattggctgcggccctcgacgcagagggggagggcatcagcaaagtgcagcgcaaagctgtcagcgccatccacagcctgttgagcagccatgatctcgaccccagatgtgttaagccagaggtcaaggtcaaaattgctgctctctacctaccgctggtggggattattctagatgccttaccccagctttgcgactttacagtggctgacaccaggcggtacagaacatctggaagtgacgaagagcaggaaggggccggtgccattaatcagaatgtggccctcgccattgcaggcaataactttaacttgaagacttccgggatcgtcttgtcctcactgccatataaacagtataatatgctgaatgccgataccacaaggaacctcatgatctgcttcctctggatcatgaagaatgctgatcagagccttatcagaaagtggattgcggatctcccgtccacccaattgaatagaatactggacctgctttttatctgcgtactctgcttcgagtacaaaggaaaacagagcagcgacaaggtgagtactcaggttctgcagaagtcacgagatgttaaggcacgcctagaggaagctttacttaggggcgaaggagcccgcggcgaaatgatgagaaggagagctccaggcaacgacagattccccggattaaatgagaatctccggtggaaaaaagagcaaacccactggcgacaggcaaatgaaaaactagacaaaactaaggccgaactggaccaggaagccctgatttcaggcaacctggcaacggaggctcacctgatcatattggatatgcaggagaacatcatccaggccagctctgccttggactgtaaggacagtctcctggggggtgtgctgagggtccttgttaactctctgaattgcgaccaatccacaacatatctaacccattgttttgccacattgcgtgccctgatcgccaaatttggcgacctcctgtttgaggaagaagttgaacagtgttttgatctgtgccatcaagtgcttcaccattgctcttctagcatggatgtaacacgctctcaggcatgtgcaaccctgtacctcctgatgaggttctcgttcggggctacgagcaacttcgctcgagtcaaaatgcaggttaccatgtctctggcgagcttagtgggacgggcccctgactttaatgaggaacacctccgacgatccctgaggaccatccttgcctactccgaggaagacaccgccatgcaaatgactccattcccaactcaagttgaagaactcctttgcaatcttaactccatcctgtatgacactgtcaagatgcgggagttccaggaggaccccgaaatgctcatggaccttatgtacagaatcgccaagtcataccaggcatcacctgatctcagactcacatggctgcagaacatggcagaaaaacataccaagaaaaagtgttataccgaggcagcaatgtgcttggtgcatgctgcggccctggtggccgagtacctgtcaatgcttgaggatcactcttacttgccggtggggagcgttagctttcaaaacatctcttccaacgtgctggaagaaagtgtcgtgagcgaagatacactgagtccggacgaagacggggtctgtgccggtcaatactttaccgaatccggcctggtgggcctgttagaacaagccgctgagttgttctcaaccggcggcttgtacgagacagttaacgaagtttataagctcgtcattcccatcctcgaggcacaccgggaattcaggaagctgacacttacacactctaagctgcagagggcctttgactctatcgtgaataaggaccataagcgcatgttcggcacttatttcagggtgggtttctttggctctaaatttggcgatctggacgaacaggaatttgtgtataaggaacctgcaattactaagctccccgaaatatcacacagactggaagccttctacgggcagtgctttggcgccgaattcgttgaggttattaaagatagtaccccagtggataaaacgaagttggatcccaacaaggcgtacattcagatcactttcgtggaaccctatttcgacgagtacgagatgaaggatcgtgtcacatacttcgagaagaatttcaatctgcgcaggtttatgtacacaacgcccttcaccctggagggacgaccaagaggagagttgcatgaacaataccgccggaacaccgtccttactacaatgcatgccttcccgtacattaagacccggatctcagtcatccaaaaggaggaatttgtgctcacccccattgaggtggcaatcgaggatatgaagaaaaaaacactacagctggccgtggccatcaatcaggagccacccgatgctaaaatgctgcaaatggtcctccagggatcagtgggtgccacagtcaatcagggccctctggaagtggctcaggtttttctggcagagatccccgccgaccccaagctgtatagacatcataataaattgcggctgtgcttcaaggagttcattatgtag

SEQ ID NO: 263257 - DNA, 6300 bp, Artificial Sequence
  derived and/or modified sequence
atggccaccctgcccagcgccgagcggcgggccttcgccctgaagattaatagatattcatctgcagagattcgcaaacagtttactttaccacccaacctgggacagtatcatagacagagcatctcaaccagcgggtttccaagtctacagctgccacaattttatgatcccgttgagccggtggatttcgaagggctgttgatgacccacctcaatagcctcgacgtgcagctggcacaagagctcggcgattttacagacgatgaccttgacgtggtttttactcccaaggaatgccgcacacttcagccctcattacccgaggagggggtggagttggacccccacgtcagggattgtgtccagacatacattcgcgaatggctgatcgtgaacaggaagaaccagggctctccagaaatctgcgggttcaaaaaaacggggagcagaaaagacttccataaaaccctgcccaagcagactttcgagtctgaaaccctggagtgttccgagcctgccgctcaggccgggcctcggcacctcaacgtgttgtgcgatgtgtcaggaaaagggcccgtgacggcatgtgatttcgatctgagaagtctccagccggacaagcgactggagaatcttctgcagcaggtctccgccgaggactttgaaaaacagaacgaggaggcccgccgcacaaatagacaagctgaactgttcgctctttacccttctgtggacgaggaggacgcggtggaaatccggccagtgcctgaatgcccaaaggagcacttgggtaaccgcattcttgttaaactgttgaccttaaagtttgagatagagatcgaacccctgttcgcctccatagccctgtatgatgtgaaagaacgaaaaaagatctctgagaacttccactgcgacctgaatagtgaccagtttaaaggatttcttagagcacacacaccctccgtcgctgccagttctcaggcaagaagcgccgtttttagtgtcacctatccaagttctgatatctacctggtagtaaagatagagaaggtcctacagcagggtgaaatcggggactgtgctgaaccatatacagtcattaaagaatccgacggtggcaaatctaaagaaaagatagagaagcttaagctgcaagccgagtctttctgccagaggctcggcaaataccgcatgcccttcgcttgggcccccatttccctctcctcattttttaatgtgagcacccttgaacgggaggtaactgatgtggatagcgtggtaggccggtcgagcgttggggagaggcgtacactcgcccaaagcaggcgactgtctgagagggccttaagtttggaagagaacggcgtgggcagtaatttcaaaacttcgacgttgagtgtgagctctttcttcaagcaggaaggagatcggttaagcgatgaggacttattcaaatttctggccgactataagcgctcctcgagcctccagagacgggtcaagtcaatccccggtctgctacgtttggagatctctacagccccagaaatcatcaactgctgtctgacacccgaaatgctgcccgtgaaaccatttccggaaaatcgcactcgccctcataaggagattctggagtttccgacacgtgaggtttacgttcctcatacggtttaccggaatttgctgtacgtctacccccagcgactgaattttgttaacaagcttgccagcgcaagaaatatcactatcaaaatccaattcatgtgtggggaagatgcctcaaatgccatgcctgtgatctttgggaaaagctcaggacccgagtttcttcaagaggtctatacggctgtaacttatcacaataaaagcccagatttttacgaggaggtcaagatcaagctccccgcaaagctcacagtgaaccaccaccttctgttcacattttaccacatcagctgccagcagaagcagggggcaagcgtggagactttattaggctacagttggctacctatccttctgaatgaacgactgcagacaggatcttactgtctcccagtggctcttgagaagctgcctcccaactactcgatgcattccgctgagaaagtgccgctgcagaatcctccaattaagtgggcagaggggcacaaaggggtgtttaatatagaggtgcaggccgtttctagtgtccatacccaggacaaccacctggagaagttcttcaccttatgtcactcattagagtcgcaggtgacttttcccattagagtcctggatcagaaaatcagcgagatggctttagaacatgagctgaaattatctatcatttgtctcaactcaagtcggctcgaacccttagtgctgttcttacacttggttctggataaactatttcagctaagtgtgcaaccaatggtcattgcgggtcagaccgccaacttctcccagttcgcctttgagtccgtagtggctatcgcgaacagtcttcataactccaaggacttatctaaagatcagcatggacgcaattgcctgctggcctcatacgtgcattatgtgtttcgcttgcctgaagtacagcgcgatgtaccaaaatccggggcaccaacagcgttgcttgaccctagaagttatcatacttacggccggacttcggcagccgcggtgtcttctaagctgctgcaggctcgggtgatgagttccagcaatcctgatctcgctgggacccatagtgcagccgatgaggaggtgaagaacattatgagctccaaaatcgcggacaggaactgttcaagaatgtcttattattgtagtggatcttccgatgctccgtcttccccagcagccccgcggccagcgtctaaaaaacatttccacgaagagctggctctgcagatggtggtttcgaccgggatggtgagagaaactgtgtttaagtacgcatggtttttcttcgaactgctggttaagagcatggcacagcatgtgcataacatggacaaaagggacagcttcaggagaactagattctcagaccgctttatggacgacataaccactatcgtgaacgtcgtgactagcgaaatcgccgcacttctggtaaagccacagaaggagaacgagcaagcagagaagatgaatatctccctggcattcttcctgtatgatcttttaagtctaatggaccggggctttgtgtttaatctcatcagacattactgtagtcaactgtcagctaagcttagcaacctacccaccctcatatcaatgcgccttgagttcctgaggatcctgtgttcccatgaacactacctaaacctaaacttgttctttatgaatgctgacacggcccccacgagcccatgtccgtccatcagcagtcaaaactctagctcctgcagctctttccaagaccagaagatcgcttctatgtttgacctgacctcagaataccggcagcagcattttctgacagggctcctgttcactgagcttgcagcggctctagatgccgaaggtgagggaatctccaaggtgcagcgaaaggccgtgagtgcaattcactcattgctgagttctcacgatctcgaccctaggtgtgtaaagcccgaagttaaagttaaaattgctgcactgtacctgccccttgttggcattattttagacgctctgccacaattatgtgactttaccgtggccgacactaggaggtacaggacctccggctccgacgaggagcaggagggtgccggcgcgatcaatcagaacgttgccttagcgattgctggcaacaatttcaatctgaagacctccggtattgtgctgagctctctgccttataagcagtataacatgctgaatgcagacaccaccagaaacctcatgatttgttttctctggatcatgaaaaacgccgaccagtccctaataagaaaatggatagcagaccttccgtcaacgcagctgaatcgcattctggacctcctgtttatttgcgtcctctgctttgagtataagggaaaacaatcatcggacaaagtctccactcaagtgcttcagaaatctagggatgtgaaagcgcggctcgaggaggccttgctccggggggaaggagcacggggggagatgatgaggagacgggcccccggtaatgatagattcccaggtctgaatgagaatctgcgctggaagaaagagcaaacgcattggcgccaggccaacgagaagctggataaaacgaaggctgaactggaccaggaggccttgatctctggtaatctggcaactgaagctcacttaattattctggatatgcaggaaaatatcattcaagccagcagcgcgcttgattgtaaagacagccttctcgggggagtgcttagggtcctcgtcaatagtctgaactgtgaccagtctacgacctatctgacccattgctttgctacactccgtgcccttatcgccaaattcggagacctcttgttcgaggaagaggtggaacagtgcttcgatctctgtcaccaggtgctgcatcactgttcctcttccatggatgtgacccgcagccaggcctgtgcgactctgtacctgcttatgaggtttagttttggagcaacttccaattttgcccgcgtcaagatgcaagtcactatgtccttagccagcctggtaggccgggcgcccgatttcaatgaagaacatctacggcgctcactgaggacaatcctcgcatactcagaagaggacaccgcgatgcaaatgacacccttcccaacccaggttgaggaattactttgtaacctcaacagtattctttacgataccgtgaaaatgcgcgaatttcaggaagatccagagatgctgatggatcttatgtacaggatcgctaaatcatatcaagcgagccctgatttacgacttacttggctgcagaatatggctgagaagcatacgaaaaagaagtgttatactgaggcagccatgtgcttggtgcatgcggcagctttagtagccgagtaccttagcatgctggaggaccactcctacttgccggtggggtcagtaagttttcaaaacattagctctaacgtgttggaggaaagcgttgtcagcgaagacacactaagcccggatgaagatggcgtttgcgcaggacagtattttaccgagtccggactggtgggtctgctggagcaagctgctgagctgttttccactggggggctgtacgagaccgtgaacgaagtctacaaactagtcattcccatcttagaggcacatcgggagttccgaaagctgacccttacgcactccaaattacagcgagcttttgacagtatagtcaacaaagatcacaaaaggatgttcggcacttactttcgggtggggttcttcgggagcaaattcggcgatttagatgagcaggagttcgtctataaagagcctgcgatcacaaagcttcccgagatctcgcaccggttggaggcgttctatggccagtgtttcggcgctgaatttgtggaggtcatcaaagactctacccccgtggataaaacaaagctcgatcccaataaggcctatatccagatcacttttgtggaaccatatttcgacgagtacgaaatgaaggatagagtcacatatttcgagaaaaacttcaatctgagacggttcatgtacaccactccctttacactcgagggacgtcctaggggcgagctgcatgagcagtaccgtagaaataccgttctgacgacaatgcatgcatttccctacattaagaccagaattagcgtgatccagaaggaagaattcgtgctcacccctatcgaggtcgcaatagaagacatgaagaagaagactttacagctcgctgtagccatcaatcaagagccccctgacgctaagatgcttcagatggtgctgcaggggtcagtcggagccactgtcaaccaagggcctctagaagtggcacaggtttttttagctgagattcctgccgatcccaagctttaccgtcaccacaacaaactccgtctatgtttcaaagaattcatcatgcgttgtggggaggccgtcgagaagaacaagcggctgattaccgccgatcagcgagaataccagcaggagctgaagaaaaattacaacaagctgaaagagaatttgcgacccatgatagaacgaaagattcccgaactgtacaaaccgatattcagggtggagtcccaaaagcgggactcctttcaccggtcgagcttcagaaagtgcgagacccaattatcacaaggcagttag

SEQ ID NO: 263258 - DNA, 5973 bp, Artificial Sequence
  derived and/or modified sequence
atggctaccctcccatccgccgaaagacgcgcatttgccctgaaaatcaaccgatacagttccgccgagataagaaagcagtttactttgcctccaaacttggggcagtaccatagacagagtatctccacatctggctttccctcactgcagctgcctcagttctacgatcctgtggagccagtggatttcgagggcttgttaatgactcacctgaattctctggacgtgcaattggctcaagagttgggcgactttaccgacgatgacttagacgtcgtattcacccccaaggagtgtcgcacactccagccgtctctgcccgaggaaggggtggaacttgatccccatgtgagggactgtgtacagacatatatacgcgagtggctgatcgtcaaccgcaaaaatcagggctcccccgagatttgtggattcaaaaaaacagggtcaagaaaggatttccataaaacgcttcctaaacagacatttgagtccgagacactggagtgctccgagccagccgcacaggctggcccacgacacctcaacgtgctctgtgatgtctccgggaagggacctgtgacggcatgtgattttgatctccggtccctgcaacctgacaagcgtctcgagaacctcctccagcaggtgagcgccgaagactttgagaaacaaaacgaggaggcacggcgaacaaacaggcaggcggaattgttcgctctgtatccctctgtggacgaagaagacgccgtggagattcgtccggtgcctgagtgcccgaaggaacacctgggcaatcgaatattagtgaaactgctaactctcaagtttgagattgaaatcgaacccctgttcgccagtatagcactgtatgatgtcaaagagcggaagaaaattagtgaaaacttccactgcgacctgaacagcgatcagttcaaaggctttcttcgggctcatactccttctgtcgcggcaagctcccaggctagaagcgctgtgttttctgtcacatacccaagttctgacatatatctggttgttaaaatcgaaaaggtcctgcagcaaggcgagatcggcgactgcgccgagccatatactgtgattaaggaatccgatggcggaaaaagcaaggaaaagatcgagaagctgaaattgcaggccgagagcttttgtcagcggctaggcaagtatcggatgccctttgcctgggcccctattagcctttcatccttcttcaacgtcagcaccttagaacgggaggtaacagacgtggattccgttgtaggtcgatcttctgtgggagagcgtcgcactttggctcagagtcgtcggttatccgagcgtgccctttccttggaggagaatggtgtcggttctaacttcaaaacctccaccctgtcagtcagcagtttttttaagcaggagggagaccggctgagcgatgaggacctcttcaaattcctggccgattataaacgctcctcttcgctgcagaggagggtcaagagcatccccggactcctccggcttgaaattagcacagctccagaaatcatcaattgttgtttaacacctgaaatgctgcccgttaaaccctttcccgagaacaggacacgccctcataaggaaatcctggagttccctacacgagaagtttacgttccccatacagtgtatcgaaatctgctgtatgtttacccgcagcgcctaaatttcgtgaataaactggctagcgccaggaacattactataaagatccagtttatgtgcggcgaggacgcttctaatgctatgccggtcatcttcggcaaatcctctgggccagaatttctgcaggaggtctataccgcggtaacctatcacaataaaagccccgatttttatgaagaagttaagatcaagctgccggctaagctgaccgtgaaccaccacctcctgttcactttttaccatatctcatgtcagcagaagcagggagctagtgtggagacactactgggctactcatggctgccgattctgctgaatgagcggctccagacggggtcctactgtctgcctgttgctctggaaaagcttccaccaaactactctatgcattctgccgaaaaagtgcctttacaaaaccctcccatcaagtgggctgaggggcataaaggagttttcaatattgaggttcaggcggtgtcctctgttcacacccaggacaatcacctggagaagttctttaccctgtgtcacagtttagagtcacaggtcaccttccccattcgagtcctcgatcagaagatcagcgagatggccctggagcatgaactcaaactgagcatcatctgcctgaattcctcgcgccttgaacccttagtgctctttctgcacctggttctggacaagcttttccagctatccgtacagcctatggtcatcgcgggtcaaactgccaattttagtcaattcgcatttgagtccgtggttgccattgctaacagtctgcataatagcaaagacctctcaaaggatcagcatggcaggaattgtctcctagctagttacgtgcactacgttttccgactgcccgaggttcagagagatgtgcctaagtcaggagcacccactgctctgttagacccaagatcctatcatacctatggacggactagtgccgctgccgtgtcgtcgaagctcttacaggcgcgtgtgatgagctcttctaatcccgacttggcagggacccacagcgccgctgacgaggaggtgaagaacatcatgagctcaaagcatttccatgaggagcttgcactccaaatggtagtgagcaccgggatggttcgggagacagtgttcaagtacgcgtggttcttcttcgagctcctggttaaaagcatggcgcagcacgtgcacaacatggacaagcgggactctttccgacggactaggttctcagaccgctttatggacgacataacaactatagttaacgtggttacaagcgagatagccgctctcctggtgaagccacagaaggagaacgaacaagcggagaaaatgaatatcagcctggcattttttctgtacgatttactgtcccttatggataggggctttgtgttcaaccttatacgccactactgctcacagctcagcgctaagctttccaatctgcccacgcttattagcatgcgactggagttcctcagaatactctgtagtcatgaacactaccttaatctgaatctgttcttcatgaacgccgacacagccccaacatctccttgtccaagtatcagttctcagaactcgagtagttgctcttcttttcaagaccagaagatagctagcatgttcgatcttacctcagagtatcggcagcaacacttcttaaccggcttgctgttcaccgagttggcagcggctttagatgctgaaggcgagggaatctcaaaagtgcagagaaaggcggtatccgccattcatagcctgctgagtagccacgatctggatccaaggtgtgtgaagcctgaagtgaaggtgaagatcgccgctctatacctcccactggttgggattatcctagacgcgctgccacagctttgcgatttcacagtagcagacacacgcagatacaggaccagcgggagcgacgaggagcaggagggtgctggcgcaatcaaccagaacgtggctcttgccatcgctggaaataacttcaacctcaagactagcgggatcgtcctctcctccctgccatataaacagtacaacatgcttaatgccgacacgactcgcaacctgatgatctgcttcttatggattatgaaaaacgccgaccagtccctaatcagaaagtggattgcagacctgccaagtacccagctgaacaggattctggacctgctttttatctgtgtgctgtgcttcgagtacaagggcaaacagagctctgataaagtttccacccaggtcctgcagaagtctcgcgacgtgaaagccaggctcgaggaagctttgctacggggagaaggcgcacggggagaaatgatgcgtcgacgtgcacccggaaacgatcggtttcccggtcttaacgagaacctgcgctggaagaaggaacaaacccactggcgccaggccaacgagaagcttgataagacaaaggccgaactcgaccaggaagccctcatttccggcaatttggccaccgaggctcaccttattatcttagacatgcaagagaacattatccaagcatcttcggccctcgactgtaaagactctcttctcggaggtgtactccgcgttctcgtgaactctttgaattgcgatcaaagcactacatacctcactcactgctttgcaactcttcgcgctctcattgcaaaattcggcgatctcctgtttgaggaagaggttgaacagtgctttgacctatgtcaccaggtgttgcaccattgttctagctccatggatgtgacccggtcccaggcctgcgcaaccctgtatctacttatgcgattctccttcggggcaacctcaaatttcgcgcgagtgaaaatgcaggtgaccatgagcctcgccagcctggtgggacgtgccccagatttcaacgaggagcacctgagacgatctcttcggacaattctggcctacagtgaagaggacacagccatgcagatgaccccctttcccacccaggtggaagagctgttgtgcaaccttaatagtattctctatgacacggttaagatgcgggaatttcaggaggaccccgaaatgttaatggatcttatgtacagaatagcaaagtcttaccaggcttcccccgatctgagacttacttggttacaaaacatggccgagaaacatacgaagaagaagtgttacactgaggccgctatgtgtctggtgcatgcagccgctctcgtggctgagtacctgtcgatgctggaggaccattcatatctccccgttggatccgttagtttccagaacatttccagcaacgtcctggaggagtcggtagtgagcgaagataccctgtctcccgacgaggacggggtctgcgctggccagtatttcactgagtcaggattggtgggcctcctggaacaggccgctgagctattctcaacaggtggcctctacgagaccgttaacgaagtctataagctagtcattcctattctagaggcgcaccgagagttccgaaaactgaccctgactcatagcaagctccaacgtgcttttgattctattgttaacaaagaccacaagcgcatgtttggcacttactttcgagttggcttcttcgggtctaaatttggagacttagacgagcaagagttcgtgtataaagaaccagctatcacgaagctgcctgagatttcacaccggctggaggccttttacggacagtgttttggtgctgaattcgttgaggtcattaaagactccactccagttgacaagaccaagctcgaccctaataaagcatacatacaaattactttcgtcgagccttactttgacgagtatgaaatgaaggatagggtgacttattttgaaaagaactttaacttacgacgcttcatgtacaccacgccttttacacttgaaggacgccctcggggagagctccacgaacaatatagaaggaataccgtcctgacaacaatgcacgcattcccctacattaaaacacgaatctccgtaatccagaaagaagaatttgtgctcacccccatcgaggttgcaattgaggacatgaagaagaaaacactgcaattggcagtcgccataaatcaagaaccaccggacgctaagatgctgcagatggtgctgcagggtagcgtgggcgctacagtgaaccagggcccactcgaagtagctcaggtgtttctggcggagattccggctgaccccaagctttatagacaccacaataaactaaggttgtgctttaaggaattcatcatgtag

SEQ ID NO: 263259 - DNA, 6299 bp, Artificial Sequence
  derived and/or modified sequence
atggccaccctcccttccgccgaaaggcgggcatttgctttgaagattaatcgctacagcagtgccgaaatcaggaaacaattcaccctaccccctaatttgggacagtaccatagacaaagtatttccacaagcggatttccaagcttgcaactcccacagttttatgaccctgtggaacctgtggactttgaggggcttctgatgacgcacctgaattccctagacgtacagcttgcccaggagctgggcgacttcaccgacgacgacctcgacgtcgttttcacgcccaaagaatgtaggacccttcagcctagcctgcctgaggagggcgtagagctggatccccacgtgagagactgtgtccaaacctatattcgcgaatggctgatagtgaatagaaaaaatcagggatccccggaaatttgcggtttcaagaaaaccggtagccgaaaagatttccacaaaacactgcctaagcaaaccttcgagtcagagacgctggagtgtagcgagcccgcagcacaagccggtcctagacatctcaatgttctgtgcgatgtgtccgggaaagggcctgttacggcttgcgatttcgatctaagaagcttgcaacccgacaagcggttagagaatttactgcagcaggttagcgccgaggacttcgaaaaacagaatgaggaggcccgtcgaactaacagacaagcagagctatttgcactgtatccaagtgtcgacgaggaagacgcggtggaaatccgacccgtacctgagtgcccaaaagagcatttaggcaaccgaatcctggtgaagctcctgaccctgaagtttgagatcgagatcgagccgcttttcgcaagcatagcgctgtatgacgtaaaggagagaaagaagataagcgagaactttcactgtgatttgaatagcgaccagttcaagggttttctgcgagcacatacccccagcgtggctgcttcatcacaggcacgttcagcggttttttccgtgacctatccaagctccgatatctacctggtggttaaaatcgagaaagtgctgcagcagggggaaatcggtgactgcgctgagccctacaccgtgattaaggagagtgatggtgggaagtcaaaggagaaaatcgaaaagttgaagcttcaggccgagtctttttgccaaagactcggcaaatatcgcatgccatttgcctgggctcctatatctctgagctcattctttaatgtctccactttggaaagggaagttacggatgttgacagcgtcgtgggccgaagtagtgtaggagaaaggagaactctcgctcagtcacgtcgcctaagcgaaagagccctcagcctcgaggagaacggagttggcagcaacttcaaaacatctactctaagcgtgtcctctttctttaaacaggaaggagacaggctgagcgacgaggatctgttcaagttcctggcagactacaaaaggtccagttccctgcaaagacgcgtgaagtctatccctgggctactgcgtctggagatttccaccgctcccgagattattaattgctgtctgacccccgagatgctgcccgtaaagccatttcctgaaaatagaacccgcccacacaaggagattctggagttccctacgcgggaagtttacgtccctcatacggtgtaccgcaacctgttatacgtgtatccccagcgcctgaactttgtgaataagctggcctccgcccgtaacataacaattaagatccagtttatgtgtggagaggatgcaagcaatgcaatgcctgtaatctttggtaagtccagcggacctgagtttttacaagaggtttataccgcagtcacataccataataagtccccagacttctatgaggaggtgaagattaagcttccagcgaaactaactgtaaaccaccaccttctgttcaccttttatcacatcagttgtcagcaaaagcagggggcttctgtggagacccttctaggttattcatggttgcctatcctgcttaatgagcgtctacaaaccggtagttactgcctgcccgtcgctctggagaagctgccacctaattacagtatgcactcagccgagaaagtgcccctgcagaatcctcctatcaagtgggctgaaggtcacaagggcgttttcaatatagaggttcaggctgtgtcctccgttcacactcaagacaatcacctggaaaagttcttcacactatgccactctttggaatctcaggtcacattccccatccgggtgctcgaccagaagatttccgagatggctctagaacacgaactcaagctgtctattatttgtcttaactcttcacgtcttgaacctttagtgcttttcctgcacctcgtgctggataaactgttccaactgagcgtgcagccaatggtcatagcgggacagacggcgaacttttctcaatttgcattcgagtctgtagtggcgatcgccaatagcctgcacaattctaaggatttgtccaaggaccagcacggacgtaattgccttctggcctcttacgtccattacgtattccggctgcctgaggtgcagagggatgtgccaaaatcaggggctccgactgccctgctggaccccagatcataccacacctacggcagaacctccgctgctgccgtatcatcaaagcttttacaggcaagagtgatgtcctcaagcaaccctgatcttgcgggtacccactccgctgcagacgaagaagtgaagaatatcatgtcctccaagatagccgatagaaattgctctaggatgagctactactgctctggctcgagtgacgcaccgtcatctcccgctgcccctcggccagcgagtaaaaaacactttcacgaggagctggctctgcaaatggttgtttcaacaggaatggttcgggagactgtgttcaaatacgcatggttttttttcgagctgctggtgaagagtatggcgcaacacgtacacaatatggataagagggactccttccggagaacacggttctcagatcgctttatggatgacatcaccactattgtgaacgtggtgacgagcgagattgccgcattgctggtaaagccacagaaggagaacgaacaggctgagaagatgaatatctctctggctttttttctttatgatctgctaagcctgatggaccggggatttgtttttaatctgattcgacattattgtagtcagcttagcgctaagctcagcaatctgccaacattgatctcgatgcgacttgaatttttaagaattctgtgctcacacgaacactatctcaacttgaacctcttctttatgaacgccgacactgctcccacctccccgtgtccaagcatctcaagccaaaattcttcctcctgcagctccttccaagatcaaaaaattgcctctatgtttgatcttacaagtgaatacagacaacagcactttctgactggtctcttgttcactgagcttgcggcagccctggatgccgaaggcgagggcatttccaaggttcaaagaaaggctgttagtgccatccatagccttttgagcagccacgaccttgacccacgatgtgtgaagccagaagtaaaagtgaaaatcgcagctctctatctgcccctcgtggggattatccttgatgcactcccacagctgtgcgacttcactgtggccgacactcgcaggtacagaacaagtggatccgatgaagagcaggaaggagccggagctataaaccagaatgtggccctggcgattgccggaaacaatttcaacctgaaaacaagcggtatagtgctgagtagcctcccgtacaaacagtacaatatgctgaacgcagacaccacgcgcaatctcatgatatgttttttatggataatgaagaatgctgaccagtctttgattagaaagtggatagccgacctgccgtccacgcagctcaataggatcctggacctgctgttcatctgcgtgctttgctttgagtataagggtaaacagtctagcgataaagtgagcacccaggtactgcagaaaagtagggatgtgaaagccaggcttgaggaggccctgctgcgaggcgagggagctcggggagaaatgatgagaaggcgcgctcccggaaatgatagattcccaggactgaatgaaaacctccggtggaaaaaagaacagacccactggagacaggcaaatgagaaattggataagacaaaagcagagctagatcaagaagcactgatcagtggcaatctcgccaccgaggcccacttgattattctcgatatgcaggaaaacatcatccaggccagttcagccctagattgcaaagatagcctcctgggtggcgtgctgcgcgtcctggtgaattcacttaattgtgatcagagcaccacttacttgactcactgtttcgctaccctacgggctctcatcgccaaatttggagacctgctgtttgaagaagaagtggagcagtgcttcgatctctgccaccaggtgctgcaccactgctcaagtagtatggacgtgactcgatcacaggcctgcgctaccctgtaccttctgatgaggttctcatttggggcaacatcaaacttcgcccgtgtgaagatgcaggttacaatgagtttggcctcccttgttggtcgggctcctgactttaatgaagaacacctgcggaggagcctgagaacaattctagcgtattctgaggaagatacggctatgcagatgactcccttcccaacccaggtggaggaacttctctgcaacttgaactcaatcttgtacgacacggtaaaaatgcgagaatttcaggaggaccccgaaatgctgatggacttgatgtaccgaatcgctaagtcttatcaggccagcccggaccttaggcttacctggctgcagaatatggccgagaagcacaccaagaagaaatgctatacagaagccgctatgtgcctcgtgcacgctgctgccctggtcgctgagtacctgagcatgttagaagatcatagctatctccccgtcgggtctgtgagttttcagaatatctccagcaatgtgttagaggagtccgtagtatccgaagacactctgtcacctgacgaggatggtgtatgtgccggacagtactttacggagtctggtctggtcggtttattggaacaggccgctgagctcttcagcaccggtggcctctacgagacagtgaacgaagtttacaaattggtcataccaatactcgaggcccacagggaatttcggaaactgactctgactcactctaaactgcagcgggcattcgattcaatcgtgaacaaggatcataaacgcatgtttgggacttacttccgggtgggcttctttggctccaaatttggagacttagatgagcaggaatttgtatataaagaacccgcaataactaagctgcctgaaatttcccatcgattggaggccttctatggccagtgtttcggcgcagagttcgtcgaagttattaaagactctacccccgtagacaagacaaaactcgatccaaacaaagcttacatccagatcactttcgttgaaccttactttgacgagtacgaaatgaaggacagggtgacatactttgaaaagaatttcaatcttcgcagatttatgtataccacccctttcaccctcgagggtcgtccacggggtgagctacatgagcagtacaggagaaacacagtccttactaccatgcacgcattcccgtatatcaagacccggataagcgtcattcaaaaggaggagtttgtgctgacacccatcgaagtagccatcgaggacatgaagaaaaagactctgcagctggcagtagccattaaccaagagcctcccgacgctaagatgttacagatggtgctccagggttctgtcggagccaccgtaaaccagggacctttggaggtggcccaggtctttctggcagaaattcctgcagacccaaaactgtatcgccaccacaataagctgaggctgtgctttaaagagttcattatgaggtgtggcgaggcggtcgagaagaataagcgattgatcaccgctgaccagcgtgagtaccagcaagaactgaagaaaaactacaataaactgaaagaaaatctgcggcctatgattgaacggaagatccctgagctgtacaaaccaatctttagagtggagtcccaaaagagggattcattccatcggtctagtttccggaaatgtgagacacagctatcacaggggtcgta

SEQ ID NO: 263260 - DNA, 5973 bp, Artificial Sequence
  derived and/or modified sequence
atggccaccctgcccagcgccgagagaagagccttcgccctgaagatcaacagatacagcagcgccgagatcagaaagcagttcaccctgccccccaacctgggccagtaccacagacagagcatcagcaccagcggcttccccagcctgcagctgccccagttctacgaccccgtggagcccgtggacttcgagggcctgctgatgacccacctgaacagcctggacgtgcagctggcccaggagctgggcgacttcaccgacgacgacctggacgtggtgttcacccccaaggagtgcagaaccctgcagcccagcctgcccgaggagggcgtggagctggacccccacgtgagagactgcgtgcagacctacatcagagagtggctgatcgtgaacagaaagaaccagggcagccccgagatctgcggcttcaagaagaccggcagcagaaaggacttccacaagaccctgcccaagcagaccttcgagagcgagaccctggagtgcagcgagcccgccgcccaggccggccccagacacctgaacgtgctgtgcgacgtgagcggcaagggccccgtgaccgcctgcgacttcgacctgagaagcctgcagcccgacaagagactggagaacctgctgcagcaggtgagcgccgaggacttcgagaagcagaacgaggaggccagaagaaccaacagacaggccgagctgttcgccctgtaccccagcgtggacgaggaggacgccgtggagatcagacccgtgcccgagtgccccaaggagcacctgggcaacagaatcctggtgaagctgctgaccctgaagttcgagatcgagatcgagcccctgttcgccagcatcgccctgtacgacgtgaaggagagaaagaagatcagcgagaacttccactgcgacctgaacagcgaccagttcaagggcttcctgagagcccacacccccagcgtggccgccagcagccaggccagaagcgccgtgttcagcgtgacctaccccagcagcgacatctacctggtggtgaagatcgagaaggtgctgcagcagggcgagatcggcgactgcgccgagccctacaccgtgatcaaggagagcgacggcggcaagagcaaggagaagatcgagaagctgaagctgcaggccgagagcttctgccagagactgggcaagtacagaatgcccttcgcctgggcccccatcagcctgagcagcttcttcaacgtgagcaccctggagagagaggtgaccgacgtggacagcgtggtgggcagaagcagcgtgggcgagagaagaaccctggcccagagcagaagactgagcgagagagccctgagcctggaggagaacggcgtgggcagcaacttcaagaccagcaccctgagcgtgagcagcttcttcaagcaggagggcgacagactgagcgacgaggacctgttcaagttcctggccgactacaagagaagcagcagcctgcagagaagagtgaagagcatccccggcctgctgagactggagatcagcaccgcccccgagatcatcaactgctgcctgacccccgagatgctgcccgtgaagcccttccccgagaacagaaccagaccccacaaggagatcctggagttccccaccagagaggtgtacgtgccccacaccgtgtacagaaacctgctgtacgtgtacccccagagactgaacttcgtgaacaagctggccagcgccagaaacatcaccatcaagatccagttcatgtgcggcgaggacgccagcaacgccatgcccgtgatcttcggcaagagcagcggccccgagttcctgcaggaggtgtacaccgccgtgacctaccacaacaagagccccgacttctacgaggaggtgaagatcaagctgcccgccaagctgaccgtgaaccaccacctgctgttcaccttctaccacatcagctgccagcagaagcagggcgccagcgtggagaccctgctgggctacagctggctgcccatcctgctgaacgagagactgcagaccggcagctactgcctgcccgtggccctggagaagctgccccccaactacagcatgcacagcgccgagaaggtgcccctgcagaacccccccatcaagtgggccgagggccacaagggcgtgttcaacatcgaggtgcaggccgtgagcagcgtgcacacccaggacaaccacctggagaagttcttcaccctgtgccacagcctggagagccaggtgaccttccccatcagagtgctggaccagaagatcagcgagatggccctggagcacgagctgaagctgagcatcatctgcctgaacagcagcagactggagcccctggtgctgttcctgcacctggtgctggacaagctgttccagctgagcgtgcagcccatggtgatcgccggccagaccgccaacttcagccagttcgccttcgagagcgtggtggccatcgccaacagcctgcacaacagcaaggacctgagcaaggaccagcacggcagaaactgcctgctggccagctacgtgcactacgtgttcagactgcccgaggtgcagagagacgtgcccaagagcggcgcccccaccgccctgctggaccccagaagctaccacacctacggcagaaccagcgccgccgccgtgagcagcaagctgctgcaggccagagtgatgagcagcagcaaccccgacctggccggcacccacagcgccgccgacgaggaggtgaagaacatcatgagcagcaagcacttccacgaggagctggccctgcagatggtggtgagcaccggcatggtgagagagaccgtgttcaagtacgcctggttcttcttcgagctgctggtgaagagcatggcccagcacgtgcacaacatggacaagagagacagcttcagaagaaccagattcagcgacagattcatggacgacatcaccaccatcgtgaacgtggtgaccagcgagatcgccgccctgctggtgaagccccagaaggagaacgagcaggccgagaagatgaacatcagcctggccttcttcctgtacgacctgctgagcctgatggacagaggcttcgtgttcaacctgatcagacactactgcagccagctgagcgccaagctgagcaacctgcccaccctgatcagcatgagactggagttcctgagaatcctgtgcagccacgagcactacctgaacctgaacctgttcttcatgaacgccgacaccgcccccaccagcccctgccccagcatcagcagccagaacagcagcagctgcagcagcttccaggaccagaagatcgccagcatgttcgacctgaccagcgagtacagacagcagcacttcctgaccggcctgctgttcaccgagctggccgccgccctggacgccgagggcgagggcatcagcaaggtgcagagaaaggccgtgagcgccatccacagcctgctgagcagccacgacctggaccccagatgcgtgaagcccgaggtgaaggtgaagatcgccgccctgtacctgcccctggtgggcatcatcctggacgccctgccccagctgtgcgacttcaccgtggccgacaccagaagatacagaaccagcggcagcgacgaggagcaggagggcgccggcgccatcaaccagaacgtggccctggccatcgccggcaacaacttcaacctgaagaccagcggcatcgtgctgagcagcctgccctacaagcagtacaacatgctgaacgccgacaccaccagaaacctgatgatctgcttcctgtggatcatgaagaacgccgaccagagcctgatcagaaagtggatcgccgacctgcccagcacccagctgaacagaatcctggacctgctgttcatctgcgtgctgtgcttcgagtacaagggcaagcagagcagcgacaaggtgagcacccaggtgctgcagaagagcagagacgtgaaggccagactggaggaggccctgctgagaggcgagggcgccagaggcgagatgatgagaagaagagcccccggcaacgacagattccccggcctgaacgagaacctgagatggaagaaggagcagacccactggagacaggccaacgagaagctggacaagaccaaggccgagctggaccaggaggccctgatcagcggcaacctggccaccgaggcccacctgatcatcctggacatgcaggagaacatcatccaggccagcagcgccctggactgcaaggacagcctgctgggcggcgtgctgagagtgctggtgaacagcctgaactgcgaccagagcaccacctacctgacccactgcttcgccaccctgagagccctgatcgccaagttcggcgacctgctgttcgaggaggaggtggagcagtgcttcgacctgtgccaccaggtgctgcaccactgcagcagcagcatggacgtgaccagaagccaggcctgcgccaccctgtacctgctgatgagattcagcttcggcgccaccagcaacttcgccagagtgaagatgcaggtgaccatgagcctggccagcctggtgggcagagcccccgacttcaacgaggagcacctgagaagaagcctgagaaccatcctggcctacagcgaggaggacaccgccatgcagatgacccccttccccacccaggtggaggagctgctgtgcaacctgaacagcatcctgtacgacaccgtgaagatgagagagttccaggaggaccccgagatgctgatggacctgatgtacagaatcgccaagagctaccaggccagccccgacctgagactgacctggctgcagaacatggccgagaagcacaccaagaagaagtgctacaccgaggccgccatgtgcctggtgcacgccgccgccctggtggccgagtacctgagcatgctggaggaccacagctacctgcccgtgggcagcgtgagcttccagaacatcagcagcaacgtgctggaggagagcgtggtgagcgaggacaccctgagccccgacgaggacggcgtgtgcgccggccagtacttcaccgagagcggcctggtgggcctgctggagcaggccgccgagctgttcagcaccggcggcctgtacgagaccgtgaacgaggtgtacaagctggtgatccccatcctggaggcccacagagagttcagaaagctgaccctgacccacagcaagctgcagagagccttcgacagcatcgtgaacaaggaccacaagagaatgttcggcacctacttcagagtgggcttcttcggcagcaagttcggcgacctggacgagcaggagttcgtgtacaaggagcccgccatcaccaagctgcccgagatcagccacagactggaggccttctacggccagtgcttcggcgccgagttcgtggaggtgatcaaggacagcacccccgtggacaagaccaagctggaccccaacaaggcctacatccagatcaccttcgtggagccctacttcgacgagtacgagatgaaggacagagtgacctacttcgagaagaacttcaacctgagaagattcatgtacaccacccccttcaccctggagggcagacccagaggcgagctgcacgagcagtacagaagaaacaccgtgctgaccaccatgcacgccttcccctacatcaagaccagaatcagcgtgatccagaaggaggagttcgtgctgacccccatcgaggtggccatcgaggacatgaagaagaagaccctgcagctggccgtggccatcaaccaggagccccccgacgccaagatgctgcagatggtgctgcagggcagcgtgggcgccaccgtgaaccagggccccctggaggtggcccaggtgttcctggccgagatccccgccgaccccaagctgtacagacaccacaacaagctgagactgtgcttcaaggagttcatcatgtag

SEQ ID NO: 263261 - DNA, 6300 bp, Artificial Sequence
  derived and/or modified sequence
atggccaccctgcccagcgccgagagaagagccttcgccctgaagatcaacagatacagcagcgccgagatcagaaagcagttcaccctgccccccaacctgggccagtaccacagacagagcatcagcaccagcggcttccccagcctgcagctgccccagttctacgaccccgtggagcccgtggacttcgagggcctgctgatgacccacctgaacagcctggacgtgcagctggcccaggagctgggcgacttcaccgacgacgacctggacgtggtgttcacccccaaggagtgcagaaccctgcagcccagcctgcccgaggagggcgtggagctggacccccacgtgagagactgcgtgcagacctacatcagagagtggctgatcgtgaacagaaagaaccagggcagccccgagatctgcggcttcaagaagaccggcagcagaaaggacttccacaagaccctgcccaagcagaccttcgagagcgagaccctggagtgcagcgagcccgccgcccaggccggccccagacacctgaacgtgctgtgcgacgtgagcggcaagggccccgtgaccgcctgcgacttcgacctgagaagcctgcagcccgacaagagactggagaacctgctgcagcaggtgagcgccgaggacttcgagaagcagaacgaggaggccagaagaaccaacagacaggccgagctgttcgccctgtaccccagcgtggacgaggaggacgccgtggagatcagacccgtgcccgagtgccccaaggagcacctgggcaacagaatcctggtgaagctgctgaccctgaagttcgagatcgagatcgagcccctgttcgccagcatcgccctgtacgacgtgaaggagagaaagaagatcagcgagaacttccactgcgacctgaacagcgaccagttcaagggcttcctgagagcccacacccccagcgtggccgccagcagccaggccagaagcgccgtgttcagcgtgacctaccccagcagcgacatctacctggtggtgaagatcgagaaggtgctgcagcagggcgagatcggcgactgcgccgagccctacaccgtgatcaaggagagcgacggcggcaagagcaaggagaagatcgagaagctgaagctgcaggccgagagcttctgccagagactgggcaagtacagaatgcccttcgcctgggcccccatcagcctgagcagcttcttcaacgtgagcaccctggagagagaggtgaccgacgtggacagcgtggtgggcagaagcagcgtgggcgagagaagaaccctggcccagagcagaagactgagcgagagagccctgagcctggaggagaacggcgtgggcagcaacttcaagaccagcaccctgagcgtgagcagcttcttcaagcaggagggcgacagactgagcgacgaggacctgttcaagttcctggccgactacaagagaagcagcagcctgcagagaagagtgaagagcatccccggcctgctgagactggagatcagcaccgcccccgagatcatcaactgctgcctgacccccgagatgctgcccgtgaagcccttccccgagaacagaaccagaccccacaaggagatcctggagttccccaccagagaggtgtacgtgccccacaccgtgtacagaaacctgctgtacgtgtacccccagagactgaacttcgtgaacaagctggccagcgccagaaacatcaccatcaagatccagttcatgtgcggcgaggacgccagcaacgccatgcccgtgatcttcggcaagagcagcggccccgagttcctgcaggaggtgtacaccgccgtgacctaccacaacaagagccccgacttctacgaggaggtgaagatcaagctgcccgccaagctgaccgtgaaccaccacctgctgttcaccttctaccacatcagctgccagcagaagcagggcgccagcgtggagaccctgctgggctacagctggctgcccatcctgctgaacgagagactgcagaccggcagctactgcctgcccgtggccctggagaagctgccccccaactacagcatgcacagcgccgagaaggtgcccctgcagaacccccccatcaagtgggccgagggccacaagggcgtgttcaacatcgaggtgcaggccgtgagcagcgtgcacacccaggacaaccacctggagaagttcttcaccctgtgccacagcctggagagccaggtgaccttccccatcagagtgctggaccagaagatcagcgagatggccctggagcacgagctgaagctgagcatcatctgcctgaacagcagcagactggagcccctggtgctgttcctgcacctggtgctggacaagctgttccagctgagcgtgcagcccatggtgatcgccggccagaccgccaacttcagccagttcgccttcgagagcgtggtggccatcgccaacagcctgcacaacagcaaggacctgagcaaggaccagcacggcagaaactgcctgctggccagctacgtgcactacgtgttcagactgcccgaggtgcagagagacgtgcccaagagcggcgcccccaccgccctgctggaccccagaagctaccacacctacggcagaaccagcgccgccgccgtgagcagcaagctgctgcaggccagagtgatgagcagcagcaaccccgacctggccggcacccacagcgccgccgacgaggaggtgaagaacatcatgagcagcaagatcgccgacagaaactgcagcagaatgagctactactgcagcggcagcagcgacgcccccagcagccccgccgcccccagacccgccagcaagaagcacttccacgaggagctggccctgcagatggtggtgagcaccggcatggtgagagagaccgtgttcaagtacgcctggttcttcttcgagctgctggtgaagagcatggcccagcacgtgcacaacatggacaagagagacagcttcagaagaaccagattcagcgacagattcatggacgacatcaccaccatcgtgaacgtggtgaccagcgagatcgccgccctgctggtgaagccccagaaggagaacgagcaggccgagaagatgaacatcagcctggccttcttcctgtacgacctgctgagcctgatggacagaggcttcgtgttcaacctgatcagacactactgcagccagctgagcgccaagctgagcaacctgcccaccctgatcagcatgagactggagttcctgagaatcctgtgcagccacgagcactacctgaacctgaacctgttcttcatgaacgccgacaccgcccccaccagcccctgccccagcatcagcagccagaacagcagcagctgcagcagcttccaggaccagaagatcgccagcatgttcgacctgaccagcgagtacagacagcagcacttcctgaccggcctgctgttcaccgagctggccgccgccctggacgccgagggcgagggcatcagcaaggtgcagagaaaggccgtgagcgccatccacagcctgctgagcagccacgacctggaccccagatgcgtgaagcccgaggtgaaggtgaagatcgccgccctgtacctgcccctggtgggcatcatcctggacgccctgccccagctgtgcgacttcaccgtggccgacaccagaagatacagaaccagcggcagcgacgaggagcaggagggcgccggcgccatcaaccagaacgtggccctggccatcgccggcaacaacttcaacctgaagaccagcggcatcgtgctgagcagcctgccctacaagcagtacaacatgctgaacgccgacaccaccagaaacctgatgatctgcttcctgtggatcatgaagaacgccgaccagagcctgatcagaaagtggatcgccgacctgcccagcacccagctgaacagaatcctggacctgctgttcatctgcgtgctgtgcttcgagtacaagggcaagcagagcagcgacaaggtgagcacccaggtgctgcagaagagcagagacgtgaaggccagactggaggaggccctgctgagaggcgagggcgccagaggcgagatgatgagaagaagagcccccggcaacgacagattccccggcctgaacgagaacctgagatggaagaaggagcagacccactggagacaggccaacgagaagctggacaagaccaaggccgagctggaccaggaggccctgatcagcggcaacctggccaccgaggcccacctgatcatcctggacatgcaggagaacatcatccaggccagcagcgccctggactgcaaggacagcctgctgggcggcgtgctgagagtgctggtgaacagcctgaactgcgaccagagcaccacctacctgacccactgcttcgccaccctgagagccctgatcgccaagttcggcgacctgctgttcgaggaggaggtggagcagtgcttcgacctgtgccaccaggtgctgcaccactgcagcagcagcatggacgtgaccagaagccaggcctgcgccaccctgtacctgctgatgagattcagcttcggcgccaccagcaacttcgccagagtgaagatgcaggtgaccatgagcctggccagcctggtgggcagagcccccgacttcaacgaggagcacctgagaagaagcctgagaaccatcctggcctacagcgaggaggacaccgccatgcagatgacccccttccccacccaggtggaggagctgctgtgcaacctgaacagcatcctgtacgacaccgtgaagatgagagagttccaggaggaccccgagatgctgatggacctgatgtacagaatcgccaagagctaccaggccagccccgacctgagactgacctggctgcagaacatggccgagaagcacaccaagaagaagtgctacaccgaggccgccatgtgcctggtgcacgccgccgccctggtggccgagtacctgagcatgctggaggaccacagctacctgcccgtgggcagcgtgagcttccagaacatcagcagcaacgtgctggaggagagcgtggtgagcgaggacaccctgagccccgacgaggacggcgtgtgcgccggccagtacttcaccgagagcggcctggtgggcctgctggagcaggccgccgagctgttcagcaccggcggcctgtacgagaccgtgaacgaggtgtacaagctggtgatccccatcctggaggcccacagagagttcagaaagctgaccctgacccacagcaagctgcagagagccttcgacagcatcgtgaacaaggaccacaagagaatgttcggcacctacttcagagtgggcttcttcggcagcaagttcggcgacctggacgagcaggagttcgtgtacaaggagcccgccatcaccaagctgcccgagatcagccacagactggaggccttctacggccagtgcttcggcgccgagttcgtggaggtgatcaaggacagcacccccgtggacaagaccaagctggaccccaacaaggcctacatccagatcaccttcgtggagccctacttcgacgagtacgagatgaaggacagagtgacctacttcgagaagaacttcaacctgagaagattcatgtacaccacccccttcaccctggagggcagacccagaggcgagctgcacgagcagtacagaagaaacaccgtgctgaccaccatgcacgccttcccctacatcaagaccagaatcagcgtgatccagaaggaggagttcgtgctgacccccatcgaggtggccatcgaggacatgaagaagaagaccctgcagctggccgtggccatcaaccaggagccccccgacgccaagatgctgcagatggtgctgcagggcagcgtgggcgccaccgtgaaccagggccccctggaggtggcccaggtgttcctggccgagatccccgccgaccccaagctgtacagacaccacaacaagctgagactgtgcttcaaggagttcatcatgagatgcggcgaggccgtggagaagaacaagagactgatcaccgccgaccagagagagtaccagcaggagctgaagaagaactacaacaagctgaaggagaacctgagacccatgatcgagagaaagatccccgagctgtacaagcccatcttcagagtggagagccagaagagagacagcttccacagaagcagcttcagaaagtgcgagacccagctgagccagggcagctag

SEQ ID NO: 263262 - DNA, 7356 bp, Artificial Sequence
  derived and/or modified sequence
gacagacgaggtttgcgcttggctgggcatgttccgcggctactctgcggcgcgccaggcccccgctttccgcaccccgcgaccctagaagccaccgaaccgccggcgggccatggccactctgccgagcgcagagcgccgcgcgttcgcgctcaagatcaacaggtattcttcagcggaaataaggaaacagtttactctcccaccaaaccttggccagtaccatcgacagagcataagtacctctggcttcccctctcttcaactacctcagttttatgaccctgtggagccagtggactttgaaggacttctgatgacacacctgaacagcctggatgtgcagcttgcccaggagctcggggacttcactgatgacgacttggacgtggtgttcacgccaaaggaatgtaggactttgcagccctctttgccggaggaaggggttgaactggaccctcatgtcagggactgtgttcagacctacatccgtgagtggctaatcgtgaaccggaaaaaccaaggaagtccagaaatctgtggctttaaaaagactggatctcgaaaagattttcacaagacgcttccgaaacagacgtttgagtcggaaaccttggagtgcagtgaacccgctgctcaggcaggcccccgccacttaaacgtgctgtgcgacgtgtctgggaaaggccccgtcactgcctgtgactttgacctccgcagcctgcagcctgacaagcggctagaaaacctcctgcagcaagtgagtgccgaggactttgagaagcagaacgaggaggcccggaggaccaataggcaggccgagctctttgccctttacccatcagtggacgaggaggatgctgtggaaatacgtccagtaccagaatgtcccaaggaacacctgggcaacagaatattggtcaagttgctgaccttgaagttcgagattgaaattgagcccctgtttgccagcattgccctctacgatgttaaagaaaggaaaaagatctcagaaaattttcactgtgacctgaactctgaccagttcaaaggatttctgcgagctcacacgccttcagtggccgcatcaagtcaggcgagatctgcagtcttctcagtcacctacccgtcctcagacatctacctggtagtcaagattgaaaaagtcctgcagcagggagagattggagactgtgcagagccctacacggttatcaaagaaagtgatggtggaaagagtaaagaaaagattgaaaaactaaaactccaagctgaatccttctgccagcgtttggggaaataccggatgccctttgcctgggcacccataagcttatcaagcttcttcaatgtctccacccttgagagggaggtaactgatgtggactctgtggttgggagaagctcagtgggtgaacggaggacattggcccaatctagaaggctttctgaaagagccctctccttggaggaaaatggggttggatccaacttcaaaacctccactctgagcgttagcagctttttcaagcaggaaggagatcgccttagcgatgaagacttattcaagtttttagctgactacaaaagatcatcatccttacagagacgagtcaagtcaattccaggcttgctaagactggagatttctacagctccagagatcatcaattgctgtctgactcctgaaatgctgcccgtgaaaccctttcctgaaaaccggacacgcccgcacaaagagattttggaatttccaacacgagaagtatatgtccctcacactgtgtacagaaaccttctctatgtctacccacagaggctgaactttgtaaacaaactagcatcagcccggaacattacaataaagatccagtttatgtgtggagaagatgctagcaatgcgatgccggtcatctttggaaaatccagcgggcctgaatttctgcaggaagtgtacacagctgttacataccataataagtctcctgacttttatgaagaagtgaaaattaagctccccgctaagctcacagtaaatcaccacctcctgttcaccttctaccatatcagctgtcagcagaagcaaggagcctccgtggaaactctcctgggatattcatggctgccaattctcttaaatgaacgtcttcaaactggatcctactgtctcccagttgccttggaaaaattgccacccaactactccatgcattctgctgagaaagtcccattacagaatcctcccattaagtgggctgaaggacataagggagtatttaatattgaagtgcaagctgtttcttctgtacacacccaggacaaccacctggagaagttcttcaccctctgccactccctggagagccaggtgaccttccccatccgcgtgctggatcagaaaatcagcgagatggcgctggagcatgagctgaagctcagcatcatctgcctgaactcctcccgcctggagccgctcgtgctcttcctgcacctggtgctggacaagctcttccagctgtccgtgcagcccatggtcatcgctggccagacagccaacttctcccagtttgccttcgagtccgtggtggccatcgccaacagtctgcacaacagcaaggacctgagcaaggaccagcatgggaggaactgcctgctggcttcctacgtgcactacgtcttccgcctgccagaggtgcaaagggatgtgcccaagtcaggcgctcccactgccctcctagaccctcggagctaccacacgtatggccgcacatcagctgctgctgtgagttcaaagctgctgcaggcccgggtgatgagcagcagtaacccagacctcgcggggacacactccgcagcagacgaggaagtgaagaacatcatgtcttcaaagcatttccatgaggagcttgcccttcagatggtggtcagcaccggaatggtgagagaaacagtcttcaagtatgcctggttcttctttgagcttctggtgaaaagcatggcccagcacgtacataacatggacaaacgggacagttttcggaggactcgtttttctgaccgtttcatggatgacataactactattgttaatgtggtcacctcggaaattgcagcccttttagtaaaaccacagaaggaaaatgaacaggcggaaaagatgaacatcagcctggctttcttcttgtatgaccttctctccctcatggatcggggctttgtgtttaacctcatcagacattattgcagccagctgtcagccaagctcagtaaccttccaacgctcatttccatgaggctagagttcctgagaatcctctgtagccatgagcattacctcaatctgaaccttttttttatgaatgctgatactgctccaacatctccttgtccttccatatcttcccagaactcaagctcctgctccagcttccaggaccagaagatcgccagcatgttcgatctgacttccgagtaccgccagcagcacttcctcaccgggctcctcttcacagaactggctgctgccctggatgccgaaggggaaggaatcagcaaagtacaaaggaaagctgtcagtgcaattcacagcctgctaagttctcacgacctggacccacgctgtgtcaaaccagaggtgaaggtcaaaatcgccgccctttacctacctttagttggcatcattttggatgctttgccacagctctgtgactttacagttgcagatactcgcagataccgcaccagtggctcggatgaagaacaagaaggagccggtgccattaaccagaatgtggctctggccatagcagggaataatttcaatttgaaaacaagtggaatagtgctgtcttccttgccctataagcagtacaacatgctgaacgcggacactactcgcaacctcatgatctgcttcctctggatcatgaaaaatgctgatcagagcctcattaggaagtggattgctgacctgccatcaacgcagctcaacaggattttagatctacttttcatctgtgtgttatgttttgagtataagggaaaacagagttctgacaaagtcagtacccaagtcctgcagaagtcaagggatgtcaaggcccggctggaagaggctttgctccgtggggaaggggccagaggggagatgatgcgccgccgggctccagggaacgaccgatttccaggcctaaatgaaaatttgagatggaagaaagagcagacacattggcggcaagctaatgagaagctagataaaacaaaggccgagttagatcaagaagccttgatcagtggcaatctggctacagaagcacatttaatcatcctggatatgcaggaaaacattatccaggcgagctcggctctggactgtaaagacagcctgctgggaggtgttctgagggtgctggtgaattctctgaactgtgatcagagtaccacctacctgactcactgctttgcaacactccgtgctctcatcgccaagtttggagacttactctttgaagaggaggtggaacagtgtttcgacctatgtcaccaagtcctgcaccactgcagcagcagcatggatgtcacccggagccaagcctgtgccaccctttacctcctcatgaggttcagttttggagccaccagtaattttgcaagagtaaagatgcaagtaaccatgtccctggcatctttggtgggaagagcaccagactttaatgaagagcacctgagaagatccttgaggacaattttggcctattcagaagaggacacagccatgcagatgactccttttcccacccaggtggaggaacttctctgtaatctgaatagcatcttatatgacacagtgaaaatgagggaatttcaggaagatcctgagatgcttatggatctcatgtacagaattgccaagagttaccaggcatctcctgatctgcggctgacctggctccagaacatggcagagaaacacaccaagaagaagtgctacacggaggctgccatgtgcctggtgcacgccgctgcgttagtggctgagtatctgagcatgctggaggaccacagctacctgcccgtgggcagtgtcagcttccagaatatttcttccaatgtgctggaggagtctgtggtctctgaggacaccctgtcacctgacgaggatggggtgtgcgcaggccagtacttcaccgagagtggcctggtaggcctcctggagcaggccgcggagctcttcagcacgggaggcttatatgagacagttaatgaggtctacaagctggtcatccccatcctagaagcgcatcgagaattccggaagctgacactcactcacagcaagctgcagagagccttcgacagcatcgttaacaaggatcataagagaatgtttggaacctacttccgagttggtttctttggatccaaatttggggatttggatgaacaggagtttgtctacaaagagcctgcaattaccaagcttcctgagatctcacatagactagaggcattttatggtcaatgttttggtgcagaatttgtggaagtgattaaagactccactcctgtggacaaaaccaagttggatcctaacaaggcctacatacagatcacttttgtggagccctactttgatgagtatgagatgaaagacagggtcacatactttgagaagaatttcaacctccggaggttcatgtacaccaccccgttcaccctggaggggcggcctcggggagagctgcatgagcagtacagaaggaacacagtcctgaccactatgcacgccttcccctacatcaagaccaggatcagcgtcatccagaaggaggagtttgttttgacaccgattgaagttgccattgaagacatgaagaagaagaccctgcagttagcagttgccattaaccaggagccgcctgatgcaaagatgcttcagatggtgctgcaaggctctgtgggagctactgtaaatcagggaccactggaagtagcccaagtgtttttggctgaaattcctgctgatccaaaactctatcgacatcacaacaagttgaggttatgctttaaggaattcatcatgagatgtggtgaagctgtagagaaaaacaagcgtctcatcacggcagaccagagggaatatcagcaggaactcaaaaagaactataacaagctaaaagagaacctcaggccaatgatcgagcggaaaattccagaactgtacaagccaatattcagagttgagagtcaaaagagggactccttccacagatctagtttcaggaaatgtgaaacccagttgtcacagggcagctaagaaaagccatcttcattcgtggagactgtggccctgcaaccctggagaaggacttgctggtacttaaaaaatgggacatttgccacccaggactgactgtacactccctgatcagccagcactctggaagctttgggatcccaggaaccatggaattattcccaaatggactctgaccagatttttgccatactggggggtggcgggatggaggatgggtactcaggcatgactgcgtatttattaaagtgtgtttttccacaatgtaccaaacaaggcataagcagcttctcctgctgactggccaatcactgcccatctgagagatgatttcctctggcccatatttgaatttattggagtaactcaaattgcctgaggaaaaatggaaaaattatccaccagtcgattcaaactgaatttcactctttataggaaggcagggcaaacttgtaggagtacgaaacattttcaataaatctacaaagggaagccttactacaattccaaaaatcatcatggttggaaatttgggaggagattatttgtgaacttgttacccttttggtaatggtggactaattgctgtatagttatttttgttttattattactgttacattaatttaacatgcatttatagaagaatacattcaaagcactgatgtaggagatacacggtacttggagcagtcagccagaaatcacagatactgctttcacttaaatggaaacaattctccgataatgctttgctttttttcttatgtcactcttgtgtactatctatttttctcctctctgggaccaagtttctttttataaagcaataatatctctgttttcatttcagaacattgtgctgtctgtcagcatatgtatatcagctacaaaatatattcaactttgacttcttttgacaaaggactttaggaaaaagaggaacaaagacattatttgagaattaaattatatatttttaatatgactgtgaccttgactgataataaagatgtaataagaattgcaagctaaatgtt

SEQ ID NO: 263263 - DNA, 7452 bp, Artificial Sequence
  derived and/or modified sequence
gacagacgaggtttgcgcttggctgggcatgttccgcggctactctgcggcgcgccaggcccccgctttccgcaccccgcgaccctagaagccaccgaaccgccggcgggccatggccactctgccgagcgcagagcgccgcgcgttcgcgctcaagatcaacaggtattcttcagcggaaataaggaaacagtttactctcccaccaaaccttggccagtaccatcgacagagcataagtacctctggcttcccctctcttcaactacctcagttttatgaccctgtggagccagtggactttgaaggacttctgatgacacacctgaacagcctggatgtgcagcttgcccaggagctcggggacttcactgatgacgacttggacgtggtgttcacgccaaaggaatgtaggactttgcagccctctttgccggaggaaggggttgaactggaccctcatgtcagggactgtgttcagacctacatccgtgagtggctaatcgtgaaccggaaaaaccaaggaagtccagaaatctgtggctttaaaaagactggatctcgaaaagattttcacaagacgcttccgaaacagacgtttgagtcggaaaccttggagtgcagtgaacccgctgctcaggcaggcccccgccacttaaacgtgctgtgcgacgtgtctgggaaaggccccgtcactgcctgtgactttgacctccgcagcctgcagcctgacaagcggctagaaaacctcctgcagcaagtgagtgccgaggactttgagaagcagaacgaggaggcccggaggaccaataggcaggccgagctctttgccctttacccatcagtggacgaggaggatgctgtggaaatacgtccagtaccagaatgtcccaaggaacacctgggcaacagaatattggtcaagttgctgaccttgaagttcgagattgaaattgagcccctgtttgccagcattgccctctacgatgttaaagaaaggaaaaagatctcagaaaattttcactgtgacctgaactctgaccagttcaaaggatttctgcgagctcacacgccttcagtggccgcatcaagtcaggcgagatctgcagtcttctcagtcacctacccgtcctcagacatctacctggtagtcaagattgaaaaagtcctgcagcagggagagattggagactgtgcagagccctacacggttatcaaagaaagtgatggtggaaagagtaaagaaaagattgaaaaactaaaactccaagctgaatccttctgccagcgtttggggaaataccggatgccctttgcctgggcacccataagcttatcaagcttcttcaatgtctccacccttgagagggaggtaactgatgtggactctgtggttgggagaagctcagtgggtgaacggaggacattggcccaatctagaaggctttctgaaagagccctctccttggaggaaaatggggttggatccaacttcaaaacctccactctgagcgttagcagctttttcaagcaggaaggagatcgccttagcgatgaagacttattcaagtttttagctgactacaaaagatcatcatccttacagagacgagtcaagtcaattccaggcttgctaagactggagatttctacagctccagagatcatcaattgctgtctgactcctgaaatgctgcccgtgaaaccctttcctgaaaaccggacacgcccgcacaaagagattttggaatttccaacacgagaagtatatgtccctcacactgtgtacagaaaccttctctatgtctacccacagaggctgaactttgtaaacaaactagcatcagcccggaacattacaataaagatccagtttatgtgtggagaagatgctagcaatgcgatgccggtcatctttggaaaatccagcgggcctgaatttctgcaggaagtgtacacagctgttacataccataataagtctcctgacttttatgaagaagtgaaaattaagctccccgctaagctcacagtaaatcaccacctcctgttcaccttctaccatatcagctgtcagcagaagcaaggagcctccgtggaaactctcctgggatattcatggctgccaattctcttaaatgaacgtcttcaaactggatcctactgtctcccagttgccttggaaaaattgccacccaactactccatgcattctgctgagaaagtcccattacagaatcctcccattaagtgggctgaaggacataagggagtatttaatattgaagtgcaagctgtttcttctgtacacacccaggacaaccacctggagaagttcttcaccctctgccactccctggagagccaggtgaccttccccatccgcgtgctggatcagaaaatcagcgagatggcgctggagcatgagctgaagctcagcatcatctgcctgaactcctcccgcctggagccgctcgtgctcttcctgcacctggtgctggacaagctcttccagctgtccgtgcagcccatggtcatcgctggccagacagccaacttctcccagtttgccttcgagtccgtggtggccatcgccaacagtctgcacaacagcaaggacctgagcaaggaccagcatgggaggaactgcctgctggcttcctacgtgcactacgtcttccgcctgccagaggtgcaaagggatgtgcccaagtcaggcgctcccactgccctcctagaccctcggagctaccacacgtatggccgcacatcagctgctgctgtgagttcaaagctgctgcaggcccgggtgatgagcagcagtaacccagacctcgcggggacacactccgcagcagacgaggaagtgaagaacatcatgtcttcaaagatcgccgatcgcaactgcagccgaatgtcttactattgctctggcagtagtgatgctccaagttcacctgcagccccaaggccagccagcaaaaagcatttccatgaggagcttgcccttcagatggtggtcagcaccggaatggtgagagaaacagtcttcaagtatgcctggttcttctttgagcttctggtgaaaagcatggcccagcacgtacataacatggacaaacgggacagttttcggaggactcgtttttctgaccgtttcatggatgacataactactattgttaatgtggtcacctcggaaattgcagcccttttagtaaaaccacagaaggaaaatgaacaggcggaaaagatgaacatcagcctggctttcttcttgtatgaccttctctccctcatggatcggggctttgtgtttaacctcatcagacattattgcagccagctgtcagccaagctcagtaaccttccaacgctcatttccatgaggctagagttcctgagaatcctctgtagccatgagcattacctcaatctgaaccttttttttatgaatgctgatactgctccaacatctccttgtccttccatatcttcccagaactcaagctcctgctccagcttccaggaccagaagatcgccagcatgttcgatctgacttccgagtaccgccagcagcacttcctcaccgggctcctcttcacagaactggctgctgccctggatgccgaaggggaaggaatcagcaaagtacaaaggaaagctgtcagtgcaattcacagcctgctaagttctcacgacctggacccacgctgtgtcaaaccagaggtgaaggtcaaaatcgccgccctttacctacctttagttggcatcattttggatgctttgccacagctctgtgactttacagttgcagatactcgcagataccgcaccagtggctcggatgaagaacaagaaggagccggtgccattaaccagaatgtggctctggccatagcagggaataatttcaatttgaaaacaagtggaatagtgctgtcttccttgccctataagcagtacaacatgctgaacgcggacactactcgcaacctcatgatctgcttcctctggatcatgaaaaatgctgatcagagcctcattaggaagtggattgctgacctgccatcaacgcagctcaacaggattttagatctacttttcatctgtgtgttatgttttgagtataagggaaaacagagttctgacaaagtcagtacccaagtcctgcagaagtcaagggatgtcaaggcccggctggaagaggctttgctccgtggggaaggggccagaggggagatgatgcgccgccgggctccagggaacgaccgatttccaggcctaaatgaaaatttgagatggaagaaagagcagacacattggcggcaagctaatgagaagctagataaaacaaaggccgagttagatcaagaagccttgatcagtggcaatctggctacagaagcacatttaatcatcctggatatgcaggaaaacattatccaggcgagctcggctctggactgtaaagacagcctgctgggaggtgttctgagggtgctggtgaattctctgaactgtgatcagagtaccacctacctgactcactgctttgcaacactccgtgctctcatcgccaagtttggagacttactctttgaagaggaggtggaacagtgtttcgacctatgtcaccaagtcctgcaccactgcagcagcagcatggatgtcacccggagccaagcctgtgccaccctttacctcctcatgaggttcagttttggagccaccagtaattttgcaagagtaaagatgcaagtaaccatgtccctggcatctttggtgggaagagcaccagactttaatgaagagcacctgagaagatccttgaggacaattttggcctattcagaagaggacacagccatgcagatgactccttttcccacccaggtggaggaacttctctgtaatctgaatagcatcttatatgacacagtgaaaatgagggaatttcaggaagatcctgagatgcttatggatctcatgtacagaattgccaagagttaccaggcatctcctgatctgcggctgacctggctccagaacatggcagagaaacacaccaagaagaagtgctacacggaggctgccatgtgcctggtgcacgccgctgcgttagtggctgagtatctgagcatgctggaggaccacagctacctgcccgtgggcagtgtcagcttccagaatatttcttccaatgtgctggaggagtctgtggtctctgaggacaccctgtcacctgacgaggatggggtgtgcgcaggccagtacttcaccgagagtggcctggtaggcctcctggagcaggccgcggagctcttcagcacgggaggcttatatgagacagttaatgaggtctacaagctggtcatccccatcctagaagcgcatcgagaattccggaagctgacactcactcacagcaagctgcagagagccttcgacagcatcgttaacaaggatcataagagaatgtttggaacctacttccgagttggtttctttggatccaaatttggggatttggatgaacaggagtttgtctacaaagagcctgcaattaccaagcttcctgagatctcacatagactagaggcattttatggtcaatgttttggtgcagaatttgtggaagtgattaaagactccactcctgtggacaaaaccaagttggatcctaacaaggcctacatacagatcacttttgtggagccctactttgatgagtatgagatgaaagacagggtcacatactttgagaagaatttcaacctccggaggttcatgtacaccaccccgttcaccctggaggggcggcctcggggagagctgcatgagcagtacagaaggaacacagtcctgaccactatgcacgccttcccctacatcaagaccaggatcagcgtcatccagaaggaggagtttgttttgacaccgattgaagttgccattgaagacatgaagaagaagaccctgcagttagcagttgccattaaccaggagccgcctgatgcaaagatgcttcagatggtgctgcaaggctctgtgggagctactgtaaatcagggaccactggaagtagcccaagtgtttttggctgaaattcctgctgatccaaaactctatcgacatcacaacaagttgaggttatgctttaaggaattcatcatgagatgtggtgaagctgtagagaaaaacaagcgtctcatcacggcagaccagagggaatatcagcaggaactcaaaaagaactataacaagctaaaagagaacctcaggccaatgatcgagcggaaaattccagaactgtacaagccaatattcagagttgagagtcaaaagagggactccttccacagatctagtttcaggaaatgtgaaacccagttgtcacagggcagctaagaaaagccatcttcattcgtggagactgtggccctgcaaccctggagaaggacttgctggtacttaaaaaatgggacatttgccacccaggactgactgtacactccctgatcagccagcactctggaagctttgggatcccaggaaccatggaattattcccaaatggactctgaccagatttttgccatactggggggtggcgggatggaggatgggtactcaggcatgactgcgtatttattaaagtgtgtttttccacaatgtaccaaacaaggcataagcagcttctcctgctgactggccaatcactgcccatctgagagatgatttcctctggcccatatttgaatttattggagtaactcaaattgcctgaggaaaaatggaaaaattatccaccagtcgattcaaactgaatttcactctttataggaaggcagggcaaacttgtaggagtacgaaacattttcaataaatctacaaagggaagccttactacaattccaaaaatcatcatggttggaaatttgggaggagattatttgtgaacttgttacccttttggtaatggtggactaattgctgtatagttatttttgttttattattactgttacattaatttaacatgcatttatagaagaatacattcaaagcactgatgtaggagatacacggtacttggagcagtcagccagaaatcacagatactgctttcacttaaatggaaacaattctccgataatgctttgctttttttcttatgtcactcttgtgtactatctatttttctcctctctgggaccaagtttctttttataaagcaataatatctctgttttcatttcagaacattgtgctgtctgtcagcatatgtatatcagctacaaaatatattcaactttgacttcttttgacaaaggactttaggaaaaagaggaacaaagacattatttgagaattaaattatatatttttaatatgactgtgaccttgactgataataaagatgtaataagaattgcaagctaaatgtt

SEQ ID NO: 263264 - DNA, 7448 bp, Artificial Sequence
  derived and/or modified sequence
gacagacgaggtttgcgcttggctgggcatgttccgcggctactctgcggcgcgccaggcccccgctttccgcaccccgcgaccctagaagccaccgaaccgccggcgggccatggccactctgccgagcgcagagcgccgcgcgttcgcgctcaagatcaacaggtattcttcagcggaaataaggaaacagtttactctcccaccaaaccttggccagtaccatcgacagagcataagtacctctggcttcccctctcttcaactacctcagttttatgaccctgtggagccagtggactttgaaggacttctgatgacacacctgaacagcctggatgtgcagcttgcccaggagctcggggacttcactgatgacgacttggacgtggtgttcacgccaaaggaatgtaggactttgcagccctctttgccggaggaaggggttgaactggaccctcatgtcagggactgtgttcagacctacatccgtgagtggctaatcgtgaaccggaaaaaccaaggaagtccagaaatctgtggctttaaaaagactggatctcgaaaagattttcacaagacgcttccgaaacagacgtttgagtcggaaaccttggagtgcagtgaacccgctgctcaggcaggcccccgccacttaaacgtgctgtgcgacgtgtctgggaaaggccccgtcactgcctgtgactttgacctccgcagcctgcagcctgacaagcggctagaaaacctcctgcagcaagtgagtgccgaggactttgagaagcagaacgaggaggcccggaggaccaataggcaggccgagctctttgccctttacccatcagtggacgaggaggatgctgtggaaatacgtccagtaccagaatgtcccaaggaacacctgggcaacagaatattggtcaagttgctgaccttgaagttcgagattgaaattgagcccctgtttgccagcattgccctctacgatgttaaagaaaggaaaaagatctcagaaaattttcactgtgacctgaactctgaccagttcaaaggatttctgcgagctcacacgccttcagtggccgcatcaagtcaggcgagatctgcagtcttctcagtcacctacccgtcctcagacatctacctggtagtcaagattgaaaaagtcctgcagcagggagagattggagactgtgcagagccctacacggttatcaaagaaagtgatggtggaaagagtaaagaaaagattgaaaaactaaaactccaagctgaatccttctgccagcgtttggggaaataccggatgccctttgcctgggcacccataagcttatcaagcttcttcaatgtctccacccttgagagggaggtaactgatgtggactctgtggttgggagaagctcagtgggtgaacggaggacattggcccaatctagaaggctttctgaaagagccctctccttggaggaaaatggggttggatccaacttcaaaacctccactctgagcgttagcagctttttcaagcaggaaggagatcgccttagcgatgaagacttattcaagtttttagctgactacaaaagatcatcatccttacagagacgagtcaagtcaattccaggcttgctaagactggagatttctacagctccagagatcatcaattgctgtctgactcctgaaatgctgcccgtgaaaccctttcctgaaaaccggacacgcccgcacaaagagattttggaatttccaacacgagaagtatatgtccctcacactgtgtacagaaaccttctctatgtctacccacagaggctgaactttgtaaacaaactagcatcagcccggaacattacaataaagatccagtttatgtgtggagaagatgctagcaatgcgatgccggtcatctttggaaaatccagcgggcctgaatttctgcaggaagtgtacacagctgttacataccataataagtctcctgacttttatgaagaagtgaaaattaagctccccgctaagctcacagtaaatcaccacctcctgttcaccttctaccatatcagctgtcagcagaagcaaggagcctccgtggaaactctcctgggatattcatggctgccaattctcttaaatgaacgtcttcaaactggatcctactgtctcccagttgccttggaaaaattgccacccaactactccatgcattctgctgagaaagtcccattacagaatcctcccattaagtgggctgaaggacataagggagtatttaatattgaagtgcaagctgtttcttctgtacacacccaggacaaccacctggagaagttcttcaccctctgccactccctggagagccaggtgaccttccccatccgcgtgctggatcagaaaatcagcgagatggcgctggagcatgagctgaagctcagcatcatctgcctgaactcctcccgcctggagccgctcgtgctcttcctgcacctggtgctggacaagctcttccagctgtccgtgcagcccatggtcatcgctggccagacagccaacttctcccagtttgccttcgagtccgtggtggccatcgccaacagtctgcacaacagcaaggacctgagcaaggaccagcatgggaggaactgcctgctggcttcctacgtgcactacgtcttccgcctgccagaggtgcaaagggatgtgcccaagtcaggcgctcccactgccctcctagaccctcggagctaccacacgtatggccgcacatcagctgctgctgtgagttcaaagctgctgcaggcccgggtgatgagcagcagtaacccagacctcgcggggacacactccgcagcagacgaggaagtgaagaacatcatgtcttcaaagatcgccgatcgcaactgcagccgaatgtcttactattgctctggcagtagtgatgctccaagttcacctgcagccccaaggccagccagcaaaaagcatttccatgaggagcttgcccttcagatggtggtcagcaccggaatggtgagagaaacagtcttcaagtatgcctggttcttctttgagcttctggtgaaaagcatggcccagcacgtacataacatggacaaacgggacagttttcggaggactcgtttttctgaccgtttcatggatgacataactactattgttaatgtggtcacctcggaaattgcagcccttttagtaaaaccacagaaggaaaatgaacaggcggaaaagatgaacatcagcctggctttcttcttgtatgaccttctctccctcatggatcggggctttgtgtttaacctcatcagacattattgcagccagctgtcagccaagctcagtaaccttccaacgctcatttccatgaggctagagttcctgagaatcctctgtagccatgagcattacctcaatctgaaccttttttttatgaatgctgatactgctccaacatctccttgtccttccatatcttcccagaactcaagctcctgctccagcttccaggaccagaagatcgccagcatgttcgatctgacttccgagtaccgccagcagcacttcctcaccgggctcctcttcacagaactggctgctgccctggatgccgaaggggaaggaatcagcaaagtacaaaggaaagctgtcagtgcaattcacagcctgctaagttctcacgacctggacccacgctgtgtcaaaccagaggtgaaggtcaaaatcgccgccctttacctacctttagttggcatcattttggatgctttgccacagctctgtgactttacagttgcagatactcgcagataccgcaccagtggctcggatgaagaacaagaaggagccggtgccattaaccagaatgtggctctggccatagcagggaataatttcaatttgaaaacaagtggaatagtgctgtcttccttgccctataagcagtacaacatgctgaacgcggacactactcgcaacctcatgatctgcttcctctggatcatgaaaaatgctgatcagagcctcattaggaagtggattgctgacctgccatcaacgcagctcaacaggattttagatctacttttcatctgtgtgttatgttttgagtataagggaaaacagagttctgacaaagtcagtacccaagtcctgcagaagtcaagggatgtcaaggcccggctggaagaggctttgctccgtggggaaggggccagaggggagatgatgcgccgccgggctccagggaacgaccgatttccaggcctaaatgaaaatttgagatggaagaaagagcagacacattggcggcaagctaatgagaagctagataaaacaaaggccgagttagatcaagaagccttgatcagtggcaatctggctacagaagcacatttaatcatcctggatatgcaggaaaacattatccaggcgagctcggctctggactgtaaagacagcctgctgggaggtgttctgagggtgctggtgaattctctgaactgtgatcagagtaccacctacctgactcactgctttgcaacactccgtgctctcatcgccaagtttggagacttactctttgaagaggaggtggaacagtgtttcgacctatgtcaccaagtcctgcaccactgcagcagcagcatggatgtcacccggagccaagcctgtgccaccctttacctcctcatgaggttcagttttggagccaccagtaattttgcaagagtaaagatgcaagtaaccatgtccctggcatctttggtgggaagagcaccagactttaatgaagagcacctgagaagatccttgaggacaattttggcctattcagaagaggacacagccatgcagatgactccttttcccacccaggtggaggaacttctctgtaatctgaatagcatcttatatgacacagtgaaaatgagggaatttcaggaagatcctgagatgcttatggatctcatgtacagaattgccaagagttaccaggcatctcctgatctgcggctgacctggctccagaacatggcagagaaacacaccaagaagaagtgctacacggaggctgccatgtgcctggtgcacgccgctgcgttagtggctgagtatctgagcatgctggaggaccacagctacctgcccgtgggcagtgtcagcttccagaatatttcttccaatgtgctggaggagtctgtggtctctgaggacaccctgtcacctgacgaggatggggtgtgcgcaggccagtacttcaccgagagtggcctggtaggcctcctggagcaggccgcggagctcttcagcacgggaggcttatatgagacagttaatgaggtctacaagctggtcatccccatcctagaagcgcatcgagaattccggaagctgacactcactcacagcaagctgcagagagccttcgacagcatcgttaacaaggatcataagagaatgtttggaacctacttccgagttggtttctttggatccaaatttggggatttggatgaacaggagtttgtctacaaagagcctgcaattaccaagcttcctgagatctcacatagactagaggcattttatggtcaatgttttggtgcagaatttgtggaagtgattaaagactccactcctgtggacaaaaccaagttggatcctaacaaggcctacatacagatcacttttgtggagccctactttgatgagtatgagatgaaagacagggtcacatactttgagaagaatttcaacctccggaggttcatgtacaccaccccgttcaccctggaggggcggcctcggggagagctgcatgagcagtacagaaggaacacagtcctgaccactatgcacgccttcccctacatcaagaccaggatcagcgtcatccagaaggaggagtttgttttgacaccgattgaagttgccattgaagacatgaagaagaagaccctgcagttagcagttgccattaaccaggagccgcctgatgcaaagatgcttcagatggtgctgcaaggctctgtgggagctactgtaaatcagggaccactggaagtagcccaagtgtttttggctgaaattcctgctgatccaaaactctatcgacatcacaacaagttgaggttatgctttaaggaattcatcatgagatgtggtgaagctgtagagaaaaacaagcgtctcatcacggcagaccagagggaatatcagcaggaactcaaaaagaactataacaagctaaaagagaacctcaggccaatgatcgagcggaaaattccagaactgtacaagccaatattcagagttgagagtcaaaagagggactccttccacagatctagtttcaggaaatgtgaaacccagttgtcacagggcagctaagaaaagccatcttcattcgtggagactgtggccctgcaaccctggagaaggacttgctggtacttaaaaaatgggacatttgccacccaggactgactgtacactccctgatcagccagcactctggaagctttgggatcccaggaaccatggaattattcccaaatggactctgaccagatttttgccatactggggggtggcgggatggaggatgggtactcaggcatgactgcgtatttattaaagtgtgtttttccacaatgtaccaaacaaggcataagcagcttctcctgctgactggccaatcactgcccatctgagagatgatttcctctggcccatatttgaatttattggagtaactcaaattgcctgaggaaaaatggaaaaattatccaccagtcgattcaaactgaatttcactctttataggaaggcagggcaaacttgtaggagtacgaaacattttcaataaatctacaaagggaagccttactacaattccaaaaatcatcatggttggaaatttgggaggagattatttgtgaacttgttacccttttggtaatggtggactaattgctgtatagttatttttgttttattattactgttacattaatttaacatgcatttatagaagaatacattcaaagcactgatgtaggagatacacggtacttggagcagtcagccagaaatcacagatactgctttcacttaaatggaaacaattctccgataatgctttgctttttttcttatgtcactcttgtgtactatctatttttctcctctctgggaccaagtttctttttataaagcaataatatctctgttttcatttcagaacattgtgctgtctgtcagcatatgtatatcagctacaaaatatattcaactttgacttcttttgacaaaggactttaggaaaaagaggaacaaagacattatttgagaattaaattatatatttttaatatgactgtgaccttgactgataataaagatgtaataagaattgcaagctaaa

SEQ ID NO: 263265 - protein, 295 aa, Artificial Sequence
  derived and/or modified sequence
MPSPRRSMEGRPLGVSASSSSSSPGSPAHGGGGGGSRFEFQSLLSSRATAVDPTCARLRASESPVHRRGSFPLAAAGPSQSPAPPLPEEDRMDLNPSFLGIALRSLLAIDLWLSKKLGVCAGESSSWGSVRPLMKLLEISGHGIPWLLGTLYCLCRSDSWAGREVLMNLLFALLLDLLLVALIKGLVRRRRPAHNQMDMFVTLSVDKYSFPSGHATRAALMSRFILNHLVLAIPLRVLVVLWAFVLGLSRVMLGRHNVTDVAFGFFLGYMQYSIVDYCWLSPHNAPVLFLLWSQR

SEQ ID NO: 263266 - protein, 204 aa, Artificial Sequence [sequence omitted]

SEQ ID NO: 263267 - DNA, 888 bp, Artificial Sequence
  derived and/or modified sequence
atgccttctcctcgtcggtcaatggaggggcgaccccttggcgtaagtgcatccagcagcagcagctcgcctggatctcctgctcatggggggggtggtggcggaagccgttttgagtttcagtctcttctgagcagtcgagctacagcagtggacccaacatgtgctaggcttagagcctccgaatcacccgtacatcgccggggtagcttcccacttgccgctgccggaccctcccagagtcccgcaccgccactgccggaagaagaccgcatggacttaaacccttcatttctggggatagctctccgcagtctcctggccatcgatctgtggctgtcgaagaaattgggagtctgtgccggtgaatcaagttcatggggttcagtgcggcccttgatgaaactgctggagatctcaggccacggcataccatggttactgggcacactctactgcctctgccgcagtgatagctgggccggtcgcgaagtgcttatgaacctgctctttgccctcttgttggacctgcttctcgtggcattaatcaagggactggtgcggcgacggagacccgcacacaaccagatggacatgttcgttacactgtcagtggacaagtacagcttccccagcgggcatgcgacccgcgctgctttaatgagtagattcatcctgaaccacctcgtcttggccataccattgagggtgttggtggttctctgggcctttgtgctgggtctctcaagagttatgctgggccgccataacgtgacagacgttgcctttggattttttcttggatacatgcagtattccatcgtggactattgctggttgtccccccacaatgcccctgtgctctttctgctctggtctcagagatag

SEQ ID NO: 263268 - DNA, 615 bp, Artificial Sequence
  derived and/or modified sequence
atggaccttaacccctctttcctgggcatcgctctgcgcagcctgctcgcaattgatctttggctcagtaagaaacttggggtgtgtgccggtgaatcatcttcctggggaagtgtgcgccccctgatgaaactactcgagatttccgggcacggcatcccttggctgctgggaacactttactgcttgtgtcggtccgattcttgggccgggcgggaggtcttaatgaacctcctgttcgcccttctgctggacttgctgttggtggcactcatcaaaggtctggtcagacgcagacggcctgcacataaccaaatggacatgttcgtgacattgtcggtggataaatacagttttccatcgggccacgcaaccagggccgccctcatgtccagatttatactgaatcatctagtcttggccatccccctgagagtgcttgtagtcctatgggcgtttgttctgggattatcgagggtgatgcttggacggcacaacgtcaccgatgtggccttcggatttttcctgggatatatgcagtactccatagtcgattattgctggttgagcccgcacaacgctcccgtgctcttcctgctgtggtctcaacgttag

SEQ ID NO: 263269 - DNA, 888 bp, Artificial Sequence
  derived and/or modified sequence
atgcccagccccaggaggtccatggagggccggcccctgggcgtgtctgccagcagcagcagcagcagccctggcagccctgcccatggaggcggcggcggcggcagcagatttgagttccagagcctgctgagcagccgggccacagctgtggaccccacctgtgcccggctgcgggccagcgagagccctgtgcacagaagaggcagcttccccctggccgccgccggccccagccagagccctgccccacccctgcctgaggaggacaggatggacctgaaccccagcttcctgggcatcgccctgcggagcctgctggccatcgacctgtggctgagcaagaagctgggcgtgtgtgccggggagagcagctcctggggctctgtgcggcccctgatgaagctgctggagatcagcggccacggcatcccctggctgctgggcaccctgtactgcctgtgccgcagtgacagctgggccggccgggaggtgctgatgaacctgctgtttgccctgctgctggacctgctgctggtggccctgatcaagggcctggtgagaagaagaagacctgcccacaaccagatggacatgtttgtgaccctgtctgtggacaagtacagcttccccagcggccacgccacccgggccgccctgatgagccgcttcatcctgaaccacctggtgctggccatccccctgcgggtgctggtggtgctgtgggcctttgtgctgggcctgagccgggtgatgctgggccgccacaacgtgacagatgtggccttcggcttcttcctgggctacatgcagtacagcatcgtggactactgctggctgagcccccacaatgcccctgtgctcttcctgctgtggagccagaggtag

SEQ ID NO: 263270 - DNA, 615 bp, Artificial Sequence
  derived and/or modified sequence
atggacctgaaccccagcttcctgggcatcgccctgcggagcctgctggccatcgacctgtggctgagcaagaagctgggcgtgtgtgccggggagagcagctcctggggctctgtgcggcccctgatgaagctgctggagatcagcggccacggcatcccctggctgctgggcaccctgtactgcctgtgccgcagtgacagctgggccggccgggaggtgctgatgaacctgctgtttgccctgctgctggacctgctgctggtggccctgatcaagggcctggtgagaagaagaagacctgcccacaaccagatggacatgtttgtgaccctgtctgtggacaagtacagcttccccagcggccacgccaccagggctgccctgatgagccgcttcatcctgaaccacctggtgctggccatccccctgcgggtgctggtggtgctgtgggcctttgtgctgggcctgagccgggtgatgctgggccgccacaacgtgacagatgtggccttcggcttcttcctgggctacatgcagtacagcatcgtggactactgctggctgagcccccacaatgcccctgtgctcttcctgctgtggagccagaggtag

SEQ ID NO: 263271 - DNA, 888 bp, Artificial Sequence
  derived and/or modified sequence
atgcccagcccccggcggagcatggagggccggcccctgggcgtgagcgcatcatcttcttcttcgtccccaggatcccctgctcatgggggtggcggagggggctctcggttcgaattccagagcctcctgtcaagtagggccacagccgtggacccaacgtgcgcgcgcctccgggcctcagaatcccctgttcacaggcgcggttcttttccactggcagctgcagggccctcccaatctcctgcccctccgcttcctgaggaagatcgaatggacctgaatccctcgttccttggtatcgctcttcggtcccttctggcgattgatctgtggttatctaaaaaattgggggtctgcgccggggagtctagttcgtggggttccgttcgccccctcatgaaattattagagattagtggtcacgggattccatggttgcttggcacattgtactgcctgtgccgtagtgatagctgggcaggaagagaagtcctgatgaatttactgttcgcgctgctcttagatctgttgctggtggccctcattaagggactggtgcggcggcggcggccagcccataaccagatggatatgttcgtgaccctgtcagtggacaagtacagctttccaagtggtcatgcgacacgggcagcactcatgagtaggttcatcttaaatcatctggtgctcgcaatccctctgcgcgtattggttgtattgtgggctttcgtactggggctgtccagagttatgttaggccgtcacaatgttacggatgtggcttttgggttcttcctgggttatatgcagtattcaatcgttgattactgctggcttagtccccacaacgccccagttctctttctcctgtggagccaaaggtag

SEQ ID NO: 263272 - DNA, 615 bp, Artificial Sequence
  derived and/or modified sequence
atggacctgaaccccagcttcctgggcatcgccctgcggagcctgctagctatcgatctgtggctgtctaagaaactgggagtgtgcgccggcgagtcctcatcatggggttcggtgcggccacttatgaaactgctggagatttcaggacacggtataccatggctgctgggaaccctctattgcctgtgtagatcggatagctgggcaggcagggaggtgctcatgaacttgttgtttgccctgctgctggacctccttctggtagcattaattaagggcctcgtacgccgccggcgacctgcccacaaccagatggatatgtttgtgaccctcagtgttgacaaatactcctttccaagcgggcacgccacgagagcagccttaatgtccaggttcatcctgaaccacctggtgctcgccattccactgagggtgctggtcgttctgtgggcctttgtccttggtctgtcccgggttatgctgggacgacacaacgtcacagacgtggcattcggctttttcctaggttacatgcaatactccatcgtcgactactgctggctttctccccacaatgcacccgttctgttcctgctctggagccagcggtag

SEQ ID NO: 263273 - DNA, 2959 bp, Artificial Sequence
  derived and/or modified sequence
cggaagcggaagaggctgcagggccgggaagcctctgtttggtccggccaggtcccgggatccgggccgccagctgcgatgccaagtccccggaggagcatggagggacggccgctgggcgtctccgcttcgagcagcagcagcagccccggcagcccagcccatggcggcggtggcggcggcagcaggtttgagttccagtccctgctcagcagccgcgccacggccgtggaccccacctgcgcccggctccgtgcatcggagagcccagttcaccgccgcggctccttccccctggccgcggcgggcccctcgcagtcgcccgcgcctccgctgcccgaggaggaccgcatggacttgaacccgtccttcctgggcatcgccctgcgctccctgctggccatcgacctgtggctgtccaagaagctgggggtgtgcgcgggagagagctcgtcgtggggcagcgtgcgaccccttatgaagctgctggagatctcgggacacggcatcccctggctgctgggcaccctctactgcctgtgcaggagcgacagctgggccgggcgcgaggtgctgatgaacctgctcttcgccctgctgttggacctgctgctggtggccttgatcaaagggctggtccgcaggcgccgcccggcccacaaccagatggacatgtttgtcactctctcggtggacaagtactccttcccctcgggccatgccacaagggccgccctgatgtcgaggttcatcctgaaccacctggtgctggccattccactgagggtgctggtggttctgtgggccttcgtcttgggcctatccagggtcatgctggggcggcacaatgtcaccgacgtagcttttggcttttttctgggctacatgcagtacagcatcgtggactattgctggctctcaccccataatgctccggtcctctttttactgtggagtcaacgatgacaccatctcattgattatggcaccaggaagtctgaaggtttccacattcgatgatgtcaacctaaaccagcagccatcccgcttgtccctcttaggcatttcaggcttcctttgggatttcaggtgtcccatgatcttgatgtgctgctaggctggagcacacactggccattactgaacacagccatattagggaaagcaaaaaaacccaaaaaatcctctattgtatatttattcaacaactgtttatgtttccaggacaactgcaaagaaaacaagctgaggtggttatactgttgctgttaaaagttggtatcagtaagatttgtgttttgtgataatccctaaatcaacataccacttgtaaactgaacttcgagaaagaaacatgatgttcattctgtaaatatacatgcagacaggtcatgtactaatcctagtccttttcctgaggtagattttaaacagtatttttaaagtccaagacataggtttttctagtttattccctgaagatctgttgccacagttgggagatttcttcttaatcctgattttcttggtaagcttttttactttattatctctataatttattatctctatccatatttgtggatcgggtagtgggaaaagagattataatacttgtctttctctcctctccctccatccctcaaaagatctttatgcatttcccactactcccttactgtcttttagcattcagagaaaaagccaacttgcttaaagaggaatcacttaaaaggtaggcatatctaagatgctcatagaagaggaagaatgggacatggccccatgcttatttttgtttacaacgtaacatggcatgagagagggcagagaaactaagttgctggggaaagttagaggaactgaaagtttgggaataggctgaccacatattatgccagtgaccagtatgacaggagatggggccctgctgccagtcatctccactgaataaagaataatgctcctctttcagggtaataaagtggggaaaaggaacgtcttctcaatgcaagaacataagctttctcgtatatacctgtatgctacagtttttcacatggaattccgttttctgaggtacagcacattttaggtaacagtatttaacttgaaattcatcatgggagtctgctgctataccaggcacaagataaaactccaaaatttctgtttacattgacctttacatttaaagctgttcatccatggtgcctccccaaatcataagaccaaagaccaccaaacgcagggtggactctgctcattattctttgacccagaaagactggagaaggtatgtgctttaagtgctgctctacctgaaaagaaatcctttaaattacctatggaagtgatgtcctcagataatcttaatgactattttggcatttataaatagaaatgattatggactttgatctgccatacggaggttcggaacctggagaacggctgtgataagtaggttttgattgagtgaaagcatgagcttgttcagagtgaggggcatagtgaaaaaggaacagccatgcctcaaaatcaaatcatttgcattcccacagcatcctgaataccgactacctcttcacttgctaaagcagctaaactgtgaagctctaagtggtttgggtttgttgtttaaccttagcgagatcctttaactgcagcaatattcaagccagatatttggaagcaaatgatatttcctcttgcagtgtccacaaatctgaatattaggggcatgaaattaggcttaccatctgatttgtaattacaattttggaattctctgttttagttgctgaggcctgagttttctggctcttaaagcatagatcatttcacctgatgtttttgaagcatcctaagtacagtagagtagaaaactgatttctttgttaattgtacactgaataatgccttttaaaaatcaaaataaaattaacaaataatggtg

SEQ ID NO: 263274 - DNA, 1082 bp, Artificial Sequence
  derived and/or modified sequence
agcggaagaggctgcagggccgggaagcctctgtttggtccggccaggtcccgggatccgggccgccagctgcgatgccaagtccccgcttcgagcagcagcagcagccccggcagcccagcccatggcggcggtggcggcggcagcaggtttgagttccagtccctgctcagcagccgcgccacggccgtggaccccacctgcgcccggctccgtgcatcggagagcccagttcaccgccgcggctccttccccctggccgcggcgggcccctcgcagtcgcccgcgcctccgctgcccgaggaggaccgcatggacttgaacccgtccttcctgggcatcgccctgcgctccctgctggccatcgacctgtggctgtccaagaagctgggggtgtgcgcgggagagagctcgtcgtggggcagcgtgcgaccccttatgaagctgctggagatctcgggacacggcatcccctggctgctgggcaccctctactgcctgtgcaggagcgacagctgggccgggcgcgaggtgctgatgaacctgctcttcgccctgctgttggacctgctgctggtggccttgatcaaagggctggtccgcaggcgccgcccggcccacaaccagatggacatgtttgtcactctctcggtggacaagtactccttcccctcgggccatgccacaagggccgccctgatgtcgaggttcatcctgaaccacctggtgctggccattccactgagggtgctggtggttctgtgggccttcgtcttgggcctatccagggtcatgctggggcggcacaatgtcaccgacgtagcttttggcttttttctgggctacatgcagtacagcatcgtggactattgctggctctcaccccataatgctccggtcctctttttactgtggagtcaacgatgacaccatctcattgattatggcaccaggaagtctgaaggtttccacattcgatgatgtcaacctaaaccagcagccatcccgcttgtccctcttaggcatttcaggcttcctttgggatttcaggtgtcccatgatcttgatgtgctgctaggctg

SEQ ID NO: 263275 - DNA, 888 bp, Artificial Sequence
  derived and/or modified sequence
atgcctagccccaggcgaagcatggaaggacgccctctcggggtttccgcgtccagctcaagtagctcccccggaagtcccgcacatggcggaggcggagggggatcaaggtttgaattccaatccctcttatcaagccgggcaacagccgtagatcccacatgtgcccgattgagggctagtgagagtcctgtccaccggaggggcagttttccgctcgccgctgctgggcctagtcaatcccctgcaccaccactcccagaagaagaccgtatggatctgaacccatctttcctcggcatagctttgagaagtctcctggctatcgacctgtggcttagcaagaaactgggggtttgcgccggagaatcttcatcttggggcagcgtgaggccactgatgaaactcctcgagatatccgggcacggcattccatggctgcttggcacattgtactgcctgtgccgttccgattcatgggccggtcgcgaagtcttgatgaatttgctcttcgcactgctgcttgatctgcttctagtcgccctgatcaaaggacttgtgcgcagaagacgaccggctcacaaccagatggacatgttcgtaactctgagtgtggacaagtattcattcccgtccggccacgccactcgggcagcactgatgagcagatttatcctaaatcacctggtattggctatacctctgagagtgcttgtggttctatgggctttcgtgctcggcctaagtagggtaatgttgggacgacacaacgtgactgatgtggcgtttgggttcttcctggggtatatgcagtactctatcgtcgactattgctggctgtctccgcataacgccccagtgctgttcttactgtggtctcagaggtag

SEQ ID NO: 263276 - DNA, 615 bp, Artificial Sequence
  derived and/or modified sequence
atggaccttaatcccagtttccttggtatcgcgcttcgaagccttctggcaattgacctgtggctgtcaaagaaattgggggtttgcgcaggcgagtctagctcttggggtagtgtccgtcccctgatgaagctgttggagatttctggacacgggataccgtggttactgggaacgctgtactgcctgtgccgctccgattcctgggccggaagggaagtgctcatgaacctgctgtttgcgctgctattggatctcttgctcgtcgcccttatcaaaggcctcgtgcgaaggcgcagaccagcccacaatcaaatggacatgttcgtgacgctgtcagtggacaaatattccttcccctccggccatgcaactcgcgcagctctcatgtctcgcttcattctaaatcatttggtgctcgctatcccgttaagggttttagtagtgctgtgggctttcgtcttgggcctctccagggtgatgctcggcagacacaacgttactgatgttgccttcggtttttttctgggctacatgcagtatagcatcgtggactactgctggttgagccctcacaatgcccctgtcttattcctcctatggtctcagagatag

SEQ ID NO: 263277 - DNA, 888 bp, Artificial Sequence
  derived and/or modified sequence
atgcccagccccagaagaagcatggagggcagacccctgggcgtgagcgccagcagcagcagcagcagccccggcagccccgcccacggcggcggcggcggcggcagcagattcgagttccagagcctgctgagcagcagagccaccgccgtggaccccacctgcgccagactgagagccagcgagagccccgtgcacagaagaggcagcttccccctggccgccgccggccccagccagagccccgccccccccctgcccgaggaggacagaatggacctgaaccccagcttcctgggcatcgccctgagaagcctgctggccatcgacctgtggctgagcaagaagctgggcgtgtgcgccggcgagagcagcagctggggcagcgtgagacccctgatgaagctgctggagatcagcggccacggcatcccctggctgctgggcaccctgtactgcctgtgcagaagcgacagctgggccggcagagaggtgctgatgaacctgctgttcgccctgctgctggacctgctgctggtggccctgatcaagggcctggtgagaagaagaagacccgcccacaaccagatggacatgttcgtgaccctgagcgtggacaagtacagcttccccagcggccacgccaccagagccgccctgatgagcagattcatcctgaaccacctggtgctggccatccccctgagagtgctggtggtgctgtgggccttcgtgctgggcctgagcagagtgatgctgggcagacacaacgtgaccgacgtggccttcggcttcttcctgggctacatgcagtacagcatcgtggactactgctggctgagcccccacaacgcccccgtgctgttcctgctgtggagccagagatag

SEQ ID NO: 263278 - DNA, 615 bp, Artificial Sequence
  derived and/or modified sequence
atggacctgaaccccagcttcctgggcatcgccctgagaagcctgctggccatcgacctgtggctgagcaagaagctgggcgtgtgcgccggcgagagcagcagctggggcagcgtgagacccctgatgaagctgctggagatcagcggccacggcatcccctggctgctgggcaccctgtactgcctgtgcagaagcgacagctgggccggcagagaggtgctgatgaacctgctgttcgccctgctgctggacctgctgctggtggccctgatcaagggcctggtgagaagaagaagacccgcccacaaccagatggacatgttcgtgaccctgagcgtggacaagtacagcttccccagcggccacgccaccagagccgccctgatgagcagattcatcctgaaccacctggtgctggccatccccctgagagtgctggtggtgctgtgggccttcgtgctgggcctgagcagagtgatgctgggcagacacaacgtgaccgacgtggccttcggcttcttcctgggctacatgcagtacagcatcgtggactactgctggctgagcccccacaacgcccccgtgctgttcctgctgtggagccagagatag

SEQ ID NO: 263279 - protein, 1478 aa, Artificial Sequence
  derived and/or modified sequence
MGDAADPREMRKTFIVPAIKPFDHYDFSRAKIACNLAWLVAKAFGTENVPEELQEPFYTDQYDQEHIKPPVVNLLLSAELYCRAGSLILKSDAAKPLLGHDAVIQALAQKGLYVTDQEKLVTERDLHKKPIQMSAHLAMIDTLMMAYTVEMVSIEKVIACAQQYSAFFQATDLPYDIEDAVMYWINKVNEHLKDIMEQEQKLKEHHTVEAPGGQKARYRKEQTLLKQLPCIPLVENLLKDGTDGCALAALIHFYCPDVVRLEDICLKETMSLADSLYNLQLIQEFCQEYLNQCCHFTLEDMLYAASSIKSNYLVFMAELFWWFEVVKPSFVQPRVVRPQGAEPVKDMPSIPVLNAAKRNVLDSSSDFPSSGEGATFTQSHHHLPSRYSRPQAHSSASGGIRRSSSMSYVDGFIGTWPKEKRSSVHGVSFDISFDKEDSVQRSTPNRGITRSISNEGLTLNNSHVSKHIRKNLSFKPINGEEEAESIEEELNIDSHSDLKSCVPLNTNELNSNENIHYKLPNGALQNRILLDEFGNQIETPSIEEALQIIHDTEKSPHTPQPDQIANGFFLHSQEMSILNSNIKLNQSSPDNVTDTKGALSPITDNTEVDTGIHVPSEDIPETMDEDSSLRDYTVSLDSDMDDASKFLQDYDIRTGNTREALSPCPSTVSTKSQPGSSASSSSGVKMTSFAEQKFRKLNHTDGKSSGSSSQKTTPEGSELNIPHVVAWAQIPEETGLPQGRDTTQLLASEMVHLRMKLEEKRRAIEAQKKKMEAAFTKQRQKMGRTAFLTVVKKKGDGISPLREEAAGAEDEKVYTDRAKEKESQKTDGQRSKSLADIKESMENPQAKWLKSPTTPIDPEKQWNLASPSEETLNEGEILEYTKSIEKLNSSLHFLQQEMQRLSLQQEMLMQMREQQSWVISPPQPSPQKQIRDFKPSKQAGLSSAIAPFSSDSPRPTHPSPQSSNRKSASFSVKSQRTPRPNELKITPLNRTLTPPRSVDSLPRLRRFSPSQVPIQTRSFVCFGDDGEPQLKESKPKEEVKKEELESKGTLEQRGHNPEEKEIKPFESTVSEVLSLPVTETVCLTPNEDQLNQPTEPPPKPVFPPTAPKNVNLIEVSLSDLKPPEKADVPVEKYDGESDKEQFDDDQKVCCGFFFKDDQKAENDMAMKRAALLEKRLRREKETQLRKQQLEAEMEHKKEETRRKTEEERQKKEDERARREFIRQEYMRRKQLKLMEDMDTVIKPRPQVVKQKKQRPKSIHRDHIESPKTPIKGPPVSSLSLASLNTGDNESVHSGKRTPRSESVEGFLSPSRCGSRNGEKDWENASTTSSVASGTEYTGPKLYKEPSAKSNKHIIQNALAHCCLAGKVNEGQKKKILEEMEKSDANNFLILFRDSGCQFRSLYTYCPETEEINKLTGIGPKSITKKMIEGLYKYNSDRKQFSHIPAKTLSASVDAITIHSHLWQTKRPVTPKKLLPTKA

SEQ ID NO: 263280 - DNA, 4437 bp, Artificial Sequence
  derived and/or modified sequence
atgggggacgcggctgatcccagggagatgcgtaaaacctttattgtgcctgcaatcaaacctttcgaccactacgatttttcaagggccaagattgcatgtaacttagcctggttagttgcaaaagcgttcgggacagagaacgtacctgaagaattgcaggagccattttacacggaccagtacgatcaggagcacattaagcctcccgttgtcaacctgctcctgagcgccgagctgtattgccgggcaggcagtctgatcctgaagtctgacgcggctaagcctctgctgggacacgatgccgtgatccaagcgctcgcgcagaaaggcctgtacgtgactgatcaggagaagctcgttaccgagcgtgatctgcataaaaagcccattcagatgtccgcccacttagcaatgatcgatactctcatgatggcctacaccgtggagatggtctcaatcgagaaggttatcgcctgtgcccagcagtattcggcatttttccaagcgaccgatctaccgtacgatattgaagacgctgtaatgtattggattaataaggtgaacgagcacctaaaggatattatggagcaggaacagaagctcaaggaacatcacaccgtggaggctcccgggggtcagaaagctagatatcggaaggaacagaccttgctcaaacagttgccgtgcataccacttgtggagaatctgcttaaagacggtaccgacgggtgcgcccttgctgccctaatccatttctactgtccggatgtggttcggttagaggatatctgtctgaaggaaacaatgtccctcgcggacagcttgtacaatctgcagttgatacaggagttttgtcaggagtatctaaatcaatgttgtcacttcacactggaggacatgctctacgcagcaagttctataaagagtaattacttggtgttcatggccgaactgttctggtggtttgaggtagtgaaaccatcttttgttcaaccccgggtagtgaggccgcagggtgctgagccagtgaaagacatgccaagtattccagtcctgaatgctgccaagcgtaatgtcctggatagcagtagtgacttcccatcgtccggcgaaggcgccactttcacccaatcccatcaccacctgccctcacgctatagccgcccccaagctcactcttctgcgagtggcggcattcggagaagctcatcaatgagctacgttgatggctttataggaacttggccgaaagagaagaggtcttccgtacacggtgtgtcatttgatatttcatttgataaggaagacagtgtgcaaaggagcacccccaatagggggatcaccagatcaatttccaacgagggactgactctgaacaactctcacgtctccaaacacatccgaaagaatctatccttcaagcccatcaatggcgaggaggaagccgaatctattgaagaagagctgaacatagatagccactccgatcttaagtcctgcgtaccactgaataccaacgagctgaacagcaacgagaacattcattataagctgccgaatggggctcttcaaaacaggatactgctcgacgagtttggtaaccaaattgagactccatcaatagaggaggccctccagatcatccatgacaccgagaaatcaccccacactccccagcctgaccaaatagcaaatggcttcttcctgcacagccaggagatgagcatacttaactccaacatcaaacttaaccaaagtagcccagacaacgtcacagatacaaagggcgcgttgtcccctatcacagataataccgaggtagacactggtatacacgtgccttcggaggatatccctgaaaccatggatgaggactctagcttgcgcgactacaccgtgtccctcgattctgatatggacgatgcttccaagttcttgcaggactacgatatccgcactggcaacactagggaggcactgtcaccttgtccttccacagtatcaaccaagtcacagccaggctcctccgcttcatctagttcaggcgtgaaaatgacctcgttcgccgaacagaaatttcgcaagctgaaccacaccgacggtaaatcatccgggtccagctcgcagaaaactaccccggaagggtctgagctgaacattccacacgtggtggcctgggcccagatccctgaagaaacaggacttccccaaggaagggatacaacacaactgctggctagcgagatggtccatctccggatgaagctcgaggaaaagcggagggctatcgaagcccagaaaaaaaaaatggaggctgcctttaccaagcaacgccagaagatgggaagaacagccttcctgacagtggtcaagaagaaaggagatggaatctctccactccgagaggaagccgcaggcgctgaggatgaaaaagtctacaccgacagggcaaaggagaaagaatcgcagaagaccgatggccagagatcaaagagccttgccgatatcaaggagtcaatggaaaacccccaagccaaatggttgaagagccctaccacaccaatcgacccagagaagcagtggaacttagcctcgccttccgaagagacactgaacgaaggcgaaattctggagtataccaagtcgatcgaaaagttaaattctagcttacactttctgcaacaggagatgcagagattgtctttgcagcaggaaatgttgatgcaaatgcgagagcagcaatcttgggttatctctccaccccaacccagtccccagaagcagataagagactttaagccgtccaaacaagccggactgagtagtgctattgcccccttttcctccgattctcctagacccacccacccttcgccccaaagcagcaaccggaagtctgcctccttctctgtaaaatcccaacgtacaccacgaccaaatgaactgaagattactccactcaacagaacccttactccacccagaagcgttgacagtcttcctcgcctgcgtcgcttcagtcccagtcaggtcccgatccaaacccgcagcttcgtttgcttcggcgatgatggggagccacaactcaaggaatcaaaaccgaaggaggaagtgaaaaaagaggagcttgaatccaagggtacgcttgaacagcgtggacataatccggaggagaaagagataaagccattcgaaagtacggtctcagaggtgctgtctttaccggtgaccgagacagtgtgtctaacccccaatgaagaccagctgaatcagccgaccgagccgccacctaagccagtttttcctccaactgcgcccaaaaatgttaatcttattgaagtgagcctgagcgatctgaagccacccgagaaagctgacgtccccgtcgagaaatatgacggggaatcggataaggagcaattcgacgacgaccaaaaagtctgctgtggcttcttcttcaaagacgaccaaaaggccgagaatgacatggccatgaagagagcagccctcctggagaagcggctccgccgtgaaaaggagactcagctgagaaagcagcagctggaagcagagatggaacataagaaagaggagactcgccgaaagaccgaggaggaaaggcagaaaaaggaggatgaaagagcaaggagagaattcataagacaggagtacatgagacggaagcaattaaagctgatggaggacatggatacagtgatcaagccaagaccccaggtggtgaagcagaaaaagcagagacctaaatccatacatagagaccatattgagtccccgaaaacacccattaagggccctcctgtgtccagcctgtcacttgcaagtctcaatactggagataacgaatcagtacactccggaaagagaacacctcgttcggagtcagtcgaaggattcctgagtcccagtcggtgtggaagtcggaacggggagaaggactgggagaatgcatcaacgacttcatctgtcgccagtggaacggagtacaccggacctaaactgtacaaggagccttctgccaaatcgaataagcacatcattcagaatgccttggctcattgctgcttggcgggaaaagttaacgagggccagaagaagaagatcttggaggaaatggaaaagtctgatgccaataatttcctgatcttatttcgcgactcgggctgccaattccggtctctatacacctactgtcccgaaaccgaggaaatcaacaagctgaccgggatcggcccaaaatccatcacaaagaaaatgatagaaggactgtacaagtataattctgatcggaagcagttttcgcacatccccgccaagaccctcagtgccagtgtggatgccatcaccatacattctcacctttggcagacaaaacggccagtaacaccaaaaaagttacttcccacaaaagcctag

SEQ ID NO: 263281 - DNA, 4437 bp, Artificial Sequence
  derived and/or modified sequence
atgggagatgctgctgacccccgggagatgaggaagaccttcatcgtgcctgccatcaagccctttgaccactatgacttcagccgggccaagatcgcctgcaacctggcctggctggtggccaaggccttcggcacagaaaatgtgcctgaggagctgcaggagcccttctacacagaccagtatgaccaggagcacatcaagccccctgtggtgaacctgctgctgtctgctgagctgtactgccgggccggcagcctcatcctgaagagtgatgctgccaagcccctgctgggccatgatgctgtgatccaggccctggcccagaagggcctgtatgtgacagaccaggagaagctggtgacagagcgggacctgcacaagaagcccatccagatgtctgcccacctggccatgattgacaccctgatgatggcctacacagtggagatggtgtccattgagaaggtgattgcctgtgcccagcagtacagcgccttcttccaggccacagacctgccctatgacattgaagatgctgtgatgtactggatcaacaaggtgaatgagcacctgaaggacatcatggagcaggagcagaagctgaaggagcaccacacagtggaggcccctgggggccagaaggcccgctacaggaaggagcagaccctgctgaagcagctgccctgcatccccctggtggagaacctgctgaaggatggaacagatggctgtgccctggccgccctgatccacttctactgcccagatgtggtgcggctggaggacatctgcctgaaggagaccatgagcctggccgacagcctgtacaacctgcagctgatccaggagttctgccaggagtacctgaaccagtgctgccacttcaccctggaggacatgctgtatgctgccagcagcatcaagagcaactacctggtgttcatggccgagctgttctggtggtttgaggtggtgaagcccagctttgtgcagccccgggtggtgcggccccagggcgctgagcctgtgaaggacatgcccagcatccctgtgctgaatgctgccaagagaaatgtgctggacagcagcagtgacttccccagcagcggggagggcgccaccttcacccagagccaccaccacctgcccagccgctacagccggccccaggcccacagcagcgccagcggcggcatcagaagaagcagctccatgtcctatgtggatggcttcatcggcacctggcccaaggagaagaggagctctgtgcatggagtgtcctttgacatcagctttgacaaggaggacagcgtgcagaggagcacccccaacagaggcatcaccaggagcatcagcaatgaaggcctgaccctgaacaacagccacgtgtccaagcacatcaggaagaacctgtccttcaagcccatcaacggggaggaggaggccgagagcattgaggaggagctgaacatcgacagccacagcgacctgaagagctgtgtgcccctgaacaccaatgagctgaacagcaatgaaaacatccactacaagctgcccaatggagccctgcagaaccgcatcctgctggatgaatttggaaaccagatcgagacccccagcattgaggaggccctgcagatcatccatgacacagagaagagcccccacaccccccagcctgaccagatcgccaacggcttcttcctgcacagccaggagatgagcatcctgaacagcaacatcaagctgaaccagagcagcccagacaacgtgacagacaccaagggggccctgagccccatcacagacaacacagaggtggacaccggcatccacgtgcccagcgaggacatccctgagaccatggatgaggacagcagcctgcgggactacacagtgtccctggacagcgacatggatgatgccagcaagttcctgcaggactatgacatcagaacaggcaacacccgggaggccctgagcccctgccccagcacagtgtccaccaagagccagcccggcagcagcgccagcagcagcagcggcgtgaagatgaccagctttgctgagcagaagttcaggaagctgaaccacacagatggcaagagcagcggcagcagcagccagaagaccaccccagagggcagcgagctgaacatcccccacgtggtggcctgggcccagatccctgaggagaccggcctgccccagggccgggacaccacccagctgctggccagcgagatggtgcacctgaggatgaagctggaggagaagagaagagccatcgaggcccagaagaagaagatggaggccgccttcaccaagcagaggcagaagatgggccgcacagccttcctgactgtggtgaagaagaagggagatggcatcagccccctgcgggaggaggccgccggggctgaagatgagaaggtgtacacagaccgggccaaggagaaggagagccagaagacagatggccagaggagcaagagcctggccgacatcaaggagagcatggagaacccccaggccaagtggctgaagagccccaccacccccatcgaccctgagaagcagtggaacctggccagccccagcgaggagaccctgaatgaaggagagatcctggagtacaccaagagcattgagaagctgaacagcagcctgcacttcctgcagcaggagatgcagaggctgagcctgcagcaggagatgctgatgcagatgagggagcagcagagctgggtgatcagccccccccagcccagcccccagaagcagatccgggacttcaagcccagcaagcaggccggcctgagcagcgccatcgcccccttcagcagtgacagcccccggcccacccaccccagcccccagagcagcaacaggaagagcgccagcttctctgtgaagagccagaggaccccccggcccaatgagctgaagatcacccccctgaacagaaccctgaccccacccaggtctgtggacagcctgccccggctgcggcgcttcagccccagccaggtgcccatccagaccaggagctttgtgtgctttggagatgatggagagccccagctgaaggagagcaagcccaaggaggaggtgaagaaggaggagctggagagcaagggcaccctggagcagaggggccacaaccctgaggagaaggagatcaagccctttgagagcacagtgtctgaggtgctgagcctgcctgtgacagagaccgtgtgcctgaccccaaatgaagaccagctgaaccagcccacagagcccccacccaagcctgtgtttcctcccacagcccccaagaatgtgaacctgattgaggtgtccctgagtgacctgaagcccccagagaaggcagatgtgcctgtggagaagtatgatggagagagtgacaaggagcagtttgatgatgaccagaaggtgtgctgcggcttcttcttcaaggatgaccagaaggcagaaaatgacatggccatgaagagagctgccctgctggagaagaggctgcggcgggagaaggagacccagctgaggaagcagcagctggaggccgagatggagcacaagaaggaggagaccaggaggaagacagaggaggagcggcagaagaaggaggatgagcgggcccggcgggagttcatccggcaggagtacatgaggaggaagcagctgaagctgatggaggacatggacaccgtcatcaagccccggccccaggtggtgaagcagaagaagcagaggcccaagagcatccaccgggaccacatcgagagccccaagacccccatcaagggcccccctgtgagcagcctgagcctggccagcctgaacacaggagacaatgaatctgtgcacagcggcaagaggacccccaggtctgagagcgtggagggcttcctgagccccagccgctgtggcagcagaaatggagagaaggactgggagaatgccagcaccaccagctctgtggccagcggcacagagtacacaggccccaagctgtacaaggagcccagcgccaagagcaacaagcacatcatccagaatgccctggcccactgctgcctggccggcaaggtgaatgaaggccagaagaagaagatcctggaggagatggagaagagtgatgccaacaacttcctgatcctcttccgggacagcggctgccagttccgcagcctgtacacctactgcccagagacagaggagatcaacaagctgactggaattggccccaagagcatcaccaagaagatgattgagggcctgtacaagtacaacagcgacaggaagcagttcagccacatcccagccaagaccctgagcgcctctgtggatgccatcaccatccacagccacctgtggcagaccaagaggcctgtgacccccaagaagctgctgcccaccaaggcctag

SEQ ID NO: 263282 - DNA, 4437 bp, Artificial Sequence
  derived and/or modified sequence
atgggcgacgccgccgacccccgggagatgcggaagaccttcatcgtcccggctataaagcccttcgaccactatgacttcagtagggccaaaatagcttgtaatcttgcatggctagtggcgaaggcctttggaaccgagaatgttcctgaagagctgcaagaaccattttacacagaccagtacgatcaagaacacatcaaaccgccggtggtgaacctgctgctctctgcggaactgtactgtcgagcaggctctctgattctgaaatccgatgcggccaagcccctgctgggacacgacgccgtgatccaggccttagcgcaaaaaggtctatacgtaactgatcaggaaaaactcgtcactgagagggacctccacaaaaaaccaatacagatgtctgcccaccttgctatgattgacacactaatgatggcttatacagttgaaatggtcagcatagagaaggtgattgcttgcgcacagcagtactctgccttcttccaggcaactgacctcccctacgatattgaggatgccgtcatgtattggataaacaaagttaacgaacacctcaaggacatcatggagcaggagcagaagctcaaggagcaccatactgtcgaagcacctgggggtcagaaagccagatatcggaaggaacaaacattgctgaagcagctgccctgcattcccctcgtggagaacctgctcaaagacggtaccgacggttgcgcacttgctgcattgatccacttctattgcccagatgtcgtgcggcttgaagacatctgcctcaaagagactatgagcctggctgattccctgtacaacctccagctgatacaggagttctgtcaggagtatctcaatcagtgctgtcactttactctggaggatatgctttatgcagcctcctcgatcaaaagcaattacctcgtgttcatggcagaactcttctggtggtttgaggtggtgaagccgtccttcgtgcagccacgagtcgttagaccgcagggggctgaaccggttaaggatatgcccagtatccccgttttgaatgcagcaaagagaaatgtgcttgactccagctccgattttccatcatctggtgagggcgctacatttacccagtctcaccaccacttaccgagtcgttactcacgcccccaagcccattcttctgcatccggtgggataagaagatcgtcgtccatgtcatatgttgacggctttatcggtacttggcctaaggaaaagagaagctcggtccacggcgtcagtttcgacatcagcttcgacaaggaggacagtgtgcagcgctccacaccaaatagaggtattactcgttctatcagcaatgagggcctcaccttgaacaatagccacgtgtcaaaacacatacgaaagaacttaagtttcaaacccatcaatggggaggaggaggctgagtctatagaggaagaactgaacatcgattcccatagcgacctgaagtcctgcgtgccactcaacactaatgaactgaattccaacgagaatatccactataagctgccaaacggtgcactgcaaaacaggatcttgttggatgagtttggcaaccagattgaaaccccgagtatagaagaagcactgcagataatccacgatactgaaaagtcacctcacacacctcaaccggaccaaatcgccaacggcttttttctgcactcacaagagatgtctatcctcaattctaatattaaactaaatcaatcttccccagacaacgtcactgatacaaagggagccctcagccccatcacagataacaccgaagtggacaccggcatacacgttccttccgaggatatccctgagacgatggacgaagactcctctctccgcgattacaccgtgtcacttgattccgatatggacgatgctagcaaattcctgcaggattacgacatcagaacaggaaacacacgcgaagcgctatctccgtgcccgagcacagtgtccactaaatcgcagcccggctccagcgcctcgagctcttctggggttaagatgacctcttttgcagaacagaaatttagaaaactcaaccacacggatggaaaatcctcagggagtagttcccagaaaactactccagaaggttcagaactcaacatcccacacgtggtcgcatgggcccagatccctgaggagaccggcctgccacaggggagagatactactcagctgctggcctcagaaatggtccatctcagaatgaaactggaagagaagcgaagagcaatagaagcccagaaaaagaaaatggaagccgctttcaccaagcagcgtcaaaagatgggtaggaccgctttcttgacagtcgtgaagaaaaaaggcgacgggataagcccactccgggaggaggcggcaggggccgaagacgagaaggtttacaccgacagggccaaggagaaagagtcacaaaagactgacggtcagcggagtaagagcctggccgatattaaagaatcaatggagaacccccaagccaagtggttgaaatccccaaccacccctatagaccctgaaaagcagtggaatcttgcctctccttctgaagagaccctcaacgaaggtgagattctcgaatacaccaagtccatcgaaaaactgaattccagcctgcatttcttacagcaggaaatgcaacggctatccctacagcaagaaatgctaatgcagatgcgtgagcagcaatcctgggtaatcagtccccctcaaccatcacctcagaagcagattagagatttcaagccctcaaaacaggcaggcttgtcgagcgcgatagccccattttccagcgactctccgcggcctactcatccaagtcctcagtctagcaacagaaaaagcgcaagttttagcgtgaagtcgcagaggaccccaagacccaacgaactgaaaataacacccctgaacagaacactcactcccccacgttctgttgattctctccctcgccttaggaggttctctccgtcccaagtgccaattcagacacgaagttttgtgtgttttggagatgatggagaaccccagttgaaggaatctaagcccaaggaggaggttaagaaggaagaacttgagagtaaaggaaccctagagcaacgcggtcataacccagaagagaaggagataaaacctttcgaatccactgtgtctgaggtgctctctctgccagttactgagactgtctgtctcacgccgaatgaggatcagctgaaccagcctacagagcctcccccaaagccagtcttccctcctaccgccccaaaaaacgtgaatctgatagaggtatctctaagtgacctcaagccaccagagaaggccgacgtgcccgtggagaaatacgacggcgaatctgataaagaacagtttgatgacgaccagaaggtgtgctgtggcttcttctttaaagatgaccagaaggctgaaaacgacatggctatgaagcgggcagcgttgttagaaaaaaggctacggcgagaaaaggaaactcagctgcggaagcagcagctcgaggccgagatggaacacaaaaaggaggagacccgtagaaagactgaggaggagcgccaaaagaaagaagatgagcgtgcccgaagagagttcatcagacaggagtacatgcgacggaaacaattgaagctgatggaggacatggacaccgtaattaaaccgaggccgcaagtggtaaagcagaaaaaacaacgacctaaatctatccacagagaccacatcgaaagtcctaagacgccaatcaagggcccgcccgtgtcttcactgtccttggccagcctcaatactggggataacgagtcagttcattccggtaaaagaactcccaggagcgagtcggttgaggggttcctcagcccatcccggtgcggcagccgaaatggagagaaagattgggaaaacgcatctaccacttcctctgttgcttccggaactgagtacaccggacccaagctttataaagagcccagcgccaagtctaataaacatataatacaaaacgcgctggctcattgctgccttgccggaaaggtcaatgaggggcagaagaagaagatcctggaggagatggagaaaagcgatgcaaataacttcctcatcttatttcgggactctggctgtcagtttaggtccctttacacctactgcccggaaaccgaggagatcaacaaactgaccgggattggccctaagtctatcaccaagaagatgattgaggggctgtacaagtataatagcgatcgcaagcaattctctcacatccccgccaagacactcagcgctagcgttgatgctatcaccattcattcacacctgtggcagacaaagaggccagtcaccccaaagaaactgctgcccaccaaggcctag

SEQ ID NO: 263283 - DNA, 4437 bp, Artificial Sequence
  derived and/or modified sequence
atgggcgatgctgccgacccgagagagatgaggaaaacattcatcgtccccgcaattaaacctttcgatcactacgacttctcacgagcaaagattgcttgcaacttggcttggctcgtggccaaggccttcggtacagagaacgtgcccgaggaactgcaggagccattttacactgaccaatacgatcaagagcacattaaacccccagtggtgaatttactgctgagtgctgagctgtattgtagggcgggaagcctgattcttaaaagcgatgccgcaaagccgctgcttggccatgatgccgttatacaggctctagcccagaaggggctgtatgtgaccgaccaggaaaagctggtcaccgagcgggatctgcataaaaaacctatccagatgagcgcacatctggcgatgatcgacactctgatgatggcctatacagtcgagatggtcagcattgagaaggttatcgcgtgcgcacagcagtattctgctttctttcaggccacagacctgccctacgatattgaggatgcggtgatgtactggataaataaggtgaatgagcacttgaaggatattatggagcaagagcagaagctcaaggagcaccacaccgtggaggctcccggtggccagaaggctcggtaccgaaaagagcaaaccctgttgaagcagctcccttgtatcccccttgtggaaaatctgctgaaagatggtacagacggctgcgctcttgcggctctcattcatttctactgtcccgatgtggttaggcttgaagatatttgtctcaaggagacgatgagcctcgccgacagcctgtacaacctgcagctcattcaggaattctgtcaggagtacctcaaccagtgttgccacttcacccttgaggatatgttgtatgcagcctccagtatcaaatctaactatctggtgttcatggccgaattgttttggtggttcgaggtggtgaagccttcatttgtccagccaagggtcgtgaggccacaaggcgcagaacctgtgaaagatatgccaagtatccctgtcctcaatgctgctaagagaaacgtgctggattcaagtagcgacttccccagctctggcgagggcgcaacctttactcagagccatcatcacttgcccagccgctacagtcgaccacaagcacatagctctgctagtggagggattcggagatctagtagtatgtcttacgtggacggctttattggaacgtggcccaaggaaaaacgatccagcgtccacggagtctcatttgacatcagctttgataaagaggactctgttcagcgttccacccctaacaggggaatcacacgaagcatttcaaacgagggtcttactttgaacaacagccacgtgtcaaagcatatccggaagaatctaagtttcaagcccatcaatggtgaggaagaagccgaatctattgaggaggagcttaacatcgattctcatagtgatcttaaatcctgtgttcccttgaatactaatgaactgaacagcaatgagaatatacactacaagctgcctaacggcgctctccagaacagaattttactggatgaatttggcaaccagatagagaccccttcaatcgaggaagccttgcaaattattcacgacactgagaaaagtcctcacacgccccagcctgaccagattgccaatggattttttctgcattcccaggagatgtccatccttaatagcaatatcaaactcaaccagagttcccctgataacgtcaccgacacaaagggtgcgctctcccccattacagacaacacagaagtcgacacaggaatccacgtccctagtgaggacatccctgagaccatggatgaagatagctctctgcgcgactacaccgtgtcactcgactctgatatggatgatgcatccaaattcctgcaggattacgatatccggaccggcaatacgcgcgaggccctctctccatgtccttctacagttagtaccaagtcacaacctggcagcagtgccagcagcagtagtggagtgaaaatgacttcctttgctgagcagaagtttcgaaaacttaatcacacggacggaaagtcatccggttccagttcccagaagacaacacctgaagggagcgagcttaacatcccgcatgtcgtggcctgggcccagatccccgaagagactggcttgcctcaggggcgagatactacacagttgctggcctctgagatggtgcacctgcggatgaaattagaagaaaagcggagggccatcgaggcccagaaaaagaaaatggaagccgctttcacgaagcagaggcaaaaaatggggaggacagcattcctgactgtcgtcaaaaagaaaggggacggcatctctccactaagggaggaggcagcaggtgctgaggacgaaaaggtctacaccgatagggccaaggaaaaggagagccaaaagacagatggacaacgatccaaatccctggctgatatcaaggagagcatggaaaatccacaggccaagtggttaaaatctcctactacccccattgatccggaaaagcagtggaatctggcaagcccatctgaagagaccctgaatgaaggcgagatactggaatacactaaaagcattgaaaagctgaacagctccctccactttctgcagcaggagatgcagagactgagcctgcagcaggagatgttaatgcagatgcgagagcagcagagctgggtgatctcccccccacaaccatctcctcaaaaacaaattcgtgattttaagcccagcaagcaggctggtttgagcagcgccattgccccttttagcagcgattccccacgacccacccacccctcaccccaaagctcgaacaggaagagcgctagcttctcagtcaagtcacagaggactccaagaccgaacgagctgaagatcacgccattgaatagaacattaactcctccaagatctgtggattcactgcccagactcagacgtttttctccatctcaagttcccattcagacgcggtcttttgtctgtttcggtgatgatggagaacctcagttaaaggagagcaaacccaaagaggaagtcaagaaagaggaattagaatccaagggaacgcttgagcagcgcggacataatccagaggaaaaagaaattaaaccctttgagtctacggtgagcgaggttctatctctgcctgtcacggagacggtgtgcctgacccccaacgaagatcagctcaaccagccaaccgagcctccccctaaacccgtcttccctccaaccgccccaaagaatgtgaacctcattgaggtgagccttagcgacctcaagccccctgagaaagccgatgtgccagtggaaaaatacgacggagagagcgataaggaacagttcgatgatgaccagaaggtttgctgcggcttctttttcaaggacgatcaaaaggcagagaacgacatggcgatgaagagagctgcccttctcgagaagagattgcgtcgggaaaaggaaacacaactgcgtaagcagcagctggaggcagaaatggagcacaagaaagaagagaccagacgcaagacggaggaggaaagacaaaagaaggaggatgaacgggcaaggagagagttcataaggcaggaatacatgcgtcgaaagcagttgaagctgatggaggacatggataccgtgattaagcctcggccacaggtcgtgaagcaaaaaaaacagaggccaaaaagcatccaccgcgatcacatcgaatcaccaaagaccccaatcaagggcccacccgtatcctctctgagtctggcttcattgaacacaggtgacaatgagtcagtgcacagcggcaaacgtaccccacgcagcgagtcagtggaaggtttcctaagtccgtcacggtgtggttcgcgcaacggagaaaaagattgggaaaatgcctcaactacaagtagcgtcgcgtctggtactgaatacacaggccctaagctgtataaggaaccctcggcgaaatccaacaaacacatcattcagaatgccctcgcacactgctgcctggccggaaaggtcaatgaaggtcagaagaagaaaatactggaggagatggagaaatccgatgctaacaacttcctaattctgttccgagactctggttgtcagtttcgctccctatacacttattgtcccgagaccgaggaaattaataaacttacgggtatcgggcctaagtcaatcacaaagaagatgatcgaggggctctataaatacaactccgataggaaacagttctcccatatccctgccaagactctgagcgcctcagtggatgcgataactattcattcacacttatggcaaactaaaaggcctgtgactcccaagaaactccttcccactaaagcttag

SEQ ID NO: 263284 - DNA, 7352 bp, Artificial Sequence
  derived and/or modified sequence
acggggcggacctcgcgcggacggacggacggagacggcgccgccacattcctatgcccgggagcggcggcggcggcggcggcggctcccgcgggaggcggcaggcgcgcggcgcggacagctgagcttctcctccgtcggcgcccgggcggacatcgcccgggccccgatggtttgagcttgcttctccctccctcccgacccccgtggtggcgaggccacgccatgtgaaggttagggccgggacatcccgaggagccgcggtgaaagatgggggatgctgcagaccccagggagatgagaaagacgttcattgttccagccatcaagccttttgaccactatgatttctccagggccaaaatcgcctgcaatctggcctggctggtggccaaagcctttgggacagaaaatgtgccagaggaacttcaagaaccattttacacagatcagtatgaccaggaacacatcaaaccacctgttgttaatttgcttctatcggctgaactatactgtcgtgctgggagtctcattctcaagagtgatgctgcaaaaccccttttgggccatgatgctgtaatccaggctttagcacagaaaggtctttatgtcactgaccaggaaaaattggtaactgaacgagatctccacaagaaacccatacagatgagtgcacatttggccatgatcgataccctcatgatggcttatactgtagaaatggtcagtatagaaaaagtaattgcgtgtgctcagcagtattcagctttttttcaagccacagatctgccctatgatattgaggacgctgtcatgtactggataaataaggtaaatgaacatttgaaagacataatggaacaagaacaaaaactgaaagaacatcacacagttgaagctccaggaggtcaaaaggctcgttatcggaaagagcaaacattgcttaagcaactgccttgcattccattggtagaaaatttgttgaaggatgggacagatggctgtgcattagctgcccttattcatttttactgtcctgatgttgtcagattagaggatatttgtttgaaagaaactatgtctttggctgatagcctgtataatctgcagctgattcaagaattttgccaagaatacttgaaccagtgttgccatttcactctggaagatatgctctatgctgcttcatccataaagagtaattatttggtgttcatggcggaactgttctggtggtttgaagtggtgaagccgtcttttgtacagcctcgtgttgttcgtccacaaggagctgaacctgtaaaagatatgccttcaattcctgtcttgaatgctgccaaaagaaatgtcttagatagtagttctgacttcccttcaagtggggaaggagctacatttacacagtctcatcatcatttgccttctaggtattcacgtccccaggctcattcttcagcctcaggaggaattagaaggtcttcatctatgtcttatgttgatggcttcatagggacatggcccaaagagaaaagatcatcagtgcatggcgtatcatttgatatttcttttgataaagaagatagtgtacagagatccactccaaaccgaggaatcactcgttctattagtaatgaaggacttactctgaacaacagtcatgtatctaaacacattaggaaaaatttgtccttcaagccaataaatggagaagaggaagcagagagcattgaagaagaacttaatatagattctcacagtgacctcaaatcttgtgtgccccttaacacaaatgaactaaattctaatgagaatattcattacaagcttccaaatggagctttacaaaatagaatacttcttgacgagtttggcaatcagatcgagacaccaagcattgaagaagcattacaaataattcatgatactgaaaaatctcctcatacacctcagccagaccaaattgctaatggcttctttcttcatagtcaagaaatgagtatcttaaattcaaatatcaagttaaatcaatctagtcctgataatgtaactgatacgaaaggtgccttgagtcccataactgacaatactgaagtagacactggaattcacgttccttcagaagatattcctgaaactatggacgaagattcttcgttgagagattatactgtaagcttggactctgacatggatgatgcatctaaatttcttcaggattatgatattcgaactggcaacaccagggaagctttgagtccttgtccaagtactgtaagtaccaagtctcagccaggcagcagtgcttcttctagttctggagttaaaatgaccagctttgctgaacaaaaattcaggaaactgaatcataccgatggaaaaagtagtggaagcagttctcaaaaaactacaccagaaggctctgaacttaatattcctcatgtggttgcttgggcacaaattccagaagaaacagggcttccacagggacgggacactacccagctgttggcctctgaaatggtgcatcttaggatgaaactagaagaaaagaggcgtgctatagaagcccagaaaaagaaaatggaagctgcttttaccaaacagagacagaaaatgggaaggacagcattccttactgtagtgaaaaagaaaggggatgggatatctcctctacgagaggaagcggcgggtgcagaagatgagaaagtatatactgatcgagcaaaagaaaaggaatcacaaaaaactgatggacaaaggagcaagtcactggcagatataaaagagagcatggagaatcctcaagccaaatggctaaagtctccaactacacctattgatcctgagaagcagtggaacctggcaagcccctcagaagaaactttaaatgaaggagagattttagaatataccaaatccattgaaaagttaaattcatccctgcattttctacaacaagaaatgcaacgcttgtcacttcagcaggagatgttaatgcagatgagagagcaacaatcttgggtgatttcacctccacaaccctctccacagaaacagattcgagattttaagccttctaagcaggcaggcctgtcatcagccattgcaccattctcctcagactcccctcgtcctactcacccatctccacagtcttctaacaggaaaagtgcatctttttctgttaaaagtcaaaggactcctaggccaaatgagttaaaaataacacctttgaatcgaaccttgacacctcctcggtctgtggatagccttcctcggttaaggaggttttcaccaagtcaagttcctattcaaactaggtcatttgtatgttttggggatgatggagaacctcagttaaaggaatccaaacctaaagaggaagttaaaaaggaggaattggaatccaaagggactttggaacagcgtggacataatccagaagaaaaggaaatcaaaccttttgagtcaacagtctctgaagtcctatcactgcctgtcacagagactgtatgtctgacaccaaatgaggaccaattgaatcaacccacagaaccccctcctaaacccgttttcccacccactgctccaaaaaatgttaatctgattgaagtttccctctcagatttgaaaccccctgaaaaggctgatgtacctgttgaaaaatatgatggagaaagtgataaagaacaatttgatgatgaccagaaagtatgctgtggattcttttttaaggatgatcaaaaagcagaaaatgatatggcaatgaaacgggcagctttgttggagaaaagattaagaagggaaaaggaaactcagctccggaaacaacagttggaagcagaaatggagcataagaaggaggaaacaaggcgtaaaactgaggaagaacgtcagaagaaagaagatgagagagcacgcagagaatttattaggcaagaatatatgaggcggaaacaactgaaactaatggaagatatggatacagtaattaaaccccgtcctcaagtagtaaaacaaaaaaaacagcgaccaaaatctattcacagagatcatattgaatcccccaaaacaccaataaagggtcctccagtctctagcctttctttggcatcgctgaacacgggtgataacgagagtgtacattcaggcaagaggacgccaagatcagagtctgtagaaggcttcttatctccaagtcgttgtggcagtcgaaatggagaaaaagactgggagaatgcatcaacaacttcttcagtggcttctggaacagaatatacaggaccaaagctctacaaagaacccagtgcaaaatccaataagcacataatacaaaatgctttagctcattgctgtttggctggaaaagtaaatgaaggtcagaagaaaaaaatactggaggaaatggagaaatcagatgccaacaacttcttaatcttgttccgggattcaggatgccagttcagatctttatacacttattgcccagaaactgaagaaatcaataaactgactgggataggccctaaatctatcactaaaaaaatgattgaaggactttacaaatataattctgacaggaaacagtttagccacatacccgctaaaactttatctgccagtgttgatgcaattaccattcatagccatttatggcagaccaaaagaccagtaacacccaaaaaacttttacccactaaggcatagaagttgggaaatacttgcttcagaacattcatggtaaatttgcacttcatctttcctgcctatagaaaatctttctaattgccaacaagacttttattaattaaaactggacattaagctctgttgtcatgaacaactggaatgtaaaccacagtattttggagtgcagaacattctcaattaagtgataagtccaaatgatgaaggaaatgttttaattcacaaatggagatttgtatgtgttatcaggttcacctgcttgatattagatacattaaagcactgaattttcatggatattagttggatttatcattgaaatatggttaagattacaaattatgtgttttatttgttgcttttttttaaccttttaatgtatattcttgtcttcagatggtttgctatttttctctcctgggggtttattctaagatacctttgtattttatttcatgtggagatcatgaaagtaggaaatatacctttagaagtaactcgcacctttcttatgatgttaagagaaacactagtgtttagttttacagtaaccctcatattttaatggtgttacagcatttgcaaaaattattctgctaagtatttacaactctatttattattcactcaagtattaacattctctattaaataagaggaggtgttgtaaagagctgctagtaggttcgctttaaaccacatgagcttaaccaagaatatgttatgagaagttgctgattaaatcagtgctgtttttacaccacttctggccaactcagaataatttagattgttcttttaacaaaaaaggctttctatctcttttaaagtaagtcactttataagttggcagaagtgaatgacactttgagagtagtctttcaatctgaagatgtaagacttcctgaaacaagttctcaagaagtctttacattatatttataactcatataaaaattatatttagaatttttaaacatgtacaaagggctacattttaattttaaaatagcttcacattattttacttatattgggtttttcttcattttaatccttttcaagtggaatggcttagaataagtatacacttgaaatctcctctacatgatctttgttctttaacagtgtataccagagggttagttggggaaaaacttcattctcaggaaaagacttgaatgattatgtgaccctgttatatttcagtgttgtgacaaatgtgtaaactagcgggggaagacagtattgtatcataaatgagatgcgtagtttgttttctttcatgggaagtagagataaaaatatatacatttctctaattgagttgtttagagaaagaactaatgtctcatatgatgtatttacttattttaaaaaaaagaataggaatgagatgtccctgagctgtacttttctattattataaggcctttaggcatcagtgcatctgggttatcaacattttctcaaatgctgtcaatattttactgtaatttatgttcttatatttatgtatatttgttaaaactgtaaaaaaatttcacagatttttttccaatacctgtgcaagatacatgtgtagctcaaaactatttgtgatctactgtttgcatgtaagagaccaggatatgtaactcttatattttaagtgtatacatattgtgtatataacatatggatattaaaaatggggaattgcacattttaccttttggacagtaatttctatcacagttagaaggaaatgatagtcaaatacacgtttagattaaaactagtttaaaaaattataaatgaatctaatcaaaatgtgaatagtagtcaaaaggataatttaataagcattttacgttactaaatttgttcatttcaatattaactaaatttccctcatcaaagcaatctttgtgatattacttcgctattaaataaagaaaattggatgcaagacaatggagaaactttaaaactaaacaggaccaccctttattcttaaatttgtgtgtgtccaacagttgaattgaatgtctataaggtctaaaggtagaatgtgaatattgccacagagttcattgctctcagtataagattttactttattaatgcagaaggaatatggatatatttctttaagtctgcagatttttttattatggtgcagcttttttttaattatgtttttaaaattatacagttgaaaaatatgccatttcataaagtctgaggattttcgtcaaccttactgaaacacactggtgctttcatcatcagaggtcaaattattatgataactattccattaagtttgccaaacatttgtcgtggttaccagtgcagcctgtcaaattctgctatttgacacagctttggaaagatttagttcttggtttttccgttttgtattagaatgactgttacagttttatttggctgtttaaagccaaattcagctatttaattatggtttcatggacactgttgagcaatgtacagtgtatggtgtgcttacctgtccactctagagcattgcttacaggttttttgttttttaagatgctgtgctgtaaaatactgtcatacttgctatttcctggtacagtgtagtttttcccctttcatttgaataaaagcatggcaccaaa

SEQ ID NO: 263285 - DNA, 4437 bp, Artificial Sequence
  derived and/or modified sequence
atgggcgacgccgccgaccccagagagatgagaaagaccttcatcgtgcccgccatcaagcccttcgaccactacgacttcagcagagccaagatcgcctgcaacctggcctggctggtggccaaggccttcggcaccgagaacgtgcccgaggagctgcaggagcccttctacaccgaccagtacgaccaggagcacatcaagccccccgtggtgaacctgctgctgagcgccgagctgtactgcagagccggcagcctgatcctgaagagcgacgccgccaagcccctgctgggccacgacgccgtgatccaggccctggcccagaagggcctgtacgtgaccgaccaggagaagctggtgaccgagagagacctgcacaagaagcccatccagatgagcgcccacctggccatgatcgacaccctgatgatggcctacaccgtggagatggtgagcatcgagaaggtgatcgcctgcgcccagcagtacagcgccttcttccaggccaccgacctgccctacgacatcgaggacgccgtgatgtactggatcaacaaggtgaacgagcacctgaaggacatcatggagcaggagcagaagctgaaggagcaccacaccgtggaggcccccggcggccagaaggccagatacagaaaggagcagaccctgctgaagcagctgccctgcatccccctggtggagaacctgctgaaggacggcaccgacggctgcgccctggccgccctgatccacttctactgccccgacgtggtgagactggaggacatctgcctgaaggagaccatgagcctggccgacagcctgtacaacctgcagctgatccaggagttctgccaggagtacctgaaccagtgctgccacttcaccctggaggacatgctgtacgccgccagcagcatcaagagcaactacctggtgttcatggccgagctgttctggtggttcgaggtggtgaagcccagcttcgtgcagcccagagtggtgagaccccagggcgccgagcccgtgaaggacatgcccagcatccccgtgctgaacgccgccaagagaaacgtgctggacagcagcagcgacttccccagcagcggcgagggcgccaccttcacccagagccaccaccacctgcccagcagatacagcagaccccaggcccacagcagcgccagcggcggcatcagaagaagcagcagcatgagctacgtggacggcttcatcggcacctggcccaaggagaagagaagcagcgtgcacggcgtgagcttcgacatcagcttcgacaaggaggacagcgtgcagagaagcacccccaacagaggcatcaccagaagcatcagcaacgagggcctgaccctgaacaacagccacgtgagcaagcacatcagaaagaacctgagcttcaagcccatcaacggcgaggaggaggccgagagcatcgaggaggagctgaacatcgacagccacagcgacctgaagagctgcgtgcccctgaacaccaacgagctgaacagcaacgagaacatccactacaagctgcccaacggcgccctgcagaacagaatcctgctggacgagttcggcaaccagatcgagacccccagcatcgaggaggccctgcagatcatccacgacaccgagaagagcccccacaccccccagcccgaccagatcgccaacggcttcttcctgcacagccaggagatgagcatcctgaacagcaacatcaagctgaaccagagcagccccgacaacgtgaccgacaccaagggcgccctgagccccatcaccgacaacaccgaggtggacaccggcatccacgtgcccagcgaggacatccccgagaccatggacgaggacagcagcctgagagactacaccgtgagcctggacagcgacatggacgacgccagcaagttcctgcaggactacgacatcagaaccggcaacaccagagaggccctgagcccctgccccagcaccgtgagcaccaagagccagcccggcagcagcgccagcagcagcagcggcgtgaagatgaccagcttcgccgagcagaagttcagaaagctgaaccacaccgacggcaagagcagcggcagcagcagccagaagaccacccccgagggcagcgagctgaacatcccccacgtggtggcctgggcccagatccccgaggagaccggcctgccccagggcagagacaccacccagctgctggccagcgagatggtgcacctgagaatgaagctggaggagaagagaagagccatcgaggcccagaagaagaagatggaggccgccttcaccaagcagagacagaagatgggcagaaccgccttcctgaccgtggtgaagaagaagggcgacggcatcagccccctgagagaggaggccgccggcgccgaggacgagaaggtgtacaccgacagagccaaggagaaggagagccagaagaccgacggccagagaagcaagagcctggccgacatcaaggagagcatggagaacccccaggccaagtggctgaagagccccaccacccccatcgaccccgagaagcagtggaacctggccagccccagcgaggagaccctgaacgagggcgagatcctggagtacaccaagagcatcgagaagctgaacagcagcctgcacttcctgcagcaggagatgcagagactgagcctgcagcaggagatgctgatgcagatgagagagcagcagagctgggtgatcagccccccccagcccagcccccagaagcagatcagagacttcaagcccagcaagcaggccggcctgagcagcgccatcgcccccttcagcagcgacagccccagacccacccaccccagcccccagagcagcaacagaaagagcgccagcttcagcgtgaagagccagagaacccccagacccaacgagctgaagatcacccccctgaacagaaccctgaccccccccagaagcgtggacagcctgcccagactgagaagattcagccccagccaggtgcccatccagaccagaagcttcgtgtgcttcggcgacgacggcgagccccagctgaaggagagcaagcccaaggaggaggtgaagaaggaggagctggagagcaagggcaccctggagcagagaggccacaaccccgaggagaaggagatcaagcccttcgagagcaccgtgagcgaggtgctgagcctgcccgtgaccgagaccgtgtgcctgacccccaacgaggaccagctgaaccagcccaccgagcccccccccaagcccgtgttcccccccaccgcccccaagaacgtgaacctgatcgaggtgagcctgagcgacctgaagccccccgagaaggccgacgtgcccgtggagaagtacgacggcgagagcgacaaggagcagttcgacgacgaccagaaggtgtgctgcggcttcttcttcaaggacgaccagaaggccgagaacgacatggccatgaagagagccgccctgctggagaagagactgagaagagagaaggagacccagctgagaaagcagcagctggaggccgagatggagcacaagaaggaggagaccagaagaaagaccgaggaggagagacagaagaaggaggacgagagagccagaagagagttcatcagacaggagtacatgagaagaaagcagctgaagctgatggaggacatggacaccgtgatcaagcccagaccccaggtggtgaagcagaagaagcagagacccaagagcatccacagagaccacatcgagagccccaagacccccatcaagggcccccccgtgagcagcctgagcctggccagcctgaacaccggcgacaacgagagcgtgcacagcggcaagagaacccccagaagcgagagcgtggagggcttcctgagccccagcagatgcggcagcagaaacggcgagaaggactgggagaacgccagcaccaccagcagcgtggccagcggcaccgagtacaccggccccaagctgtacaaggagcccagcgccaagagcaacaagcacatcatccagaacgccctggcccactgctgcctggccggcaaggtgaacgagggccagaagaagaagatcctggaggagatggagaagagcgacgccaacaacttcctgatcctgttcagagacagcggctgccagttcagaagcctgtacacctactgccccgagaccgaggagatcaacaagctgaccggcatcggccccaagagcatcaccaagaagatgatcgagggcctgtacaagtacaacagcgacagaaagcagttcagccacatccccgccaagaccctgagcgccagcgtggacgccatcaccatccacagccacctgtggcagaccaagagacccgtgacccccaagaagctgctgcccaccaaggcctag

SEQ ID NO: 263286 - protein, 384 aa, Artificial Sequence
  derived and/or modified sequence
MAGILAWFWNERFWLPHNVTWADLKNTEEATFPQAEDLYLAFPLAFCIFMVRLIFERFVAKPCAIALNIQANGPQIAPPNAILEKVFTAITKHPDEKRLEGLSKQLDWDVRSIQRWFRQRRNQEKPSTLTRFCESMWRFSFYLYVFTYGVRFLKKTPWLWNTRHCWYNYPYQPLTTDLHYYYILELSFYWSLMFSQFTDIKRKDFGIMFLHHLVSIFLITFSYVNNMARVGTLVLCLHDSADALLEAAKMANYAKFQKMCDLLFVMFAVVFITTRLGIFPLWVLNTTLFESWEIVGPYPSWWVFNLLLLLVQGLNCFWSYLIVKIACKAVSRGKVSKDDRSDIESSSDEEDSEPPGKNPHTATTTNGTSGTNGYLLTGSCSMDD

SEQ ID NO: 263287 - DNA, 1155 bp, Artificial Sequence
  derived and/or modified sequence
atggccggcatcctggcctggttctggaacgagagattctggctgccccacaacgtgacctgggccgacctgaagaacaccgaggaggccaccttcccccaggccgaggacctgtacctggccttccccctggccttctgcatcttcatggtgagactgatcttcgagagattcgtggccaagccctgcgccatcgccctgaacatccaggccaacggcccccagatcgccccccccaacgccatcctggagaaggtgttcaccgccatcaccaagcaccccgacgagaagagactggagggcctgagcaagcagctggactgggacgtgagaagcatccagagatggttcagacagagaagaaaccaggagaagcccagcaccctgaccagattctgcgagagcatgtggagattcagcttctacctgtacgtgttcacctacggcgtgagattcctgaagaagaccccctggctgtggaacaccagacactgctggtacaactacccctaccagcccctgaccaccgacctgcactactactacatcctggagctgagcttctactggagcctgatgttcagccagttcaccgacatcaagagaaaggacttcggcatcatgttcctgcaccacctggtgagcatcttcctgatcaccttcagctacgtgaacaacatggccagagtgggcaccctggtgctgtgcctgcacgacagcgccgacgccctgctggaggccgccaagatggccaactacgccaagttccagaagatgtgcgacctgctgttcgtgatgttcgccgtggtgttcatcaccaccagactgggcatcttccccctgtgggtgctgaacaccaccctgttcgagagctgggagatcgtgggcccctaccccagctggtgggtgttcaacctgctgctgctgctggtgcagggcctgaactgcttctggagctacctgatcgtgaagatcgcctgcaaggccgtgagcagaggcaaggtgagcaaggacgacagaagcgacatcgagagcagcagcgacgaggaggacagcgagccccccggcaagaacccccacaccgccaccaccaccaacggcaccagcggcaccaacggctacctgctgaccggcagctgcagcatggacgactag

SEQ ID NO: 263288 - DNA, 1155 bp, Artificial Sequence
  derived and/or modified sequence
atggcggggatcctggcttggttctggaatgagcggttttggcttccacataacgtgacctgggctgatctcaagaatacggaggaggcgacttttcctcaagccgaggacctgtacctggcctttccgctggcattttgtatctttatggtcagactgatctttgaaagatttgtagccaaaccgtgcgctattgcgctgaatatccaggccaacggtccccaaatcgcgccgccgaatgcaatactcgagaaggtgttcacagcaatcactaagcacccagacgagaaaagactagaaggcctttcgaagcagttagattgggatgttagatcgattcaaaggtggtttcgccagcggagaaaccaggagaaaccatctaccctaacacgcttctgtgagtccatgtggcgcttctcattttacttgtacgtttttacctatggagtccgatttttgaagaagaccccttggttatggaacaccaggcattgctggtacaactatccttaccaacctctaacaaccgacctgcattattactacatcctggagctctcgttctattggtctctgatgttttcacagttcactgacattaaacgcaaagacttcggtatcatgttccttcaccacctcgtaagcattttcctgattaccttcagttatgtgaacaacatggctagagttgggacgttagtgctgtgcctgcacgacagcgctgatgccttacttgaagccgccaagatggcgaactatgctaaattccagaagatgtgtgacctgctgttcgtgatgtttgccgtggtattcatcacaacacgcctgggcattttccccctgtgggtcttaaatacaaccctgtttgaatcttgggaaatcgtgggcccctatccatcatggtgggtgtttaatctcttacttcttctggtgcagggtttaaactgtttctggagttatctgattgtgaagatcgcctgtaaagcagtcagtagagggaaagtaagtaaggatgatcgttctgacatcgaatcctcctccgatgaggaggactctgagcctccagggaaaaatccacacacagccacaacaacaaatgggacaagcggcaccaacggttaccttctgaccgggagttgtagcatggatgattag

SEQ ID NO: 263289 - DNA, 1155 bp, Artificial Sequence
  derived and/or modified sequence
atggccggcatcctggcctggttctggaatgaacgcttctggctgccccacaacgtgacctgggccgacctgaagaacacagaggaggccaccttcccccaggccgaggacctgtacctggccttccccctggccttctgcatcttcatggtgcggctcatctttgaaagatttgtggccaagccctgtgccatcgccctgaacatccaggccaacggcccccagatcgcccccccaaatgccatcctggagaaggtgttcaccgccatcaccaagcacccagatgagaagaggctggagggcctgagcaagcagctggactgggatgtgcgcagcatccagcgctggttccggcagaggaggaaccaggagaagcccagcaccctgacccgcttctgtgagagcatgtggaggttctccttctacctgtatgtgttcacctacggcgtgcgcttcctgaagaagaccccctggctgtggaacaccaggcactgctggtacaactacccctaccagcccctgaccacagacctgcactactactacatcctggagctgtccttctactggagcctgatgttcagccagttcacagacatcaagaggaaggactttggcatcatgttcctgcaccacctggtgtccatcttcctgatcaccttctcctatgtgaacaacatggcccgggtgggcaccctggtgctgtgcctgcatgacagcgcagatgccctgctggaggccgccaagatggccaactatgccaagttccagaagatgtgtgacctgctgtttgtgatgtttgctgtggtgttcatcaccacccggctgggcatcttccccctgtgggtgctgaacaccaccctgtttgagagctgggagatcgtgggcccctaccccagctggtgggtgttcaacctgctgctgctgctggtgcagggcctgaactgcttctggagctacctgattgtgaagatcgcctgcaaggctgtgtcccggggcaaggtgtccaaggatgacagaagtgacatcgagagcagcagtgatgaggaggacagcgagcccccaggcaagaacccccacacagccaccaccaccaacggcaccagcggcaccaacggctacctgctgaccggcagctgcagcatggatgactag

SEQ ID NO: 263290 - DNA, 1155 bp, Artificial Sequence
  derived and/or modified sequence
atggccggcatcctggcctggttctggaacgagcggttctggctgccccacaatgtgacatgggcagatttgaaaaatacggaggaagccaccttcccacaagccgaagacctgtacttggccttccctctggccttttgcatctttatggtgaggcttatcttcgaacgcttcgtggctaaaccctgtgccatcgccttgaatattcaagctaacggcccacagatcgctccacctaacgccatcctggaaaaggtgttcaccgctatcaccaagcatcccgacgaaaagcgcctagaggggctgtccaaacaattggattgggatgtacggagcattcagagatggtttcgccaacgccgaaaccaagagaagccttcaaccctgacacggttttgcgagagtatgtggcggtttagcttttacttgtacgtgtttacatacggcgttaggttcctgaaaaagacaccgtggttatggaacactaggcactgctggtacaactacccctaccagcctctgactacagacctacactactattatattctggaactgtcgttctactggagcctgatgttcagccagtttaccgatatcaaaagaaaggacttcggtattatgttcctccatcacctagtgtcaatttttctcatcaccttttcgtatgtgaataatatggcaagagttgggacactggtgctgtgcctgcacgattccgcagatgcccttcttgaagcagctaagatggctaattatgctaagtttcagaagatgtgtgacctgctgtttgtaatgttcgcagtcgtattcataacaacacggctcggtattttccctctgtgggtattgaataccacattgtttgagagctgggaaattgtcgggccatatccctcctggtgggtattcaatctcctgttactgctggttcagggcctaaattgcttctggtcttacttgatcgtgaagattgcctgtaaggccgtatctcgcggcaaggtctccaaagacgatcggagcgatatcgaatcaagctccgacgaggaagatagcgaacctccaggtaaaaatccacacaccgcaacaactacaaacggtacatcagggacaaacggttacctcctcactgggagttgctctatggatgactag

SEQ ID NO: 263291 - DNA, 1155 bp, Artificial Sequence
  derived and/or modified sequence
atggccggaatcctagcctggttttggaatgagcggttctggttgccccataatgtgacctgggccgacctgaagaacactgaggaggctacttttccacaggccgaagacttgtacctggcttttccactggccttttgcatcttcatggtgcggctaatatttgaaagatttgtggccaaaccatgtgcaattgcactaaacatacaggcgaatggaccgcagatcgctcctccaaacgctatactggagaaggttttcaccgcgattactaagcatcctgacgaaaagcgactcgagggtttgtctaaacagttggattgggacgttagatcaattcagaggtggtttcgccagcggagaaaccaagaaaagccctctactctgacccggttctgtgagtcaatgtggcggttctccttctacctctacgtgtttacctacggggtaaggtttctgaaaaagacaccatggctgtggaatacccgccactgctggtacaattacccttatcagcccctaaccacagatttacactattactacattctggagctgagcttttattggtcgctgatgttctctcaattcaccgacatcaagagaaaggactttggaatcatgtttttacaccatcttgtcagtatctttctgataacctttagttatgttaataacatggctagggtggggaccttagtgttgtgcctgcatgattcagcggacgccttacttgaggctgccaaaatggctaactacgccaagttccagaaaatgtgcgatctgctgtttgtgatgttcgccgtcgtatttatcacgaccaggctaggcatctttcccctgtgggtgctgaatacaacactgttcgagtcttgggaaatcgtcgggccttacccatcctggtgggttttcaacctgctgctgctgctagttcagggactgaactgcttttggtcttatctgatcgtaaagattgcatgtaaagctgtctctcggggtaaggtctccaaggacgatcgtagtgacattgagtcctcttccgatgaggaggactccgaaccgccagggaaaaatccacatactgctacaaccaccaatggaaccagtggaactaatggctacctcctgaccggttcttgttccatggatgactag

SEQ ID NO: 263292 - DNA, 7214 bp, Artificial Sequence
  derived and/or modified sequence
agggctggttctgaagcttggcggcagcccctacctgctgacccaccgcctccgggcgcacgggaagaggactgagagccctgaaaccccagcggggcaggagccagcattctgagcatgtgcgagccagccagggggctagggcggatttggggggtcgactttaggtcgtcgccctaagcgcaaagcgaaagagcggtgagagcaggggcgggcgacactccccggagcggtgcccctgcgcccagggcgcagcgactgcgccctgccctgcgggtgtgggcgagttggccgcgtgtgtgcctcgctgtttgacgcgaagacgagccaatcagggcgggcggcccgagctgccatgtgacgggcaaggcggcccctttccccagcgcggccagagggaggagagaaccggggctcgccgcgagccttcgagagcagcggccgcggaggaggcggcggcggcgggcgggagcagcggcggcggcggcacaggctcggggccagccgggcgcgcatccccgggcgccctgcgcggtggagagcttggcgggctgcgggtgccgcaggacaggagtggacaaagcaagatggcagggatcttagcctggttctggaacgagaggttttggctcccgcacaatgtcacctgggcggacctgaagaacacggaggaggccaccttcccgcaggctgaggacctctatctcgcttttcccctggccttctgtatcttcatggtgcggctcatcttcgagagatttgtagccaaaccgtgcgccatagccctcaacattcaggccaatggaccacaaattgctccgcccaatgccattctggaaaaggtcttcactgcaattacaaagcatcctgatgaaaagagattggaaggcctctccaagcaactggactgggatgttcgaagcattcagcgctggtttcgacaaagacgcaatcaggagaagccaagcacgctgacgaggttctgtgagagcatgtggagattttcattttacctttatgtatttacctacggagtcagattcctgaaaaagaccccctggttgtggaatacgaggcattgctggtacaactacccctatcagccactcacaactgaccttcactactattacatcctggagctgtcgttttattggtctttgatgttttctcagttcactgatatcaaaagaaaggactttggcattatgttcctgcaccaccttgtatctattttcttgattaccttttcatatgtcaacaatatggcccgagtaggaacgctggtcctttgtcttcatgattcagctgatgctcttctggaggctgccaaaatggcaaattatgccaagtttcagaaaatgtgtgatctcctgtttgttatgtttgccgtggtttttatcaccacacgactgggtatatttcctctctgggtgttaaataccacattatttgaaagctgggagatcgttggaccttacccttcctggtgggtttttaacctactgctattgctagtacaagggttgaactgcttctggtcttacttgattgtgaaaatagcttgcaaagctgtttcaagaggcaaggtgtccaaggatgatcgaagtgatattgagtctagctcagatgaggaggactcagaacctccgggaaagaatccccacactgcgacaaccaccaatgggaccagtggtaccaacgggtatctcctgactggctcctgctccatggatgattaattactcaaaactacaagtcccaagcaaagtgaactatttgttcctggaagtatttaataagttgcaaatgcagttcctttcataatatctcagcaccagaaacaaaaattaagattatcaaagcattttgaatagtgcactgccatgtgtcctgtctgtgaatgaagaagaattaccattctctctttgtaggcatgctgtatgtaattgacacaagggaacagtatttgcatttgtactgtcttagaatattatttatttttttgtatttgtaaatctgtggacaaaagagggtttcctcactccttttactcactgggctcatgacagtgaaggagatgctccatctgcttctccccctttctcttgctgtagtccaatgtgctatgagcatcagcttactttgtcacttagagcaagcaaaacccagtgcaagagtctcgttcagctctaaataggtttgctttcttttagttacagtgcccattttgaaattgcctatacagtcttagtgaccatttaaaccggacgaactaggtgtttaattttcactcttcatgttcaattagcagttcaaattaaagaagatggttattggagaacttttttgaatggttttgtattaaattgctttgaaatagatttcatttcttgtgcacacagccaagatttcttcaatgggtgtgagctagttgagggttaaccttgtaggttgcagagtgtatttgtttgtttgtttgtttttctctgtgatgaggtcagtgctctgattttgaaggaggatattcactgaagctcatagttataaacaaggaaatcactgttaagaatgggaatttgtcctgtgttctgggaataacataaagagagcaactgatttcagccaggttttgccactaccctataattagtgcagtcttatgttataaaagaaagaagttaactatatttggggacaaaaaaatatttcaagagttgataaagattacctgtgcagtgcagagcactttaatgcaaccagctttcaagaaaaagccctatctagtacttgatgttgatgtttttattttgctgagcaaaataaagccaatgggagaaagactattttaccctttgcttttctccttaaacgtaatccagatgactttcctgttactaaacactgagcagcattacactacaatgcttctttggtttccaggaatttttttcaaatggggctgtttctggaaaaatgaaaaattctattggacaatggcaatatcaacaatgaggaaaattactgaagaataagtttccataagtctcctacatagcagtgttatttatgtacagataagaaaaccatatgtcagccaaagattttatctcttcttctaacttttagtaagaggaaaaagggattataaaacccttcataaatcaagaaggccatcacttagaacgaaccccaaacaaaaatgccataatataaatgtgtgaatcagggctgtgaagacaacagcagaaatgctaacaagcgtgcagaaacaccagagagtgcgtatcctgctcagaaccattcacatttaattcaattcttggaaaaaattaaagctttttgcccacaatttgcaatctgtgggttaatagttaaaagaatgttcccaaccaaaaaattcttaccgtaatattatatcttgccctacttatttacaaaataatatgtttctgttatggtccttagtaataattgaagaggcttagaaatacatctgcttgtttattgagaaaacgatgcaaataattctgcttttagagccttgttattttatttcacaaaacaggcatatgtctaggagtgtaatttgtggatggttgagtttgtaagaacaatcataaaaggacttgttagtctccagaacatctgctaaaatgcaagtatatgtataaggtaatagcatattacagctgaaaattttgagaaggtaaaagtttcttaattaaaatatgaacatatttagcttgctttagtgtctggggcaagtcctctcaatggctaaaattaactttagagatccatgtgttcaggtttagatcatatgacactcgagcacagaagaataatttcaaggaggtcatcttgtaaattaaaggtttagaagaattgcataaaacgtagtaaatggggtctgtcattagcaaaggcaaatctaagcaatcatttttccccccagaagttacttagaaggagaactgggaacacttggggtctctctaactgatggcattcacttcacacagtcgtctatgttatccagagatttttatttcattttacattttagggcacagttctttggggctaattaaaatggggtttgcaggctttttatggtgaagaataatatatctctgtctatagctttcccatggtagcctgataaggctgagagagaaaaatatgtgcagtatctcatcctccccctgtaccaggccatagctttgaagtgtattttgtaaattcaactataggttagtcagaatgctgtttttcgttaattaacttagcctgtgttgatatctcctccttcctggtcacattcaaaccttcccagagtacaaaggggtatgtagaaaggattccagaagaagtaatactttattctctaatgttaatagcttttctggatctcttagtagggggaaagtagaaaatcgagtagaatttggcctcaggtcaataaatgatataaaaacatgtgttctatttatgtatatatatgtatgtttctccaaaaagtgataaaaccaaaatatcactgactcatccctacccatattcttttcataaaacccactcaccaggtacaatagaaacttccctccttgtttgtcagcctcctgttcatgttccccacacacctgaaggtggtagaatcttttcagcctcttagccagtgagctaaatatggctaagcacaggtcataagagcacctaaggccagcatataagccaactacagttcacctttccaaatttggtcctatggatgttgagcatagggaagcaactctcagtattttggattattcaagtgtatgtggtaaaaatgcagatgattgctgctttaccccagggtttattagcatcctacttctgctgggctgcatcattatataatgccacaggcatctagtcaaggtaaagaagccagaaaggttaggcaagaagtgagataaaatcagatcacctttgatcaaaatggttggtgaacctccacatgtccagttctgttgccaaactttccattcagagtatttggtggagtttgaatttgagcaaactaaatgccttcatcttaggtagaaagggcctgaatcttccattttatattcaaacctcattgttatttggcctaagtaaaaagtcagatttcatttccatttacctgagttcgctttaaagagcttttcaaagagagctttatagacacccacaattgtccccaatctcttcatgatgttgcattaatagttgtttttgtccctttcttggaaatgttaatgccaaagttgcctgaacattgggcggttttcttaatttgaagtataaaaattataaagagtaattccaaaggtattaaaagattgtttaacagtatgtgtggtgatgtcattatctccagagaggcttcaagaaatcctttggaaataaaaagttaaatgtttacatttcatgtggtatttcaggtcttcaggttctgattagcttacttttttcctttgtctttggctgatttctgctttgtagataaataataatagccctgagatgtttctaacatttaaataagaaaaaaatcaaatcgaagtcagcctgctggaaaagtgatcacatggcagttgcagtaacttgtatggaaagagaaaatgcaatgagcccagttactgcacttgccactaccatgctgtccatggaaggaataatcagcagttcagttgtcacaagccgcccttgaagaaaacgcagcaaaatattttaaaatgaagatattgcagtccccagagccagtgaaggtttcttttggtaaaatgaaattgtgccattgtcaaagtaccccgtagtgatgagcactgactggttcactggccacattttagttcttcataataataggccacaaaagggctctgtggtttgcctccatgtgcactggcccctccccacccctagggggcactcagtagctgctgagaaggcctgtccacgaggctgttggaacccctccaataaatacttagaggtagtgtatctgatgcttgttttcgtggagaaaattgtattggagaacttaaaacatcacgaatatttttaataggatccgcagacacccaaaggagaagcttggtcttttccaggtatttccaacttgagttcaacccaaagcctttgaaaggaatgcattaccacatgaccacatgctgagaccccatggggtctaacacgggacctaagaaagtctctgcagccagatagtacatggtgtctccacaaaactaggcattctggagattgcccagaaagggatgtgaggggaccgttaagatctgtcttgcttatctcatgcactcacattccttcagcctcctggagttcctgataaaaggaagccagggtgtggacattttttagctattgatttcccaatagcttgtggatcagttgtacacccacacttccttctctgcctaattccgtttttctggaaaaagtagtatgcccatgtatgtgtgtttttcttaacacaggtccatgaaagtttggcttcctggtttgatgtctgttgcgtggcctggaaaccagggagcagcaactattgagatggtttctgtgttcagtgaaaaattctatttcattgagacaattttttctttatccacagtaattttttgacactgtcatcatgaaactacccttaggaaaataagattacctgcaaaaaaaaaaaagaaatgagttatggaataggaacagttatgtgatgattctgaaactttaacttagagcttcattactttaagaatggaaaacaacctctgagtttgatttcccaaagtttcataaagcccctaagctcatgattttcatcaactctttgcccacatagtcatttacctccacagccgtttgttgtcatagaaggggtggtggtgtttggatttgatttttttcaacttgcagtgagaaataggataggtgacaaaaccttacttgttttcttaagacaattcagtgcttgagcatctctgtcagaaatggaatgaaatactgttagccaattagaattattttatgtattgttattgtgttttgctgatttttatatgaaaatataattattcattcttgatctctggaagcaatcattattatgaggatcattttactttggaaacactttcataataaagataagtattaagagtgca

SEQ ID NO: 263293 - protein, 146 aa, Artificial Sequence
  derived and/or modified sequence
MKLHCEVEVISRHLPALGLRNRGKGVRAVLSLCQQTSRSQPPVRAFLLISTLKDKRGTRYELRENIEQFFTKFVDEGKATVRLKEPPVDICLSKDSIWLSYHSIPSLPRFGYRKNLCLWKILSELFHSRNYYHESAFCCPHCGLSR

SEQ ID NO: 263294 - DNA, 441 bp, Artificial Sequence
  derived and/or modified sequence
atgaagctgcactgcgaggtggaggtgatcagcagacacctgcccgccctgggcctgagaaacagaggcaagggcgtgagagccgtgctgagcctgtgccagcagaccagcagaagccagccccccgtgagagccttcctgctgatcagcaccctgaaggacaagagaggcaccagatacgagctgagagagaacatcgagcagttcttcaccaagttcgtggacgagggcaaggccaccgtgagactgaaggagccccccgtggacatctgcctgagcaaggacagcatctggctgagctaccacagcatccccagcctgcccagattcggctacagaaagaacctgtgcctgtggaagatcctgagcgagctgttccacagcagaaactactaccacgagagcgccttctgctgcccccactgcggcctgagcagatag

SEQ ID NO: 263295 - DNA, 441 bp, Artificial Sequence
  derived and/or modified sequence
atgaaactgcattgtgaagtcgaggtcatcagccgccatcttcccgctctgggcctgcggaacagaggcaagggcgtcagggcggtgttgagcctgtgccagcaaacctcccgaagccagcccccagtcagagcctttctgctcatttccacactgaaagataaacggggcacaaggtatgagctgagggaaaatatcgagcagttcttcaccaaattcgtagacgaaggaaaggctacggtgcggctgaaagaacccccagtcgacatttgtctaagcaaggacagcatctggctgtcgtatcacagcattccatcgttacctcggtttggttacaggaaaaacctatgcctgtggaaaatcctgagcgaactgttccattccaggaactattaccacgagtccgccttctgctgtccacattgcggtctctcacgttag

SEQ ID NO: 263296 - DNA, 1690 bp, Artificial Sequence
  derived and/or modified sequence
gagcaggaaggctcggaccggcggctgactcctggaagtctgctgacagaggctcaacacggctcggacgcccttgccccggttcctaagccccaaggcgggcaagtgccggctgatcacctccacctcacagtgtagcttcatctcgcccaacggccacaaccacgtcaagctggctttgaaacttcctccttcccgccacccggcgccgccatcggggtcctcgcgcacgcgggctgcccactgatctgcctgcctgttggactggtccgcgactcgggctgtcttagcaccgtgtctgtatgaagcccgcgggaaacggcttcccttctcccttagcagggccgggttctcgccgtggttgcgtaccgggactgaccacctggatccgggctcgcgcccgggaaaccggcagtcggcgggggcgcaacgtcttttcccccgagcgcgcagctggcagcggtggttgtttctgttcggggaggattccgagggtttcagctgttgacgctttacgcgttgcgggcgcacgtcgggccgctgtttcccgagggaaggcaggtgtgcctctgcgttacagggaaaggcacttagaactgtctgagtggccccgtaagccagcgagggcgcatttcccggcgcggacgggctgctggtggttttggtggctgctctccggaggcacacctggcacgtcgaaggggggctttatatggctgtatttgacttggcaattcctgctgaacaaataatttttcatggcgggtaggtggatggagtgtgactggcttaactgcacctgagacgtggaaagaccgtccagaccgcacaaggccttcgtactcttgattttcttgattgattgaactaggacggggcccggctggggagtgggaagcgcctggggagcaaatgttaagcaggcgctcacggtcggggtcgtggtcttgcctccttaaaatttgtgctctaggcgcctctctcaccttaacctaatcctagccgtatattaaacattttattgtgtctgagttatacttccgtaatggtaaaatgacgttcagaaataccgatttttcaatacaactgtgacaaaatgtgatttattctcaaatgagcgtccctatttacatgttgaacctgaagtgttgtcagttaattcctcattctttgaaacgtaatagttcctggaaaaaagtgattaagataaaattatggccgggcgcggtggctcacgcctgtaatcccagcactttgcggggctgaggcaggcaggtcgcttgagcccaggagttcaagaccagtttgggcaacatggcaaaacccagtctctaagaaaaatacaaaaaaattagccgggcgtggtggcgcgtgtctgtagtcccagctattggggaggctgaggtggcaggatcacttgagcctggggaggtcgagaggctccggtgagctgtaatcgcgcactggcactccagcctgagtgaccccgtctcaaaaaaaaaaaagaaattactttccctccatttagtattcttatatgtacatctagtagagcattaaaacgcgactcagcatttaagcaaaactttatggctaaagagaaaacggacactacaattttcagactattagactttataggagttacctgcttttgttctttgagagggtaataatgtagaaaagataa

SEQ ID NO: 263297 - DNA, 441 bp, Artificial Sequence
  derived and/or modified sequence
atgaagctgcactgtgaggtggaggtgatcagccgccacctgcctgccctgggcctgaggaacagaggcaagggcgtgcgggctgtgctgagcctgtgccagcagaccagccgcagccagccccctgtgcgggccttcctgctgatcagcaccctgaaggacaagaggggcaccaggtatgagctgcgggagaacatcgagcagttcttcaccaagtttgtggatgagggcaaggccaccgtgcggctgaaggagccccctgtggacatctgcctgagcaaggacagcatctggctgagctaccacagcatccccagcctgccccgcttcggctacaggaagaacctgtgcctgtggaagatcctgtctgagctgttccacagcaggaactactaccatgaaagtgccttctgctgcccccactgcggcctgagcaggtag

SEQ ID NO: 263298 - DNA, 957 bp, Artificial Sequence
  derived and/or modified sequence
ccgggcgcgagcccggatccaggtggtcagtcccggtacgcaaccacggcgagaacccggccctgctaagggagaagggaagccgtttcccgcgggcttcatacagacacggtgctaagacagcccgagtcgcggaccagtccaacaggcaggcagatcagtgggcagcccgcgtgcgcgaggaccccgatggcggcgccgggtggcgggaaggaggaagtttcaaagccagcttgacgtggttgtggccgttgggcgagatgaagctacactgtgaggtggaggtgatcagccggcacttgcccgccttggggcttaggaaccggggcaagggcgtccgagccgtgttgagcctctgtcagcagacttccaggagtcagccgccggtccgagccttcctgctcatctccaccctgaaggacaagcgcgggacccgctatgagctaagggagaacattgagcaattcttcaccaaatttgtagatgaggggaaagccactgttcggttaaaggagcctcctgtggatatctgtctaagtaaggattccatatggctctcatatcattccattccatctctgccaagatttggataccgcaaaaatttgtgtttgtggaagattctgtctgaactctttcattcaaggaactactaccatgaatctgcattctgttgcccacactgtggtcttagtagataatttgggtggtactgaagcacctattatctcttatttctgttctctaggctgttatgttaattcctctgatatgttaaagtaatgggtgagaccagaaaaagaaatttcaataacagatcagtttggggtgcatgtatgattttgcagcgtcaaattggagtaagggaagatttctgtatacttgctggagaggaggaatgtgtatagttactcatttagatgactccaaaacttttattaaaaccaattttagttt

SEQ ID NO: 263299 - DNA, 441 bp, Artificial Sequence
  derived and/or modified sequence
atgaagctgcactgcgaggtggaggtgatcagccggcacctgcccgcacttggcttgcggaataggggcaagggcgttcgcgcagtgctgagcctatgtcagcagacctcacgcagtcagcccccagttcgggcgtttttgttgatcagtacactgaaggacaaaagaggaacacggtatgagctgcgagagaacatcgagcagtttttcacaaaatttgtggacgaagggaaggccacggtacggctgaaggagcctcccgtggacatttgccttagcaaggatagtatttggctgtcgtaccacagtatcccttctctgccaagatttggttaccgtaaaaatttatgcctttggaaaatcttatcagaactgtttcattctaggaactactatcacgagagtgcattctgctgcccgcactgcggactaagcaggtag

SEQ ID NO: 263300 - DNA, 441 bp, Artificial Sequence
  derived and/or modified sequence
atgaagttgcattgtgaggtcgaagttatctcccggcacctgccggcactgggtttgagaaaccggggaaaaggcgtgcgggcagtgttgagcctgtgccagcagacatctagaagccaaccgccagttagggcatttctgttgatttcaactctgaaagacaagaggggcactaggtatgaacttagggagaacatcgagcagttttttacaaaattcgtggacgaagggaaagctactgtgcgactgaaagaaccacctgtggacatttgcctctccaaggactccatctggctgtcctatcacagtatcccttcactcccccgattcggctatcggaagaacctatgcttatggaaaatccttagcgagctatttcactccaggaactattaccatgaatctgccttttgctgtcctcattgtggcctgtccagatag

SEQ ID NO: 263301 - protein, 495 aa, Artificial Sequence
  derived and/or modified sequence
MAGKVRSLLPPLLLAAAGLAGLLLLCVPTRDVREPPALKYGIVLDAGSSHTSMFIYKWPADKENDTGIVGQHSSCDVPGGGISSYADNPSGASQSLVGCLEQALQDVPKERHAGTPLYLGATAGMRLLNLTNPEASTSVLMAVTHTLTQYPFDFRGARILSGQEEGVFGWVTANYLLENFIKYGWVGRWFRPRKGTLGAMDLGGASTQITFETTSPAEDRASEVQLHLYGQHYRVYTHSFLCYGRDQVLQRLLASALQTHGFHPCWPRGFSTQVLLGDVYQSPCTMAQRPQNFNSSARVSLSGSSDPHLCRDLVSGLFSFSSCPFSRCSFNGVFQPPVAGNFVAFSAFFYTVDFLRTSMGLPVATLQQLEAAAVNVCNQTWAQLQARVPGQRARLADYCAGAMFVQQLLSRGYGFDERAFGGVIFQKKAADTAVGWALGYMLNLTNLIPADPPGLRKGTDFSSWVVLLLLFASALLAALVLLLRQVHSAKLPSTI

SEQ ID NO: 263302 - DNA, 1488 bp, Artificial Sequence
  derived and/or modified sequence
atggccggaaaagtgcgctccttgttgccgccactactgctggccgctgccggactggcaggcctcctgctactctgtgtgcctaccagagacgtgagggagcccccagctctcaaatacgggatcgtgctggacgctggttccagccacaccagtatgttcatttacaagtggccggccgacaaggagaacgataccggcatagtgggacagcattcctcttgtgacgttccggggggcggtatctccagctatgcagataatcctagtggagcgtcccagagcctggtcggctgcttggagcaggccctccaggatgtccccaaggagcggcatgcaggcactccgctgtatctgggagctacggccggaatgcgcctgctgaacttgacaaaccctgaagcctcaacgagtgtcctgatggccgtaacccacacgctcacccaatatccttttgactttcgaggtgcccggattttgtccggacaggaggagggggttttcggctgggtgactgcgaattaccttctggagaattttattaagtacggttgggtgggccgttggttcagaccccgcaagggcaccctgggcgcaatggacctgggtggggcctcaacacagattacattcgaaaccaccagcccagccgaggacagagcatctgaggtccagctgcatctgtatggacaacactacagggtatacactcactcctttctctgctacggcagggatcaggttcttcagcgtttgctggcttctgcactgcagacacatggattccacccatgctggccgcgcggtttctccactcaggtgttgcttggtgacgtttatcaaagcccttgcacgatggcacaaagaccccaaaattttaacagctccgcccgggtttctcttagtggctcttcagatccacatctttgcagggacctggtctctggtctgttttctttctccagctgtccattttcgagatgttcattcaatggcgtctttcagccgccggtggctggaaacttcgtggccttttccgcctttttttataccgtggatttcctgcgtactagcatgggtctgccagttgccaccctgcaacagttagaggcagctgctgtcaatgtgtgtaaccagacgtgggctcaactgcaggcccgcgtgcctggtcaacgcgcccgactggccgactattgtgctggagctatgttcgtgcaacagctgttatcccgcggatacggattcgatgagcgagcatttggaggtgtgatcttccaaaagaaggctgcagacacagccgtaggttgggcattggggtacatgcttaacctgacgaacctaatccctgccgatccacctggcttacgaaaagggaccgatttctcctcgtgggtggtacttctattgctctttgcctcggccctgttggcggctctggtgctcctgctgcgacaggtgcacagtgctaaactccccagcaccatctag

SEQ ID NO: 263303 - DNA, 1488 bp, Artificial Sequence
  derived and/or modified sequence
atggccggcaaggtgcgcagcctgctgccccccctgctgctggccgctgctggcctggccggcctgctgctgctgtgtgtgcccaccagagatgtgcgggagcccccagccctgaagtatggcatcgtgctggatgctggcagcagccacacctccatgttcatctacaagtggccagctgacaaggaaaatgacaccggcatcgtgggccagcacagcagctgtgatgtgcctgggggcggcatcagcagctatgctgacaaccccagcggggccagccagagcctggtgggctgcctggagcaggccctgcaggatgtgcccaaggagagacatgctggcacccccctgtacctgggcgccacagctggcatgaggctgctgaacctgaccaaccctgaggccagcacctctgtgctgatggctgtgacccacaccctgacccagtacccctttgacttccggggggcccgcatcctgagcggccaggaggagggcgtgtttggctgggtgacagccaactacctgctggagaacttcatcaagtatggctgggtgggccgctggttccggcccaggaagggcaccctgggcgccatggacctgggcggggccagcacccagatcacctttgagaccaccagccctgctgaggaccgggccagcgaggtgcagctgcacctgtatggccagcactacagagtgtacacccacagcttcctgtgctacggccgggaccaggtgctgcagaggctgctggccagcgccctgcagacccacggcttccacccctgctggccccggggcttcagcacccaggtgctgctgggagatgtgtaccagagcccctgcaccatggcccagaggccccagaacttcaacagcagcgcccgggtgtccctgagcggcagcagtgacccccacctgtgccgggacctggtgtctggcctcttctccttcagcagctgccccttcagccgctgcagcttcaatggagtcttccagccccctgtggccggcaactttgtggccttcagcgccttcttctacacagtggacttcctgcggacctccatgggcctgcctgtggccaccctgcagcagctggaggccgctgctgtgaatgtgtgcaaccagacctgggcccagctgcaggcccgggtgcccggccagagggcccggctggccgactactgtgccggggccatgtttgtgcagcagctgctgagccggggctacggctttgatgagcgggccttcggcggcgtcatcttccagaagaaggctgctgacacagctgtgggctgggccctgggctacatgctgaacctgaccaacctgatcccagctgaccccccaggcctgaggaaaggaacagacttcagctcctgggtggtgctgctgctgctgtttgccagcgccctgctggccgccctggtgctgctgctgcggcaggtgcacagcgccaagctgcccagcaccatctag

SEQ ID NO: 263304 - DNA, 1488 bp, Artificial Sequence
  derived and/or modified sequence
atggccggcaaggtgcggagcctgctgccccccctgctgctggccgcagcagggcttgccggcttattgctgctgtgcgtccctactcgggacgtgcgagagcccccagctctgaagtatggaattgtcctagacgctggatcctcgcacacatcaatgttcatttacaagtggcccgcagacaaggaaaatgacactggcatcgttggccaacatagctcatgtgacgtgccgggtggtggaatcagctcatacgcagataatcctagtggggccagccagtcgctggtcggctgcttggagcaagcactgcaggatgtgcccaaggagcgccatgccggtacacccctgtacctgggggcaacagccggaatgcggctgctcaacctgactaaccccgaagcgtccacgtcagttctcatggcagtaactcacaccctgactcagtacccgtttgactttcgaggggcccgtatcttgtccggacaagaggagggcgtctttggctgggtgaccgcgaactatttgctcgagaacttcatcaaatacggttgggtcggcagatggttccgccctagaaagggcacattaggcgccatggacctggggggcgcttccacccagatcacattcgagaccacatcgcccgcggaagacagagctagcgaggtacagctgcatctttacggccaacattatcgcgtttatacccatagcttcctgtgttatgggagggatcaggtgctgcagaggctcctcgcctcagctctgcaaacccacggtttccacccttgttggcctcggggcttcagtactcaggtgctcctgggtgatgtttaccagtcaccttgtactatggcacaaagaccccagaatttcaattcttccgctagagtgtcattatctggaagcagcgatccacacctgtgcagagatctggtgtccgggctgtttagcttctcaagttgcccattctcccgttgcagtttcaacggcgtattccagcctcctgtggccggtaactttgtggctttttctgctttcttctatacagtcgatttccttcggacatctatgggacttccagtagcaaccctacagcagttggaagctgccgctgtgaatgtgtgtaaccagacttgggcacaactacaagctagagtgccaggtcagcgggcccgtctcgcagattattgtgctggggccatgtttgttcagcaattactcagtaggggctacggattcgatgagcgggcctttggcggcgttatcttccagaagaaggccgccgatacagctgttggctgggccctcggctatatgttgaacctgactaatctcattccagccgaccctcctggtttgagaaaggggacagacttttcctcatgggtggtgctacttctcttgtttgccagtgcactgctggccgccctcgtacttttactccgtcaagtccacagtgccaagctgccgagtactatctag

SEQ ID NO: 263305 - DNA, 1488 bp, Artificial Sequence
  derived and/or modified sequence
atggctggcaaagtccgatccttactcccgccattgttacttgccgcagctggactggcaggactgttacttctatgcgtccctacgcgggatgtaagagaaccgcctgctcttaagtatggcatcgtgctggatgccggatcctcacacactagcatgtttatctacaagtggcccgcagacaaggaaaatgatacaggcatcgtgggtcagcatagcagttgcgatgtgccaggaggcggaattagtagctatgcagataatccttctggggctagtcaaagcctcgtgggctgcctggagcaagcactccaggatgtccccaaggagagacacgcaggcacacccctttacttaggtgctactgctgggatgcggcttttaaacctcactaatcctgaggcgagtacatccgttcttatggccgtgacccataccctgactcaatatccgttcgatttccgaggggcacgtatcttatcaggccaggaggagggcgtgttcggatgggtcacagcaaactacctgctggagaatttcattaagtacgggtgggtaggacgctggtttaggccaaggaaggggaccttaggtgctatggacttaggcggagcgtccacacagattacatttgagactaccagtccggctgaggacagggcctctgaggtccagctacatctgtacggacagcactaccgcgtatatacccactctttcctctgttacggcagggatcaggttctacagcggctgctggcttcagcactgcaaacgcatggatttcatccctgctggccgagagggttttctacacaggtgctgctaggagatgtgtatcagagtccctgtactatggcccagcgcccacaaaacttcaacagcagcgcgagggtgtctctttccgggagcagcgacccccatctttgtagggatttggtctccggcctcttttcattttcttcctgcccattcagccgctgttcctttaatggcgtttttcagccccctgtagccggtaactttgtagctttttcagcgtttttttataccgtagactttctacgaacttcgatgggactgccggtcgcaacacttcagcaactggaagcggctgcggtgaatgtatgtaaccagacctgggctcagctccaggcgagagtgcctggccagcgtgctcgcctggctgattattgcgctggggctatgttcgtacagcagttgttgtctcgaggctacgggttcgacgagcgggcatttggaggcgtaattttccagaaaaaggccgcagacactgcagtcgggtgggccctgggctatatgctgaacttaactaacttaatccccgcagatccaccgggattgcgcaagggtaccgacttctcaagttgggtggttttgttgctcctttttgccagcgctcttctggccgcactggtactgctgcttaggcaggtccacagcgcaaaactgccctccacaatttag

SEQ ID NO: 263306 - DNA, 1488 bp, Artificial Sequence
  derived and/or modified sequence
atggccggcaaggtgagaagcctgctgccccccctgctgctggccgccgccggcctggccggcctgctgctgctgtgcgtgcccaccagagacgtgagagagccccccgccctgaagtacggcatcgtgctggacgccggcagcagccacaccagcatgttcatctacaagtggcccgccgacaaggagaacgacaccggcatcgtgggccagcacagcagctgcgacgtgcccggcggcggcatcagcagctacgccgacaaccccagcggcgccagccagagcctggtgggctgcctggagcaggccctgcaggacgtgcccaaggagagacacgccggcacccccctgtacctgggcgccaccgccggcatgagactgctgaacctgaccaaccccgaggccagcaccagcgtgctgatggccgtgacccacaccctgacccagtaccccttcgacttcagaggcgccagaatcctgagcggccaggaggagggcgtgttcggctgggtgaccgccaactacctgctggagaacttcatcaagtacggctgggtgggcagatggttcagacccagaaagggcaccctgggcgccatggacctgggcggcgccagcacccagatcaccttcgagaccaccagccccgccgaggacagagccagcgaggtgcagctgcacctgtacggccagcactacagagtgtacacccacagcttcctgtgctacggcagagaccaggtgctgcagagactgctggccagcgccctgcagacccacggcttccacccctgctggcccagaggcttcagcacccaggtgctgctgggcgacgtgtaccagagcccctgcaccatggcccagagaccccagaacttcaacagcagcgccagagtgagcctgagcggcagcagcgacccccacctgtgcagagacctggtgagcggcctgttcagcttcagcagctgccccttcagcagatgcagcttcaacggcgtgttccagccccccgtggccggcaacttcgtggccttcagcgccttcttctacaccgtggacttcctgagaaccagcatgggcctgcccgtggccaccctgcagcagctggaggccgccgccgtgaacgtgtgcaaccagacctgggcccagctgcaggccagagtgcccggccagagagccagactggccgactactgcgccggcgccatgttcgtgcagcagctgctgagcagaggctacggcttcgacgagagagccttcggcggcgtgatcttccagaagaaggccgccgacaccgccgtgggctgggccctgggctacatgctgaacctgaccaacctgatccccgccgacccccccggcctgagaaagggcaccgacttcagcagctgggtggtgctgctgctgctgttcgccagcgccctgctggccgccctggtgctgctgctgagacaggtgcacagcgccaagctgcccagcaccatctag

SEQ ID NO: 263307 - DNA, 2095 bp, Artificial Sequence
  derived and/or modified sequence
ccgcactctccgggtccacgcatcgtcctcccgcgcgcccgcccgcccatggccgggaaggtgcggtcactgctgccgccgctgctgctggccgccgcgggcctcgccggcctcctactgctgtgcgtccccacccgcgacgtccgggagccgcccgccctcaagtatggcatcgtcctggacgctggttcttcacacacgtccatgtttatctacaagtggccggcagacaaggagaacgacacaggcattgtgggccagcacagctcctgtgatgttccaggtgggggcatctccagctatgcagacaacccttctggggccagccagagtcttgttggatgcctcgaacaggcgcttcaggatgtgcccaaagagagacacgcgggcacacccctctacctgggagccacagcgggtatgcgcctgctcaacctgaccaatccagaggcctcgaccagtgtgctcatggcagtgactcacacactgacccagtacccctttgacttccggggtgcacgcatcctctcgggccaggaagagggggtgtttggctgggtgactgccaactacctgctggagaacttcatcaagtacggctgggtgggccggtggttccggccacggaaggggacactgggggccatggacctggggggtgcctctacccagatcacttttgagacaaccagtccagctgaggacagagccagcgaggtccagctgcatctctacggccagcactaccgagtctacacccacagcttcctctgctatggccgtgaccaggtcctccagaggctgctggccagcgccctccagacccacggcttccacccctgctggccgaggggcttttccacccaagtgctgctcggggatgtgtaccagtcaccatgcaccatggcccagcggccccagaacttcaacagcagtgccagggtcagcctgtcagggagcagtgacccccacctctgccgagatctggtttctgggctcttcagcttctcctcctgccccttctcccgatgctctttcaatggggtcttccagcccccagtggctgggaactttgtggccttctctgccttcttctacactgtggactttttgcggacttcgatggggctgcccgtggccaccctgcagcagctggaggcagccgcagtgaatgtctgcaaccagacctgggctcagctgcaagctcgggtgccagggcaacgggcccgcctggccgactactgcgccggggccatgttcgtgcagcagctgctgagtcgcggctacggcttcgacgagcgcgccttcggcggcgtgatcttccagaagaaggccgcggacactgcagtgggctgggcgctcggctacatgctgaacctgaccaacctgatccccgccgacccgccggggctgcgcaagggcacagacttcagctcctgggtcgtcctcctgctgctcttcgcctccgcgctcctggctgcgcttgtcctgctgctgcgtcaggtgcactccgccaagctgccaagcaccatttaggggccgacgggggcagctgccccatccctcccccaacccctgtatccccaccccgtactcccacccctcccacaacccctgtacctcccacccctgtatccccacccctccacccacccctctcccaacctctctccccgcccctgtatcctgcattcctccacccaccctctatcccccaccgctccaccccaccactgtcttctccatccttccaccccaccctcagcgtctctgcccctaaggcagcccaggaaataggaactgagactctggtacccacaggagcctgggtgggcaaagagcgctcaatccagctccttgaacccctccagcccgcttcagcctgggcatcactgcaggccccgtgctcctcctcctcctcctcagggctgggtctccagagagtggggccttggtcctgagaatcagcccttagaggctccttctgtgtagtctgggtctgtactggggagggtcacagcccacgggctggcagccagcccagcacctacttgtaaaaattttgtaataaaaagtttttcctagagacgtgaaa

SEQ ID NO: 263308 - protein, 168 aa, Artificial Sequence
  derived and/or modified sequence
MSLTHRLHLCKYWGCAVSNVCRFWEGRPLPLMIVVPYTLPVSLPVGSCVIITGTPILTFVKDPQLEVNFYTGMDEDSDIAFQFRLHFGHPAIMNSCVFGIWRYEEKCYYLPFEDGKPFELCIYVRHKEYKVMVNGQRIYNFAHRFPPASVKMLQVFRDISLTRVLISD

SEQ ID NO: 263309 - DNA, 1082 bp, Artificial Sequence
  derived and/or modified sequence
gctgcattacagacacagacctgcaaacatctatggttgtgacagagtttctttctgacacctgagtctttctcctgctgcacggaaagcttgctgggaggggcttggaatctggcatgaagccaaagggcatctctgagttgcagcatttaaatgatcccactcagagattcacacagaagactggacacaattccgaagagctgcccagaaggagagaacaatgtcatcactacccagtggcagacacctttcaccccagctacacaagagggggcagatgtgtgaggatcactgcagtccaggagttcgatgtttcagtgagctgtgattgcaccactgcatatcagcctgggtgacagagcaagaccctatctcaaaaatacagaaaaatcatcaaccacttgcagtcgtcgtagaaatcaatcattccctccagttatgtccctgacccacaggcttcatttgtgcaagtactggggctgtgctgtcagtaatgtgtgccgcttctgggaaggacgtccattgcccttgatgattgtggtaccatacacactgcctgtttccttgcctgttggttcgtgcgtgataatcacagggacaccgatcctcacttttgtcaaggacccacagctggaggtgaatttctacactgggatggatgaggactcagatattgctttccaattccgactgcactttggtcatcctgcaatcatgaacagttgtgtgtttggcatatggagatatgaggagaaatgctactatttaccctttgaagatggcaaaccatttgagctgtgcatctatgtgcgtcacaaggaatacaaggtaatggtaaatggccaacgcatttacaactttgcccatcgattcccgccagcatctgtgaagatgctgcaagtcttcagagatatctccctgaccagagtgcttatcagcgattgagggagatgatcagactcctcattgttgaggaatccctctttctacctgaccatgggattcccagagcctactaacagaataatccctcctcaccccttcccctacacttgatcattaaaacagcaccaaacttc

SEQ ID NO: 263310 - DNA, 507 bp, Artificial Sequence
  derived and/or modified sequence
atgtctcttactcatcgactgcacctctgtaagtactggggttgtgctgttagcaatgtgtgccggttctgggagggacgcccccttccactgatgatcgtggttccatatacactccctgtgtccctgccggtgggctcgtgtgtaatcataacaggtacgccaattttaacattcgtaaaggatccgcagcttgaggttaacttttacactggcatggatgaggactctgacatcgccttccaattccgtctgcactttggacatccagccattatgaactcatgtgttttcggaatctggagatatgaagaaaagtgttattaccttccttttgaagatgggaaaccttttgaactgtgtatttatgtacgccacaaggaatataaagtaatggtaaatggccagcgtatttacaatttcgctcatcgctttcctcctgctagtgtgaaaatgctgcaggtgttccgcgacattagtctcacccgggtgttaatctccgattag

SEQ ID NO: 263311 - DNA, 507 bp, Artificial Sequence
  derived and/or modified sequence
atgagcctgacccaccggctgcacctgtgcaagtactggggctgtgctgtgtccaatgtgtgccgcttctgggagggccggcccctgcccctgatgattgtggtgccctacaccctgcctgtgtccctgcctgtgggcagctgtgtgatcatcaccggcacccccatcctgacctttgtgaaggacccccagctggaggtgaacttctacacaggcatggatgaagattctgacatcgccttccagttccggctgcacttcggccacccagccatcatgaacagctgtgtgtttggcatctggaggtatgaggagaagtgctactacctgccctttgaagatggcaagccctttgagctgtgcatctacgtgcgccacaaggagtacaaggtgatggtgaatggccagaggatctacaactttgcccaccgcttccccccagcctctgtgaagatgctgcaggtgttccgggacatcagcctgaccagggtgctgatcagtgactag

SEQ ID NO: 263312 - DNA, 507 bp, Artificial Sequence
  derived and/or modified sequence
atgagcctgacccaccggctgcacctgtgcaagtactggggctgcgcagttagtaacgtgtgcaggttctgggagggacgtcctctgcctctgatgatcgtggtgccatacacactgcccgtctccctgccagtagggtcctgcgttattatcacagggacaccaatcctaacattcgtcaaagatccccagctggaggtgaacttctacaccgggatggatgaggattccgacatcgcgtttcagttccgcctgcacttcggtcaccctgccatcatgaatagctgtgtattcgggatttggagatacgaagagaaatgttactatctgccgtttgaagacggtaagccgtttgagctgtgcatttacgtgagacacaaagaatacaaggtgatggtgaacggtcagcgaatctacaatttcgcgcatagattccctcccgcctccgtaaagatgcttcaggtcttcagagacatttctttaaccagggtgcttatcagtgattag

SEQ ID NO: 263313 - DNA, 507 bp, Artificial Sequence
  derived and/or modified sequence
atgagccttactcaccgccttcacctgtgtaaatactggggatgcgcagtaagcaatgtgtgccgattctgggaaggccgtcccctacctcttatgatcgtcgttccatacacattgcctgtgagcctcccagttggaagctgtgttatcattacagggactccgatcctgaccttcgtaaaggatccgcagttggaagtgaacttttataccggcatggacgaagatagtgatattgccttccagttccgactacactttggccatcccgctataatgaattcttgcgtttttggcatttggaggtatgaagagaaatgttactacttgcctttcgaagacggaaagcccttcgagttgtgtatttatgttaggcacaaagagtacaaagtcatggttaacggccaacgtatttacaactttgctcatcgattccctccagcttcagttaagatgctgcaggtgttcagggacattagtctgacccgagtgcttatctcagattag

SEQ ID NO: 263314 - DNA, 507 bp, Artificial Sequence
  derived and/or modified sequence
atgagcctgacccacagactgcacctgtgcaagtactggggctgcgccgtgagcaacgtgtgcagattctgggagggcagacccctgcccctgatgatcgtggtgccctacaccctgcccgtgagcctgcccgtgggcagctgcgtgatcatcaccggcacccccatcctgaccttcgtgaaggacccccagctggaggtgaacttctacaccggcatggacgaggacagcgacatcgccttccagttcagactgcacttcggccaccccgccatcatgaacagctgcgtgttcggcatctggagatacgaggagaagtgctactacctgcccttcgaggacggcaagcccttcgagctgtgcatctacgtgagacacaaggagtacaaggtgatggtgaacggccagagaatctacaacttcgcccacagattcccccccgccagcgtgaagatgctgcaggtgttcagagacatcagcctgaccagagtgctgatcagcgactag

SEQ ID NO: 263315 - protein, 187 aa, Artificial Sequence
  derived and/or modified sequence
MERQEESLSARPALETEGLRFLHTTVGSLLATYGWYIVFSCILLYVVFQKLSARLRALRQRQLDRAAAAVEPDVVVKRQEALAAARLKMQEELNAQVEKHKEKLKQLEEEKRRQKIEMWDSMQEGKSYKGNAKKPQEEDSPGPSTSSVLKRKSDRKPLRGGGYNPLSGEGGGACSWRPGRRGPSSGG

SEQ ID NO: 263316 - DNA, 570 bp, Artificial Sequence
  derived and/or modified sequence
atggagagacaggaggagagcctgagcgccagacccgccctggagaccgagggcctgagattcctgcacaccaccgtgggcagcctgctggccacctacggctggtacatcgtgttcagctgcatcctgctgtacgtggtgttccagaagctgagcgccagactgagagccctgagacagagacagctggacagagccgccgccgccgtggagcccgacgtggtggtgaagagacaggaggccctggccgccgccagactgaagatgcaggaggagctgaacgcccaggtggagaagcacaaggagaagctgaagcagctggaggaggagaagagaagacagaagatcgagatgtgggacagcatgcaggagggcaagagctacaagggcaacgccaagaagccccaggaggaggacagccccggccccagcaccagcagcgtgctgaagagaaagagcgacagaaagcccctgagaggcggcggctacaaccccctgagcggcgagggcggcggcgcctgcagctggagacccggcagaagaggccccagcagcggcggctgaggctag

SEQ ID NO: 263317 - DNA, 564 bp, Artificial Sequence
  derived and/or modified sequence
atggagagacaggaggagagcctgagcgccagacccgccctggagaccgagggcctgagattcctgcacaccaccgtgggcagcctgctggccacctacggctggtacatcgtgttcagctgcatcctgctgtacgtggtgttccagaagctgagcgccagactgagagccctgagacagagacagctggacagagccgccgccgccgtggagcccgacgtggtggtgaagagacaggaggccctggccgccgccagactgaagatgcaggaggagctgaacgcccaggtggagaagcacaaggagaagctgaagcagctggaggaggagaagagaagacagaagatcgagatgtgggacagcatgcaggagggcaagagctacaagggcaacgccaagaagccccaggaggaggacagccccggccccagcaccagcagcgtgctgaagagaaagagcgacagaaagcccctgagaggcggcggctacaaccccctgagcggcgagggcggcggcgcctgcagctggagacccggcagaagaggccccagcagcggcggctag

SEQ ID NO: 263318 - DNA, 570 bp, Artificial Sequence
  derived and/or modified sequence
atggagcgacaggaagagtcactgtccgctcgaccagctctcgagaccgagggtctccgatttttgcatacgactgtgggctcattgttagccacctacggatggtacatcgtgttctcctgtattcttctttacgtcgtatttcagaagctgtctgcacggttgagagcgctgcgccagagacagcttgatcgggctgccgctgctgttgaaccagatgtggtggtaaaacgccaggaagccctggccgccgcccgcctgaagatgcaagaggagcttaatgcgcaagtggaaaaacataaagagaaactgaagcaactggaggaagaaaagagaaggcagaaaatagagatgtgggattccatgcaggaagggaagtcttataaaggcaacgcaaaaaaaccccaggaggaagactcccctgggccttcaacgagttctgtgctcaaacgcaaaagtgatcgaaaaccactacgaggcggcggttataatcctctgagtggtgaaggtgggggggcttgctcttggcggccagggcgcagaggccccagttccgggggctgaggctag

SEQ ID NO: 263319 - DNA, 570 bp, Artificial Sequence
  derived and/or modified sequence
atggagagacaggaagaatccctgtcagcccggcccgccctggagacggaaggcttgcgttttctgcatacaacagtagggtctctgcttgctacttatggatggtatattgtcttttcctgtatcctgctgtacgtcgtctttcagaagctttcagccaggttgagggctctcagacagcgccaactcgatcgggccgcggcagcggtggaaccagacgtggtggttaagaggcaggaagcactggccgcagccaggctcaagatgcaggaggagctgaacgcccaggttgagaaacacaaagagaaactgaaacaactggaagaagagaaaagacgacagaaaatcgagatgtgggactcaatgcaggaaggaaaatcttataaggggaatgcaaaaaagccgcaggaagaggattcccctggcccctctacctcttctgtattgaagaggaaatccgacaggaagccactgcggggcgggggatataaccccctgtctggcgaggggggtggcgcatgtagctggcgccccggtcggcgagggccatcttcgggaggctgaggatag

SEQ ID NO: 263320 - DNA, 564 bp, Artificial Sequence
  derived and/or modified sequence
atggaacggcaggaggaaagtctttccgccagacccgccctcgagaccgagggcctgcgctttctgcacactactgtgggctccctattggccacatatgggtggtacattgtcttctcgtgtatcctgctgtacgttgtgttccagaagctttccgccagattacgtgctctacgtcagcgtcagctggacagggccgctgctgcagttgaacccgatgttgttgtcaaaaggcaggaggcactagccgccgcgaggttaaagatgcaagaagagctgaacgcacaggttgaaaaacacaaggaaaaactcaaacagctggaagaggaaaagaggaggcagaaaattgagatgtgggattctatgcaggagggcaaatcttataagggcaatgcgaagaaaccacaggaggaagacagcccggggcccagcacgagcagtgttctgaagaggaagagcgaccgtaagcctttaaggggcgggggctataaccctctgtccggcgagggcggaggtgcctgttcctggcgccccggccggcgtggccctagcagcggcggctag

SEQ ID NO: 263321 - DNA, 564 bp, Artificial Sequence
  derived and/or modified sequence
atggagcggcaggaggagagcctgagcgcccggcctgccctggagacagagggcctgcgcttcctgcacaccaccgtgggcagcctgctggccacctacggctggtacatcgtgttcagctgcatcctgctgtatgtggtgttccagaagctgagcgcccggctgcgggccctgcggcagaggcagctggacagagctgctgctgctgtggagccagatgtggtggtgaagaggcaggaggccctggccgccgcccggctgaagatgcaggaggagctgaatgcccaggtggagaagcacaaggagaagctgaagcagctggaggaggagaagaggcggcagaagattgagatgtgggacagcatgcaggagggcaagagctacaagggaaatgccaagaagccccaggaggaggacagccctggccccagcaccagctctgtgctgaagaggaagagtgacaggaagcccctgcggggcggcggctacaaccccctgtctggagagggcggcggggcctgctcctggaggcctggccggcggggccccagcagcggcggctag

SEQ ID NO: 263322 - DNA, 570 bp, Artificial Sequence
  derived and/or modified sequence
atggagcggcaggaggagagcctgagcgcccggcccgccctggagaccgagggtctcagatttctacataccacagttgggtcactgctcgcaacgtatgggtggtacatcgtcttttcctgtatactgctgtatgtcgtttttcagaagctcagcgcccgcctcagagctctcagacaacggcagctagaccgcgcggctgccgcagttgagccagacgtggtggtcaagaggcaagaagctttggcggctgcccgcctgaagatgcaagaagagctgaacgctcaggtcgaaaagcataaagaaaagctgaagcagttggaggaggaaaaacgaagacagaagatagaaatgtgggacagcatgcaagagggcaaatcatacaaagggaatgcgaaaaagcctcaggaagaggacagccctgggccgtcaacctcctccgtcctgaagagaaaatccgacagaaagcctctgagaggggggggttataacccgttgtccggagaaggcggcggagcatgctcatggaggccgggcagaagagggccctctagtggcggatgaggctag

SEQ ID NO: 263323 - DNA, 570 bp, Artificial Sequence
  derived and/or modified sequence
atggagcggcaggaggagagcctgagcgcccggcccgccctggagacagaaggcttgagattcctgcatactacggtgggatcactgttagcaacatatggctggtacatcgtgttctcttgcattttgttatacgtggtattccagaagctgtcggcccggctgagggctcttcgacaacgtcaactggacagagcagctgccgccgtggagccagatgttgtcgttaaaagacaggaggctctggctgctgcgaggttgaagatgcaggaagagctcaatgcgcaggtggagaagcacaaggagaagcttaaacaacttgaagaggagaagcgccgacaaaagatcgagatgtgggacagcatgcaagagggcaagtcttataaaggtaatgcaaaaaagccccaggaggaggatagcccaggccccagtacctcatccgtgcttaaaagaaaatccgacagaaagcctctcagggggggcggatataatccactttcaggcgaagggggaggtgcctgttcctggaggccagggcgccgcggaccatctagtggcggatgaggctag

SEQ ID NO: 263324 - DNA, 564 bp, Artificial Sequence
  derived and/or modified sequence
atggagcggcaggaggagagcctgagcgcccggcccgccctggagactgaaggcctccgcttcttgcatacgacggtcggttccttgctggcaacgtatggatggtacatcgttttctcttgtattctcctgtacgtggtgtttcagaagctctcagcacggctgagggcccttcgccagaggcaactggacagggccgctgctgctgtggagcctgacgtcgttgtaaagcgccaggaggccctggctgccgctcgtctgaaaatgcaggaggagctcaacgcccaggtcgagaaacacaaggaaaaactgaaacagctggaagaggagaagcgtcgtcagaagatcgagatgtgggatagcatgcaggaaggtaaatcctataaggggaacgcgaaaaaaccacaggaagaagactctccagggccctcaacatcgagcgtgttaaaaaggaaaagcgaccgaaaacccctgaggggggggggttacaaccctttgtctggggaggggggtggcgcttgttcatggaggccagggagaagaggcccatctagcggaggctag

SEQ ID NO: 263325 - DNA, 570 bp, Artificial Sequence
  derived and/or modified sequence
atggaacgccaggaggaatcgctttccgctcgacccgctctggagactgagggcctccgtttcctacatactacagtggggtcccttctggccacctatggatggtacatcgtgttcagctgtattctgctgtatgtggtgttccaaaagttgtcagcccgtctgcgagctctgcggcagaggcaactggaccgggcagcagcagccgtagaacccgatgtggtcgttaagcgtcaagaagcccttgccgcagccaggctcaagatgcaggaggaactcaatgcccaagtggaaaaacacaaggaaaagctgaagcagcttgaggaggaaaaacggagacagaagattgaaatgtgggattcaatgcaggaaggtaagtcttacaaaggcaatgcgaagaaaccgcaagaggaagattcaccgggtccctctacaagtagcgtgctgaaaaggaaaagtgatagaaaaccactgcggggaggaggatataacccactgagtggcgagggcggaggcgcttgctcttggcggcctggcaggcgagggcctagctccgggggatgaggctag

SEQ ID NO: 263326 - DNA, 570 bp, Artificial Sequence
  derived and/or modified sequence
atggaacgccaggaggagtccctgagtgctcgtcctgcccttgagaccgagggactgcggttcctgcatacaactgtggggagcctgttggccacatatgggtggtacattgtgttctcttgtattttgttgtacgtcgtcttccagaagctgtctgccagactcagagctctccgccagaggcagcttgatcgcgcagccgcagctgtagagccggacgtcgtagtgaaaagacaggaggctttggctgctgcgcgactgaaaatgcaggaggagctcaacgcacaagtggagaagcacaaggaaaaactgaaacaactggaggaggaaaagagaaggcagaagatcgaaatgtgggactccatgcaggaaggtaaaagttataaaggcaacgccaagaagccgcaggaggaggactcacctggccctagcacttcatccgtattaaaacggaagagcgatcgcaaacccctgcggggtgggggatacaatcctctcagcggggagggcggtggcgcttgctcttggcgcccaggcaggagaggaccctcatctggtggctgagggtag

SEQ ID NO: 263327 - DNA, 564 bp, Artificial Sequence
  derived and/or modified sequence
atggaacgtcaggaggagtcccttagcgctagaccggctttggagacagaaggtctgagattcttacataccacagtaggtagcctgctagccacgtacggttggtacatcgtattctcatgcatactcctttatgtggtcttccagaaactctcggccaggctgcgtgctctgagacagcggcaactcgacagggccgctgctgcagtagagccagatgtggttgtcaagcgccaggaggcactggccgctgccaggctcaagatgcaagaagagctcaacgcccaagtcgagaagcataaggagaaactgaagcagctagaggaggaaaagagacgccagaagattgagatgtgggacagcatgcaggaagggaagagttacaagggaaatgccaagaaaccccaggaggaagattccccgggtcccagcacgagcagtgttctcaagcgcaaaagtgacagaaagccacttaggggcggaggatacaacccactgagcggcgaaggcggtggagcttgcagttggcgtcccggacgcaggggtccaagcagcggcggttag

SEQ ID NO: 263328 - DNA, 1439 bp, Artificial Sequence
  derived and/or modified sequence
cggcagggctgggcggcggcggcggcggcggtcatggaacgccaagaggagtctctgtccgcgcggccggccctggagaccgaggggctgcgcttcctgcacaccacggtgggctccctgctggccacctatggctggtacatcgtcttcagctgcatccttctctacgtggtctttcagaagctttccgcccggctaagagccttgaggcagaggcagctggaccgagctgcggctgctgtggaacctgatgttgttgttaaacgacaagaagctttagcagctgctcgactgaaaatgcaagaagaactaaatgcgcaagttgaaaagcataaggaaaaactgaaacaacttgaagaagaaaaaaggagacagaagattgaaatgtgggacagcatgcaagaaggaaaaagttacaaaggaaatgcaaagaagccccaggaggaagacagtcctgggccttccacttcatctgtcctgaaacggaaatcggacagaaagcctttgcggggaggaggttataacccgttgtctggtgaaggaggcggagcttgctcctggagacctggacgcagaggcccgtcatctggcggatgaggctaagaatcttgtagaatattccgtggttgcttcttgaccaagggaaatacagtctggctgtgagagacttaaaatctcttgaggagcgctctggagaatggctgaaggagaggaaacaggagccttgagcagtgtaattacaaacaaataggttggcatagtcttaagtctttgagtctagagagatttgagttttgttttgcctgtggaggcaattgggggtttcaggtcaaagagagggtcagtggaaacaagggtgggccttgtgaggtgtggggaagccctgggaccctcactccccttccagtgtgtaactggattggctcccaccagcccagaagatttacgacgtgggaaatggtatacttggattaaaatatttcatccagatttgtttacatctagagagaaccccttgtaggttataaggaaactttttaacattcttccttgaatatattttctgtagctgaaaatgtttgtgaagtggctgtcaactacacatcgcatgagtagaggggctctgggtcggggtttcatatgcagcagagcagctcccttgctgccgtccatcaagagccctcaacacaagagtttgttataaatagaaataaacgacaaaaagtagaggggtatgtttaagtacactattagatgtgactgactaccttgaaacctgatttttttccatggggagaaacagtgcttgaattctgcatgccccccttgcatctagcaccttttggtaggggtggaaggagggtgtcagggagaatgattaggagataatggaggggaggggaaacttgcgttgtgtaatagcatttgaagagcactta

SEQ ID NO: 263329 - DNA, 1188 bp, Artificial Sequence
  derived and/or modified sequence
agggctgggcggcggcggcggcggcggtcatggaacgccaagaggagtctctgtccgcgcggccggccctggagaccgaggggctgcgcttcctgcacaccacggtgggctccctgctggccacctatggctggtacatcgtcttcagctgcatccttctctacgtggtctttcagaagctttccgcccggctaagagccttgaggcagaggcagctggaccgagctgcggctgctgtggaacctgatgttgttgttaaacgacaagaagctttagcagctgctcgactgaaaatgcaagaagaactaaatgcgcaagttgaaaagcataaggaaaaactgaaacaacttgaagaagaaaaaaggagacagaagattgaaatgtgggacagcatgcaagaaggaaaaagttacaaaggaaatgcaaagaagccccaggaggaagacagtcctgggccttccacttcatctgtcctgaaacggaaatcggacagaaagcctttgcggggaggaggttataacccgttgtctggtgaaggaggcggagcttgctcctggagacctggacgcagaggcccgtcatctggcggatgaggctaagaatcttgttagtgtcacttttgacattagcaagatgaacccttaaccctcgattcaattgccttacgcacgcttttcacagtgactagccaaggggaggtggggttgatttctgttcctaactacacctgcatatgtcagggctccagtcagcaaaaggtatagatgttgcctctaggcatgaggtcattggtcacattctacttggagacagtgattgcattcattgatttcatggttaattgctagttggtaggtaaaggcctctagatgattagcaatcttgataaaagaggcctagtaatgttcttttgaggttagaaatccttgctgctaggacagtctctgtgacaggttgcgttgaatgatgtcttccttatcaatggtgagcccaccagtgaggattactgatgtggacagttgatggggtttgtttctgtatatttatttttatgtacagaactttgtaaaaacgaaactatttaaaaaacaagaataacatttttagcatctttattcaaggagatttatggacttcaatttgtctatcaaacattaaatagctttttattacaacctctaactatta

SEQ ID NO: 263330 - DNA, 1292 bp, Artificial Sequence
  derived and/or modified sequence
acgtgtgcgtaggagcgcaccggaagcgcccggctggaggcgcggcggcagggctgggcggcggcggcggcggcggtcatggaacgccaagaggagtctctgtccgcgcggccggccctggagaccgaggggctgcgcttcctgcacaccacggtgggctccctgctggccacctatggctggtacatcgtcttcagctgcatccttctctacgtggtctttcagaagctttccgcccggctaagagccttgaggcagaggcagctggaccgagctgcggctgctgtggaacctgatgttgttgttaaacgacaagaagctttagcagctgctcgactgaaaatgcaagaagaactaaatgcgcaagttgaaaagcataaggaaaaactgaaacaacttgaagaagaaaaaaggagacagaagattgaaatgtgggacagcatgcaagaaggaaaaagttacaaaggaaatgcaaagaagccccaggaggaagacagtcctgggccttccacttcatctgtcctgaaacggaaatcggacagaaagcctttgcggggaggaggttataacccgttgtctggtgaaggaggcggagcttgctcctggagacctggacgcagaggcccgtcatctggcggatgaggctaagaatcttgtagaatattccgtggttgcttcttgaccaagggaaatacagtctggctgtgagagacttaaaatctcttgaggagcgctctggagaatggctgaaggagaggaaacaggagccttgagcagtgtaattacaaacaaataggttggcatagtcttaagtctttgagtctagagagatttgagttttgttttgcctgtggaggcaattgggggtttcaggtcaaagagagggtcagtggaaacaagggtgggccttgtgaggtgtggggaagccctgggaccctcactccccttccagtgtgtaactggattggctcccaccagcccagaagatttacgacgtgggaaatggtatacttggattaaaatatttcatccagatttgtttacatctagagagaaccccttgtaggttataaggaaactttttaacattcttccttgaatatattttctgtagctgaaaatgtttgtgaagtggctgtcaactacacatcgcatgagtagaggggctctgggtcggggtttcatatgcagcagagcagctcccttgctgccgtccatcaagagccctcaacacaagagtttgttataaatagaaataaacgacaaaaagtagaggggtatgtttaagtaca

SEQ ID NO: 263331 - protein, 456 aa, Artificial Sequence
  derived and/or modified sequence
MATFSRQEFFQQLLQGCLLPTAQQGLDQIWLLLAICLACRLLWRLGLPSYLKHASTVAGGFFSLYHFFQLHMVWVVLLSLLCYLVLFLCRHSSHRGVFLSVTILIYLLMGEMHMVDTVTWHKMRGAQMIVAMKAVSLGFDLDRGEVGTVPSPVEFMGYLYFVGTIVFGPWISFHSYLQAVQGRPLSCRWLQKVARSLALALLCLVLSTCVGPYLFPYFIPLNGDRLLRNKKRKARWLRAYESAVSFHFSNYFVGFLSEATATLAGAGFTEEKDHLEWDLTVSKPLNVELPRSMVEVVTSWNLPMSYWLNNYVFKNALRLGTFSAVLVTYAASALLHGFSFHLAAVLLSLAFITYVEHVLRKRLARILSACVLSKRCPPDCSHQHRLGLGVRALNLLFGALAIFHLAYLGSLFDVDVDDTTEEQGYGMAYTVHKWSELSWASHWVTFGCWIFYRLIG

SEQ ID NO: 263332 - protein, 97 aa, Artificial Sequence
  derived and/or modified sequence
MATFSRQEFFQQLLQGCLLPTAQQGLDQIWLLLAICLACRLLWRLGLPSYLKHASTVAGGFFSLYHFFQLHMVWVVLLSLLCYLVLFLCRHSSHRGV

SEQ ID NO: 263333 - DNA, 1371 bp, Artificial Sequence
  derived and/or modified sequence
atggctacatttagccgccaggaatttttccagcaactgctgcagggctgtctactgcccactgctcagcaaggactggatcagatctggcttcttctggccatctgtcttgcttgtaggttgctttggcggctgggacttcctagctatctgaagcacgcctcgacggtggccggtggtttttttagcctttaccacttttttcaactgcacatggtgtgggtcgttctgctgtcgctgctgtgctatttggttctgtttttatgtagacatagctcccataggggcgtctttctctcagtgactatactcatctatctcttgatgggcgagatgcatatggtcgataccgttacatggcacaaaatgcggggtgcgcagatgatcgtagccatgaaggccgtgagtctcggcttcgatctggaccgcggcgaggtgggcactgtgccgtcgccagtggaatttatgggttacttgtattttgtgggcactatcgtattcggcccctggatctctttccatagttatttacaggcggtacagggacggccactgagttgtaggtggctgcagaaggtggcgaggtctctggcactcgctttactgtgtctcgtgctcagcacatgcgtcgggccttatctcttcccgtattttattccgctcaatggggacaggctactgcgcaataagaaacgcaaggcgcgctggctgagggcctacgaaagcgcagtttcgtttcacttttcaaactactttgtgggatttttatctgaggcgacagcaaccctcgccggagcaggattcaccgaagaaaaagaccacctggagtgggatctgacggtgtcaaaacccttgaacgtcgagctcccacggagtatggtcgaggtggtgaccagttggaatctgcctatgtcgtattggttgaataactacgtgtttaaaaatgctctgcgattaggcactttctctgctgtattagttacttacgctgcatcggccctattgcacggtttcagctttcatttggctgcggtgttgctcagcttagcattcatcacctacgttgaacacgtgctcaggaagcggctagcccgtatcctgtctgcatgtgtgctttcgaaaaggtgccctccagactgctcccaccagcatcggttgggtctaggggtgcgtgccctgaatttgctcttcggtgctttagctatcttccacttggcctacctaggcagtctatttgacgtagacgttgacgatactacagaggagcagggctacggcatggcgtacacagtccacaaatggagtgagctctcttgggctagtcactgggttacttttggatgctggatattctaccgactgataggttag

SEQ ID NO: 263334 - DNA, 1371 bp, Artificial Sequence
  derived and/or modified sequence
atggccaccttcagccggcaggagttcttccagcagctgctgcagggctgcctgctgcccacagcccagcagggcctggaccagatctggctgctgctggccatctgcctggcctgccgcctgctgtggaggctgggcctgcccagctacctgaagcacgccagcacagtggccggcggcttcttcagcctgtaccacttcttccagctgcacatggtgtgggtggtgctgctgagcctgctgtgctacctggtgctcttcctgtgccgccacagcagccaccggggcgtcttcctgtctgtgaccatcctgatctacctgctgatgggagagatgcacatggtggacacagtgacctggcacaagatgagaggagcccagatgattgtggccatgaaggctgtgtccctgggctttgacctggacagaggagaggtgggcaccgtgcccagccctgtggagttcatgggctacctgtactttgtgggcaccatcgtgtttggcccctggatctccttccacagctacctgcaggccgtgcagggccggcccctgagctgccgctggctgcagaaggtggcccggagcctggccctggccctgctgtgcctggtgctgagcacctgtgtgggcccctacctgttcccctacttcatccccctgaatggagaccggctgctgaggaacaagaagaggaaggcccgctggctgcgggcctatgagagcgctgtgtccttccacttcagcaactactttgtgggcttcctgtctgaggccacagccaccctggccggggccggcttcacagaggagaaggaccacctggagtgggacctgactgtgtccaagcccctgaatgtggagctgcccaggtccatggtggaggtggtgacctcctggaacctgcccatgagctactggctgaacaactacgtgttcaagaatgccctgcggctgggcaccttctctgctgtgctggtgacctacgccgccagcgccctgctgcacggcttctccttccacctggccgctgtgctgctgagcctggccttcatcacctacgtggagcacgtgctgaggaagaggctggcccgcatcctgagcgcctgtgtgctgagcaagcgctgccccccagactgcagccaccagcaccggctgggcctgggcgtgcgggccctgaacctgctgtttggagccctggccatcttccacctggcctacctgggcagcctgtttgatgtggatgtggatgacaccacagaggagcagggctacggcatggcctacacagtgcacaagtggagcgagctgtcctgggccagccactgggtgaccttcggctgctggatcttctaccgcctgattggatag

SEQ ID NO: 263335 - DNA, 1371 bp, Artificial Sequence
  derived and/or modified sequence
atggccaccttcagccggcaggagttcttccagcagctgctgcagggctgcctgcttcccactgcccagcagggcctagatcagatctggctactcctcgcaatttgtctggcctgtcgtctcctttggaggctcggactgccgtcctatctcaagcacgcctctacagtggcgggcggatttttttccttatatcatttttttcaactccacatggtctgggtcgtactactgagtctcctatgctatctggtgttgttcctgtgcagacacagctcacaccgcggcgttttcttatcagtaaccatcctgatctacttgttgatgggggagatgcatatggttgatacagtgacttggcacaaaatgagaggggcacagatgatagtggccatgaaagcggtgagcctgggcttcgacttggacagaggggaggtgggaacagtgccctcacccgtggagttcatgggttacctgtatttcgtcggtaccatcgttttcggtccttggatatctttccactcttatctgcaggccgtgcagggtagacccttgagttgccgatggctacagaaggttgccagatcactggccctagccctcctgtgcctggtgctcagcacctgcgtagggccatatcttttcccgtatttcattcctctcaatggcgacaggcttctgcgcaataagaagagaaaagccaggtggcttagagcatacgagagtgcggtgtcatttcacttctccaactacttcgtcggcttcctctcagaagccaccgcgaccctggcaggggccggctttactgaggaaaaggaccatcttgagtgggacctgaccgtcagcaagccactgaacgtggagctccccagaagtatggtagaggtcgtcactagttggaacctgcctatgtcctattggcttaataattatgtgtttaagaatgcgcttcgactcgggactttctcagcagtgttagttacttatgctgcatcagccctgctgcacggcttctctttccatttggccgcagtgctgctctcccttgcttttattacctacgtagagcacgttctccgcaagcgcctggctaggatcctgagtgcttgtgtgcttagtaaacgctgccccccagattgttctcaccagcaccgcctcggattgggggtgagggcccttaatttgttattcggagccttggccatctttcacctggcctatctgggtagcctgttcgacgtggatgttgacgacaccaccgaagagcaaggttatggcatggcctatacagtgcacaaatggtcggaattgtcttgggcctcccactgggtcacttttggatgctggattttctataggctcatcggctag

SEQ ID NO: 263336 - DNA, 1371 bp, Artificial Sequence
  derived and/or modified sequence
atggccaccttttcacgccaggagttttttcagcagcttttacagggatgcctgctccccactgctcaacaggggttggaccagatctggctcctacttgcgatctgccttgcctgccggcttctgtggaggctgggactgccttcttatctgaagcatgcctcaacagtggccggtgggtttttctctctctatcattttttccagctgcatatggtctgggtggtcctcctatctctcctttgttatttagtgctgttcctgtgccggcattctagccacagaggggtgttcctgagcgtgactatccttatctacctgcttatgggcgagatgcatatggtcgataccgttacatggcacaaaatgaggggagcccaaatgattgtggctatgaaagctgtctcactggggttcgatctcgaccgcggagaagtcggaaccgtgcctagtccggtcgagttcatgggctacctgtactttgttgggaccatcgtcttcgggccatggatttctttccactcttacctacaggctgtccagggccgacccctaagttgcaggtggttgcaaaaagtagctaggagcttggcacttgcactcctgtgcctggtgctgagcacttgcgtgggcccatacctcttcccatacttcatcccactgaacggcgaccgtcttttgcgcaataaaaaacgtaaggcacgatggctgagggcctatgagtccgcggtcagctttcactttagtaattattttgtgggctttttaagcgaagccacggcaactctggctggtgctggcttcacagaggagaaggatcacctcgagtgggatctcacggtgtccaaacccttgaacgtagaactgcctaggtccatggtggaggtggtcaccagctggaatttgcccatgagctattggctcaacaactacgtcttcaagaatgccctgaggctgggtactttcagtgccgtgttggtcacttacgccgcaagtgctctcttgcacgggttctcattccacctggcagccgtcctgctgtccctcgcatttatcacgtacgttgagcatgttctacgcaagaggttagcaagaatcttgtctgcttgtgtgctctctaaacgatgtcctccggattgctctcaccagcacagattgggactgggggtacgagctctgaatttattatttggtgccctcgccatcttccatctggcatatctagggtctctattcgacgtagatgtggacgacaccacagaggagcaagggtacggaatggcttataccgtccataaatggtcagagctgagttgggcttcccactgggtcacgttcggttgttggattttttacagacttataggatag

SEQ ID NO: 263337 - DNA, 1371 bp, Artificial Sequence
  derived and/or modified sequence
atggccaccttcagcagacaggagttcttccagcagctgctgcagggctgcctgctgcccaccgcccagcagggcctggaccagatctggctgctgctggccatctgcctggcctgcagactgctgtggagactgggcctgcccagctacctgaagcacgccagcaccgtggccggcggcttcttcagcctgtaccacttcttccagctgcacatggtgtgggtggtgctgctgagcctgctgtgctacctggtgctgttcctgtgcagacacagcagccacagaggcgtgttcctgagcgtgaccatcctgatctacctgctgatgggcgagatgcacatggtggacaccgtgacctggcacaagatgagaggcgcccagatgatcgtggccatgaaggccgtgagcctgggcttcgacctggacagaggcgaggtgggcaccgtgcccagccccgtggagttcatgggctacctgtacttcgtgggcaccatcgtgttcggcccctggatcagcttccacagctacctgcaggccgtgcagggcagacccctgagctgcagatggctgcagaaggtggccagaagcctggccctggccctgctgtgcctggtgctgagcacctgcgtgggcccctacctgttcccctacttcatccccctgaacggcgacagactgctgagaaacaagaagagaaaggccagatggctgagagcctacgagagcgccgtgagcttccacttcagcaactacttcgtgggcttcctgagcgaggccaccgccaccctggccggcgccggcttcaccgaggagaaggaccacctggagtgggacctgaccgtgagcaagcccctgaacgtggagctgcccagaagcatggtggaggtggtgaccagctggaacctgcccatgagctactggctgaacaactacgtgttcaagaacgccctgagactgggcaccttcagcgccgtgctggtgacctacgccgccagcgccctgctgcacggcttcagcttccacctggccgccgtgctgctgagcctggccttcatcacctacgtggagcacgtgctgagaaagagactggccagaatcctgagcgcctgcgtgctgagcaagagatgcccccccgactgcagccaccagcacagactgggcctgggcgtgagagccctgaacctgctgttcggcgccctggccatcttccacctggcctacctgggcagcctgttcgacgtggacgtggacgacaccaccgaggagcagggctacggcatggcctacaccgtgcacaagtggagcgagctgagctgggccagccactgggtgaccttcggctgctggatcttctacagactgatcggctag

SEQ ID NO: 263338 - protein, 455 aa, Artificial Sequence
  derived and/or modified sequence
MATFSRQEFFQQLLQGCLLPTAQQGLDQIWLLLAICLACRLLWRLGLPSYLKHASTVAGGFFSLYHFFQLHMVWVVLLSLLCYLVLFLCRHSSHRGVFLSVTILIYLLMGEMHMVDTVTWHKMRGAQMIVAMKAVSLGFDLDRGEVGTVPSPVEFMGYLYFVGTIVFGPWISFHSYLQAVQGRPLSCRWLQKVARSLALALLCLVLSTCVGPYLFPYFIPLNGDRLLRKGTMVRWLRAYESAVSFHFSNYFVGFLSEATATLAGAGFTEEKDHLEWDLTVSKPLNVELPRSMVEVVTSWNLPMSYWLNNYVFKNALRLGTFSAVLVTYAASALLHGFSFHLAAVLLSLAFITYVEHVLRKRLARILSACVLSKRCPPDCSHQHRLGLGVRALNLLFGALAIFHLAYLGSLFDVDVDDTTEEQGYGMAYTVHKWSELSWASHWVTFGCWIFYRLIG

SEQ ID NO: 263339 - DNA, 1368 bp, Artificial Sequence
  derived and/or modified sequence
atggccaccttcagcagacaggagttcttccagcagctgctgcagggctgcctgctgcccaccgcccagcagggcctggaccagatctggctgctgctggccatctgcctggcctgcagactgctgtggagactgggcctgcccagctacctgaagcacgccagcaccgtggccggcggcttcttcagcctgtaccacttcttccagctgcacatggtgtgggtggtgctgctgagcctgctgtgctacctggtgctgttcctgtgcagacacagcagccacagaggcgtgttcctgagcgtgaccatcctgatctacctgctgatgggcgagatgcacatggtggacaccgtgacctggcacaagatgagaggcgcccagatgatcgtggccatgaaggccgtgagcctgggcttcgacctggacagaggcgaggtgggcaccgtgcccagccccgtggagttcatgggctacctgtacttcgtgggcaccatcgtgttcggcccctggatcagcttccacagctacctgcaggccgtgcagggcagacccctgagctgcagatggctgcagaaggtggccagaagcctggccctggccctgctgtgcctggtgctgagcacctgcgtgggcccctacctgttcccctacttcatccccctgaacggcgacagactgctgagaaagggcaccatggtgagatggctgagagcctacgagagcgccgtgagcttccacttcagcaactacttcgtgggcttcctgagcgaggccaccgccaccctggccggcgccggcttcaccgaggagaaggaccacctggagtgggacctgaccgtgagcaagcccctgaacgtggagctgcccagaagcatggtggaggtggtgaccagctggaacctgcccatgagctactggctgaacaactacgtgttcaagaacgccctgagactgggcaccttcagcgccgtgctggtgacctacgccgccagcgccctgctgcacggcttcagcttccacctggccgccgtgctgctgagcctggccttcatcacctacgtggagcacgtgctgagaaagagactggccagaatcctgagcgcctgcgtgctgagcaagagatgcccccccgactgcagccaccagcacagactgggcctgggcgtgagagccctgaacctgctgttcggcgccctggccatcttccacctggcctacctgggcagcctgttcgacgtggacgtggacgacaccaccgaggagcagggctacggcatggcctacaccgtgcacaagtggagcgagctgagctgggccagccactgggtgaccttcggctgctggatcttctacagactgatcggctag

SEQ ID NO: 263340 - DNA, 1368 bp, Artificial Sequence
  derived and/or modified sequence
atggctacgttttctagacaggagttttttcaacagctgctccagggttgcttgcttcctacggcacaacagggcctggaccaaatctggctgctgcttgccatttgtctggcgtgccgcctgttgtggcgcctcggactcccgtcatacctgaaacacgcgagcacagtagcaggcggattcttctcgctgtatcactttttccaactgcacatggtgtgggtcgtgttgctgtctttgttatgttaccttgtcttgttcctttgccgccattcttcacacagaggggtgtttttgtctgtgaccattctgatctaccttttgatgggtgaaatgcacatggtggatactgtgacctggcacaaaatgaggggcgcccagatgatagtcgcaatgaaggccgtgtctttaggttttgacttggaccggggagaagtcggaaccgtgccatctccagtggaatttatgggatatttgtattttgtaggcacaatcgtcttcggcccatggatctcctttcatagctacctacaggctgtgcaggggcggccacttagttgccgttggcttcagaaggtggcgagaagcttggctttggcacttctttgtcttgtgctctcaacatgtgttggcccatatttatttccctattttattcccttgaatggagatcgcctgttacgaaaaggcaccatggtgaggtggctgcgcgcatacgagagcgcagtgtccttccacttctccaactacttcgttggctttttgtctgaagccaccgctacgctggcaggcgccggattcacagaagaaaaggatcatctggaatgggacctgacagtttctaagcctctcaatgtggaactgcctaggtcaatggttgaggttgttacgtcatggaatttgcctatgtcttactggctgaataactatgtttttaagaacgcactgagactcggcacattttctgctgtgcttgtgacttatgccgcatcagctttactacacggattctcatttcatttagctgcggttctgctgtccctagctttcatcacttatgttgagcatgtgctgcgcaagagattggccaggatactgagtgcctgcgtcctgagtaagaggtgcccacctgactgctcccatcagcaccgattgggcctgggagtgcgagcactaaaccttctatttggcgccctggccatctttcacttggcgtacctcggctccctttttgatgttgacgtggacgacaccactgaagaacagggatatgggatggcatataccgtgcacaagtggagtgaactttcttgggccagccattgggttaccttcgggtgctggattttttaccgcttaatcggatag

SEQ ID NO: 263341 - DNA, 1368 bp, Artificial Sequence
  derived and/or modified sequence
atggccaccttcagccggcaggagttcttccagcagctgctgcagggctgcctgctgcccacagcccagcagggcctggaccagatctggctgctgctggccatctgcctggcctgccgcctgctgtggaggctgggcctgcccagctacctgaagcacgccagcacagtggccggcggcttcttcagcctgtaccacttcttccagctgcacatggtgtgggtggtgctgctgagcctgctgtgctacctggtgctcttcctgtgccgccacagcagccaccggggcgtcttcctgtctgtgaccatcctgatctacctgctgatgggagagatgcacatggtggacacagtgacctggcacaagatgagaggagcccagatgattgtggccatgaaggctgtgtccctgggctttgacctggacagaggagaggtgggcaccgtgcccagccctgtggagttcatgggctacctgtactttgtgggcaccatcgtgtttggcccctggatctccttccacagctacctgcaggccgtgcagggccggcccctgagctgccgctggctgcagaaggtggcccggagcctggccctggccctgctgtgcctggtgctgagcacctgtgtgggcccctacctgttcccctacttcatccccctgaatggagaccggctgctgaggaagggcaccatggtgcgctggctgcgggcctatgaatctgctgtgtccttccacttcagcaactactttgtgggcttcctgtctgaggccacagccaccctggccggggccggcttcacagaggagaaggaccacctggagtgggacctgactgtgtccaagcccctgaatgtggagctgcccaggtccatggtggaggtggtgacctcctggaacctgcccatgagctactggctgaacaactacgtgttcaagaatgccctgcggctgggcaccttctctgctgtgctggtgacctatgctgccagcgccctgctgcacggcttctccttccacctggccgctgtgctgctgagcctggccttcatcacctacgtggagcacgtgctgaggaagaggctggcccgcatcctgagcgcctgtgtgctgagcaagcgctgccccccagactgcagccaccagcaccggctgggcctgggcgtgcgggccctgaacctgctgtttggagccctggccatcttccacctggcctacctgggcagcctgtttgatgtggatgtggatgacaccacagaggagcagggctacggcatggcctacacagtgcacaagtggagcgagctgtcctgggccagccactgggtgaccttcggctgctggatcttctaccgcctcatcggctag

SEQ ID NO: 263342 - DNA, 1368 bp, Artificial Sequence
  derived and/or modified sequence
atggccaccttcagccggcaggagttcttccagcagctgctgcagggctgcttgctccctaccgcccaacaaggactcgaccaaatctggcttctacttgccatttgtctggcctgccgcttattgtggcgcctggggctgccaagctacctgaaacacgcgagtaccgtggccggaggattcttttctctataccacttcttccaattgcacatggtctgggtagttttgttgtctctactttgttatctggtgttgtttctgtgtcgccactcttctcaccggggcgtgttcctgagtgtaacaatcttgatttacctgctgatgggagagatgcatatggtcgacaccgtgacgtggcacaaaatgcgtggagcccagatgatcgtggccatgaaggcagtttcactcggatttgacctagatcgaggcgaggtggggaccgtgccatcccccgtggaatttatgggctacctttactttgttggcactatcgtgttcggaccatggattagcttccacagttacttgcaggcggtccagggcaggcctctctcgtgccggtggctgcagaaagttgcgcgcagcctcgccctggccctcctgtgtctggttctctcaacctgcgtgggtccatacctcttcccctattttattccactgaacggcgatcgtctacttcgaaaaggcacaatggtgcgatggcttagagcttacgaaagtgcagtgagtttccattttagcaactattttgtcggttttctgtccgaggctaccgcaactttagctggagctgggtttacagaagaaaaggaccatttagagtgggacttgaccgtatctaagcccttgaacgtggagttgccaagatccatggtggaggtggtcacttcttggaatctgcccatgagttattggctgaacaactatgtattcaaaaatgcactcaggttgggaactttctcagcagtcctagtaacctacgccgcgtccgcgctgctacacggtttctcatttcacctcgctgcagtactgctttctttggcctttattacatatgttgaacacgtattacggaaacggctcgcaagaatactgagcgcatgtgtgctgagtaagcgatgtcctcctgattgcagccaccaacacaggctggggcttggcgtaagggcgctaaatttactgtttggcgcccttgcaatttttcacttagcttatctcggctcgctgtttgatgtggacgtcgatgatacaactgaagagcaaggttatggcatggcctacaccgtccataagtggtcagagctttcttgggcgtcccactgggtgaccttcggatgctggatcttctaccgactgatcggttag

SEQ ID NO: 263343 - DNA, 1368 bp, Artificial Sequence
  derived and/or modified sequence
atggctacattcagtagacaggagtttttccagcaactcctgcagggctgcctgctgcctacagcccagcagggattggatcagatatggctgctactggccatctgcctggcctgtaggctactatggagattaggcttgccttcatatctgaagcacgccagcactgtggccggtggctttttttcactgtatcacttcttccagcttcacatggtttgggtagtcctgttgagtctcttgtgctacttggtgctgtttctctgtaggcacagtagccatagaggggtctttctttccgtcacaattttgatttatcttctgatgggcgaaatgcacatggtggacacggtcacgtggcataagatgcgaggggctcagatgattgtcgctatgaaggccgtttccctcggcttcgacctggaccgcggtgaggtcgggactgttccgtctccagttgaatttatgggctacctatattttgtaggcactattgtgtttggcccatggatcagttttcactcctatctgcaggccgtgcagggacggcctctgagctgccgatggttgcagaaagtggctcgatcactggctttggctctcctctgcctggtgctgtctacctgcgtggggccttatctgttcccttatttcattcccctgaatggagacagacttctgagaaaaggtaccatggtccgttggctaagggcttacgagtccgcagtgagctttcatttctctaactactttgtcggtttcctgtcagaggccacagcgacactcgcaggagccggattcactgaggaaaaggatcatctcgaatgggacctgacagtctcgaaacccctgaatgtggagctgcccagatctatggtagaggtggtgacgtcgtggaatttaccgatgagctactggctgaacaattacgtcttcaagaacgcactaagactgggtactttctctgccgtattggttacatatgcggcttcagcgctgctgcacgggtttagtttccacctggctgccgtgctcctctctctggcctttatcacctacgtggaacacgtgctgagaaagcgcctggctcgaattctgagcgcatgtgttctgtctaaacgctgccccccagattgtagtcatcaacaccgtctgggcttgggggttcgcgctttgaacctgctgtttggagcactggcaatcttccacctggcgtaccttggatccctatttgatgtggatgtggatgacaccactgaggaacaaggatatggcatggcttacaccgtgcacaagtggtccgagctgtcctgggcctcacactgggtgaccttcggctgttggatattctaccggctgatcggctag

SEQ ID NO: 263344 - DNA, 1368 bp, Artificial Sequence
  derived and/or modified sequence
atggctacattttctcggcaggagttcttccagcagctgctgcaggggtgcttgctgcctacagcccagcaggggctggaccagatctggcttttgctggccatctgtctggcctgccgccttctgtggagattaggcttgccctcttatctgaaacacgcatcgacagtggcaggcgggtttttttccctatatcacttcttccagcttcatatggtctgggtcgtcctgctgagcctgctttgctacttggtgctttttctgtgtagacatagttctcatcggggggtgtttttatcagtgactattctcatctatctgctgatgggagagatgcacatggtagacaccgttacttggcataaaatgcggggcgcccagatgatcgtggccatgaaagccgtatctctcggcttcgatctcgatcgcggcgaggtgggtacagtgccttcaccggtggagtttatgggctatctgtattttgtgggaacaatcgtattcggcccttggatctcattccacagctacctgcaggctgtgcaaggaaggcctctgtcgtgtaggtggctgcaaaaagttgcccgttcattggccctcgctttgctctgcctagtgctctcaacctgcgtcggaccttacttgttcccttacttcatccctctgaatggagatcgattgctgcggaagggcacaatggtgcggtggttgcgagcctatgaaagtgctgtcagctttcatttcagtaactacttcgtgggattcctgtccgaagcaacagccaccctcgctggggccggttttaccgaggagaaagaccacctggaatgggacctcacagtcagcaagcctcttaacgttgagctcccccgcagcatggttgaagtcgtgacatcctggaatttgcccatgtcatattggctgaacaattacgtctttaaaaatgcactacgcctcggaacgttctcagccgtgttggtaacatacgcagccagtgccctccttcacggtttttccttccacctggcggcagtcctgctaagcttggcctttattacctacgtagagcatgtcctcaggaagaggctcgccaggatcctgtccgcatgcgtcctttcaaagcggtgtccccctgactgctcccatcaacatcgtcttgggctgggagtgcgagccctaaatctgttgtttggcgccctagctatcttccatctggcctacctgggaagcctgtttgacgtggacgtcgacgataccacagaggaacagggatacggcatggcctacactgtacacaaatggtccgagctaagttgggcttcacattgggtcaccttcggctgctggatcttttacaggctgattggatag

SEQ ID NO: 263345 - DNA, 1368 bp, Artificial Sequence
  derived and/or modified sequence
atggccacctttagtcgccaagagtttttccagcagctcctgcaaggttgcttgctccctaccgcccagcagggactggatcagatatggttactgctcgcaatttgcctggcatgcaggctgctctggagattaggactgccaagctacctcaagcacgcatccaccgttgctggggggtttttttccttgtaccacttcttccagctccatatggtgtgggtggtgcttctgagcctgctttgttatctggtgcttttcttatgtcgtcattcatcgcatagaggagtgtttctgagtgtcaccattctaatttacctgttgatgggagaaatgcacatggtggataccgtcacctggcacaaaatgcgtggtgcccagatgatagttgcaatgaaagctgtgagcctcggcttcgatttggataggggcgaagtgggcaccgtgcctagtccagtggaattcatgggatacttgtatttcgtgggcaccatcgttttcggcccctggatctctttccattcctatctgcaggctgtgcaaggccgaccactatcctgtcggtggttgcaaaaggtggcccgctctctggccctcgctcttctgtgcctggtactctccacctgcgttggaccttacctgttcccatacttcattccactcaacggtgataggttactcaggaagggaaccatggtgcggtggttaagagcctatgaatctgctgttagcttccacttttccaactattttgtcggctttcttagtgaagcaacagccactctggctggggccgggtttaccgaagaaaaggaccaccttgagtgggatttaacggtctcaaagcccctcaacgtggaattgccgcggtctatggtagaagttgtcacttcgtggaacctcccaatgagttattggcttaataactatgtgttcaaaaacgccttaaggctcggaaccttcagcgccgtgctggtgacttacgcggcatctgccctgctgcatggattttcttttcacctcgccgcggtgctgctcagcctggcctttatcacatatgtggagcatgtgctgcgaaaacggcttgcccgcattctctcagcttgtgtgttatccaaaagatgtcctcccgattgctcccatcagcacaggctgggtctgggggttcgcgctctcaatttgctttttggggcactcgccatctttcacctggcttacctgggcagccttttcgatgtggatgtggatgatactaccgaagaacaggggtatggaatggcctacacagtgcataaatggtccgagctgagttgggcatcccattgggttacgttcggttgctggattttctatcgattgatcggctag

SEQ ID NO: 263346 - DNA, 1368 bp, Artificial Sequence
  derived and/or modified sequence
atggccaccttcagccggcaggagttcttccagcagctgctgcaggggtgtctcctccctaccgcacagcagggattggaccagatttggctcctccttgctatctgtctggcatgccggctgctctggcggcttggactccctagttacctaaagcacgcctccaccgttgcaggcggattctttagtctgtatcatttcttccagctgcatatggtctgggtggtgttactgtctctcctctgttatctggttctatttctgtgccgacattcaagccacagaggtgtttttctaagcgtcaccatcctcatttacctgctgatgggcgagatgcacatggtggatacagtgacatggcataaaatgaggggggcccaaatgatcgtcgcaatgaaagcagtctcactaggtttcgacctcgacaggggagaggtcggcaccgtcccctcccctgtggaatttatgggatacctatactttgtgggcaccatcgtatttggaccttggatctcttttcactcatatctgcaagccgtacagggaagacccctttcttgccggtggctgcagaaagtggcacgaagcctggccctggctttactgtgccttgtgctgtcaacatgcgtcgggccctacctgttcccatactttatacctctgaatggagacagactgcttagaaaaggcaccatggttcggtggctccgggcctatgagtctgcagtttcgttccacttctcaaattattttgtggggttcctcagcgaggctacagcaaccctggcaggcgcagggttcaccgaagaaaaagatcacctagagtgggacctcaccgtttctaagcccctgaatgtcgagctgcctcgctccatggtggaagtggtaacatcctggaatctgccgatgtcttactggctgaacaactatgtatttaagaatgccctgcggctgggtactttctcagctgtgttagtgacttatgccgcgtctgcactcctgcacggatttagctttcaccttgccgcagtgttgctgagcctggcctttatcacatacgtggaacacgtgcttagaaaaagactggcacggatactgagcgcctgtgtccttagcaagcgatgtcccccggactgttctcatcagcataggctggggctcggcgtgcgcgctctgaacttgttgtttggcgccctcgcaatttttcacctcgcctatctgggcagcctgttcgacgtggacgtcgacgacactacagaggagcagggctatgggatggcatacaccgtgcacaagtggtcagagctgtcttgggcatcccattgggtgacctttggctgttggatcttctaccggctgatcgggtag

SEQ ID NO: 263347 - DNA, 1368 bp, Artificial Sequence
  derived and/or modified sequence
atggccaccttcagccggcaggagttcttccagcagctgctgcagggctgcctgttacccacggcgcagcagggactggatcagatctggctactcctggccatatgcttagcctgccggctcttatggcgactgggtttgccttcttatcttaagcatgccagtaccgtggcagggggcttctttagcctgtatcattttttccagctccatatggtgtgggtggtgcttctttctttactctgctaccttgtcctttttctatgccggcactcatctcaccgaggggtgtttctgagcgttacaatcttaatctatcttttgatgggcgaaatgcatatggtggatactgtcacctggcacaaaatgagaggcgcccagatgattgttgccatgaaagccgtatcactgggcttcgacctggataggggggaagttggaacagtgcccagccctgtggaattcatgggttacttatatttcgtggggaccatcgtgtttgggccatggatttcattccattcttacctgcaagccgttcagggccgcccccttagctgccgctggctgcaaaaggttgcccggtccctagcccttgctttattgtgcctagttttgagtacttgtgttggaccctacctgttcccctacttcatccctctgaatggcgatcgcttgctgcggaaaggaaccatggttcgctggctcagggcctacgaatcagcagtctcgtttcacttctctaattattttgtcggctttctgtccgaggctacagccaccctagcgggcgcgggcttcactgaggaaaaagaccacttggaatgggatctgacggtgtccaaacccctcaacgtggaattacctcgctcgatggtggaggttgtaacaagttggaacctcccaatgtcctattggctcaataattacgtatttaaaaacgccctccgccttggcacattctccgctgtcctagtcacctatgcagcttctgcgctcctccatggtttttcattccacctggccgccgtgctcctgagcctggcttttattacgtatgtagaacatgtactccggaaaagactcgcacgaatccttagcgcttgcgtgctgtcgaaaagatgtcccccagactgcagtcatcaacaccgactcggtctgggcgttcgcgctttgaacctgctgttcggagctctggccattttccatctagcttatctcgggagcctgtttgatgtggacgtggatgatactacagaggaacagggctacggcatggcttatacggttcacaagtggagcgaactctcctgggcctctcactgggtgactttcggctgctggatcttttacaggctgatcgggtag

SEQ ID NO: 263348 - DNA, 1368 bp, Artificial Sequence
  derived and/or modified sequence
atggctaccttctcccggcaggaattcttccagcagttgctgcaaggttgccttctcccaaccgctcagcagggattagaccagatctggttgttgctggccatttgtctagcgtgtcggttactatggcgtctcggattgcccagctacttgaaacacgcatccactgtcgctggtgggttttttagtctctaccacttctttcaactgcacatggtctgggttgtcttactcagtctcctttgttacctggtgttatttctttgtagacattctagtcatcgtggtgtctttctctctgtaaccatccttatatacctgcttatgggcgagatgcacatggtggacactgtgacctggcacaagatgcgcggtgcacagatgatcgtcgccatgaaggccgtctccctgggcttcgacttggatagaggcgaggtggggacggtgccatcccccgtggaatttatgggttatctgtactttgtaggcacaatcgtttttgggccttggattagcttccattcgtatttgcaagcagtgcaaggacgcccattgtcctgtcgttggctccagaaagtggctcggagcttagctctcgccctgctgtgcctggttttgtccacctgtgtaggaccatatctgtttccgtattttatccccctcaatggcgataggctccttaggaagggcaccatggtcaggtggctcagggcatacgaatcagccgtatcctttcatttcagcaactactttgtggggttcttgtcagaggccaccgcgacacttgccggagcaggatttactgaggaaaaagaccatcttgagtgggacctgacagttagcaagcctttgaacgtggagcttcctcgatcaatggttgaggtcgtgacgtcatggaacctccccatgtcatactggctgaacaactacgtgttcaaaaacgccttacgactggggaccttcagcgccgtgctcgtgacttatgccgcaagcgcgctgttgcacgggttctcattccatttggcggcagtgctcctgagcctcgcatttataacatatgtagagcacgtactccggaaacgcttggccaggatcctctctgcttgtgtcctgagcaagcggtgtcctcctgattgctcccatcagcaccggctgggcctgggcgtcagggcattaaatcttttgttcggggctctcgcgatcttccatcttgcttacctgggttcattattcgacgtggatgtggacgacaccactgaagagcaggggtatgggatggcttataccgtgcacaaatggagtgaactctcctgggcaagccactgggtaaccttcggctgctggatcttctaccggctgattggatag

SEQ ID NO: 263349 - DNA, 1368 bp, Artificial Sequence
  derived and/or modified sequence
atggctacctttagtcggcaggaattttttcagcagctcctgcaaggttgtctgctgcctacggcccagcaaggcctcgaccaaatttggctcctacttgccatctgtttagcttgcagactcctgtggcggcttggtttacctagttacttgaagcacgcgagcacggttgctggtggcttcttcagcctttaccacttcttccagcttcacatggtgtgggtcgtgttattgtctctcttgtgctacctggtgctgttcttatgcagacattcgtcccatcgcggtgtgtttctctctgtcacaatcttaatttacctgttgatgggggagatgcacatggtggatactgtgacatggcacaaaatgcgaggagctcagatgatagtggccatgaaagctgtgagcctcggctttgatctggacaggggggaggtgggtaccgtgcctagccctgtggagtttatgggttatctctacttcgtaggcacaatcgtattcggcccttggatctcattccattcctacctgcaagccgtgcagggtcgccctctgtcctgtagatggctgcagaaggtggcaaggagtttagcccttgcgctcctctgcctcgtcctgtccacatgcgtcgggccatacttgttcccctacttcatccccctcaacggggacaggttacttcggaaaggtactatggtccgttggctacgcgcttatgagtccgccgtgtcttttcacttctccaattacttcgtcggattcctatcagaggctacagctacactagccggagccggattcactgaggaaaaagaccatctagagtgggaccttacagtctcaaagccattaaacgtcgaacttcctcgctcgatggttgaggttgtcacgtcttggaatctgcccatgagttattggctgaataattacgtgtttaaaaacgcactccggctgggaactttttctgccgtgctcgtcacttacgcagcttccgccctactccatgggtttagctttcatttagcagctgtacttctttcgcttgcgtttataacttacgtagagcacgtgctcaggaaacgactggctagaattctgtctgcttgcgtgctgagcaagagatgcccacctgactgctcccatcagcaccgtctgggcctgggggtacgggcactgaatctgctgttcggcgctctggctatcttccacctcgcttacttaggcagtctattcgacgtggatgtggacgacactactgaggaacagggctatggtatggcctacacagtgcacaaatggtcagaattgtcatgggcctctcactgggtaacatttggttgttggatattctaccgcttaatagggtag

SEQ ID NO: 263350 - protein, 461 aa, Artificial Sequence
  derived and/or modified sequence
MATFSRQEFFQQLLQGCLLPTAQQGLDQIWLLLAICLACRLLWRLGLPSYLKHASTVAGGFFSLYHFFQLHMVWVVLLSLLCYLVLFLCRHSSHRGVFLSVTILIYLLMGEMHMVDTVTWHKMRGAQMIVAMKAVSLGFDLDRGEVGTVPSPVEFMGYLYFVGTIVFGPWISFHSYLQAVQGRPLSCRWLQKVARSLALALLCLVLSTCVGPYLFPYFIPLNGDRLLRNKKRKARGTMVRWLRAYESAVSFHFSNYFVGFLSEATATLAGAGFTEEKDHLEWDLTVSKPLNVELPRSMVEVVTSWNLPMSYWLNNYVFKNALRLGTFSAVLVTYAASALLHGFSFHLAAVLLSLAFITYVEHVLRKRLARILSACVLSKRCPPDCSHQHRLGLGVRALNLLFGALAIFHLAYLGSLFDVDVDDTTEEQGYGMAYTVHKWSELSWASHWVTFGCWIFYRLIG

SEQ ID NO: 263351 - DNA, 1386 bp, Artificial Sequence
  derived and/or modified sequence
atggccaccttcagcagacaggagttcttccagcagctgctgcagggctgcctgctgcccaccgcccagcagggcctggaccagatctggctgctgctggccatctgcctggcctgcagactgctgtggagactgggcctgcccagctacctgaagcacgccagcaccgtggccggcggcttcttcagcctgtaccacttcttccagctgcacatggtgtgggtggtgctgctgagcctgctgtgctacctggtgctgttcctgtgcagacacagcagccacagaggcgtgttcctgagcgtgaccatcctgatctacctgctgatgggcgagatgcacatggtggacaccgtgacctggcacaagatgagaggcgcccagatgatcgtggccatgaaggccgtgagcctgggcttcgacctggacagaggcgaggtgggcaccgtgcccagccccgtggagttcatgggctacctgtacttcgtgggcaccatcgtgttcggcccctggatcagcttccacagctacctgcaggccgtgcagggcagacccctgagctgcagatggctgcagaaggtggccagaagcctggccctggccctgctgtgcctggtgctgagcacctgcgtgggcccctacctgttcccctacttcatccccctgaacggcgacagactgctgagaaacaagaagagaaaggccagaggcaccatggtgagatggctgagagcctacgagagcgccgtgagcttccacttcagcaactacttcgtgggcttcctgagcgaggccaccgccaccctggccggcgccggcttcaccgaggagaaggaccacctggagtgggacctgaccgtgagcaagcccctgaacgtggagctgcccagaagcatggtggaggtggtgaccagctggaacctgcccatgagctactggctgaacaactacgtgttcaagaacgccctgagactgggcaccttcagcgccgtgctggtgacctacgccgccagcgccctgctgcacggcttcagcttccacctggccgccgtgctgctgagcctggccttcatcacctacgtggagcacgtgctgagaaagagactggccagaatcctgagcgcctgcgtgctgagcaagagatgcccccccgactgcagccaccagcacagactgggcctgggcgtgagagccctgaacctgctgttcggcgccctggccatcttccacctggcctacctgggcagcctgttcgacgtggacgtggacgacaccaccgaggagcagggctacggcatggcctacaccgtgcacaagtggagcgagctgagctgggccagccactgggtgaccttcggctgctggatcttctacagactgatcggctag

SEQ ID NO: 263352 - DNA, 1386 bp, Artificial Sequence
  derived and/or modified sequence
atggctacattttcgcgacaggagtttttccagcagttactgcagggatgcctgctgcccaccgcgcagcaggggctggatcagatctggctgttactagctatttgtcttgcctgtcgcttgttatggaggctgggcctgccttcctacctgaagcatgcttcaactgtagccggcggcttcttctcattatatcacttcttccagctgcacatggtgtgggttgtgctgctgagtctgctgtgctacttggttctattcttatgtagacatagctcccaccggggcgtattcctgtcagtgaccattttgatttacctcctgatgggggagatgcacatggttgacaccgtgacttggcataagatgcgaggggcccagatgatcgtcgctatgaaggccgtgtcactgggcttcgacctcgacaggggcgaagtcggcacagtgccgtcccctgtcgagttcatgggctacctctattttgtcggaactatagtcttcggtccatggatctcttttcactcatacctccaggcagtgcagggaaggcctctgtcatgtcgctggcttcagaaggtcgctcggtctctggcgttggctctgctatgcctggtcctcagcacttgtgtcggtccttacctgtttccatactttatccccctaaacggggaccggctcctcagaaacaagaagaggaaagcgcgcggaacgatggttcggtggctgcgggcatacgagagcgccgtgagctttcatttttctaattatttcgttggtttcctctcagaggctactgcaaccctggcaggtgcgggttttactgaggagaaggaccacttggaatgggatttgaccgtgtctaagccactcaacgtggagctcccccggagcatggtcgaggtagtgacctcatggaatttaccaatgtcatattggctcaacaattatgtcttcaagaatgccctcagactgggtaccttctcggccgtcctggtaacctacgccgcgtctgctctgctgcatggcttctcatttcaccttgccgcggtgctgctgagccttgccttcattacctatgttgaacacgttctgcggaaaagactcgccaggattctaagtgcatgcgtgttgtctaagagatgtccgccagattgctcacatcaacaccggctgggactcggagtgcgggcccttaacctgctctttggagcgctcgctatttttcacttagcctacctgggctctctctttgatgtcgacgtagatgataccaccgaagaacaggggtacggcatggcatatacagtccataagtggtccgaactttcatgggcttcacattgggtcacatttggttgttggattttttaccgactcatcgggtag

SEQ ID NO: 263353 - DNA, 1386 bp, Artificial Sequence
  derived and/or modified sequence
atggccaccttcagccggcaggagttcttccagcagctgctgcagggctgcctgctgcccacagcccagcagggcctggaccagatctggctgctgctggccatctgcctggcctgccgcctgctgtggaggctgggcctgcccagctacctgaagcacgccagcacagtggccggcggcttcttcagcctgtaccacttcttccagctgcacatggtgtgggtggtgctgctgagcctgctgtgctacctggtgctcttcctgtgccgccacagcagccaccggggcgtcttcctgtctgtgaccatcctgatctacctgctgatgggagagatgcacatggtggacacagtgacctggcacaagatgagaggagcccagatgattgtggccatgaaggctgtgtccctgggctttgacctggacagaggagaggtgggcaccgtgcccagccctgtggagttcatgggctacctgtactttgtgggcaccatcgtgtttggcccctggatctccttccacagctacctgcaggccgtgcagggccggcccctgagctgccgctggctgcagaaggtggcccggagcctggccctggccctgctgtgcctggtgctgagcacctgtgtgggcccctacctgttcccctacttcatccccctgaatggagaccggctgctgaggaacaagaagaggaaggcccggggcaccatggtgcgctggctgcgggcctatgaatctgctgtgtccttccacttcagcaactactttgtgggcttcctgtctgaggccacagccaccctggccggggccggcttcacagaggagaaggaccacctggagtgggacctgactgtgtccaagcccctgaatgtggagctgcccaggtccatggtggaggtggtgacctcctggaacctgcccatgagctactggctgaacaactacgtgttcaagaatgccctgcggctgggcaccttctctgctgtgctggtgacctatgctgccagcgccctgctgcacggcttctccttccacctggccgctgtgctgctgagcctggccttcatcacctacgtggagcacgtgctgaggaagaggctggcccgcatcctgagcgcctgtgtgctgagcaagcgctgccccccagactgcagccaccagcaccggctgggcctgggcgtgcgggccctgaacctgctgtttggagccctggccatcttccacctggcctacctgggcagcctgtttgatgtggatgtggatgacaccacagaggagcagggctacggcatggcctacacagtgcacaagtggagcgagctgtcctgggccagccactgggtgaccttcggctgctggatcttctaccgcctcatcggctag

SEQ ID NO: 263354 - DNA, 1386 bp, Artificial Sequence
  derived and/or modified sequence
atggccaccttcagccggcaggagttcttccagcagctgctgcagggatgtttgctacccaccgcgcagcagggcctggatcagatttggctgcttttagccatctgtctggcctgcagacttctctggcggttaggcctgccttcttacttgaaacatgcttccactgttgccggcggatttttttccttatatcacttttttcagctccatatggtctgggtggtactactgagtctgctttgttatctggtgctgttcctgtgcagacatagctcacaccgcggcgtgtttctttctgtgactatcctcatctatcttctgatgggagagatgcatatggtggacacagtcacttggcacaagatgaggggcgctcagatgatcgtggctatgaaggcagtatccctcggctttgatcttgatcggggtgaggtggggacggtcccgagcccggtggaatttatgggatacctgtactttgtcggtaccatcgtttttggcccgtggatatcattccacagctacctgcaggccgtgcagggccggccactgtcctgtagatggttgcagaaggtggcaaggtccctcgccctggcactcctgtgcttagtcctgagtacgtgtgttggcccttacctctttccctacttcatcccactcaacggagatcgcctgctccggaacaaaaaacgtaaggcgaggggaaccatggttcggtggcttagggcttacgagagtgccgtcagctttcattttagcaactattttgtcggctttctctcagaggcgactgcaactctggcaggggccggtttcacagaggaaaaggatcaccttgagtgggacctgacggtcagtaagcccttgaatgtggagttgcctagatccatggtagaagttgtgacctcgtggaatctccccatgtcttattggttaaataattacgtgttcaagaacgccctacgccttggcaccttctcagctgtccttgtgacttatgccgcctcagcccttctccatggtttctccttccatctggctgcagtgttactttctctagcctttattacatatgtggaacatgtactacgtaagagacttgctcgcatcctctctgcctgtgtgctcagtaagcgatgtcctccagattgctctcaccaacaccgtctaggtttgggggtgagggcactgaatctgctgttcggagcccttgccatatttcacctcgcttatctgggctctctcttcgatgtcgatgtggatgatactaccgaagagcagggttatggcatggcctatactgtgcataagtggtccgaactgagttgggccagccactgggtcacctttggatgttggatcttctataggctcatcgggtag

SEQ ID NO: 263355 - DNA, 1386 bp, Artificial Sequence
  derived and/or modified sequence
atggctaccttctctcgacaggaattcttccagcaactgttgcaggggtgcctccttcccacagcccagcagggccttgaccagatatggctgctgttagctatttgcctggcatgccggttgctgtggcggttggggctgccgagctacctgaaacacgcgtctactgttgcgggaggattcttttccctctaccacttcttccagctacacatggtgtgggtggtgttgctgtcactgctgtgctacctggttctgttcctgtgccgccatagcagccaccgcggtgtattcttgtccgtgaccatcctgatttacctcttgatgggcgagatgcacatggtcgacacagtaacatggcacaagatgagaggcgctcagatgattgttgctatgaaagctgtcagtttgggcttcgacctcgacagaggcgaggtgggcacagtaccctctccagttgaattcatgggttacctctactttgtcggcacaattgtctttggcccatggattagctttcactcatacttgcaggccgtccagggacggccactgtcatgcaggtggctccagaaagttgcacggagtctcgcactggcgctgctgtgcttagttctgagtacctgcgtcggaccctacctgttcccctatttcattcctctgaacggagacagattgttacggaataaaaaacgcaaggctcgtggtactatggttcgatggctgagagcatatgagtctgcggtgtcctttcacttttctaattacttcgtgggtttcttgagtgaagccaccgctacccttgctggtgctggcttcaccgaggaaaaggatcacctagagtgggacttgaccgttagcaagcctctgaacgtggagctacctcgcagcatggtggaggtcgtcacgagctggaatctgccaatgagttattggttaaataactatgtgtttaaaaatgctcttcgtttagggacgttttccgctgtcttggttacctacgcagcgtcggccctgctccacggcttcagttttcatttagccgctgtccttttgtcattggcgtttattacttacgtcgagcatgttctgcgaaagaggttggcaagaatactgagcgcttgtgttttgtcgaagcgctgtccgccagattgctcccatcaacatcggctgggcctgggcgtcagagccctaaatctgcttttcggcgctctggccatctttcacctcgcctacttgggcagcctttttgacgtcgatgtggacgacaccacagaggaacaagggtatggaatggcatacaccgtccataagtggagtgagctcagttgggctagtcattgggtcacgtttggttgttggattttctaccggctgataggttag

SEQ ID NO: 263356 - DNA, 1386 bp, Artificial Sequence
  derived and/or modified sequence
atggccaccttttccagacaggagtttttccagcagctcctgcagggctgtctgctgccaactgcgcaacaggggctggaccagatctggttgctgctggccatctgccttgcttgccggttgctatggaggttaggcctgccttcctacctgaagcatgctagcacggtcgccggaggttttttctccctgtatcacttctttcagctccacatggtatgggtcgtgctcctctctctcctgtgttacctggtgttgttcctctgccgccactcctcacaccgcggcgtcttcctttccgtcaccattttaatctatttgttaatgggcgagatgcacatggtggacaccgtgacctggcataaaatgcgtggcgcgcaaatgatagtcgcaatgaaggctgtgtccctgggctttgacctggatcggggtgaagtcggcacagtcccttccccggtggagttcatggggtacctgtacttcgtgggtactattgtgtttggaccatggatttccttccactcatacttgcaagcggtccagggaagacctttatcttgccgttggctgcagaaagtcgctcgaagcctcgccctagctcttctatgcctggtactgtctacttgtgtcggcccttatctcttcccctacttcattccgctgaatggcgatcggttgctccgcaacaagaaacgcaaagccagggggaccatggtccggtggctacgcgcctatgagtcggctgtgagcttccatttcagcaattactttgtgggctttctttctgaagctacagcgaccctcgccggagccggattcactgaagagaaggaccaccttgaatgggatcttacagtgagcaagcctctaaatgtggaactgcctcgttcaatggtggaggttgtcacatcttggaatctgccaatgagctactggttaaacaactacgtcttcaaaaacgccttacgtcttggtactttttccgcagtactggttacgtacgctgcctctgctctgctccatggctttagtttccatctggccgcagtgcttctgtccctggcatttattacatatgtggagcacgtcttacggaagcggctagccaggatattatcagcctgcgtcctctcaaagagatgcccgccagactgtagccatcaacaccggttaggtctgggggtgagggcgctgaatctgctgttcggagcacttgccatcttccatctcgcgtatttaggctcgcttttcgatgtggacgtggacgataccaccgaggagcaaggctatggtatggcctacaccgtccacaagtggtccgagttatcttgggctagtcactgggtgaccttcggctgctggattttctatcgcctaatcgggtag

SEQ ID NO: 263357 - DNA, 1386 bp, Artificial Sequence
  derived and/or modified sequence
atggctacattcagccggcaggaattctttcagcaacttctgcagggctgcttgcttcccacggctcaacagggtttagaccagatttggttgctgctggcaatctgcctcgcatgcaggctgctctggcggctgggactaccatcttacctgaagcatgcctctaccgttgccggaggctttttttcactttaccacttcttccagctgcacatggtgtgggtcgtactgctgtccctgctgtgttacctcgtcttgtttttgtgccgccattcttcccaccgaggggtattcctgagcgtgacaatattgatctacctgctgatgggcgagatgcatatggtcgatacagtgacatggcacaagatgcggggggcccaaatgatcgtcgcaatgaaggccgtctcactgggatttgatctcgatcgtggggaggtgggtactgtgccctcacccgtggagttcatgggctacctttactttgtcggaacaatcgtgttcggcccgtggatctcgtttcacagctacctgcaggccgtgcaggggcgacctctgtcgtgccggtggctccaaaaggtcgccaggagcctggctctggccctactgtgtctggtactgtccacatgtgtcgggccgtacctgttcccctactttattccactaaacggagaccgcttgctcagaaataaaaaaaggaaagcgcgcggtacaatggtccggtggttgcgcgcatacgaatccgccgtatctttccactttagcaattacttcgtcggatttctgtctgaggcaactgcaacactggcaggagccggcttcacagaagagaaggatcacctggaatgggatctgaccgtgtcaaagccactgaacgtcgagcttcccaggagtatggttgaagtcgtgacttcatggaatctaccaatgtcttactggctgaataattacgtctttaaaaatgccctgcggctgggcacattctctgccgtgctcgtaacctacgctgcttctgctttgctgcacggcttttctttccacctcgccgcagtcctgctctctctggcattcataacttacgtggaacatgtcctccggaagcggctagctcggatcctatccgcatgcgtcctgtcgaagcggtgtccgcctgactgcagtcatcaacaccgcctcggcctcggggttcgggcgcttaatctgctgtttggggcccttgcaatttttcacttggcctacctgggttctctgtttgatgtggatgtcgatgatactaccgaggagcagggatatggcatggcttacactgttcataaatggagcgagttgagttgggcctcacactgggttacttttggctgctggatcttttatcggttaattggatag

SEQ ID NO: 263358 - DNA, 1386 bp, Artificial Sequence
  derived and/or modified sequence
atggccaccttcagccggcaggagttcttccagcagctgctgcagggatgtctgctgccgaccgcccaacaaggcctggatcagatctggttgctgctggcgatttgcctggcatgccgtctgctgtggcggttgggactgccttcctatctcaagcacgcctctacagtggccggtggcttcttctcgctttatcatttctttcagctgcatatggtctgggtggtcttgttatccttactgtgctatctggtattatttctatgccggcactcctctcatcgcggggtatttctgtccgtgaccattctcatctacctgctcatgggggaaatgcacatggtcgacacagtgacctggcataagatgagaggcgcccagatgatcgtcgcaatgaaggccgtttctttgggatttgacttagacaggggtgaagtaggtacagtgccttctcccgtcgagttcatgggctacttgtacttcgtcggtacgatcgttttcggcccctggatatcattccattcttacctgcaggctgtccagggcaggccactgagctgcaggtggctgcaaaaggtggccaggagcctggccctggctctgttatgtctggtgctgagtacctgcgtggggccttatctgtttccctactttattccacttaacggcgaccggcttttacgaaataagaagcggaaagcccgcggtaccatggtgaggtggttgagggcttacgaatccgctgtatcctttcatttcagcaactatttcgttggtttcctctcggaagcaactgcgactctggcgggagctgggtttaccgaggagaaagatcacttggaatgggatctcactgtcagtaagccactcaacgtggaactcccgaggtcaatggtagaagtagttacatcatggaacctgcccatgagttactggctcaataactacgtcttcaaaaacgcactgcgactcgggacgttttcagccgtgctggtgacttacgcggcaagtgcactgcttcatggattctcattccatctagctgccgtcctattatccctcgccttcatcacctacgtcgaacacgtcttgcggaagcgcctagctcggattctcagtgcatgcgtcttaagcaagcgctgtccacctgactgctcccaccagcatcggctcggcctgggggttagagctcttaatctcttgttcggcgcgttggctatttttcatctggcatacctgggctccttgttcgatgtggacgtggacgataccacagaagagcaggggtacggcatggcctacaccgtgcataaatggtctgaactctcctgggcctcacactgggtcaccttcggatgttggatattctatcgactcatcggatag

SEQ ID NO: 263359 - DNA, 1386 bp, Artificial Sequence
  derived and/or modified sequence
atggccaccttcagccggcaggagttcttccagcagctgctgcaggggtgtctcctgcccaccgcgcagcagggccttgatcaaatttggctactccttgccatttgcctggcatgccgacttctgtggaggctgggcctgcccagttacttaaagcacgcctctacggtcgccggaggattcttcagtctgtaccatttttttcagctgcacatggtttgggttgttctcctatcgttgctgtgttatctggtcttatttctttgtcggcattcctctcacagaggcgtgtttctgtctgtgacgatactgatctaccttttaatgggagaaatgcatatggtagacaccgtgacttggcacaagatgcgcggagcccaaatgatcgtcgctatgaaagcagtctctctgggttttgacctagaccgcggtgaggttggcacagttcctagccccgtggaatttatgggatacctgtatttcgtgggaaccattgtgtttggaccctggatttcttttcattcatacctgcaggcagtccagggaagaccgctcagttgtcgatggctacagaaggtggcgcgaagtttggccctggcactcctgtgtctggtgctgtccacttgtgtaggcccttacctgtttccatattttatccccctgaacggcgataggttactgcgtaacaaaaaaagaaaggccagaggcaccatggtgcgctggctgcgcgcctatgagagtgccgtgagcttccacttcagcaattatttcgtcggattcctttctgaagcaacagccaccttagccggcgctggctttacagaagagaaggatcacctggagtgggatttaacagttagcaaaccactcaacgtggagctgcccaggagtatggtggaagtggtgaccagttggaacctgcccatgtcttattggctgaacaattatgtttttaagaatgctctgcggctgggcaccttttctgcagtgctggtaacatacgccgctagcgctctgctccacgggttttcatttcacctggccgcagtgctgctcagcctggcctttatcacgtacgtggaacatgtgctccggaagcggcttgccagaattttgagcgcttgcgtgttaagtaaaaggtgcccacctgattgttcacaccagcaccgcttaggcttgggcgtgagagccttgaaccttctcttcggtgcactggcgatcttccatctggcctaccttgggtctttgtttgacgtggacgtggacgacacaacagaggagcaggggtacggtatggcatataccgtccacaagtggtccgaactctcatgggcaagtcactgggtgacatttggttgctggatcttttacaggcttattggatag

SEQ ID NO: 263360 - DNA, 1386 bp, Artificial Sequence
  derived and/or modified sequence
atggccaccttttctaggcaagaattcttccagcagctgcttcagggttgtctgttacccactgcacagcagggcctggaccaaatttggctgctcttagctatatgtcttgcctgccggctcttgtggcgactgggcctgccatcatatctgaagcacgcttctaccgtggcaggcggttttttcagcctgtatcatttcttccagttgcacatggtctgggtggtcctgctgtctttactctgctatctggtgctctttctgtgccgacatagttctcacaggggggtctttctgtctgtgactatcctgatttatctgctgatgggcgaaatgcacatggtggatacggtgacatggcacaagatgaggggagctcaaatgatcgtggctatgaaagccgtttccctggggttcgatcttgaccgcggtgaagtgggaacagtgccatctcccgttgagtttatgggatatctgtacttcgtcgggacaattgtattcgggccttggatatctttccatagttatctacaagcagtccagggcaggcctctgtcctgtcggtggcttcagaaagtggctcgctctctcgcactcgccttattatgtctcgtgctgagtacttgtgtcggtccataccttttcccgtatttcatccctttgaacggggatcgcctgctcaggaacaaaaaacgaaaggcaaggggcactatggtgcgctggttgcgcgcttatgaatctgccgtgtcattccatttctccaattattttgtgggatttcttagcgaagccaccgccacactggcaggtgccggatttaccgaggagaaggatcacctggagtgggatcttacggtttctaagcccctgaacgtcgagttaccgagatctatggtcgaggtagtaacctcctggaacttaccgatgagttattggctgaataactatgtgttcaaaaatgcactcagactggggacattttcagctgtgttggtcacgtatgctgcttctgccctcctgcatggcttttcctttcatctagcagctgtccttctttctttagccttcattacctacgtcgagcatgtgctccgaaaacggcttgcaaggatcctctctgcgtgtgtgttgagcaagaggtgccctcccgactgttcccaccagcacagactgggtctgggcgtgcgggcactcaacctcctgtttggcgcactggcaatcttccacttagcctaccttggcagcctatttgacgtggatgtagacgacactacagaggaacaggggtatggcatggcctacaccgttcacaaatggtccgaactttcctgggcctctcactgggtgacgtttggctgctggatcttttacaggctgataggctag

SEQ ID NO: 263361 - DNA, 1386 bp, Artificial Sequence
  derived and/or modified sequence
atggctaccttttcccggcaggagttttttcagcagttgttgcaggggtgcctgctcccgacggcccagcagggtctagaccagatttggctgcttctggccatttgcctagcgtgccgactgttgtggcggctgggtctcccctcttatctgaaacacgcctcaactgtggccggagggttcttctcactctaccactttttccaattgcatatggtatgggtcgtgctgctgtccctgttgtgctatctggtgctctttctatgcagacactcctcacaccggggtgtctttctgagcgtcactatcctcatatatttgttgatgggtgagatgcacatggtggacacagtgacttggcataaaatgcgaggtgctcaaatgatcgtagccatgaaggccgttagcctcggatttgacctggaccggggtgaggtaggaacggtgccctcacctgtggaattcatgggctatctatactttgttggcactattgtgtttggtccatggatttcttttcacagctatctgcaggctgtgcaggggaggccactgtcatgccgttggctgcaaaaagtggccagaagccttgctttagcgctcctttgcctggtcctctcgacctgcgtgggcccttacttgttcccttactttatccccctgaatggcgaccgtttgctccgcaacaagaaacgtaaagccagaggcaccatggtgcgctggctgcgggcatatgaatccgccgtgagttttcattttagcaactattttgtggggtttctcagcgaggctactgcaactctcgctggagccggatttaccgaagagaaagaccatctagaatgggaccttactgtatccaaaccgctcaatgtggaattacccaggagcatggtggaggtggtaacatcctggaatctgccaatgagctattggttgaacaactatgtttttaagaatgccctgcggctcggtacattttcagcagtcctagtcacatacgccgctagtgctttactgcatgggttttcattccaccttgccgcagtgttactgtctcttgcatttataacatacgtcgagcacgtgctccgcaagcgcctagcccgaatactgtctgcatgcgtactgagtaaacggtgtccaccagattgtagtcaccagcatcgtctaggcttgggggtgcgtgctctcaaccttctcttcggggcacttgcaattttccatctcgcatatctcgggagtctcttcgacgtggatgtggatgacacgacggaggagcaagggtacggcatggcgtacaccgtgcacaagtggagcgagctctcctgggcctctcattgggtcactttcggctgttggatcttctaccgtttaatcggatag

SEQ ID NO: 263362 - DNA, 1764 bp, Artificial Sequence
  derived and/or modified sequence
atggtgtctcctcgcatgtctggactgctttcgcagacggtcattttggctctaatctttcttccccagacacggcctgctggggtgtttgagctacagatacacagctttggaccaggacctggtcctggcgcccccaggtccccttgtagcgcaaggcttccttgccgtctgttcttccgcgtctgcctgaagcctggtctctccgaagaagctgccgagagcccatgtgcattgggagccgcactatccgcccgaggcccagtgtacactgagcagcccggggccccagccccagacctgccattgccggatggcctactgcaggtgcctttccgcgatgcttggccaggcactttcagctttatcatcgaaacatggcgagaggagcttggagatcagattggcggacctgcctggagcctactcgccagggtggccggccggcggcgtctggccgctggcgggccatgggccagagatattcagagagccggagcttgggagctgaggttctcttaccgggctagatgtgaaccccctgccgtgggaaccgcgtgcaccaggctgtgccgtccccgctctgcaccttctcgctgcgggccgggattacgcccatgtgctcctttggaagacgagtgtgaggccccattagtgtgtcgcgcagggtgtagcccagagcatgggttctgtgaacagcccggcgaatgtcggtgcctcgaagggtggactggaccactttgtaccgtgcctgtgtcgaccagctcctgtctgtctccccgcggaccatcttctgccactactgggtgcctggtccccggaccagggccgtgtgacggaaatccatgtgctaatggtggctcctgctctgagacacctcgatcattcgagtgtacctgcccaagagggttttatggcctgaggtgcgaggtgtcaggcgtgacctgtgccgacggcccgtgctttaacggaggactatgcgtaggaggcgccgatcccgattcagcgtacatttgtcattgcccccccggctttcagggctccaattgtgagaagcgtgtggatcgatgctccctgcagccgtgccggaacgggggactctgtctggatttgggacacgcgctgcgctgcagatgtcgcgccggatttgccgggcctcgctgcgagcacgacctcgatgactgcgctgggagggcatgtgccaacggaggtacctgtgtggaaggtggaggagcacacagatgcagctgcgccctaggcttcggcggacgggactgccgggaaagggcagacccctgcgccgcacgcccctgtgcccacggtgggcgatgttatgcccactttagcggactggtttgcgcatgtgcccccggctatatgggggcaaggtgtgaattccctgtccacccggatggggcgtctgccctcccagccgccccccctgggttgaggcctggcgatcctcagaggtatttacttcctccagccctggggttgctcgtcgcagcaggcgtggctggagccgctttgcttctggtacacgtgcggagacggggacactctcaagatgcaggctctagactcctcgctgggacccccgaaccttctgtgcacgctcttccagatgcactgaacaacctgcgaactcaggaaggctccggcgacgggccctctagctctgttgattggaacagacccgaagatgtggaccctcagggaatatacgtgatatccgctcctagcatatatgcacgtgaagcatag

SEQ ID NO: 263363 - DNA, 1764 bp, Artificial Sequence
  derived and/or modified sequence
atggtgagccccaggatgagcggcctgctgagccagaccgtcatcctggccctgatcttcctgccccagaccaggcctgctggggtgtttgagctgcagatccacagctttggacctggccctggccctggggcccccaggagcccctgcagcgcccggctgccctgccgcctcttcttccgggtgtgcctgaagccaggcctgtctgaggaggccgctgagagcccctgtgccctgggcgccgccctgagcgcccggggccctgtgtacacagagcagcccggggccccagccccagacctgcccctgcctgatggcctgctgcaggtgcccttcagagatgcctggccaggcaccttctccttcatcatcgagacctggagggaggagctgggggaccagattggaggccctgcctggagcctgctggcccgggtggccggcagaagaaggctggccgccggcggcccctgggcccgggacatccagagagctggggcctgggagctgcgcttctcctaccgggcccgctgtgagcccccagctgtgggcacagcctgcacccggctgtgccggcccaggtctgcccccagccgctgtggccctggcctgcggccctgtgcccccctggaggatgaatgtgaggcccccctggtgtgccgggccggctgcagccctgagcacggcttctgtgagcagcccggggagtgccgctgcctggagggctggacaggccccctgtgcaccgtgcctgtgtccaccagcagctgcctgagcccccggggccccagcagcgccaccaccggctgcctggtgcccggccctggcccctgtgatggcaacccctgtgccaatggaggcagctgcagcgagacccccaggagctttgaatgtacctgcccccggggcttctacggcctgcgctgtgaggtgtctggagtgacctgtgctgatggcccctgcttcaatggaggcctgtgtgtgggcggcgctgaccctgattctgcctacatctgccactgccccccaggcttccagggcagcaactgtgagaagagggtggaccgctgcagcctgcagccctgcagaaatggaggcctgtgcctggacctgggccacgccctgcgctgccgctgcagagctggctttgctggcccccgctgtgaacatgacctggatgactgtgccggccgggcctgtgccaacggcggcacctgtgtggagggcggcggggcccaccgctgcagctgtgccctgggctttggaggccgggactgccgggagagagctgacccctgtgccgcccggccctgtgcccacggcggccgctgctacgcccacttcagcggcctggtgtgtgcctgtgcccctggctacatgggcgcccgctgtgagttccctgtgcacccagatggagccagcgccctgcctgctgcccctcctggcctgcggcctggggacccccagcgctacctgctgcccccagccctgggcctgctggtggccgccggcgtggccggggccgccctgctgctggtgcacgtgagaagaagaggccacagccaggatgctggcagccggctgctggccggcaccccagagcccagcgtgcacgccctgcctgatgccctgaacaacctgcggacccaggagggcagcggagatggccccagcagctctgtggactggaacagaccagaagatgtggacccccagggcatctacgtgatcagcgcccccagcatctatgcccgggaggcctag

SEQ ID NO: 263364 - DNA, 1764 bp, Artificial Sequence
  derived and/or modified sequence
atggtgagcccccggatgagcggcctgctgagccagaccgtgatcctggccctgattttcttgcctcagacaaggccggcaggtgtgtttgagctacagattcactccttcgggcctggaccaggccctggagccccgcggtccccctgctcggcacgcttaccttgccggctgttcttccgtgtctgtttgaagccaggattgtccgaggaagccgcagaatccccttgtgcgctgggcgccgctctgagcgcccgtggacccgtttataccgagcaacccggagctcctgcccccgatcttcctctccccgacggattgctccaggttccattccgcgatgcctggccgggtactttctcatttatcattgaaacctggcgcgaggagctaggcgatcaaattgggggtcccgcgtggtccctccttgccagggttgctggacggcgtcgtctcgcagccggtggtccatgggcgcgcgatatacagagagcgggcgcctgggaattgagatttagctacagggcgcgatgcgaaccccccgccgtcgggactgcttgcacccggctgtgtcgaccgcgttcagccccgtctcggtgtggacctggactgcgcccctgcgcacccttagaagacgagtgtgaggctcctttggtgtgcagggccgggtgttctccggaacacggcttctgtgaacagcctggtgagtgtaggtgtctggaggggtggacaggcccgctgtgcacggtgcccgtctctactagcagctgcttgagccctcgcgggccctctagtgcaaccacaggttgtttagtgccagggcctggcccttgtgatgggaacccctgcgctaatggggggagttgtagtgagacacctagatcctttgagtgcacatgtccacgtggcttctacggcttacggtgcgaagtgtccggggtgacatgcgccgacgggccatgcttcaacggcggactatgcgtgggaggtgccgatcctgactccgcctatatttgccactgccctcctggcttccagggctccaactgcgagaagagagtggaccgatgcagccttcagccatgtcgcaacggggggctgtgcctggacctcggccatgcactgcggtgccgatgcagggccggcttcgccggcccaaggtgtgagcacgatctcgacgattgtgcggggcgcgcctgtgccaatgggggaacatgtgtcgaggggggaggcgctcaccggtgctcatgcgccctggggttcggagggcgcgattgcagagagcgcgcagacccatgtgccgcaagaccttgcgcccatggcggtagatgctacgcccacttttctggcttagtgtgtgcgtgcgccccagggtacatgggagctcggtgtgaattcccggttcatcctgacggcgcaagcgctctgcctgcagcgcccccgggccttcgccccggtgatccacagaggtatttgctcccaccggcactgggactgctggtggcagctggcgtcgcgggagctgccctgttgcttgtccatgtaaggaggcgtggtcatagtcaggatgccgggagtaggttgctagccggcactccagagcctagtgttcatgccctgccagatgctctgaacaacctcaggacgcaggaaggaagtggggacggcccatcgtcttccgtggactggaaccgtcccgaagatgtggacccccaaggaatctacgtgatctccgcccctagtatctacgcacgtgaagcatag

SEQ ID NO: 263365 - DNA, 1611 bp, Artificial Sequence
  derived and/or modified sequence
gtgttctgctgcaactacggccactgccccccccggccccccgcccttcgaccctgcccccctcccctccgcggacgacctgggtctaccgaactgacaactacagccaccacgaccgccagcacaggaagcacggctacccctagctccacccccgggactgctccccctccgaaggtactcaccagccctgctactacgccgacggccactagctcgaaagctacgagttcttccagtccaagaacggccactacgctgcctgtgctcacgtccaccgcaaccaagagcactgcaacttctgtgacgccaattccgtcctccacactcgggaccactgggactctccctgagcaaacaactactcccgtggccacaatgtccaccatccatcccagcagcacacctgaaactactcacacgtcaacggtccttacaactaaagctaccacgactcgcgctacatcctccacgagtacccctagtagcactcctgggacaacttggattctgacagaacttacaactgccgccactacaaccgcagctaccggacccaccgcgacacccagctctacaccaggcaccacctggatccttacagagctcaccaccaccgccacgacgaccgcaagtacggggtctaccgctacccctagttccacaccgggcacaacttggattttaacggaaccttctaccacagctacagtcacagtgcctactggctctacggccactgcctcaagcacacaggcgaccgcgggcacaccacacgtgtccacaaccgctaccacccctacggttacctcttcaaaggctaccccgagttccagtccaggtactgcaacggccctccccgctctccgcagtaccgctacgacccattcctaccagctgtacagccaccccctgctgctgcccactacatggactagactttctcagaccacaacacctaccgccaccatgtcaactgctactccatcttctactccggagactgtacatacaagcactgtcctcacggccaccgctaccactactggcccagccctctggcctccgccccccccaccacaagagcagctgacacttccaaagtgccggctgccacagccaagacatagtcatccattgctgcagccaagagatggcacacacgcgagttccgtggaccagcacaatcatcacacacacaaccaccacacccacaaccaatggcttcacggagaccctctattgcatcctggagaccacccccaccgccagtctgcagatcaccatcaccacaactgcacaggaagtatggctacaccaagttcaagcactcagacttctggaacacccccgagtcttactacgactgccaccacaatcaccgcaaccggcagcacaactaaccccagtagcacaccagggacaactcccattacacctgtgctgacctctactgctaccacccctgccgctacatcgagcaaggctaccagttcatcctccccacggactgcgacaactctgccggtgcttacctctactgcgacaaagtctacagctacctcatttacccccatcccaagcccttgcggcccccgaggtccctcttag

SEQ ID NO: 263366 - DNA, 1764 bp, Artificial Sequence
  derived and/or modified sequence
atggtctccccacggatgagcggactgttatcccagacagtgattctcgcacttatctttcttccccagacgcgccctgctggggtgttcgagctgcaaatacactctttcggccctgggcctggccctggtgcacctcgctctccgtgttccgctagactcccttgcaggctcttcttccgagtttgcttgaaacccggactgagcgaagaggctgcagagagcccatgtgcccttggtgcggctctgtccgcaaggggcccagtctatactgaacagcccggagcacctgcccctgatctcccactcccagacgggctgctgcaagtgccattccgtgatgcctggcctggcactttctcgttcatcatcgagacgtggagagaggaactgggagaccaaattggcggtcctgcatggtctctactggctcgggtcgctggaagacggcgtttggcagctgggggaccatgggcgcgtgacatccagagagccggagcctgggaactacgattctcataccgtgcccgatgcgaaccgcctgccgttggaaccgcttgtacgagactctgcagaccaagatcagctccttccagatgcggtccgggactgcgcccatgtgctccgctggaggacgagtgtgaagcccctctcgtctgccgggcaggttgcagcccggaacacgggttctgtgagcagccaggtgaatgtcgatgtctggagggctggaccggccctctgtgcaccgtgcccgttagcactagtagttgccttagcccacgagggccaagttctgctacaacaggatgtctggtacccggtcctgggccatgtgacgggaacccgtgcgccaacgggggaagttgcagtgagactccgcgatccttcgaatgcacttgtcctcggggattctacggtctgagatgcgaagtgtcgggcgtcacttgtgccgacggaccatgtttcaacggcggactatgtgtcggtggcgcagacccagactctgcctacatttgtcattgtccccctggttttcagggaagcaactgtgagaagcgagttgaccgatgctcactgcagccttgccgcaatggcggattgtgtttggaccttggacacgccctccgatgtaggtgccgcgctggctttgccggaccacgatgtgaacatgatctggacgattgtgctgggagagcctgcgcaaacggaggaacatgcgtggaaggaggcggagcccacagatgctcatgtgctttggggtttgggggacgagactgcagagagagggccgacccttgtgcagcacgcccatgtgcgcatggcggtcgctgttatgcacatttctcaggtctcgtgtgtgcctgcgcccctggctacatgggagcgaggtgtgagttccccgttcaccctgacggagcaagcgcactgcctgcagcccctcccggattaaggcctggagacccgcagcggtatctgctacccccagcactgggcctgttggtggctgcgggagtggctggtgcagcgctgctgttggtgcatgtgcgacggcgtggacactctcaggatgcgggatcccgtttgctggccggtacccctgaaccttctgtgcacgcgctgccagacgcccttaacaacctgcgaacccaagaaggctctggagatggaccttccagctcggtagactggaatcgtcccgaagacgtggacccacaaggaatatatgtgattagcgcccctagcatctatgctagagaagcttag

SEQ ID NO: 263367 - DNA, 1764 bp, Artificial Sequence
  derived and/or modified sequence
atggtgagccccagaatgagcggcctgctgagccagaccgtgatcctggccctgatcttcctgccccagaccagacccgccggcgtgttcgagctgcagatccacagcttcggccccggccccggccccggcgcccccagaagcccctgcagcgccagactgccctgcagactgttcttcagagtgtgcctgaagcccggcctgagcgaggaggccgccgagagcccctgcgccctgggcgccgccctgagcgccagaggccccgtgtacaccgagcagcccggcgcccccgcccccgacctgcccctgcccgacggcctgctgcaggtgcccttcagagacgcctggcccggcaccttcagcttcatcatcgagacctggagagaggagctgggcgaccagatcggcggccccgcctggagcctgctggccagagtggccggcagaagaagactggccgccggcggcccctgggccagagacatccagagagccggcgcctgggagctgagattcagctacagagccagatgcgagccccccgccgtgggcaccgcctgcaccagactgtgcagacccagaagcgcccccagcagatgcggccccggcctgagaccctgcgcccccctggaggacgagtgcgaggcccccctggtgtgcagagccggctgcagccccgagcacggcttctgcgagcagcccggcgagtgcagatgcctggagggctggaccggccccctgtgcaccgtgcccgtgagcaccagcagctgcctgagccccagaggccccagcagcgccaccaccggctgcctggtgcccggccccggcccctgcgacggcaacccctgcgccaacggcggcagctgcagcgagacccccagaagcttcgagtgcacctgccccagaggcttctacggcctgagatgcgaggtgagcggcgtgacctgcgccgacggcccctgcttcaacggcggcctgtgcgtgggcggcgccgaccccgacagcgcctacatctgccactgcccccccggcttccagggcagcaactgcgagaagagagtggacagatgcagcctgcagccctgcagaaacggcggcctgtgcctggacctgggccacgccctgagatgcagatgcagagccggcttcgccggccccagatgcgagcacgacctggacgactgcgccggcagagcctgcgccaacggcggcacctgcgtggagggcggcggcgcccacagatgcagctgcgccctgggcttcggcggcagagactgcagagagagagccgacccctgcgccgccagaccctgcgcccacggcggcagatgctacgcccacttcagcggcctggtgtgcgcctgcgcccccggctacatgggcgccagatgcgagttccccgtgcaccccgacggcgccagcgccctgcccgccgccccccccggcctgagacccggcgacccccagagatacctgctgccccccgccctgggcctgctggtggccgccggcgtggccggcgccgccctgctgctggtgcacgtgagaagaagaggccacagccaggacgccggcagcagactgctggccggcacccccgagcccagcgtgcacgccctgcccgacgccctgaacaacctgagaacccaggagggcagcggcgacggccccagcagcagcgtggactggaacagacccgaggacgtggacccccagggcatctacgtgatcagcgcccccagcatctacgccagagaggcctag

SEQ ID NO: 263368 - DNA, 2043 bp, Artificial Sequence
  derived and/or modified sequence
agatataaggcttggaagccagcagctgcgactcccgagacccccccaccagaaggccatggtctccccacggatgtccgggctcctctcccagactgtgatcctagcgctcattttcctcccccagacacggcccgctggcgtcttcgagctgcagatccactctttcgggccgggtccaggccctggggccccgcggtccccctgcagcgcccggctcccctgccgcctcttcttcagagtctgcctgaagcctgggctctcagaggaggccgccgagtccccgtgcgccctgggcgcggcgctgagtgcgcgcggaccggtctacaccgagcagcccggagcgcccgcgcctgatctcccactgcccgacggcctcttgcaggtgcccttccgggacgcctggcctggcaccttctctttcatcatcgaaacctggagagaggagttaggagaccagattggagggcccgcctggagcctgctggcgcgcgtggctggcaggcggcgcttggcagccggaggcccgtgggcccgggacattcagcgcgcaggcgcctgggagctgcgcttctcgtaccgcgcgcgctgcgagccgcctgccgtcgggaccgcgtgcacgcgcctctgccgtccgcgcagcgccccctcgcggtgcggtccgggactgcgcccctgcgcaccgctcgaggacgaatgtgaggcgccgctggtgtgccgagcaggctgcagccctgagcatggcttctgtgaacagcccggtgaatgccgatgcctagagggctggactggacccctctgcacggtccctgtctccaccagcagctgcctcagccccaggggcccgtcctctgctaccaccggatgccttgtccctgggcctgggccctgtgacgggaacccgtgtgccaatggaggcagctgtagtgagacacccaggtcctttgaatgcacctgcccgcgtgggttctacgggctgcggtgtgaggtgagcggggtgacatgtgcagatggaccctgcttcaacggcggcttgtgtgtcgggggtgcagaccctgactctgcctacatctgccactgcccacccggtttccaaggctccaactgtgagaagagggtggaccggtgcagcctgcagccatgccgcaatggcggactctgcctggacctgggccacgccctgcgctgccgctgccgcgccggcttcgcgggtcctcgctgcgagcacgacctggacgactgcgcgggccgcgcctgcgctaacggcggcacgtgtgtggagggcggcggcgcgcaccgctgctcctgcgcgctgggcttcggcggccgcgactgccgcgagcgcgcggacccgtgcgccgcgcgcccctgtgctcacggcggccgctgctacgcccacttctccggcctcgtctgcgcttgcgctcccggctacatgggagcgcggtgtgagttcccagtgcaccccgacggcgcaagcgccttgcccgcggccccgccgggcctcaggcccggggaccctcagcgctaccttttgcctccggctctgggactgctcgtggccgcgggcgtggccggcgctgcgctcttgctggtccacgtgcgccgccgtggccactcccaggatgctgggtctcgcttgctggctgggaccccggagccgtcagtccacgcactcccggatgcactcaacaacctaaggacgcaggagggttccggggatggtccgagctcgtccgtagattggaatcgccctgaagatgtagaccctcaagggatttatgtcatatctgctccttccatctacgctcgggaggcctgacgcgtctcctccatccgcacctggagtcagagcgtggatttttgtatttgctcggtggtgcccagtctctgccccagaggctttggagttcaatcttgaaggggtgtctgggggaactttactgttgcaagttgtaaataatggttatttatatcctattttttctcaccccatctctctagaaacacctataaaggctattattgtgatcagttttgact

SEQ ID NO: 263369 - protein, 1237 aa, Artificial Sequence
  derived and/or modified sequence
MDLRDFYLLAALIACLRLDSAIAQELIYTIREELPENVPIGNIPKDLNISHINAATGTSASLVYRLVSKAGDAPLVKVSSSTGEIFTTSNRIDREKLCAGASYAEENECFFELEVVILPNDFFRLIKIKIIVKDTNDNAPMFPSPVINISIPENTLINSRFPIPSATDPDTGFNGVQHYELLNGQSVFGLDIVETPEGEKWPQLIVQQNLDREQKDTYVMKIKVEDGGTPQKSSTAILQVTVSDVNDNRPVFKEGQVEVHIPENAPVGTSVIQLHATDADIGSNAEIRYIFGAQVAPATKRLFALNNTTGLITVQRSLDREETAIHKVTVLASDGSSTPARATVTINVTDVNDNPPNIDLRYIISPINGTVYLSEKDPVNTKIALITVSDKDTDVNGKVICFIEREVPFHLKAVYDNQYLLETSSLLDYEGTKEFSFKIVASDSGKPSLNQTALVRVKLEDENDNPPIFNQPVIELSVSENNRRGLYLTTISATDEDSGKNADIVYQLGPNASFFDLDRKTGVLTASRVFDREEQERFIFTVTARDNGTPPLQSQAAVIVTVLDENDNSPKFTHNHFQFFVSENLPKYSTVGVITVTDADAGENKAVTLSILNDNDNFVLDPYSGVIKSNVSFDREQQSSYTFDVKATDGGQPPRSSTAKVTINVMDVNDNSPVVISPPSNTSFKLVPLSAIPGSVVAEVFAVDVDTGMNAELKYTIVSGNNKGLFRIDPVTGNITLEEKPAPTDVGLHRLVVNISDLGYPKSLHTLVLVFLYVNDTAGNASYIYDLIRRTMETPLDRNIGDSSQPYQNEDYLTIMIAIIAGAMVVIVVIFVTVLVRCRHASRFKAAQRSKQGAEWMSPNQENKQNKKKKRKKRKSPKSSLLNFVTIEESKPDDAVHEPINGTISLPAELEEQSIGRFDWGPAPPTTFKPNSPDLAKHYKSASPQPAFHLKPDTPVSVKKHHVIQELPLDNTFVGGCDTLSKRSSTSSDHFSASECSSQGGFKTKGPLHTRQCNSHSKSDNIPVTPQKCPSSTGFHIQENEESHYESQRRVTFHLPDGSQESCSDSGLGDHEPVGSGTLISHPLPLVQPQDEFYDQASPDKRTEADGNSDPNSDGPLGPRGLAEATEMCTQECLVLGHSDNCWMPPGLGPYQHPKSPLSTFAPQKEWVKKDKLVNGHTLTRAWKEDSNRNQFNDRKQYGSNEGHFNNGSHMTDIPLANLKSYKQAGGATESPKEHQL

SEQ ID NO: 263370 - DNA, 3714 bp, Artificial Sequence
  derived and/or modified sequence
atggacctcagagatttttacttattagctgccctgattgcttgcctgcgacttgactctgctatcgcccaggagctgatctatacaatccgagaagagctgccagagaacgtccccatcggaaacatacctaaggatctcaatatttcccacatcaatgccgctaccggcacctctgctagtctggtttatagattagtgtcaaaggcaggcgacgcaccactggttaaggtgtcaagtagtacaggtgaaatttttactactagcaaccggatcgaccgcgaaaagctttgcgctggcgcatcttacgccgaagaaaacgaatgtttctttgagcttgaagtcgttattctgcctaacgattttttcaggctaattaagattaagatcattgtcaaagatactaatgacaacgccccaatgttcccctcgcctgtgataaatatcagcattccagagaacacacttatcaatagccgattccctatcccttctgccaccgaccccgatactgggtttaatggggtccagcactatgagctcctcaatgggcagtcagtctttggcctggatatcgtggagacccccgaaggtgagaagtggccccaactcatcgtccagcagaacctggacagggaacagaaagacacctatgtcatgaagattaaggtcgaggacggaggtacgccgcagaagtcttccactgcgatcctccaggtgacagtttctgatgttaatgataatcgcccagtgtttaaagaaggccaggttgaggtccacatccctgagaatgctcccgttggcacatcagtcatacagttacacgctaccgacgctgacataggatctaacgccgagattaggtacatttttggggcccaggttgctcccgcaaccaagcggctcttcgcacttaataacaccaccggtctcatcacagtgcaacgatctcttgacagggaggaaacagcaattcacaaggtcactgttctggcaagcgatggtagctctactccagcacgcgccaccgttactattaatgtgaccgatgttaacgacaaccccccaaacatcgatctacgctatatcatttctcctatcaacggaactgtatatctgtctgaaaaagatcctgtcaataccaagatcgccttgatcaccgtctcggataaggatacggacgtcaacgggaaggtgatctgtttcatcgagagggaggtccccttccacctcaaggctgtgtatgacaaccagtacctcctggaaacttcaagcctgctggattacgaaggaacaaaagaattttcatttaaaattgtggcctcagatagtggtaaaccgtcattaaaccaaaccgcccttgtcagagtcaagctggaagacgagaacgataatcctcccatctttaaccaaccagtcattgagctaagtgtttcagagaataaccgtcgaggactgtacctgactaccatctccgctactgatgaggattctggcaagaacgctgacatagtgtatcagctgggcccaaacgcatcctttttcgatcttgatcgtaagaccggtgtgcttaccgcctccagggttttcgatagagaggagcaggagcgtttcatcttcacagttactgctagggacaatggcactccccccctgcagagccaggctgctgttattgtgaccgtcctggatgaaaatgacaacagcccaaagtttacacataatcacttccaattctttgtgagtgaaaatttaccaaagtatagtactgtgggtgtaataacagtgacagatgcagatgccggtgagaataaggccgtgaccctgagtattctcaatgacaatgacaacttcgtgctcgatccttactctggtgtcatcaagagcaatgtgagcttcgatagggaacagcagtccagctatacgttcgacgtgaaagccacagatgggggtcagcctccaagatcctcaactgcaaaggtaacaattaatgtcatggacgtgaacgacaactcccctgtggtaatttcaccacctagtaatactagctttaaactggtgcccttgagtgctatcccgggctccgtagttgcggaagtgttcgccgttgacgtagacacaggaatgaatgccgagttaaagtacacaatcgtgagcggtaacaacaagggcctgttcaggatcgatccggtgaccggcaacataactctggaagagaagccggcccctaccgatgttggcctgcataggcttgtggtgaacatctctgacttgggttatccgaaatcactgcatacactggttctggttttcctgtacgtgaacgatacagcaggcaatgcctcttatatctacgatttgattaggcggacgatggagacgccattagatcgtaatattggtgattcaagccagccttatcagaatgaggactatctcacaattatgatcgcaattatagccggcgccatggtggtgatcgtagtgatctttgtaaccgtcctggtcaggtgtagacacgcatcgaggttcaaggccgcgcagcgatctaagcagggtgctgagtggatgtctccaaatcaggagaacaagcaaaacaaaaaaaagaagcggaaaaaaagaaaaagtcccaaatcttccctgctgaatttcgtaaccatcgaggagagcaaacccgatgacgccgttcatgagcctatcaacggaaccatttcactgcccgccgagctggaagagcagagcatcgggaggtttgactggggcccagctccccctactacctttaaacctaactcacccgatctggccaaacattataaatctgcctcgccgcagcctgcgtttcatctaaagcccgacacaccagtgtcagtgaagaagcatcacgtcatacaagagcttcccctcgacaatacattcgtgggagggtgtgacacactgtccaaacgaagctccacctcttcagatcacttctccgcatctgagtgctcgtcacaaggagggtttaagacgaagggtcctctgcacacacgccagtgtaattctcacagcaaatccgataacatccctgtcaccccccagaagtgccctagcagtaccggtttccatattcaggagaacgaggagtcccactatgagtcccaaagaagagtgacgttccacctcccggatgggtctcaggagtcgtgctccgattcagggttgggcgaccacgaacctgtgggaagtggaactctcatcagccaccctctgccactggtccagccccaagacgaattttatgaccaggcaagccccgataagcggactgaggcggatggcaatagcgatcctaattctgacggcccattaggcccgcgcggtctcgccgaggctaccgagatgtgtactcaggagtgtttggttcttgggcatagtgataactgttggatgccacccggactgggcccataccagcaccccaagtctcccctttcgacttttgccccccagaaggagtgggttaaaaaggataaactcgtcaacgggcatactcttactagggcctggaaggaagactcgaaccgaaaccagttcaatgaccggaagcagtatgggtcgaatgaagggcacttcaacaatggcagccatatgacagacattcctctagctaatcttaaatcatataagcaagctggcggcgctacagaatccccaaaggagcatcagctctag

SEQ ID NO: 263371 - DNA, 3714 bp, Artificial Sequence
  derived and/or modified sequence
atggacctccgggatttttacctgctggccgctctcatcgcgtgtctgaggctagattccgctatcgcccaagagctgatctatacaatccgtgaagaactgcctgagaatgtccctattggaaatatccctaaggacctgaacatatcacatatcaacgcggctaccggtacgagtgccagtcttgtgtatagactggtgtccaaagctggggacgctcccctggtaaaggtttcctctagcaccggtgagatctttacaaccagcaaccggattgacagagagaaattatgtgcaggagccagctacgctgaggagaacgagtgcttcttcgagctcgaagtagtcatcctgccaaacgacttctttcggctaattaaaataaaaatcatcgtgaaggatacaaatgataacgctcccatgtttccaagccctgttataaacatcagcattccagagaataccctaatcaattctagattccctatcccttctgctaccgacccagataccgggtttaacggagtacaacactacgaactcctgaacggacagagcgtgttcggcctagatatcgtagagacccccgagggggagaaatggccacagctgattgtccaacaaaatttagatagagagcaaaaagacacttatgtaatgaagattaaagttgaagatggtgggaccccacagaaatcatccacagccattttgcaggtcactgtgtctgacgtgaacgataacagacccgtctttaaagaaggacaagtcgaggtgcatatcccagagaatgcccccgttggaaccagcgttatccagttgcacgcaacagatgcagacatcgggtccaatgctgaaattcgctatatcttcggggcacaggtggccccagcaactaaaaggctgttcgccctcaataacactactggactcattacagtgcagagaagcctagaccgcgaggagacagccattcataaggtaacagtgctcgcctctgatggtagcagcactccagcccgtgctacggtcaccatcaatgtgaccgacgtcaacgataatccccctaacattgacttacgttatataatctctcctattaacggcaccgtgtatctttctgaaaaagatcccgtgaatactaagatcgctcttatcactgtgtccgataaagacacagatgtcaatggcaaagtaatttgcttcatcgagcgcgaagtgccattccatctaaaagccgtatacgataatcaatacctgcttgagacatcatcactgctggattatgagggaaccaaagagttcagcttcaaaattgtcgcttcagatagtgggaaaccatcactgaaccagaccgccctggtgcgcgtaaagttagaagacgagaatgataaccctcccatatttaaccagcccgtgatcgagctgagtgtgagtgaaaacaatcgacgggggctgtatttgaccactatcagcgccaccgacgaggatagtggaaaaaatgcggatatcgtataccagcttggcccaaatgcaagctttttcgatcttgaccgaaaaacaggtgtgttgacagctagcagggtgttcgatcgggaagagcaagaacgcttcatattcaccgtaacagccagggataatggcacaccccccctccagtctcaggccgccgtgatagtgactgttttggatgaaaatgataatagccccaaatttacccacaaccacttccagttttttgtatccgagaatttacccaagtattctacagtgggtgtcataaccgtcaccgatgccgacgccggagagaacaaggccgtcaccctgtcaattctgaacgataacgataactttgtgctggacccttacagcggcgtcatcaagtccaacgtttctttcgacagagagcaacagtccagttatacattcgacgtgaaggcaaccgacggaggccagcccccccggagttctactgccaaagtaacaattaacgtaatggacgtcaacgataattcaccagtagtcatcagccctccgagtaatacatccttcaaactggtccccttatccgctattcctggaagtgtcgtggccgaagtgttcgcggttgacgttgacacaggcatgaatgctgaactgaagtacaccattgtgtctggtaataacaagggcctcttcaggatcgaccccgttaccggaaacatcacattagaggaaaagcctgcaccaacggatgttggcctgcatcgacttgtggtcaatatcagtgacctcggttaccccaagtctctgcacaccctggttttagtcttcctttatgtaaacgacacggccggaaatgcctcatacatctatgatttgatccgccggacaatggagacccccctggatcgaaatatcggcgatagctcgcaaccttatcagaacgaagactatttgaccataatgatcgccatcatcgcaggagccatggttgtcatcgtggtcatttttgtgaccgtattggtgcggtgccgccacgcatccagattcaaagctgcacagagatctaaacagggggcggagtggatgtctcctaatcaggagaataaacagaacaagaaaaagaagaggaagaagagaaaaagccctaaatcttcccttttgaacttcgtgacaatagaagaatccaaacccgacgatgccgtccacgagcccattaatgggacaatttctttgccagccgagttggaagaacaatctattggtcggtttgactgggggcctgcaccaccaaccaccttcaaaccaaactccccagacctggccaagcattacaaaagcgcctccccacaacccgccttccatttgaagcctgacacacctgtgtcagttaaaaaacatcatgtcatccaggagctccccctggataatacctttgtgggcggctgcgacacactgtctaaaagaagttcgaccagctctgatcacttcagcgctagcgaatgctctagtcaggggggttttaaaactaaggggcctcttcatacacgacagtgtaacagccactccaaaagcgacaacatacctgttacgcctcagaagtgcccgagcagtacggggtttcatatccaagagaatgaagaatcccactacgaaagtcagcggagggtgacattccatctcccagatggtagccaggaaagctgcagtgactctggactgggcgaccacgaacctgtgggctcaggcactcttataagccacccattgcccctcgtccagcctcaggatgagttttatgatcaagcttcccccgataagcggaccgaagccgacggaaattccgatcccaattcagatggccctctaggacctcgtggactggcagaggccaccgagatgtgtactcaggaatgcttagtcctgggacatagcgacaactgctggatgcctccaggcctgggaccataccagcatcccaagagtccgctgtccaccttcgctcctcaaaaggaatgggtcaagaaagataaactcgttaacggtcataccctgactagggcctggaaagaagactcaaatagaaaccagttcaacgaccgaaagcagtacggctcgaacgagggccatttcaacaacggaagccacatgaccgatatccccctggccaatcttaaatcgtataagcaagccggaggggccaccgagtcccccaaggagcatcagttatag

SEQ ID NO: 263372 - DNA, 3714 bp, Artificial Sequence
  derived and/or modified sequence
atggacctgcgggacttctacctgctggccgccctgattgcctgcctgcggctggacagcgccatcgcccaggagctgatctacaccatccgggaggagctgcctgaaaatgtgcccatcggcaacatccccaaggacctgaacatcagccacatcaatgctgccaccggcaccagcgccagcctggtgtaccgcctggtgtccaaggctggagatgcccccctggtgaaggtgagcagcagcactggagagatcttcaccaccagcaacagaattgaccgggagaagctgtgtgccggggccagctatgcagaggagaatgaatgcttctttgagctggaggtggtgatcctgcccaatgacttcttccgcctcatcaagatcaagatcatcgtgaaggacaccaatgacaatgcccccatgttccccagccctgtgatcaacatcagcatccctgagaacaccctcatcaacagccgcttccccatccccagcgccacagatcctgacaccggcttcaacggggtgcagcactatgagctgctgaatggccagagcgtgtttggcctggacatcgtggagaccccagagggggagaagtggccccagctgattgtgcagcagaacctggaccgggagcagaaggacacctacgtgatgaagatcaaggtggaggatggcggcaccccccagaagagcagcacagccatcctgcaggtgacagtgtctgatgtgaatgacaacagacctgtgttcaaggagggccaggtggaggtgcacatcccagaaaatgcccctgtgggcaccagcgtcatccagctgcacgccacagatgctgacatcggcagcaatgctgagatccgctacatctttggagcccaggtggccccagccaccaagaggctgtttgccctgaacaacaccaccggcctcatcaccgtgcagaggagcctggaccgggaggagacagccatccacaaggtgacagtgctggccagtgatggcagcagcaccccagcccgggccaccgtgaccatcaacgtgacagatgtgaatgacaacccccccaacatcgacctgcgctacatcatcagccccatcaatggcaccgtgtacctgtctgagaaggaccctgtgaacaccaagatcgccctgatcaccgtgtctgacaaggacacagatgtgaatggcaaggtgatctgcttcatcgagcgggaggtgcccttccacctgaaggctgtgtatgacaaccagtacctgctggagaccagcagcctgctggactatgagggcaccaaggagttctccttcaagatcgtggccagtgacagcggcaagcccagcctgaaccagacagccctggtgcgggtgaagctggaggatgaaaatgacaacccccccatcttcaaccagcccgtcatcgagctgtctgtgtctgagaacaacagaagaggcctgtacctgaccaccatcagcgccacagatgaggacagcggcaagaatgctgacatcgtgtaccagctgggccccaatgccagcttctttgacctggacaggaagacaggagtgctgacagccagccgggtgtttgaccgggaggagcaggagcgcttcatcttcaccgtgacagcccgggacaatggcaccccacccctgcagagccaggccgctgtgattgtgacagtgctggatgaaaatgacaacagccccaagttcacccacaaccacttccagttctttgtgtctgagaacctgcccaagtacagcacagtgggcgtcatcaccgtgacagatgctgatgctggggagaacaaggctgtgaccctgagcatcctgaatgacaatgacaactttgtgctggacccctacagcggggtcatcaagagcaatgtgtcctttgaccgggagcagcagagcagctacacctttgatgtgaaggccacagatggcggccagcccccaagaagcagcacagccaaggtgaccatcaacgtgatggatgtgaatgacaacagccctgtggtgatcagcccccccagcaacaccagcttcaagctggtgcccctgagcgccatccctggctctgtggtggccgaggtgtttgctgtggatgtggacaccggcatgaatgctgagctgaagtacaccatcgtgtctggcaacaacaagggcctcttcagaattgatcctgtgacaggcaacatcaccctggaggagaagccagcccccacagatgtgggcctgcaccggctggtggtgaacatcagtgacctgggctaccccaagagcctgcacaccctggtgctggtgttcctgtatgtgaatgacacagctggaaatgccagctacatctatgacctgatccggaggaccatggagacccccctggacaggaacatcggggacagcagccagccctaccagaatgaagactacctgaccatcatgattgccatcatcgccggggccatggtggtgattgtggtgatctttgtgacagtgctggtgcgctgcagacatgccagccgcttcaaggccgcccagaggagcaagcagggcgctgagtggatgagccccaaccaggagaacaagcagaacaagaagaagaagaggaagaagaggaagagccccaagagcagcctgctgaactttgtgaccatcgaggagagcaagccagatgatgctgtgcatgagcccatcaatggcaccatcagcctgcctgctgagctggaggagcagagcatcggccgctttgactggggccctgccccacccaccaccttcaagcccaacagcccagacctggccaagcactacaagagcgccagcccccagcctgccttccacctgaagccagacacccctgtgtctgtgaagaagcaccacgtgatccaggagctgcccctggacaacacctttgtgggcggctgtgacaccctgagcaagaggagcagcaccagcagtgaccacttcagcgcctctgaatgtagcagccagggcggcttcaagaccaagggccccctgcacacccggcagtgcaacagccacagcaagagtgacaacatccctgtgaccccccagaagtgccccagcagcacaggcttccacatccaggagaatgaggagagccactatgagagccagaggagagtgaccttccacctgcctgatggcagccaggagagctgcagcgacagcggcctgggggaccacgagcctgtgggcagcggcaccctcatcagccaccccctgcccctggtgcagccccaggatgagttctatgaccaggccagcccagacaagaggacagaagcagatggcaacagcgaccccaacagtgatggccccctgggcccccggggcctggccgaggccacagagatgtgcacccaggagtgcctggtgctgggccacagcgacaactgctggatgcctcctggcctgggcccctaccagcaccccaagagccccctgagcacctttgccccccagaaggagtgggtgaagaaggacaagctggtgaatggccacaccctgacccgggcctggaaggaggacagcaacagaaaccagttcaatgacaggaagcagtatggcagcaatgaaggccacttcaacaacggcagccacatgacagacatccccctggccaacctgaagagctacaagcaggccggcggggccacagagagccccaaggagcaccagctgtag

SEQ ID NO: 263373 - DNA, 3714 bp, Artificial Sequence
  derived and/or modified sequence
atggacctgcgggacttctacctgctggccgccctgatcgcctgcctgcgcttggactcagccattgcccaggagctgatttacacaattcgggaagaactcccagagaatgtgcccataggtaacatccccaaggatctgaatatctcccatattaatgcggctaccgggactagtgcaagccttgtttaccgacttgtgtctaaggccggggacgcccccctcgtgaaggtgtcctcaagtacaggagagatctttacaacaagcaaccgcatagacagagagaaattatgtgcaggggcctcctacgctgaagaaaatgagtgctttttcgagcttgaggtcgtaattctgcccaacgactttttccggctcattaagataaaaatcatagtaaaggacacgaacgataatgctcctatgtttccgtcacctgtaatcaacattagcattcctgaaaacaccctgattaactctagattccctatccccagcgcaaccgatcccgacacaggttttaacggggtacaacattatgaattgctgaacggccaatccgtctttggcctggacatcgtagagactccagaaggagagaaatggcctcagctaatcgtgcagcagaacttagacagagagcagaaggatacttacgttatgaagattaaagtggaggacggcggaaccccccagaagtcctctacagccatcctgcaggtgacggtttcagacgtcaacgacaatcgacccgtcttcaaggagggtcaggtagaggtccacatccctgagaatgcgcccgtcgggacctcagttatacagctgcacgcaaccgatgccgacatcggatccaatgccgaaattcggtacatcttcggtgcacaggtggccccggctacgaagaggctctttgccctgaacaatactaccggcttgataactgtgcagcgctcattggatagggaggagacggcaattcacaaggtcactgtcctggctagcgatggttcttcaacaccagccagagctaccgtgactataaatgtaacagacgttaacgacaaccctccaaatattgatctgcgctacatcatctcccccatcaacgggacagtatacctctcagagaaggaccctgtaaatactaagattgccctgattaccgtgagtgataaggacacagacgtcaatgggaaagttatttgctttattgaaagagaggttcccttccatctgaaagctgtttacgataatcagtacctccttgaaacaagcagcctgctcgactatgagggcactaaggaatttagcttcaaaatcgtggcgagtgacagcggtaagccaagccttaatcagaccgccctggtgcgcgtaaagttggaggatgaaaatgataacccgccgatctttaaccaaccggttatcgagcttagcgtgtccgaaaataaccggcgaggcctttaccttacaactatctctgccactgacgaagactctggaaaaaacgctgatatcgtgtatcagcttggacctaacgctagttttttcgatctcgatcggaagactggagtgctcaccgcctcccgggtatttgaccgggaagagcaggaaagatttattttcactgtcactgctagagataacggcacaccccccctacagtcccaggcagctgtaatcgttactgtgctggatgaaaatgacaatagtccgaaattcacgcacaaccacttccaatttttcgtaagcgagaacctgccaaaatattcgacggttggagtgatcacggtcacagatgccgacgcgggcgagaacaaggcagtgacacttagtattctgaacgataacgataacttcgtgctcgacccatactccggggtgataaaaagtaacgtatcgttcgatcgggaacagcagagctcctacacattcgatgtaaaggccacagatgggggccagcctcccaggagtagcaccgccaaagtgacaatcaacgtcatggacgtgaacgacaactcgcctgtggtaatcagcccccctagtaacacttcatttaaactagtaccgttgagcgctatcccggggagcgtggtcgctgaggtgtttgcagttgatgtagacacaggtatgaacgccgagctgaaatacacaatcgtctctggaaataataagggtctttttcggatcgacccagtcactggaaacatcacactggaagagaaaccggccccaaccgatgtcggcctgcacaggctcgttgtgaatataagcgacctcgggtatccgaaatcgctgcatacactggtgctcgtttttctatatgtcaacgacactgccgggaacgcctcgtatatatacgacctgattcgcaggacaatggaaacgcccctggacaggaacattggagactcttctcaaccctatcagaatgaggattatctcactataatgatcgcaatcattgcaggagccatggtcgtcattgtggtgatctttgtgacagtgctggtccgttgccgccacgccagtaggttcaaggctgcgcagcgctccaagcagggggccgagtggatgagccccaaccaggaaaacaaacaaaacaagaagaagaagcggaaaaaacggaagtcccctaaatcttctctcctcaattttgtgacgattgaggagagcaagcccgatgacgcggtacatgaacccatcaacggcacaattagcctgcccgctgagctagaggaacaatccatcggccgcttcgattggggccccgcccctccaactacttttaagcccaattctcccgatctggccaagcattacaagtccgcttcgccccagcctgccttccatctcaaacccgacacacctgtgtccgtcaagaagcaccacgtgatccaggaactgcccctcgacaatactttcgtcggtgggtgtgatactctatcaaagcgatccagcacctcttccgaccacttctccgcctccgagtgcagctcccaaggcggcttcaagaccaaaggacccttacacacccgccaatgcaactcccatagcaagtctgataacatccctgtcacaccccagaagtgcccttctagtaccggcttccacatccaggaaaatgaggagtctcattacgaaagtcaaagaagggttacattccacctgccagatggatcgcaggaatcctgctccgattctggtctcggagaccacgagcctgtgggctctggcacccttatttcccacccacttccattggtccagccacaggatgaattttatgatcaggcttcacccgataagcgcacggaggccgacggaaatagcgaccccaattcagacggcccattagggcccagaggcctggctgaggcaactgaaatgtgtacacaggaatgcctggtgctcggccactccgacaattgctggatgccacctggactgggaccctatcaacacccaaaaagccccctttctaccttcgccccacagaaggagtgggtgaagaaggacaagcttgtgaacggccacacacttaccagagcgtggaaagaagacagcaatcggaaccagtttaacgaccgcaagcaatatggatcaaacgaaggtcactttaacaacggaagccacatgactgacattcctctggccaacctgaagagctataagcaggctggaggggcaacagagtcacccaaggagcatcagctgtag

SEQ ID NO: 263374 - DNA, 3714 bp, Artificial Sequence
  derived and/or modified sequence
atggacctgcgggacttctacctgctggccgccctgatcgcctgcctgagactggattccgctatagcccaagaactcatttatactattagagaagagctccccgaaaacgtgccaattggcaatattcccaaggacctgaacatttctcacatcaacgcagcgactggcacatcggcttctctcgtgtaccgtctcgtttcgaaagctggcgacgcacctctcgttaaagtaagcagctcaaccggggaaattttcacaacgtcgaaccggatcgaccgggaaaaactgtgcgcgggggcaagctacgccgaggagaacgagtgtttcttcgagttagaggtggtaatcctgcctaacgacttttttcgccttataaaaatcaagatcattgtgaaagataccaacgataatgcccctatgttcccttcaccagtcatcaacatttccattcccgagaacacacttatcaatagcaggttccctatccccagcgcgacggacccagacaccggttttaacggagtgcagcattacgaattgctaaatggacaaagtgtgtttgggctagatatagttgagaccccagaaggcgagaagtggccgcagctgattgtacagcagaacctggacagggagcagaaggatacgtacgtgatgaaaattaaggtggaggacggcgggactccccagaaaagttccacagcaatcctccaggtgactgtgtctgatgtgaatgacaaccgacccgtatttaaggaaggccaggttgaagtgcacatccccgagaatgcacccgtgggaacatcagttattcagctccacgcgactgacgccgacatcggctcaaacgctgaaatacggtatatctttggtgcccaggtggcccccgcaacaaagagactgttcgcattaaataatactaccggattgattaccgtgcagcgctctctcgaccgggaagaaacggcgatccacaaagtgactgtgcttgcttcagacggttcttccacacctgcgcgcgccaccgtgacgataaatgtgaccgatgtgaacgataacccccccaatatcgatctgagatacatcatttctcccatcaatggaactgtctacttgtctgaaaaggacccagttaacacaaaaatcgccctgataaccgtgagtgataaggacacagatgtgaatggcaaggtaatctgcttcattgaaagagaggtcccatttcacctgaaggcagtgtacgataaccagtaccttctggaaactagttcacttctcgactatgaaggaaccaaggagttcagtttcaagattgtcgcttccgactcaggaaaaccctccttgaatcagaccgcacttgttcgggtcaaattagaagacgagaatgataatccaccgatttttaatcagcctgtgattgagctgtctgtgagcgaaaataacagaaggggattgtaccttaccaccatttctgccacagacgaagacagtggaaaaaacgcagacatcgtttatcagctcggccctaacgcctccttttttgacctggaccggaaaactggagtgcttacagcatctcgcgttttcgatagggaggagcaagagcgatttatatttaccgtcaccgccagagataacggcacaccacctctccaatcgcaagccgccgtgattgttactgtgctcgatgaaaacgacaattcccctaagttcacgcataaccactttcagttcttcgtctcagagaaccttcccaaatatagcaccgttggcgttatcacagttacagatgccgatgccggcgagaacaaggccgttacactctcgattctgaacgacaacgacaacttcgtactagacccatattctggagtcataaaatctaatgtgtctttcgacagggagcaacagtcaagctacacattcgatgttaaagccactgacggaggacagccaccacgctcttctactgctaaggtgacaatcaacgtgatggatgtgaatgacaactctcccgtggtcattagccctccaagcaacacctccttcaaactggtgcctctcagtgccataccaggaagcgttgtggccgaagttttcgccgtcgatgtggatacagggatgaacgcagaactcaagtacactattgtgtcagggaataataaggggctgtttagaatcgatcccgtgaccgggaatatcaccctcgaggagaaacccgctcctacggatgtgggactccatcggctagtggtcaatatatcagatctggggtatccaaaaagtctgcacaccctggtgctggtgttcctgtacgttaacgacactgctgggaatgcaagttacatctacgacctcatccggcgcactatggagacccctttggataggaacatcggagactcatcacaaccataccagaacgaggactatctgactattatgatcgccatcattgcaggcgccatggtggttattgtcgtgatattcgtgaccgtgttggtccgatgccgccacgcctccagatttaaggcggcccagcggtctaaacagggcgccgaatggatgtctccaaaccaggagaacaagcagaataaaaagaagaagcgcaagaagagaaagagtccaaaatccagtctgctaaactttgttacaatagaggagtccaagccagatgatgccgttcatgagccgataaatggaaccattagcctgcccgcagagctggaggaacagtccatcgggcggtttgattggggtccggcacctcctactactttcaagcccaactctcctgatctggcaaaacactacaagagtgcaagtccacaacccgcattccacctcaaaccagacactcccgtctctgtgaagaagcaccatgtgatacaagaactccccttggataacacttttgttggaggttgtgataccctaagtaagcgctcaagcacgtcctccgatcacttctcagcatcagagtgttcatctcagggcggcttcaagactaaggggcccctgcacacccgccagtgtaactcacacagcaaaagtgataacatcccagtgaccccccagaagtgcccctcaagcaccgggttccatatacaagagaatgaggaatcgcattatgagtcccagagacgagtaacttttcatctgcctgatggatcacaggaatcctgttcagatagtggtctgggagaccatgagccagtagggtcaggcaccctgatttcccacccactgccattagttcagccacaagacgaattttatgaccaggcatctcccgacaaaaggactgaagccgacggcaatagtgatcccaacagcgacggccccctggggcctcgtgggttagccgaggcgacagagatgtgcacgcaggaatgcctggtgttaggacatagtgataattgttggatgcctcctggtctgggcccatatcagcatccgaagagccccctcagtacgtttgccccacagaaggaatgggtcaaaaaggataaacttgtaaatgggcacaccctgacacgggcgtggaaggaagacagtaacaggaaccagtttaacgacagaaagcaatacggcagtaacgaagggcacttcaataacggaagtcacatgacagacatcccactggccaatttgaaaagctacaagcaagccgggggagccacagaatcccctaaggaacaccagctttag

SEQ ID NO: 263375 - DNA, 3714 bp, Artificial Sequence
  derived and/or modified sequence
atggacctaagagacttctatctgctagcagccctgatagcttgcttgagactggactccgccatcgcacaggagctcatttatacgatcagagaagagctgcctgagaatgtgcctattgggaacattcctaaagatctgaatatcagtcacatcaacgccgcaacaggtacctcagcgagtctcgtgtaccgcctcgtgtccaaagccggtgacgctccccttgtcaaggtgtcctccagcaccggggagattttcactaccagcaaccgaattgatcgagagaaactttgcgccggtgccagctacgcagaggagaacgaatgcttcttcgagctggaggtggtgatcttacctaatgactttttcagactcatcaagatcaaaatcatagtcaaagacacgaatgacaatgcccctatgttcccgtctcctgtgattaacatttcaatccctgaaaatactttgatcaattctcgcttccctatcccctctgcaaccgaccccgatactgggtttaacggcgtgcagcactatgagttgttaaacgggcagagtgtgttcggccttgacatcgtagagacccccgagggggagaagtggccccagctgatagtccaacaaaaccttgaccgcgaacagaaggacacttacgtgatgaaaatcaaagttgaggatggtgggacacctcagaagagttcgacagcgatactgcaggtgacagtttcagatgtgaatgataacaggccagtgttcaaggaggggcaggtagaagtacatatcccagagaacgcacccgtgggcacatcggttattcagttgcacgcgaccgacgccgacattgggagcaacgcagagatacgctatatattcggggcacaggtggctccagccaccaagaggctgtttgctttaaacaatacaaccggtctcattactgtgcagcgctctttggatcgcgaagaaaccgccatccataaagtgacagtgctagcttcagacggaagtagtactcctgcccgagcaaccgttaccatcaacgtcaccgacgtgaacgataaccctcccaacatcgaccttaggtacatcattagtccaatcaacggcaccgtttatctttccgagaaagaccccgtgaacaccaagatagctcttataaccgtgagtgacaaggatacagatgtgaacggaaaagttatctgctttatagaaagggaggtacccttccacctgaaggcagtgtatgacaaccagtatttgctcgaaacttcgtccttgctcgactatgaagggactaaagagtttagctttaaaattgtggctagcgattctggcaagccatcccttaaccagaccgccctggttcgggtaaaactggaggacgagaatgacaacccacccattttcaaccagccagtcatcgaactctccgtgtccgagaacaataggcgcggtttgtacctgactacaatttctgctaccgacgaagacagtggcaagaacgcagacatagtgtatcaactgggcccaaatgcttccttttttgatttagacaggaaaaccggggtacttactgcctctcgcgtctttgatcgagaagagcaggagcggttcatcttcaccgtcacggccagggacaatggcaccccgccattgcagagccaggctgctgtcatcgtcaccgttctggacgaaaacgataactcccccaagtttacccacaatcacttccaattttttgtgtcagagaacctccccaaatactctacagtcggggtgataaccgtcacggatgctgatgctggagaaaataaggctgtcacacttagtattctcaatgacaatgataacttcgtcctggacccatactccggtgtgatcaaaagcaatgtaagcttcgaccgggaacagcagagttcttacacctttgatgtaaaagcgacggacggcggtcagccacccagatccagcaccgctaaggtcacaatcaacgtgatggacgtgaatgacaattctccggtggtgatttcaccaccttctaacacctccttcaagctggtaccactaagcgcaatcccaggctcagtggtggccgaagtatttgctgtggacgtggatacgggtatgaacgcagagctcaagtacaccatagtgtctggcaataataaaggactgtttagaatcgaccctgtgacagggaatatcaccctggaggagaagcccgctcctaccgacgttggacttcaccgactggtggtgaatatttcagacttgggctaccctaaatcactgcataccctggtactggtgttcctgtacgttaacgatacagccggaaacgcctcatacatttacgacctgattagaagaactatggaaacacctttggaccgaaatatcggggactcctcacaaccttaccagaacgaagattatctgactatcatgatagcaatcatcgccggtgccatggtggtgatcgtcgtgatattcgtaacagtcctggtcagatgtcggcatgcaagccgtttcaaggcggctcagagaagtaagcagggagccgagtggatgagccccaatcaggaaaataagcagaacaaaaagaaaaagagaaaaaagcgcaaatctccgaaaagttctctgctgaatttcgtgactatcgaggagtccaagccagatgacgctgtgcatgagcccatcaatggcactattagcctgccagcagagttagaggagcagtctatagggcgtttcgattggggtcctgcaccaccaacaaccttcaaacctaacagccccgacttagccaaacactataagtcagccagcccccagccagcttttcacctcaagccggatacacccgtctctgtcaaaaaacatcacgtcattcaagaactgccactcgacaataccttcgtgggcggatgtgacactcttagcaagcgctcctctacttcaagcgatcacttctctgcgagcgaatgttcctcccaaggcggtttcaagacaaaaggccctctgcacacccggcaatgtaactcccattctaaatcggacaatattcccgttactcctcaaaagtgtccatcatctaccgggtttcacatccaagaaaatgaggagagtcactatgaatcgcagagaagagtaacttttcacctgccagacggctcccaggagagttgttcagatagcggtctgggcgatcacgagcctgttggctctggcacactgatatcccatcctctcccactggtccagccacaggatgagttttacgatcaggcttctcctgataaacgcaccgaggcagacggaaattccgaccccaactcagacggtccgctagggcctcgcggactggccgaggccaccgagatgtgtacacaagaatgtctcgtgctgggccactccgacaattgttggatgcctcctggactgggcccttaccagcaccctaaaagtccactctccaccttcgctcctcaaaaggagtgggtaaagaaggataaactagtcaatggccacactctcactcgagcctggaaggaagatagcaatagaaaccagtttaatgaccggaaacagtatggatctaacgaaggccatttcaacaacggaagccacatgactgatattcccttagccaacctcaaatcttacaagcaagcaggtggcgctactgagtcaccaaaagagcaccagctttag

SEQ ID NO: 263376 - DNA, 3714 bp, Artificial Sequence
  derived and/or modified sequence
atggaccttcgggatttctacctgttagccgcactaatagcctgtctgcgactggacagtgctattgcacaggagctcatctataccattcgggaggaactgccggagaacgttccaataggcaacattcctaaggatttaaacatctctcacatcaatgcagctacgggtaccagcgcttctcttgtgtaccgcctggtgtccaaggctggcgacgcacctctggtaaaggtgagctcttccaccggagagatctttaccacgtcgaaccgcattgatagagagaagctgtgtgctggcgcttcctatgctgaagagaacgaatgtttctttgagctcgaggtcgttattttgccgaacgatttcttcaggttaatcaaaattaagattattgtgaaagacactaatgacaatgcaccaatgtttcccagcccagtgatcaatatcagcattcctgagaataccctcatcaattctagattcccaatccccagcgcaactgacccagacactggcttcaatggggtgcagcactatgagcttcttaacgggcagagcgtgttcggcttggatattgtggaaacgccggagggagaaaaatggccccagctcatcgtgcaacaaaacttggaccgggaacaaaaggacacttatgtaatgaaaattaaggtggaggacgggggaactcctcagaaaagctcgaccgccatattgcaggtgacagtgtcagatgttaatgataatcggccagtgttcaaagaagggcaggtggaggtccacatccctgaaaatgcgccagtgggtacaagcgtcatccagctccacgccacagacgcagacatcggatcaaacgcagaaatcaggtacatattcggagctcaggtcgccccagcaacaaagaggctgtttgccttaaacaacacgaccggtttgattaccgtccaacgcagtctcgaccgcgaagaaactgccatacataaggtgacggtgctggccagcgacgggtcatccactccagccagggccactgttactatcaacgttaccgacgtcaacgataaccctcccaatatcgacctgaggtatattatcagcccaatcaacggaaccgtgtatctttccgagaaagatcctgtgaacaccaaaatcgctcttatcaccgtgtcggacaaggatacagatgtcaacggtaaggtgatttgcttcattgagagggaggtaccatttcaccttaaggcggtgtatgataaccagtatctgttggaaacgtctagcctgctggattatgagggcacaaaggaattcagcttcaaaatcgtggcatctgactcaggcaaaccttccctgaaccagaccgcgctagtacgggtgaagctggaggatgagaacgataaccctcccatttttaaccagccggtaattgaactgagcgtgtctgaaaacaatcgcaggggcctgtatctcacgacgatctccgctaccgacgaagacagcgggaagaatgcagatatcgtataccagctcggcccaaatgcatccttcttcgacctggatcggaagaccggggtgctcaccgcttcacgggtctttgaccgtgaggaacaggaaaggtttatcttcactgtgaccgcccgagacaacggtacccccccactgcagagccaagcagccgtgattgttactgtcctggacgagaacgacaactcacccaagtttacccacaaccacttccagttctttgtgtctgaaaacctgcctaagtactcaaccgtgggggttattacagttaccgatgcagacgccggagagaacaaggcagtaacgctcagcatcctgaacgataacgacaattttgtgctggacccgtatagcggggtcataaaaagcaacgtgtcatttgaccgagagcagcagagttcgtatacgttcgacgtcaaggcgactgatggcggacaacctccgaggtcttccacagccaaagtgacaattaatgtcatggatgttaacgacaacagccctgtggtgatcagtcccccaagtaatacctcatttaagttggtgcccttgtcagccattcctgggagcgtcgtcgcagaagtttttgcagtggatgtggacacggggatgaacgccgagctgaaatacacaatagtttcaggaaataataaaggcctgttcaggattgacccagtgacaggaaatattacgctcgaagagaaaccagcaccaacagacgtgggtttacacaggctcgtggttaacattagcgacctcggataccccaagtctcttcacacgctggttttggtttttctatacgtgaacgacacagctggcaatgccagttacatttacgacctgatcagaaggactatggaaacacctcttgaccggaacattggagactcttcccagccttatcagaatgaggactatctgactattatgattgccattatcgccggtgcgatggtggtgatcgtcgtgattttcgtgaccgtattggttaggtgcaggcacgcttcccggttcaaggctgcgcagaggtccaaacagggtgctgagtggatgagtcccaatcaggagaacaagcagaacaagaaaaagaaaagaaagaaacggaaaagccctaagagctcacttctgaacttcgttactatcgaagagagcaaacccgatgatgcggttcacgaacctatcaacggaaccatttctctgccagccgaactcgaggagcagtctatcggacgtttcgactggggacctgcacccccaaccacatttaaacctaacagccccgacctcgctaagcattataaatcagcctcacctcagccggctttccatctgaaaccggacacccccgtttcagtcaaaaaacaccacgtgattcaggaactccctctagataacacctttgtcgggggttgtgatactttatcgaaacggtcatccacctcatccgaccactttagtgcttcagaatgctcttcacagggagggtttaaaacaaagggcccactacatacacgccaatgtaactcacatagcaaaagcgacaacatccctgtgaccccacagaaatgcccatccagcacgggatttcatatccaagagaacgaggaatcccattacgagtcccagcgaagggtgacctttcacctgccagatggctcccaggagagttgcagtgactcaggcctcggtgaccatgagccagtgggaagcggtactttgatctcacacccacttccgttagtacagccacaggacgaattctacgaccaggcgagcccagacaaacgcacagaggcggacggtaactctgacccaaactctgatggacctctgggacctcgaggactagcagaagctactgagatgtgcacccaggaatgcttagtgctggggcactctgataactgttggatgccccctgggctgggcccttatcagcaccccaaaagtcctctatctacatttgcgccacaaaaggagtgggtcaagaaggacaagctcgtaaacgggcatacactcaccagggcttggaaggaagattccaatagaaaccagttcaacgaccgtaagcaatacgggtcaaacgagggacacttcaacaacgggtcacacatgacggacatccccctggctaacctgaagtcttacaagcaggccggaggcgcaacggagagccctaaagaacatcagttatag

SEQ ID NO: 263377 - DNA, 5667 bp, Artificial Sequence
  derived and/or modified sequence
cggctgtctccaaataagtgatgagatataatgcatcctccagtccatgcacgcttcctcttgcaatttgtgcatcattcctcagtggaaacctttaaaccctaaaatccaggaaaagaaaataaatacattatcatggacctgagggatttttacctgttggctgctctgattgcctgtttaaggctggattccgcaatagctcaagaacttatttacactattagagaggaattgcctgaaaatgtgcccataggaaacataccaaaggatctgaacatttctcacatcaatgctgccacagggaccagcgccagccttgtctacagactggtttctaaagctggggatgcccctttggtgaaagtttccagcagcactggggaaattttcacaacctccaacagaatagacagagaaaaactctgtgctggcgcctcatatgctgaggagaatgagtgtttctttgaacttgaggtggtgatcctccccaatgatttcttcaggctgatcaaaataaaaataattgtcaaggataccaatgataatgcccccatgtttccatctcctgtcatcaatatttccattccagaaaacactttgatcaacagccgctttccaattccatcagcaacagatcctgacacaggcttcaatggtgtacagcattatgaattgttaaatgggcagagtgtttttggactggatatcgtggaaactccagagggagagaagtggccacaactgattgttcagcaaaacttggatagagaacagaaagatacctatgtgatgaaaatcaaagtagaggatggaggcactccacagaaatccagtacggccatactgcaggtcacagtaagtgatgtaaatgacaacaggccagtgtttaaagagggtcaagtggaggtgcatattccagagaatgctcccgtaggtacctctgtaattcagctccatgccactgatgcagatataggcagtaatgctgaaatccggtacatttttggtgcccaggtcgcccctgcaaccaaaagactctttgctttaaataatactactgggctgattacagttcagaggtccttagatagagaggagacagccattcacaaagtgacagtgctggctagtgacggcagctccactcctgctcgagcaacggttaccatcaatgtcaccgatgtaaatgataaccctcctaatatagacctcaggtacattataagtcccatcaatggcaccgtgtatttatctgagaaagatcctgtcaatacaaagattgccctaattacagtttcagataaggacacagatgtgaatggcaaagtgatctgttttattgaaagagaggtcccatttcatttgaaggcggtatatgacaaccaatatttgttagagacctcttctttgttggactatgagggcaccaaagaattcagctttaaaattgttgcctctgattctgggaagcccagtttaaatcagactgccctggtaagggttaagcttgaggatgaaaatgacaacccaccaattttcaaccagcctgtaattgagctgtcagtttctgaaaacaaccgacgtgggttatacttaacaactattagtgccacagatgaagacagtgggaaaaatgcagacattgtttatcagcttggaccgaatgcctccttctttgatctggaccgaaaaacaggagttttgacagcctccagagtatttgacagagaagaacaagaacgattcatttttacagtaactgccagggacaatgggacccctcccctccaaagccaagcggctgtgattgttactgttctggatgagaatgacaatagccccaagtttactcataatcattttcaattttttgtgtctgagaatctgccaaagtatagtactgtgggggtaatcacagtgacagatgcagatgctggagagaataaagctgtgactctttccattctaaatgacaatgataattttgtgttggatccctattctggagtcataaagtcaaatgtctcatttgatagagagcagcagagttcctacacttttgatgtcaaagccactgatggaggacaaccacctcgttcctctactgcaaaagtaactatcaacgtcatggatgtcaatgacaacagcccagttgtcatttctccaccgtctaatacttcctttaagttggtgcccctctcagccattcctggctccgtggtagcagaagtttttgcagtggatgttgacactggaatgaacgctgaactaaagtatactatagtgagtggaaacaataaaggcttattccggattgatccagtaacaggtaacattactctggaagaaaaaccagcacctactgatgtgggattgcatcgtttggtggtcaacataagtgacctggggtaccctaagtctttgcacacgcttgtgcttgtattcctttatgttaacgacactgctggaaatgcctcctatatctatgacttgatccgcaggactatggagaccccgttggacaggaacataggggatagtagccaaccctatcaaaatgaggactatctaaccatcatgattgccatcatcgccggtgccatggtggtcattgttgtgatcttcgtcaccgttctggtgcgctgtcgccatgcatcaaggttcaaagcagctcagaggagcaagcaaggtgccgaatggatgtccccaaaccaggagaacaagcaaaacaagaaaaagaaaagaaagaaaaggaagtctcccaaaagctctcttttgaactttgttactatcgaagagtccaaacccgatgatgcagttcatgaacctatcaatgggacaataagcctgccggctgaactggaggagcaaagtataggaagatttgactggggcccggcacctccaacaacattcaagcctaacagtcctgacctggccaagcactacaaatctgcttctccacagcctgcttttcatctcaaaccagacactccagtttccgtgaaaaagcaccacgtgattcaggaactccctttggacaacacctttgttgggggttgtgacaccctttctaaacgctcttccactagttcagatcacttcagtgcctcagagtgcagttcccaaggaggcttcaagacaaagggccccttacacaccagacagtgtaactcacacagcaaaagtgacaatattcctgtcactcctcagaaatgtcccagctccacgggtttccacattcaggagaatgaagaaagccattacgagtcgcagcgccgtgttacgtttcatctccctgatggctcccaggaaagctgcagtgacagtggtctaggagaccatgagccggtgggtagtggaaccctgatctcacaccctcttcctctggttcagccacaggacgaattctatgaccaggcctctccggacaagaggactgaagcagatggcaactctgatcccaactctgatgggcctttgggtccccgaggattagctgaagctacagagatgtgcactcaagagtgcttggttttgggtcactctgataattgctggatgcctcctggcttgggtccatatcaacaccccaaatctcctctctcaacctttgcaccccagaaagaatgggtgaagaaggacaagcttgtgaatgggcacaccctgaccagagcctggaaagaagacagcaacaggaaccagttcaatgaccgtaagcagtatggctccaatgaaggccatttcaacaatggcagccacatgacagacattcctctggcaaatctgaagtcttataagcaagcaggaggtgctactgagagtcctaaggagcaccaactctaagaaaaggctatatgggacctaataactttaaatagacatgctaataccgtgtgcgtcagagctttatgtattcaatagatctctacaactatgccccttctagcagggatacctataactttgtgttagcaccatggagaatacaatgtttttgcaacatatgagagaagatagttctagccatgcaattttgtttactagaattgattacactctccagagatctctccattgtgcaaattttttttattattgcattttattttgaccctggactgctgctatgaacaatagaatatgcatttggaaagtaagaaagtttcatggattagagtgactgaaaaacatatccagttagaaaattgtgcttttttttttttttttttttttttttgtcattgatttgtgctgggactgctatacttgacattatactgcaaacaaaacttaaagagataagcattaaacctattgtgctgttaacaacgttagtggacacttgtaagtcaatcagtgttaaagtatttgtaaatagaagcaagctattattaacaacttttgtgtacttataatgttcacctaaaaatgttgtagcataattctgtgttttatggttgcttctgtccttctttttatttacctctttgttgttatttttgttgtttctttcagtgaggtgtttctgtgttagtagtctgtcttgacacacattgttcaaacaatctcaagcacttgtgtttaaaaaaggttctgaaatcttgcttctcatatgatagcttatgatgccggaattctgtaaacaataaagatgaaagaaaaaatgaaaactttatacaaaaaaggacttctgcaaaagcttggaaattcagaacctattttttatcatcttattttcaaagtaggcaaaagcaaaatcacttaattagtaccattaagtgagagagtaatggaaaactgttatccatcaaaagtgatataatatcctgtacttgtcactcatgtaaaactaatgtatcaaaattagcatatatggaagaaaaatcactattcaaaaatagtttcaattgggcaaatgtgtgtctacaactttgttgaaatggcagagtctgtgttgatcctcatatacaataatgttgttgtaacacaagtgttattagaccatagccacaaaatatttaatgtgttgtgccttcatgatgtaacagaacattctccaggtagggtagttgggggaaataaagggataaatctctaattattgctgtttaactgtttgttatcatagttggtcaatgcctggcaggtaccagcatattgtcacttaggtcaaaccaataaagtgacaactaatgttaataagatctcagttgcacgtgcaaacaaatccaaattcgaacattcttaggaggtttttgttaaggcatgacagatgatttaaacaaataaatagcatgcaacaaaatgtctttattgaaagaagtggaagttatcttaatgccacggttcaccatcaatttaaaagtaaaaaaaacaaaaaaaaaacaaaaaatttaaaaaaaaggtttgctaatctgatagttaatttgttcttaccaaaaaataaaattactttgtaaatagcagttcacatttttccacagtataatggaaaataatgggtaggggtgcattgcttattgaagtacatttttgtcggtttgtgaggggtgtttgatgactttgacagaataaatatctaaacaattatccttgttactgctttgccagttctacgttatttacaattattcagctcttgcaataaatgttctgaattcc

SEQ ID NO: 263378 - DNA, 6226 bp, Artificial Sequence
  derived and/or modified sequence
agttcagagagaggagagggagaaggagagaggggcagaggggaagggagagagggagagcacgcgagacggaaaggagcgcctcagagtctctgaagcacgcaagagataaccgattaggaatttttcgggcaactgtcacccggatagctgtcagagaatcatcatcaccgcaactctgacgtttcctacaagaagttagagacttaagcagtattggcatcggatggaaatggtatgcatgctgctgtggaaaatatccctgagctgaagaagtgcaactatgtgttgtgtgtgctaaatgcccagaagaacccagacccagtgggtaagagagacgaaatgtggagagaatgactaacgacaaatccgtgaatttgttctctggagttgctaatttgccagcccgaagcaacacattttacaaggaggaaacattttgctgcttctgatttctccccaaactggtgctaccagatgcatggctttctatgtgttggaacaaatcattcctaactgcagcatactgggaaaggggaaaggttgaggcaactaaccggctgtctccaaataagtgatgagatataatgcatcctccagtccatgcacgcttcctcttgcaatttgtgcatcattcctcagtggaaacctttaaaccctaaaatccaggaaaagaaaataaatacattatcatggacctgagggatttttacctgttggctgctctgattgcctgtttaaggctggattccgcaatagctcaagaacttatttacactattagagaggaattgcctgaaaatgtgcccataggaaacataccaaaggatctgaacatttctcacatcaatgctgccacagggaccagcgccagccttgtctacagactggtttctaaagctggggatgcccctttggtgaaagtttccagcagcactggggaaattttcacaacctccaacagaatagacagagaaaaactctgtgctggcgcctcatatgctgaggagaatgagtgtttctttgaacttgaggtggtgatcctccccaatgatttcttcaggctgatcaaaataaaaataattgtcaaggataccaatgataatgcccccatgtttccatctcctgtcatcaatatttccattccagaaaacactttgatcaacagccgctttccaattccatcagcaacagatcctgacacaggcttcaatggtgtacagcattatgaattgttaaatgggcagagtgtttttggactggatatcgtggaaactccagagggagagaagtggccacaactgattgttcagcaaaacttggatagagaacagaaagatacctatgtgatgaaaatcaaagtagaggatggaggcactccacagaaatccagtacggccatactgcaggtcacagtaagtgatgtaaatgacaacaggccagtgtttaaagagggtcaagtggaggtgcatattccagagaatgctcccgtaggtacctctgtaattcagctccatgccactgatgcagatataggcagtaatgctgaaatccggtacatttttggtgcccaggtcgcccctgcaaccaaaagactctttgctttaaataatactactgggctgattacagttcagaggtccttagatagagaggagacagccattcacaaagtgacagtgctggctagtgacggcagctccactcctgctcgagcaacggttaccatcaatgtcaccgatgtaaatgataaccctcctaatatagacctcaggtacattataagtcccatcaatggcaccgtgtatttatctgagaaagatcctgtcaatacaaagattgccctaattacagtttcagataaggacacagatgtgaatggcaaagtgatctgttttattgaaagagaggtcccatttcatttgaaggcggtatatgacaaccaatatttgttagagacctcttctttgttggactatgagggcaccaaagaattcagctttaaaattgttgcctctgattctgggaagcccagtttaaatcagactgccctggtaagggttaagcttgaggatgaaaatgacaacccaccaattttcaaccagcctgtaattgagctgtcagtttctgaaaacaaccgacgtgggttatacttaacaactattagtgccacagatgaagacagtgggaaaaatgcagacattgtttatcagcttggaccgaatgcctccttctttgatctggaccgaaaaacaggagttttgacagcctccagagtatttgacagagaagaacaagaacgattcatttttacagtaactgccagggacaatgggacccctcccctccaaagccaagcggctgtgattgttactgttctggatgagaatgacaatagccccaagtttactcataatcattttcaattttttgtgtctgagaatctgccaaagtatagtactgtgggggtaatcacagtgacagatgcagatgctggagagaataaagctgtgactctttccattctaaatgacaatgataattttgtgttggatccctattctggagtcataaagtcaaatgtctcatttgatagagagcagcagagttcctacacttttgatgtcaaagccactgatggaggacaaccacctcgttcctctactgcaaaagtaactatcaacgtcatggatgtcaatgacaacagcccagttgtcatttctccaccgtctaatacttcctttaagttggtgcccctctcagccattcctggctccgtggtagcagaagtttttgcagtggatgttgacactggaatgaacgctgaactaaagtatactatagtgagtggaaacaataaaggcttattccggattgatccagtaacaggtaacattactctggaagaaaaaccagcacctactgatgtgggattgcatcgtttggtggtcaacataagtgacctggggtaccctaagtctttgcacacgcttgtgcttgtattcctttatgttaacgacactgctggaaatgcctcctatatctatgacttgatccgcaggactatggagaccccgttggacaggaacataggggatagtagccaaccctatcaaaatgaggactatctaaccatcatgattgccatcatcgccggtgccatggtggtcattgttgtgatcttcgtcaccgttctggtgcgctgtcgccatgcatcaaggttcaaagcagctcagaggagcaagcaaggtgccgaatggatgtccccaaaccaggagaacaagcaaaacaagaaaaagaaaagaaagaaaaggaagtctcccaaaagctctcttttgaactttgttactatcgaagagtccaaacccgatgatgcagttcatgaacctatcaatgggacaataagcctgccggctgaactggaggagcaaagtataggaagatttgactggggcccggcacctccaacaacattcaagcctaacagtcctgacctggccaagcactacaaatctgcttctccacagcctgcttttcatctcaaaccagacactccagtttccgtgaaaaagcaccacgtgattcaggaactccctttggacaacacctttgttgggggttgtgacaccctttctaaacgctcttccactagttcagatcacttcagtgcctcagagtgcagttcccaaggaggcttcaagacaaagggccccttacacaccagacagtgtaactcacacagcaaaagtgacaatattcctgtcactcctcagaaatgtcccagctccacgggtttccacattcaggagaatgaagaaagccattacgagtcgcagcgccgtgttacgtttcatctccctgatggctcccaggaaagctgcagtgacagtggtctaggagaccatgagccggtgggtagtggaaccctgatctcacaccctcttcctctggttcagccacaggacgaattctatgaccaggcctctccggacaagaggactgaagcagatggcaactctgatcccaactctgatgggcctttgggtccccgaggattagctgaagctacagagatgtgcactcaagagtgcttggttttgggtcactctgataattgctggatgcctcctggcttgggtccatatcaacaccccaaatctcctctctcaacctttgcaccccagaaagaatgggtgaagaaggacaagcttgtgaatgggcacaccctgaccagagcctggaaagaagacagcaacaggaaccagttcaatgaccgtaagcagtatggctccaatgaaggccatttcaacaatggcagccacatgacagacattcctctggcaaatctgaagtcttataagcaagcaggaggtgctactgagagtcctaaggagcaccaactctaagaaaaggctatatgggacctaataactttaaatagacatgctaataccgtgtgcgtcagagctttatgtattcaatagatctctacaactatgccccttctagcagggatacctataactttgtgttagcaccatggagaatacaatgtttttgcaacatatgagagaagatagttctagccatgcaattttgtttactagaattgattacactctccagagatctctccattgtgcaaattttttttattattgcattttattttgaccctggactgctgctatgaacaatagaatatgcatttggaaagtaagaaagtttcatggattagagtgactgaaaaacatatccagttagaaaattgtgcttttttttttttttttttttttttttgtcattgatttgtgctgggactgctatacttgacattatactgcaaacaaaacttaaagagataagcattaaacctattgtgctgttaacaacgttagtggacacttgtaagtcaatcagtgttaaagtatttgtaaatagaagcaagctattattaacaacttttgtgtacttataatgttcacctaaaaatgttgtagcataattctgtgttttatggttgcttctgtccttctttttatttacctctttgttgttatttttgttgtttctttcagtgaggtgtttctgtgttagtagtctgtcttgacacacattgttcaaacaatctcaagcacttgtgtttaaaaaaggttctgaaatcttgcttctcatatgatagcttatgatgccggaattctgtaaacaataaagatgaaagaaaaaatgaaaactttatacaaaaaaggacttctgcaaaagcttggaaattcagaacctattttttatcatcttattttcaaagtaggcaaaagcaaaatcacttaattagtaccattaagtgagagagtaatggaaaactgttatccatcaaaagtgatataatatcctgtacttgtcactcatgtaaaactaatgtatcaaaattagcatatatggaagaaaaatcactattcaaaaatagtttcaattgggcaaatgtgtgtctacaactttgttgaaatggcagagtctgtgttgatcctcatatacaataatgttgttgtaacacaagtgttattagaccatagccacaaaatatttaatgtgttgtgccttcatgatgtaacagaacattctccaggtagggtagttgggggaaataaagggataaatctctaattattgctgtttaactgtttgttatcatagttggtcaatgcctggcaggtaccagcatattgtcacttaggtcaaaccaataaagtgacaactaatgttaataagatctcagttgcacgtgcaaacaaatccaaattcgaacattcttaggaggtttttgttaaggcatgacagatgatttaaacaaataaatagcatgcaacaaaatgtctttattgaaagaagtggaagttatcttaatgccacggttcaccatcaatttaaaagtaaaaaaaacaaaaaaaaaacaaaaaatttaaaaaaaaggtttgctaatctgatagttaatttgttcttaccaaaaaataaaattactttgtaaatagcagttcacatttttccacagtataatggaaaataatgggtaggggtgcattgcttattgaagtacatttttgtcggtttgtgaggggtgtttgatgactttgacagaataaatatctaaacaattatccttgttactgctttgccagttctacgttatttacaattattcagctcttgcaataaatgttctgaattcctg

SEQ ID NO: 263379 - DNA, 3714 bp, Artificial Sequence
  derived and/or modified sequence
atggacctgagagacttctacctgctggccgccctgatcgcctgcctgagactggacagcgccatcgcccaggagctgatctacaccatcagagaggagctgcccgagaacgtgcccatcggcaacatccccaaggacctgaacatcagccacatcaacgccgccaccggcaccagcgccagcctggtgtacagactggtgagcaaggccggcgacgcccccctggtgaaggtgagcagcagcaccggcgagatcttcaccaccagcaacagaatcgacagagagaagctgtgcgccggcgccagctacgccgaggagaacgagtgcttcttcgagctggaggtggtgatcctgcccaacgacttcttcagactgatcaagatcaagatcatcgtgaaggacaccaacgacaacgcccccatgttccccagccccgtgatcaacatcagcatccccgagaacaccctgatcaacagcagattccccatccccagcgccaccgaccccgacaccggcttcaacggcgtgcagcactacgagctgctgaacggccagagcgtgttcggcctggacatcgtggagacccccgagggcgagaagtggccccagctgatcgtgcagcagaacctggacagagagcagaaggacacctacgtgatgaagatcaaggtggaggacggcggcaccccccagaagagcagcaccgccatcctgcaggtgaccgtgagcgacgtgaacgacaacagacccgtgttcaaggagggccaggtggaggtgcacatccccgagaacgcccccgtgggcaccagcgtgatccagctgcacgccaccgacgccgacatcggcagcaacgccgagatcagatacatcttcggcgcccaggtggcccccgccaccaagagactgttcgccctgaacaacaccaccggcctgatcaccgtgcagagaagcctggacagagaggagaccgccatccacaaggtgaccgtgctggccagcgacggcagcagcacccccgccagagccaccgtgaccatcaacgtgaccgacgtgaacgacaacccccccaacatcgacctgagatacatcatcagccccatcaacggcaccgtgtacctgagcgagaaggaccccgtgaacaccaagatcgccctgatcaccgtgagcgacaaggacaccgacgtgaacggcaaggtgatctgcttcatcgagagagaggtgcccttccacctgaaggccgtgtacgacaaccagtacctgctggagaccagcagcctgctggactacgagggcaccaaggagttcagcttcaagatcgtggccagcgacagcggcaagcccagcctgaaccagaccgccctggtgagagtgaagctggaggacgagaacgacaacccccccatcttcaaccagcccgtgatcgagctgagcgtgagcgagaacaacagaagaggcctgtacctgaccaccatcagcgccaccgacgaggacagcggcaagaacgccgacatcgtgtaccagctgggccccaacgccagcttcttcgacctggacagaaagaccggcgtgctgaccgccagcagagtgttcgacagagaggagcaggagagattcatcttcaccgtgaccgccagagacaacggcaccccccccctgcagagccaggccgccgtgatcgtgaccgtgctggacgagaacgacaacagccccaagttcacccacaaccacttccagttcttcgtgagcgagaacctgcccaagtacagcaccgtgggcgtgatcaccgtgaccgacgccgacgccggcgagaacaaggccgtgaccctgagcatcctgaacgacaacgacaacttcgtgctggacccctacagcggcgtgatcaagagcaacgtgagcttcgacagagagcagcagagcagctacaccttcgacgtgaaggccaccgacggcggccagccccccagaagcagcaccgccaaggtgaccatcaacgtgatggacgtgaacgacaacagccccgtggtgatcagcccccccagcaacaccagcttcaagctggtgcccctgagcgccatccccggcagcgtggtggccgaggtgttcgccgtggacgtggacaccggcatgaacgccgagctgaagtacaccatcgtgagcggcaacaacaagggcctgttcagaatcgaccccgtgaccggcaacatcaccctggaggagaagcccgcccccaccgacgtgggcctgcacagactggtggtgaacatcagcgacctgggctaccccaagagcctgcacaccctggtgctggtgttcctgtacgtgaacgacaccgccggcaacgccagctacatctacgacctgatcagaagaaccatggagacccccctggacagaaacatcggcgacagcagccagccctaccagaacgaggactacctgaccatcatgatcgccatcatcgccggcgccatggtggtgatcgtggtgatcttcgtgaccgtgctggtgagatgcagacacgccagcagattcaaggccgcccagagaagcaagcagggcgccgagtggatgagccccaaccaggagaacaagcagaacaagaagaagaagagaaagaagagaaagagccccaagagcagcctgctgaacttcgtgaccatcgaggagagcaagcccgacgacgccgtgcacgagcccatcaacggcaccatcagcctgcccgccgagctggaggagcagagcatcggcagattcgactggggccccgccccccccaccaccttcaagcccaacagccccgacctggccaagcactacaagagcgccagcccccagcccgccttccacctgaagcccgacacccccgtgagcgtgaagaagcaccacgtgatccaggagctgcccctggacaacaccttcgtgggcggctgcgacaccctgagcaagagaagcagcaccagcagcgaccacttcagcgccagcgagtgcagcagccagggcggcttcaagaccaagggccccctgcacaccagacagtgcaacagccacagcaagagcgacaacatccccgtgaccccccagaagtgccccagcagcaccggcttccacatccaggagaacgaggagagccactacgagagccagagaagagtgaccttccacctgcccgacggcagccaggagagctgcagcgacagcggcctgggcgaccacgagcccgtgggcagcggcaccctgatcagccaccccctgcccctggtgcagccccaggacgagttctacgaccaggccagccccgacaagagaaccgaggccgacggcaacagcgaccccaacagcgacggccccctgggccccagaggcctggccgaggccaccgagatgtgcacccaggagtgcctggtgctgggccacagcgacaactgctggatgccccccggcctgggcccctaccagcaccccaagagccccctgagcaccttcgccccccagaaggagtgggtgaagaaggacaagctggtgaacggccacaccctgaccagagcctggaaggaggacagcaacagaaaccagttcaacgacagaaagcagtacggcagcaacgagggccacttcaacaacggcagccacatgaccgacatccccctggccaacctgaagagctacaagcaggccggcggcgccaccgagagccccaaggagcaccagctgtag

SEQ ID NO: 263380 - protein, 626 aa, Artificial Sequence
  derived and/or modified sequence
MHQIRKSEYTQPTPIQCQGVPVALSGRDMIGIAKTGSGKTAAFIWPMLIHIMDQKELEPGDGPIAVIVCPTRELCQQIHAECKRFGKAYNLRSVAVYGGGSMWEQAKALQEGAEIVVCTPGRLIDHVKKKATNLQRVSYLVFDEADRMFDMGFEYQVRSIASHVRPDRQTLLFSATFRKKIEKLARDILIDPIRVVQGDIGEANEDVTQIVEILHSGPSKWNWLTRRLVEFTSSGSVLLFVTKKANAEELANNLKQEGHNLGLLHGDMDQSERNKVISDFKKKDIPVLVATDVAARGLDIPSIKTVINYDVARDIDTLLTPKDSNFAGDLVRNLEGANQHVSKELLDLAMQNAWFRKSRFKGGKGKKLNIGGGGLGYRERPGLGSENMDRGNNNVMSNYEAYKPSTGAMGDRLTAMKAAFQSQYKSHFVAASLSNQKAGSSAAGASGWTSAGSLNSVPTNSAQQGHNSPDSPVTSAAKGIPGFGNTGNISGAPVTYPSAGAQGVNNTASGNNSREGTGGSNGKRERYTENRGSSRHSHGETGNRHSDSPRHGDGGRHGDGYRHPESSSRHTDGHRHGENRHGGSAGRHGENRGANDGRNGESRKEAFNRESKMEPPPKRKKSRWDS

SEQ ID NO: 263381 - protein, 938 aa, Artificial Sequence
  derived and/or modified sequence
MNWNKGGPGTKRGFGFGGFAISAGKKEEPKLPQQSHSAFGATSSSSGFGKSAPPQLPSFYKIGSKRANFDEENAYFEDEEEDSSNVDLPYIPAENSPTRQQFHSKPVDSDSDDDPLEAFMAEVEDQAARDMKRLEEKDKERKNVKGIRDDIEEEDDQEAYFRYMAENPTAGVVQEEEEDNLEYDSDGNPIAPTKKIIDPLPPIDHSEIDYPPFEKNFYNEHEEITNLTPQQLIDLRHKLNLRVSGAAPPRPGSSFAHFGFDEQLMHQIRKSEYTQPTPIQCQGVPVALSGRDMIGIAKTGSGKTAAFIWPMLIHIMDQKELEPGDGPIAVIVCPTRELCQQIHAECKRFGKAYNLRSVAVYGGGSMWEQAKALQEGAEIVVCTPGRLIDHVKKKATNLQRVSYLVFDEADRMFDMGFEYQVRSIASHVRPDRQTLLFSATFRKKIEKLARDILIDPIRVVQGDIGEANEDVTQIVEILHSGPSKWNWLTRRLVEFTSSGSVLLFVTKKANAEELANNLKQEGHNLGLLHGDMDQSERNKVISDFKKKDIPVLVATDVAARGLDIPSIKTVINYDVARDIDTHTHRIGRTGRAGEKGVAYTLLTPKDSNFAGDLVRNLEGANQHVSKELLDLAMQNAWFRKSRFKGGKGKKLNIGGGGLGYRERPGLGSENMDRGNNNVMSNYEAYKPSTGAMGDRLTAMKAAFQSQYKSHFVAASLSNQKAGSSAAGASGWTSAGSLNSVPTNSAQQGHNSPDSPVTSAAKGIPGFGNTGNISGAPVTYPSAGAQGVNNTASGNNSREGTGGSNGKRERYTENRGSSRHSHGETGNRHSDSPRHGDGGRHGDGYRHPESSSRHTDGHRHGENRHGGSAGRHGENRGANDGRNGESRKEAFNRESKMEPKMEPKVDSSKMDKVDSKTDKTADGFAVPEPPKRKKSRWDS

SEQ ID NO: 263382 - DNA, 1881 bp, Artificial Sequence
  derived and/or modified sequence
atgcatcaaatcagaaagagtgagtatacccaacccactcctattcagtgtcagggagttccagtggccctgtcgggtagagatatgataggaatagccaaaaccgggagcgggaagactgcagcttttatttggcccatgctcattcacatcatggatcagaaggaattggaaccaggagatggccccatcgcggttatcgtctgtcctacacgcgaactgtgtcagcagattcatgcagaatgcaagaggttcggaaaagcatacaacctacgctcagtggccgtgtacggcgggggtagtatgtgggagcaggctaaggctctgcaggaaggggccgaaatcgtggtatgtacccctggcaggttgatcgaccatgtgaaaaagaaagcaaccaacctgcagagggtgagctaccttgttttcgatgaagcagacagaatgttcgacatggggtttgaataccaggtgcgttccattgcctctcacgttaggcctgaccggcaaaccctgctgtttagtgcgacctttcgcaaaaagatcgagaagttggctcgtgatatactgattgacccaatcagagtagtacagggagatattggggaagccaacgaggacgtaactcagatagttgagattctccactcgggaccttcaaagtggaactggctgacccggcgcttggtcgagttcacctcatcgggttcagtcctgctctttgtcacgaaaaaagcgaacgctgaagagttagcaaacaatctcaaacaagagggtcacaacctggggctgcttcatggagacatggatcagagcgagaggaacaaggtgatttcagattttaagaaaaaggatatacctgttctcgttgccactgatgttgccgcccgcgggctggacatcccgtccatcaagacggtgatcaattatgatgtcgctcgggatatcgacactctcctgacgcctaaggatagcaattttgcaggcgacctggtgcggaatctggagggggctaaccaacacgtgtctaaggaactgctggatctggccatgcagaacgcctggttccgcaagtcacgtttcaagggcggcaagggcaagaagctcaacattggggggggcggattagggtacagggagcggcctgggctgggctctgagaatatggatagaggtaataacaatgtcatgagtaattatgaagcctacaaacccagcacaggagccatgggcgatagactgaccgcaatgaaagccgcttttcagtcccagtataaaagccacttcgtggcagcatctctgagtaatcagaaagctggctcttccgcggccggcgcaagtggatggacctctgccgggagcctgaattcagtgcctacaaactctgcccaacaggggcacaattctcccgactcacctgtcacttcagccgccaaggggatacccggctttggcaacaccggcaatatttcaggagctccagtaacgtacccaagtgcaggtgcacagggcgtaaacaatacagccagcggcaataattctcgcgaaggcacgggaggcagtaacggaaagcgcgagcgctataccgaaaaccgaggatcctcccgccattcgcacggcgagacaggaaaccggcattcagattcgcctcggcacggcgacggggggagacacggcgacgggtacagacatccagaatcgagcagtcgacatacagatggccatcgacatggagagaaccgtcacggcggtagtgctggacgtcatggcgaaaatcggggcgcaaacgacggtcgaaatggagagtctagaaaagaagccttcaaccgcgaatccaagatggaaccaccgcccaaacggaaaaagagccggtgggatagctag

SEQ ID NO: 263383 - DNA, 2817 bp, Artificial Sequence
  derived and/or modified sequence
atgaattggaacaaaggcggccccggtactaaaagggggttcggcttcggcgggtttgctatctctgccggcaaaaaggaagaacctaaactgccccagcagagccactccgcatttggcgctacgagcagctcaagcggattcggaaagtcggctcccccacagctcccttctttctataagatcggttccaagcgcgctaattttgacgaggaaaacgcctacttcgaagacgaggaagaggactctagcaatgtggatctgccgtatatcccagcagaaaatagccctacccggcagcagttccacagtaagccagtagattccgattccgatgatgacccccttgaggcctttatggcagaggtggaggatcaggccgcccgcgatatgaaaagactcgaggagaaagacaaagaacggaagaacgtaaaggggatcagagatgacattgaggaagaggatgatcaggaggcatattttcggtatatggctgagaatccaaccgcgggggtggtacaggaagaggaagaggacaatttagagtacgacagtgatggcaatcctatcgctcctacaaagaagattatcgaccccctgcccccaatcgatcattccgagatcgattacccacctttcgaaaagaatttctacaatgagcatgaagagataaccaatctgaccccacagcagttaatcgacctacgccataagctcaatctgcgggtctctggcgcggcccccccccgccctggatcatccttcgcgcacttcggattcgatgagcagttaatgcatcagattaggaagtccgaatacactcaaccaacccccattcagtgtcagggcgtaccagtcgccctcagcggccgggacatgatagggatcgctaaaaccggctcaggtaaaaccgcagcgttcatctggccaatgctcatacacataatggatcagaaggagctggagccgggagacggccctattgcagtaattgtgtgtccaactcgggagctgtgccagcaaattcacgcagagtgtaagcgcttcggcaaggcttataatctccggagtgtcgctgtgtatggcggtgggtcaatgtgggaacaggcgaaggccttgcaggagggggcagagatcgtggtctgcacacccggacgcctgatagaccacgtaaaaaaaaaggcaactaatctgcagagagtctcatacttggtttttgatgaagcagatcggatgtttgatatgggctttgaatatcaagtccgttcaatagcaagccacgtaaggccagacagacagacactcctatttagtgcaacattcaggaaaaagatcgaaaagctggcacgggatatcctaatcgacccaattcgcgttgtccagggcgacattggggaggcgaacgaggatgttacccagatagtggagatacttcacagtggtcctagcaagtggaattggcttacccgccgtctggtggaatttacaagctccgggtcagtattgctgtttgtcacaaaaaaagcgaatgccgaggagctcgccaacaacctaaagcaagagggccataaccttgggttgttacatggagatatggaccaatctgagcgcaacaaagtcatctctgacttcaagaaaaaagacattccggtgctggtggctactgacgtggctgcccggggtctcgacatccccagtatcaagactgttatcaactacgacgtggcgagagatatcgacacacatacccatcgaatcggccgcactggtcgcgcaggcgagaagggggtggcttacacacttttgactcccaaagacagcaacttcgcaggagacctggtgcggaatctcgagggagctaatcagcatgtttcaaaggagctgctcgacctggccatgcagaacgcgtggttcaggaaaagccgttttaaaggcggcaagggcaaaaaactcaatatcgggggtggaggactggggtatagagaacgtcctggactcgggtccgagaacatggataggggtaataataacgttatgtcaaactacgaagcctacaagccctcgaccggagccatgggggacaggttaaccgctatgaaggcagctttccaaagccaatacaagagccatttcgtggctgcaagcctctcaaatcagaaggccgggtccagcgctgccggtgcatcagggtggacttctgccggtagcctgaattccgtgcccaccaattctgctcagcaaggacataattctccggacagccccgtaacgagcgccgccaagggaattcctggcttcgggaacacaggtaatatctctggtgctcccgtcacatatccaagcgccggagctcagggtgtgaacaacacagccagcggcaacaattcccgcgagggcaccggcggtagcaacggcaagcgggagagatatacagagaatcgtggcagctctaggcatagccatggcgagactggcaatcggcatagcgacagcccaaggcatggggatggtggcaggcatggagatgggtataggcatcccgagagcagctcgagacacaccgacggccatcggcatggagaaaatcggcacgggggcagtgctgggcgccacggcgagaacagaggggcaaatgatggacgcaacggtgaatccagaaaggaggccttcaacagggaatccaaaatggaaccgaaaatggagccaaaggtggattctagcaaaatggataaagttgacagtaaaacagataagacggcggacggattcgccgtgcccgaaccgcccaagaggaagaagtctcggtgggactcatag

SEQ ID NO: 263384 - DNA, 2817 bp, Artificial Sequence
  derived and/or modified sequence
atgaattggaacaaggggggacccggtaccaagcggggcttcggatttgggggattcgccattagcgcaggaaagaaggaggaacctaaactcccccagcagtcacactccgcatttggcgcgaccagtagctccagcggcttcggcaagtctgcccctccacagttgccctccttctacaaaatcgggtccaaacgcgccaactttgatgaggaaaatgcttactttgaggacgaagaagaggactcaagcaacgtggacctgccttatattcctgccgaaaatagcccgaccaggcaacaattccatagtaaacctgttgactcagacagtgatgatgatccgttagaggcgttcatggccgaggtcgaagatcaggcagccagggacatgaaacggctcgaggagaaggacaaggagcggaagaacgtcaaagggatccgagacgatattgaagaggaggatgatcaagaggcttactttcggtacatggctgaaaatcctactgctggtgttgtgcaggaggaagaggaagacaatctggagtacgactccgatggcaaccccatagctccaacaaagaagataatcgaccccctccccccaatcgaccactccgagatcgactaccccccctttgagaaaaatttctataacgaacatgaggagatcacaaatttgaccccacagcagctaatcgacctgcggcacaaactgaacttgagagtgtccggtgccgctccaccaaggcctgggtcctcgttcgcccactttgggttcgatgagcagctgatgcaccagattaggaagagtgagtacactcagcctacacccatacagtgccagggagttcccgtcgctttatccggtagggatatgattggcattgcaaaaacaggaagcggtaaaactgccgcattcatctggccgatgttaatccacatcatggaccagaaggagctcgagcccggggatggcccaatcgccgtaatcgtgtgtccgacacgggagctttgccagcagatccatgcggagtgtaaaagattcgggaaggcttacaatctgcgaagtgtggcagtgtacgggggcggaagtatgtgggagcaagccaaagccctgcaggagggcgccgaaatcgtagtttgcacccctggcagattaatcgatcatgttaagaagaaggcgaccaatctgcagagagtctcctacctggtgttcgacgaggccgacaggatgttcgatatgggtttcgagtaccaagtgcgatcgattgcgtctcacgtgcggccagaccgtcaaaccctgctgttctcagctaccttccggaagaagattgaaaagctggcaagagacatcctcatcgacccaatccgggtcgtgcagggagacatcggagaggccaacgaggatgtgacccagattgttgaaatcctccatagcggtcccagcaagtggaactggctcaccagacggctggtcgagttcactagctccgggtctgttctgctgttcgtgaccaagaaggcgaacgcagaggagcttgctaacaacttaaaacaagagggacacaatctgggcctgttacacggagatatggaccagtccgagagaaacaaagtgatcagcgattttaagaaaaaagacatccccgtactagtggcaacggatgttgcagctagaggcctggacattccatctatcaaaactgtgattaactacgatgtagcccgggatatcgatacacacactcatcgaattgggcggaccggtcgtgcgggcgagaaaggtgttgcctatacacttctcaccccgaaagattcaaacttcgccggagacttggtacgtaatctggaaggtgccaaccagcacgtgagtaaagagctgttggacttggctatgcagaacgcttggtttcggaagagtaggttcaaaggggggaagggcaagaagctgaatattggcggcgggggcctgggctaccgtgaaaggcccggactgggttccgaaaacatggatagagggaataataacgtgatgagtaactacgaagcttataagccttccaccggagcgatgggggatagactcaccgccatgaaagccgcgttccaatcccaatataaatctcatttcgtggcagcttctctaagcaaccagaaggccgggagtagtgctgccggtgccagcggttggacttctgccggctccctgaattcagtccctacgaactcagctcagcaaggacacaattcccccgattcacccgttacgagcgctgccaaaggcatccccggcttcggtaacactggtaacatttctggcgccccagtaacctacccctcagcaggggctcagggggtaaacaacacagcaagcggaaataattctcgcgaggggaccggggggtctaacggcaaaagggagcgctacactgaaaaccgcggatcctccaggcactctcacggcgagacagggaatcggcatagcgactcccccagacatggcgatggcggacgacacggagatggatatcgccaccccgaatctagtagccgacacacggatgggcaccgccacggcgagaaccgccatgggggcagcgcgggcaggcacggtgagaaccggggtgccaacgacggtaggaacggcgagtccagaaaggaggcattcaacagagaatccaagatggagcctaagatggagccaaaggtggactcgtcaaagatggacaaggtagattcaaagactgataaaacagcagacggattcgccgttcctgaaccccctaagcggaaaaagtcgaggtgggattcttag

SEQ ID NO: 263385 - DNA, 2817 bp, Artificial Sequence
  derived and/or modified sequence
atgaactggaataaaggcggacctggcacaaaaagaggcttcggattcggaggcttcgctatcagtgcaggtaagaaagaagaacctaaactcccccagcaatcgcattccgcttttggggctacctcatcaagtagtggcttcggtaaatccgcccccccacaactgccctcattttataaaatcggctccaaacgtgcaaattttgatgaggagaatgcgtatttcgaggatgaagaggaagatagcagtaatgtcgatctgccttacatacctgcagaaaattcccctacgagacaacagtttcatagcaagcccgtcgacagtgattccgacgacgatcctctggaggcattcatggcagaagtcgaggatcaggccgctcgggacatgaagagattggaggagaaggacaaggaacgcaaaaacgtgaagggcatacgagatgatattgaagaggaagatgatcaggaggcttatttcaggtatatggcagagaatcccaccgccggtgtggtgcaggaggaggaggaagataacctggagtatgatagcgatggaaaccctattgcccccactaagaaaatcatcgatccgttaccgcctatagaccacagcgagatcgactaccctccctttgagaaaaatttttataacgagcacgaggaaatcaccaatctgacaccccagcagctgatcgacttacgacacaagctgaatctaagagtaagcggggcagccccccctcggcccggcagcagtttcgcacactttggatttgatgagcagctcatgcatcagattcgcaaaagcgaatatactcaacctacccctattcagtgccaaggggttccggtggccttgtcaggccgcgacatgatcggtatcgcaaagacagggtcagggaaaaccgctgctttcatctggcctatgttaatccacataatggaccaaaaggaactcgaaccaggggatgggcctattgctgtgatcgtctgccccacgagggagctgtgccagcagatccatgcagagtgtaagaggtttggaaaagcctacaacctgaggtccgtggctgtgtatggaggaggcagcatgtgggaacaggcaaaagccctccaggaaggagccgagatcgtagtctgtacccccggccgcctcatcgaccacgtcaaaaagaaggccaccaacctgcaaagagtgagttaccttgtcttcgatgaggcagatagaatgtttgatatgggcttcgaatatcaggtgagaagcattgcctcccatgttcgaccagatcgacagactctgctcttttcagccaccttcaggaagaagatagagaaactggcccgcgacatcctcattgatcctattagggtggtgcagggtgacataggggaggctaacgaggatgtcacccagatcgtcgagattttgcacagtgggcctagcaagtggaactggttgactcggcggctcgttgagttcaccagtagtgggtcagttctgctgttcgtcactaaaaaggccaacgccgaggagctggccaacaatttgaagcaggagggccacaaccttgggttgctgcacggagatatggaccagtctgagcgaaacaaagtgatctcagactttaagaagaaagacatccctgtgctcgtggcaaccgatgtcgctgcaagggggctcgacatcccctctattaagacagtcatcaactacgacgtggctcgggatatagatacacatactcatcgcataggacgcacaggacgggctggggagaaaggggtcgcctacacactgctgactccaaaagactccaatttcgccggagatcttgtgcgcaatctggaaggcgctaatcagcacgttagtaaagagttactggacttggccatgcagaacgcctggttccgcaaatcaaggttcaaggggggaaagggcaagaagttgaacattggcggaggcgggctcgggtatagagaaagacccggattggggtctgagaacatggaccgcgggaacaataacgtgatgtctaactacgaagcatacaagccttctaccggtgcaatgggcgaccgtcttactgcaatgaaagccgccttccagtcccagtacaaaagccactttgtggccgcaagtctgagcaatcagaaagccggcagcagcgctgcaggcgccagcggctggaccagcgcaggatccctgaatagtgtccccacaaattccgcgcagcagggacacaactccccagatagccctgtgactagtgctgcgaaaggcatccctgggttcggcaatactggcaatatatctggggcaccagttacctacccctcagccggcgcccagggtgtcaacaataccgcaagtggcaataatagccgtgaaggcacgggtggatcaaacggcaagcgggaacgctatacagaaaatcgggggagctccaggcattctcatggggaaacaggcaatcggcatagcgattcccctcgtcacggggatggtggccgtcacggagatggatatcgccatccagagagctcctcccgccacacagacggccaccggcatggtgagaatcgacacggcggatctgccggtcggcacggcgagaaccggggcgccaatgacggaaggaatggtgagtcaagaaaggaggcgttcaacagagagtccaaaatggagcccaagatggaacctaaagtcgacagttcaaaaatggataaagtggacagcaagaccgacaagacagctgacgggtttgctgtacctgagcctccgaaacgcaagaagtcacgatgggactcttag

SEQ ID NO: 263386 - DNA, 2817 bp, Artificial Sequence
  derived and/or modified sequence
atgaactggaataaggggggaccgggaacaaaacgaggttttggttttggaggattcgctatctccgcaggtaagaaggaagagcctaagttgcctcagcagtcacattcagcttttggcgctacatcttcctccagtggcttcggcaagtctgcaccgccccaactccccagcttttacaagatcgggagtaagcgggctaacttcgatgaggaaaacgcatactttgaagatgaagaggaggactcatctaacgtagatcttccgtatatccctgccgagaacagcccaaccagacaacagtttcacagtaagcctgttgactctgattccgacgacgatccactggaggccttcatggcagaggttgaggaccaagcagcaagggatatgaagcgcctcgaggaaaaggataaagaacggaaaaatgtgaaggggatcagagatgatatcgaggaagaggacgatcaggaagcctattttcgctatatggcagagaatcccaccgcgggggtagtccaggaggaggaagaagacaacttagaatacgattcagacggtaacccgattgcacccacaaaaaaaattattgatcctttgcccccaatcgaccactccgagatcgattacccacctttcgagaagaatttctataatgaacatgaggagataaccaacttaaccccccagcagctgatagatcttaggcataaactgaacctgcgggtgtcaggggctgccccacccagacccggctctagctttgcccatttcggattcgacgaacagctcatgcaccagatccggaaatccgaatatacccaacccactcccatacagtgtcagggtgtacccgtcgcgctcagtggcagggacatgattggaattgccaaaacaggtagcggcaagaccgccgcttttatctggcccatgctgattcatatcatggaccagaaggagctcgaacctggggatggcccaatcgccgtgatagtctgccctaccagggaactatgccagcagatacacgctgaatgcaaacgattcggcaaagcatacaacctacgtagtgtggccgtgtacggagggggatctatgtgggagcaggccaaagctttgcaagagggggccgaaattgtggtctgtacgcccgggaggctgattgatcacgtaaagaagaaggcaactaacctccagcgagtgtcatatctggtttttgatgaggcggacaggatgttcgatatggggttcgagtatcaggtgaggtcgatcgcatctcatgtgcgtccggacagacagaccctgctgtttagcgctacctttcgcaagaagatcgagaagctagctagggacattctgatcgaccccatccgtgtcgttcagggagacattggcgaggccaatgaggacgtcacccagatagttgaaatcttgcactccggaccctccaagtggaactggttgacaaggcggctcgtggaattcactagcagcgggagtgtcctgctgttcgtgacgaagaaagctaacgctgaggagctcgcgaataatctgaaacaggaaggtcacaatttgggcctcctccacggtgatatggatcagagcgagcgcaacaaagtgatttccgactttaaaaagaaggacattcccgtgctcgtggctacagacgtggctgcccgcggcctggacatcccatccattaagacggttattaactatgacgtcgctagggatatcgatacccacacccatcgcattggcagaacgggtcgggcgggggaaaagggtgttgcctatactctcctgactcccaaggattccaacttcgcgggggaccttgttagaaatctcgagggggctaaccagcacgtgtcgaaggagctgctggatctagccatgcagaatgcctggtttcgaaagtccagattcaagggcggcaagggcaagaagctcaacatcggcgggggggggctgggctaccgtgagaggccgggcttgggaagcgagaatatggaccggggcaacaataacgtgatgtctaattacgaagcttataagccctccacgggagccatgggtgataggctaacagccatgaaagctgcgttccagtcccagtataaatctcactttgtcgccgcctcgctctctaaccagaaagccggatcctccgccgcaggagcatctggttggacatcagccggctcattaaatagcgtgcctacgaactccgctcagcagggtcacaattctcctgattcccccgttacatctgccgctaaggggatcccaggcttcgggaatacagggaacatatcaggagcccccgtcacctaccctagcgctggcgcccaaggcgttaataataccgcctccggtaacaattctagagagggtaccggagggtctaatgggaaaagggaaagatacactgagaacagaggaagtagccgacattcccacggcgagaccgggaatcggcactcagactcccctcggcacggtgatggtggaagacacggagacggttatcgacacccagagtctagctcccggcatactgatggacaccgccatggggaaaaccgccatggtggttctgctggcagacacggggaaaaccgcggcgccaacgatggtcggaatggagaatcacggaaggaggcttttaatcgggagagtaagatggagccaaagatggagccgaaagtcgacagcagtaaaatggacaaagtcgattcgaagaccgataagaccgctgacggattcgctgtgcccgaaccccccaagagaaagaagagcaggtgggactcttag

SEQ ID NO: 263387 - DNA, 1881 bp, Artificial Sequence
  derived and/or modified sequence
atgcaccagatcaggaagtctgagtacacccagcccacccccatccagtgccagggcgtgcctgtggccctgagcggccgggacatgattggcatcgccaagacaggcagcggcaagacagctgccttcatctggcccatgctgatccacatcatggaccagaaggagctggagcctggagatggccccatcgctgtgattgtgtgccccacccgggagctgtgccagcagatccacgccgagtgcaagagatttgggaaggcctacaacctgcggtctgtggccgtgtatggaggcggctccatgtgggagcaggccaaggccctgcaggagggcgctgagatcgtggtgtgcaccccaggccgcctgattgaccacgtgaagaagaaggccaccaacctgcagagggtgtcctacctggtgtttgatgaagctgacaggatgtttgacatgggctttgagtaccaggtgcgcagcatcgccagccacgtgcggccagaccggcagaccctgctcttcagcgccaccttcaggaagaagattgagaagctggcccgggacatcctgattgaccccatccgggtggtgcagggcgacatcggggaggccaatgaagatgtgacccagatcgtggagatcctgcacagcggccccagcaagtggaactggctgacccggcggctggtggagttcaccagcagcggctctgtgctgctgtttgtgaccaagaaggccaatgctgaggagctggccaacaacctgaagcaggagggccacaacctgggcctgctgcatggagacatggaccagagcgagaggaacaaggtgatcagtgacttcaagaagaaggacatccctgtgctggtggccacagatgtggccgcccggggcctggacatccccagcatcaagacagtcatcaactatgatgtggcccgggacatcgacaccctgctgacccccaaggacagcaactttgctggggacctggtgaggaacctggagggcgccaaccagcacgtgtccaaggagctgctggacctggccatgcagaatgcctggttcaggaagagccgcttcaagggcggcaagggcaagaagctgaacatcggcggcggcggcctgggctaccgggagaggcctggcctgggcagcgagaacatggaccggggcaacaacaacgtgatgagcaactatgaggcctacaagcccagcactggagccatgggagaccggctgacagccatgaaggccgccttccagagccagtacaagagccactttgtggccgccagcctgagcaaccagaaggccggcagcagcgctgctggggccagcggctggaccagcgctggcagcctgaacagcgtgcccaccaacagcgcccagcagggccacaacagcccagacagccctgtgaccagcgctgccaagggcatccctggctttggaaacacaggcaacatcagcggggcccctgtgacctaccccagcgctggggcccagggcgtgaacaacacagccagcggcaacaacagccgggagggcactggaggcagcaatggcaagcgggagcgctacacagaaaatagaggcagcagccgccacagccacggggagactggaaacagacacagcgacagccccaggcatggagatggcggcagacatggagatggctaccgccaccctgagagcagcagccgccacacagatggccaccgccacggggagaacagacatggaggcagcgctggccgccacggggagaacagaggagccaatgatggaagaaatggagagagcaggaaggaggccttcaaccgggagagcaagatggagcccccacccaagaggaagaagagccgctgggacagctag

SEQ ID NO: 263388 - DNA, 2817 bp, Artificial Sequence
  derived and/or modified sequence
atgaactggaacaagggcggccctggcaccaagaggggcttcggctttggaggctttgccatctctgctgggaagaaggaggagcccaagctgccccagcagagccacagcgcctttggagccaccagcagcagcagcggctttgggaagagcgccccaccccagctgcccagcttctacaagattggcagcaagagggccaactttgatgaggagaatgcctactttgaagatgaggaggaggacagcagcaatgtggacctgccctacatcccagctgagaacagccccacccggcagcagttccacagcaagcctgtggacagcgacagtgatgatgaccccctggaggccttcatggccgaggtggaggaccaggccgcccgggacatgaagaggctggaggagaaggacaaggagaggaagaatgtgaagggcatcagagatgacatcgaggaggaggatgaccaggaggcctacttccgctacatggccgagaaccccacagctggggtggtgcaggaggaggaggaggacaacctggagtatgacagtgatggcaaccccatcgcccccaccaagaagatcatcgaccccctgccccccatcgaccacagcgagattgactaccccccatttgagaagaacttctacaatgaacatgaggagatcaccaacctgaccccccagcagctgattgacctgcggcacaagctgaacctgcgggtgtctggggccgccccacccaggcctggcagcagctttgcccacttcggctttgatgagcagctgatgcaccagatcaggaagtctgagtacacccagcccacccccatccagtgccagggcgtgcctgtggccctgagcggccgggacatgattggcatcgccaagacaggcagcggcaagacagctgccttcatctggcccatgctgatccacatcatggaccagaaggagctggagcctggagatggccccatcgctgtgattgtgtgccccacccgggagctgtgccagcagatccacgccgagtgcaagagatttgggaaggcctacaacctgcggtctgtggccgtgtatggaggcggctccatgtgggagcaggccaaggccctgcaggagggcgctgagatcgtggtgtgcaccccaggccgcctgattgaccacgtgaagaagaaggccaccaacctgcagagggtgtcctacctggtgtttgatgaagctgacaggatgtttgacatgggctttgagtaccaggtgcgcagcatcgccagccacgtgcggccagaccggcagaccctgctcttcagcgccaccttcaggaagaagattgagaagctggcccgggacatcctgattgaccccatccgggtggtgcagggcgacatcggggaggccaatgaagatgtgacccagatcgtggagatcctgcacagcggccccagcaagtggaactggctgacccggcggctggtggagttcaccagcagcggctctgtgctgctgtttgtgaccaagaaggccaatgctgaggagctggccaacaacctgaagcaggagggccacaacctgggcctgctgcatggagacatggaccagagcgagaggaacaaggtgatcagtgacttcaagaagaaggacatccctgtgctggtggccacagatgtggccgcccggggcctggacatccccagcatcaagacagtcatcaactatgatgtggcccgggacatcgacacccacacccaccgcatcggccgcacaggccgggccggggagaagggcgtggcctacaccctgctgacccccaaggacagcaactttgctggggacctggtgaggaacctggagggcgccaaccagcacgtgtccaaggagctgctggacctggccatgcagaatgcctggttcaggaagagccgcttcaagggcggcaagggcaagaagctgaacattggaggcggcggcctgggctaccgggagcggcccggcctgggcagcgagaacatggaccggggcaacaacaacgtgatgagcaactatgaggcctacaagcccagcactggagccatgggagaccggctgacagccatgaaggccgccttccagagccagtacaagagccactttgtggccgccagcctgagcaaccagaaggccggcagcagcgctgctggggccagcggctggaccagcgctggcagcctgaacagcgtgcccaccaacagcgcccagcagggccacaacagcccagacagccctgtgaccagcgctgccaagggcatccctggcttcggcaacacaggcaacatcagcggggcccctgtgacctaccccagcgctggggcccagggcgtgaacaacacagccagcggcaacaacagccgggagggcaccggcggcagcaatggcaagcgggagcgctacacagagaacagaggcagcagccgccacagccatggagagaccggcaacagacacagcgacagccccaggcatggagatggcggcagacatggagatggctaccgccaccctgagagcagcagccgccacacagatggccacagacatggagaaaatagacatggaggcagcgctggaagacatggagaaaatagaggagccaatgatggaagaaatggagagagcaggaaggaggccttcaaccgggagagcaagatggagcccaagatggagcccaaggtggacagcagcaagatggacaaggtggacagcaagacagacaagacagcagatggctttgctgtgcctgagccccccaagaggaagaagagccgctgggacagctag

SEQ ID NO: 263389 - DNA, 1881 bp, Artificial Sequence
  derived and/or modified sequence
atgcaccagatccggaagagcgagtacacccagcccacccccatccagtgtcaaggggtaccagtcgctttgagcgggagggacatgatcggcattgctaagactgggtctggtaaaacggccgcttttatttggcccatgttaattcatataatggaccagaaagaactggaaccaggggatggacccatagccgttattgtgtgcccgactcgggagctttgtcagcaaatccacgcagagtgtaaaaggttcggaaaagcatacaacctgcggtctgtcgccgtgtatggcggaggatccatgtgggaacaggccaaagctcttcaagaaggggcagagatagtggtttgtacgccgggtaggttaatcgaccacgtgaagaaaaaggccactaatctccagcgagtaagctatctggtgtttgatgaggctgacaggatgttcgacatgggctttgaatatcaggtccgctcgatcgcttcacacgtgcggccagataggcaaactcttctcttttctgcgacttttaggaagaagatcgagaagttggcccgagacattttgatcgatcccattcgtgtggtccagggcgatatcggcgaagcaaacgaggatgtgactcagatcgtcgaaatcctccactctggtccatccaagtggaattggctgactaggcgcctagtcgaatttacttcttcgggatccgtcttgctcttcgttaccaaaaaagccaacgcagaagaactggcaaacaacctcaagcaggagggtcataacctggggctgttgcatggcgacatggaccagagtgaacggaacaaagttattagtgattttaagaagaaggatattcccgtgctggttgcaacggatgtcgccgcgagagggcttgatatcccatctatcaagaccgtgattaactacgacgttgcaagagacatcgacaccttgcttactccgaaagacagtaacttcgccggcgatttggttagaaacctcgagggggcaaaccagcacgtctccaaggaacttctggatctggccatgcagaacgcctggtttcgaaaaagcagatttaaaggcgggaaaggcaaaaagttgaacatcggcggcggcggcctcggctatagggaacggccgggccttgggagcgagaacatggataggggcaacaacaatgttatgtctaactatgaggcatataaaccttccaccggagccatgggggaccggttaactgccatgaaggccgccttccaaagccagtacaagtcacactttgtggccgcttccctctctaatcagaaagctggctcaagtgctgctggcgcaagtggctggacttccgccggttccctgaatagtgtgcccacgaactccgctcaacaaggacacaactcgcccgattcccccgttactagtgcagctaagggcatccctggatttggaaatacaggtaatatctccggcgccccagtgacttatccatccgccggtgcacagggggtcaataataccgcctctgggaacaattcaagggagggtacaggcggcagtaatggtaaaagagagcgctacacggagaaccggggaagcagccgacactctcacggggagaccggcaataggcattccgattctcctagacacggcgacggcggcagacatggggatggctataggcatccggaatcctcaagtagacatacggatggccataggcatggcgagaatagacacgggggctccgcgggccgtcatggggaaaatcggggtgcaaatgacggacgtaacggcgaatcacgcaaagaagccttcaatagggaatccaagatggagcccccacctaaaaggaagaaatcccgatgggattcttag

SEQ ID NO: 263390 - DNA, 2817 bp, Artificial Sequence
  derived and/or modified sequence
atgaactggaacaagggcggccccggcaccaagcggggcttcggctttggagggttcgccataagtgccgggaaaaaggaggagcccaaactgccacagcaaagtcattcagcatttggggccacatcctcttcaagtggttttgggaaatccgcacctccccagctgccgtccttctacaagatcggctctaaaagggccaactttgacgaggaaaatgcttactttgaggacgaggaggaagacagttctaacgtcgatctgccgtacatcccagccgagaatagtcctaccaggcagcagtttcactcgaaaccagtcgattccgacagtgacgacgatccattagaagcttttatggccgaggtggaggatcaggccgccagagatatgaaacgtttagaggagaaggacaaggagcgcaaaaacgttaaggggatcagggatgatatcgaagaagaggatgaccaggaggcttactttcgttatatggcagaaaaccctacagccggtgtggttcaggaagaggaagaggacaatttagaatatgatagcgacggtaatcctatcgcaccaactaagaaaatcatcgatcccctgcccccaatcgatcactcggagattgactatccaccctttgagaaaaacttttataatgaacacgaagaaatcactaacctgacaccacagcaactcatagatctccgacacaaacttaacctgagggtgtcaggcgcagcccctccccgccctggcagttcctttgcccactttggcttcgacgaacagctcatgcaccaaattcggaagagcgaatacacccagcctactcctatccaatgtcagggcgtcccggtagccctgagtggccgggatatgattggcatcgcgaaaaccggttcggggaagacggctgcatttatttggccaatgcttatacacattatggaccagaaggagttagaaccaggcgacggcccaatcgcagtgatcgtgtgccctacgcgcgaactgtgccagcagattcatgctgaatgcaaacgtttcggaaaagcctataacctgaggtctgtggctgtctatggtggcggctcaatgtgggaacaagctaaggcgctgcaggaaggcgccgagattgtagtgtgcacaccagggcggctgattgaccacgttaagaagaaggctactaatctgcaacgagtatcctaccttgtcttcgacgaagcagacagaatgttcgatatgggatttgaatatcaggtgcgaagtatcgcatctcacgttcgcccagatcgccagactttgctgttttcggccaccttcagaaagaagatagagaaactggcacgggatattctcattgaccccatcagagtagtccagggcgacattggggaagctaacgaagatgtgacacaaatagtcgaaatcttgcactcggggccgtcaaagtggaattggcttactcgccgtctagtggagttcacttccagcggtagcgtgctgctcttcgttacaaagaaggcaaatgccgaggaattggccaataatctcaagcaagagggtcataatctggggctgctacatggcgatatggatcagtctgaaaggaataaagttatttctgacttcaaaaaaaaggatatccctgttctggtggctaccgatgtggccgcacgcggactggacattcccagcatcaaaacagtgattaattacgatgtcgctagggacattgatacccacacccaccggattggtcgaacaggacgggcgggggaaaaaggagtggcctatactctgttgactccaaaagactcaaatttcgccggcgatcttgtcagaaacctggaaggtgcaaaccagcacgtgagcaaggagctcctggacctcgctatgcaaaacgcttggttccgaaagtcaagattcaaaggcggaaaggggaaaaaactcaacatcggcgggggcggccttggctaccgcgaacgtccgggcctgggctcagaaaatatggacaggggaaacaataatgtgatgagtaactacgaagcatataagccctccacgggagcaatgggagaccgactgacagctatgaaagctgcgtttcagagccagtataagtcacattttgtggccgcctccctcagcaaccagaaggccggttcttcagcagcaggggctagcggttggacttctgcaggttctctgaatagtgtgcccaccaattcagcacaacagggacataattcaccagattctccagtcacatctgcagccaaaggaatcccaggattcggcaacacgggcaacatctcaggcgcacctgtcacttacccgtccgccggcgcccagggagtgaataacaccgcctctggtaacaattctcgcgagggcacaggaggcagtaacggcaaacgtgaacgttataccgagaaccggggaagctccaggcacagccacggggagaccggaaatcggcactccgactcgccccgacacggcgatgggggccgccacggcgacgggtatcggcaccccgagagttccagccgccatacggatggtcacagacatggcgaaaacaggcatggaggtagcgccggccggcatggcgaaaaccgcggagctaatgatggtaggaacggtgagtcacggaaggaggcctttaacagggagagcaagatggaacccaagatggaacccaaggtggattcctctaaaatggataaggtggatagtaaaaccgataaaaccgcagacggatttgccgtgccagagccccctaagcggaagaagagtaggtgggattcatag

SEQ ID NO: 263391 - DNA, 2817 bp, Artificial Sequence
  derived and/or modified sequence
atgaactggaacaagggcggccccggcaccaagcggggcttcggctttggcggcttcgccatatctgctgggaaaaaggaggaaccaaaactgccgcagcagtcacatagcgcctttggcgcaacctctagctcgagcggtttcggcaagtcggctccaccccagctcccatccttttacaaaatcgggtctaagagagctaacttcgacgaggaaaatgcctacttcgaggatgaggaagaagactcaagtaacgtggatcttccttatattcctgcagagaactccccaactcggcagcagtttcacagtaaaccggtagacagtgactcggatgatgatcccctggaggcgtttatggctgaggtggaggatcaggctgcccgcgatatgaagcggctggaagagaaggacaaggagcgcaagaatgtgaaaggtattagagacgatattgaagaggaggatgaccaggaagcgtatttcaggtatatggccgaaaaccccactgcgggcgtggttcaggaagaagaggaggacaacctcgagtatgattcagatggtaaccccatcgcaccgactaaaaagataatagatcccctgcctccaattgaccactctgagatcgattaccctccctttgagaaaaatttctacaatgagcatgaagaaattactaatctgacgccccagcaactgattgacttacgtcacaagctcaaccttcgtgtctcaggagcggctcctcctaggccaggcagctctttcgcacatttcgggttcgacgagcaactcatgcaccaaatacggaaaagtgagtacactcaacccacccccattcagtgccagggcgtgcctgtggctctgtcgggtagagacatgattgggatagctaagaccgggtcaggcaagaccgccgctttcatctggcctatgcttatccacataatggatcagaaggagctggaaccaggtgatggtccaatcgctgtgatagtctgtccaaccagagaactgtgtcagcaaatacacgccgagtgtaagcggttcggtaaggcctacaatctgcggtccgtggctgtttacggtggcgggtcaatgtgggagcaggcaaaggctttacaggagggggcagagatcgtggtctgcacccccggccggcttattgaccacgtaaagaaaaaagccaccaatctgcagcgagtgtcctatcttgtctttgacgaggccgatcgcatgttcgacatggggttcgaataccaagttcgcagcattgcctcccacgtgcgaccagaccggcaaaccctgcttttctccgccactttccgcaagaaaatcgaaaagctggcccgcgatatcctgatagatccaatccgagttgtacagggggatatcggagaggccaacgaggatgtgacacagattgtcgaaattctacattcagggccttctaagtggaactggctgacacgacgcctggtcgagtttacaagcagcggcagtgtgctcttgttcgttaccaagaaggctaacgccgaggaactagcaaacaatctgaagcaagaaggccacaacctggggctcctccatggggacatggaccaatcagagcgcaacaaggtgattagtgacttcaaaaagaaagacatccctgtccttgtggcaacagacgtcgccgctcgggggctagatattccctctataaagactgtcatcaactacgatgtcgccagggacatcgatacccacacccaccggatcgggcgcaccggtcgcgctggtgagaagggcgtggcttacacacttctgacccccaaagatagcaatttcgccggggaccttgtcaggaatctggagggcgcaaatcagcacgtgagcaaggaactgctggatctggctatgcagaacgcctggtttaggaaatccaggttcaaaggaggcaagggaaagaagctcaatatcggcggcggtggcctcgggtatagagagcggcccggattagggtcagagaatatggaccgtggcaataataacgtgatgtccaactatgaggcttacaaaccttccaccggagccatgggggatcggctgacggccatgaaagccgcatttcagagccaatataaaagtcacttcgtcgccgcctcattaagtaatcagaaggcgggcagctccgccgcaggcgcttccggctggacttctgcggggagtttgaacagcgtgcctacgaatagcgcgcaacagggacacaattctcctgactcgccggtgacctctgccgctaaaggaataccaggcttcggcaacactggcaatatcagcggggcccccgtgacatatccgtcagctggcgctcagggcgtgaacaatacggcttcaggcaataatagccgcgaaggcaccggcgggtccaatggcaagcgtgagcggtatactgagaatcgtggctcatcaagacactcgcacggagagactgggaatcgccattctgacagcccacgtcacggagatggggggcgccacggggacgggtataggcaccccgagtcaagttcacgacacacggacggacatcgtcacggagaaaaccgacacggcggtagtgcaggaagacatggagaaaaccgaggagccaatgatggtcgaaatggcgaaagcaggaaggaagcgtttaatcgggagagtaagatggaacctaaaatggagcccaaggttgactcgtccaagatggacaaagtcgactctaagaccgataagacagcggacggtttcgccgttcccgagcctccaaaacggaaaaaaagtcgctgggattcttag

SEQ ID NO: 263392 - DNA, 2817 bp, Artificial Sequence
  derived and/or modified sequence
atgaactggaacaagggcggccccggcaccaagcggggcttcggcttcggtggcttcgccatcagcgcaggtaaaaaggaggagccgaagttgccccagcagagtcacagcgcttttggcgccacatcaagttctagcgggttcgggaaatccgcacctccccagttaccatccttctacaaaattggatccaaacgcgccaactttgatgaagaaaatgcttactttgaagacgaggaggaagactccagcaatgtcgatctgccttacatcccagctgaaaattccccaacacgacagcagttccactccaaaccggtggactctgatagcgatgacgacccacttgaagccttcatggccgaagtcgaggatcaggccgccagagatatgaaacgtctcgaggagaaagacaaggagcgaaagaacgttaaggggattcgcgacgacattgaagaggaggatgatcaggaagcatacttcagatacatggccgagaatcctacagccggagttgtacaggaagaggaagaagataatcttgaatatgactccgacggcaacccgatcgctcctacaaagaagatcatagacccccttccccccatcgaccactctgagattgactacccccccttcgagaagaatttctacaatgagcacgaggagatcaccaaccttaccccacaacaactcattgacctgcggcataaactgaacctccgtgtgtccggcgcggccccgcccaggcctggctcctctttcgcccattttggattcgatgagcagctgatgcaccaaataaggaagagcgaatatactcagccgacgcccatccagtgccagggagtcccggtggccttatcaggcagggacatgattgggatcgccaagactggatcagggaagaccgccgcctttatctggccgatgctcattcacatcatggatcaaaaggagctggagccaggcgacgggccaattgccgtcatcgtttgcccaactcgagagctctgccagcagattcatgcggagtgtaaacggtttggtaaagcctacaaccttcgatctgtggccgtctacggaggcgggagcatgtgggagcaggctaaggcactgcaggagggagccgagattgtggtctgtacccccgggcggctcatcgatcatgtaaagaagaaagcaacaaacctgcagagagttagctatctggtgtttgatgaggccgatcgtatgttcgacatgggttttgagtaccaggttaggtcaatagcctcacatgtgcgcccagatcgccagaccctgctcttttcagctacgttccgaaagaagattgaaaaactggcaagagatatattgattgatcctatccgcgtcgtgcagggagatattggcgaggctaatgaagacgttacccagatcgtagaaatcctgcactccggaccctcaaagtggaactggcttaccaggcggctcgtcgaatttaccagttctggaagcgtgttactgtttgttaccaagaaagcgaacgcagaggagctggctaataatctgaaacaggaagggcacaatctgggattactccacggcgacatggaccaaagtgaaagaaacaaagtgatcagtgacttcaagaagaaggatattcctgtgctcgtcgctactgacgtagcagcgcgagggcttgacattccaagcatcaagactgtgatcaattacgacgtcgctcgggacattgatacgcacacccacagaattggaagaactgggagagcaggtgaaaagggtgtagcatataccctgctaaccccaaaagacagcaattttgcgggggatctggtccgtaatttggagggagcaaaccaacatgtttctaaggaactgcttgacttagcgatgcagaacgcatggttcaggaagagcaggttcaaggggggcaaaggaaagaagctgaatataggcggcggcggcctggggtacagggagcgacccggactcggttctgagaatatggatagagggaacaacaacgtaatgtcaaactacgaagcgtacaaaccctcaacaggggcaatgggggaccgattgacggccatgaaggcagccttccagtcccaatacaaaagccactttgtggcagcttcactaagtaaccagaaggccggaagcagcgccgcaggcgcatctggctggacatccgcagggtcccttaacagtgtgcctaccaatagcgcccagcaaggtcacaactcccctgatagtcctgtgacttccgctgcaaagggaatccccggctttgggaacacggggaatatctcgggagctccagtgacctacccgtctgcgggggcccagggagtgaacaataccgcgtctggaaataacagcagagagggaacagggggctcaaacgggaaacgcgagaggtacaccgaaaacaggggctctagcaggcactctcacggcgagaccggaaatcgacacagtgattctccacgacacggcgacggaggccgtcacggagatggttatcgacatcccgagtctagctcccggcataccgacgggcacaggcacggagagaaccgacatggaggttctgcgggcagacacggagagaatcgaggagccaacgacggcagaaacggcgagagtcgtaaggaagcttttaacagagaatccaagatggagcccaagatggagcccaaggttgactcttctaaaatggataaggtggacagtaagacagacaagacggcggacgggtttgctgtgccagaacctcccaaaagaaaaaagagccgatgggattcgtag

SEQ ID NO: 263393 - DNA, 2817 bp, Artificial Sequence
  derived and/or modified sequence
atgaactggaacaagggcggccccggcaccaagcggggcttcggcttcggcggattcgccatctccgcaggcaaaaaagaagagcctaaactgccgcagcagtcacattccgcatttggcgccacctcaagctcttcaggttttgggaaaagcgcaccccctcaactcccatctttctacaagatcggaagtaagagagctaacttcgacgaagaaaatgcgtactttgaagatgaagaagaagactcttccaatgtggacctcccatacattcctgccgaaaactcccccactaggcaacagttccactccaagccagtggattccgattctgacgacgatccactggaagccttcatggccgaggtggaggaccaggctgcccgcgacatgaagaggctggaggagaaagacaaggagcggaaaaatgtaaagggtattagagacgacattgaagaagaggatgatcaggaagcatactttagatatatggcagaaaatcctacagccggtgtcgtccaggaagaagaagaggataaccttgagtacgatagcgacgggaacccgatcgcgcccacaaagaaaatcattgatcccttacctccaattgaccactcagaaatcgattaccctccgttcgagaaaaacttctacaacgagcacgaagagattaccaacttgaccccccaacagttgattgacctgcgccataagcttaacctgagagtttcaggagccgctcctcctcgccccggtagctcgtttgcccatttcggctttgatgaacaactgatgcatcagattcgcaagtcggaatatactcagcccacgccaatccagtgccagggcgtgccagtggcgctgagcggcagggacatgatcggcattgccaaaactggatctgggaagacagctgccttcatctggcccatgcttatacacattatggaccagaaagagttagaacccggcgatggacccatcgccgtgattgtctgccccacgagggagctgtgccaacaaatccatgcagagtgcaagagatttgggaaagcctataatctacggtcagtggctgtgtacggcggcggctcaatgtgggagcaagcaaaggcgcttcaggaaggagctgagattgttgtctgcacccccgggcggctgattgatcacgtgaaaaaaaaggcaactaacctccagagagtaagttacctggtgtttgacgaagctgacaggatgttcgacatggggttcgaatatcaagtccgcagcattgcgtctcacgttaggcctgaccgtcagaccttgctctttagcgccaccttccggaagaaaatagagaagctcgcacgggacatattaatcgatcccattagggtggtgcagggagatatcggcgaagccaatgaggacgtgacacagattgtggagatactgcactccgggccctcgaagtggaactggctcactcgcaggttagtggagtttactagctcaggctcagttctgctctttgtgacaaagaaagccaatgctgaggaactggctaacaacctgaagcaagagggccataatctgggcctgctgcacggcgatatggatcagtcagagcgaaataaggtgatatcagattttaaaaagaaggacatccccgtgctggtggctacggatgtggccgcacgggggttggacattcctagtattaagaccgtgattaactacgacgtagcacgcgatatagatacccacactcaccgtatcgggagaaccggacgcgccggtgaaaagggggtcgcatacaccctcctcacaccgaaagatagcaatttcgcaggtgatcttgtacgtaatcttgagggagctaaccagcacgtatccaaagaacttttggatctcgctatgcagaacgcatggttcagaaagtcacgctttaaaggcggaaaaggtaagaagctcaacattggtgggggtggcttgggctacagagaaaggcctggcctgggctctgagaacatggacagaggcaacaacaatgtgatgagcaactacgaggcctacaaaccgagcacaggtgcgatgggagatcgactgactgctatgaaggcagcctttcagtcccagtacaagagccactttgttgccgcctctctgagcaatcagaaagcaggaagctccgctgctggagcgagtggctggacctccgcaggaagtcttaactccgtgcccactaacagtgcgcaacagggccacaactcccccgatagtccagtgacgtccgccgccaaaggaatcccaggtttcggcaataccggtaacattagcggcgctcccgtgacttatccatcagcgggagcccaaggtgtgaataatacggcttctggtaacaacagccgcgagggtaccggtggttcgaatggcaaacgcgagcgctacacagagaacaggggttccagtcggcacagtcatggggaaaccggcaaccgccattcggactccccacggcacggcgatgggggaaggcatggggatggataccgccatccagagtccagcagcaggcataccgacggccaccggcacggagagaatcgacatggaggctcagcgggccggcatggggaaaaccggggcgctaacgacggtcgaaacggcgaaagccggaaggaggccttcaacagggaatctaagatggagccaaaaatggagccaaaggtggactcctcaaaaatggataaagtggactcgaagaccgacaagacagcagatggctttgctgtcccggagccaccgaagcgaaagaagtccaggtgggacagttag

SEQ ID NO: 263394 - DNA, 1881 bp, Artificial Sequence
  derived and/or modified sequence
atgcaccagataaggaagagcgagtacacccaaccaactcccattcagtgtcagggggtccctgtggcccttagcggcagagacatgatcggcattgctaagactggaagcggaaagactgctgctttcatttggccaatgctaatccatattatggatcagaaggagttggaacctggcgatggcccaatagccgtgattgtttgtcctactagagagctgtgccagcagattcatgccgagtgtaaacgctttggtaaggcctacaacctcagaagtgtggcggtctacggcggaggctcaatgtgggagcaggccaaggccctgcaggagggcgcagaaattgtagtgtgtacccctggtagacttatcgatcacgtcaagaaaaaggccactaacctccagagggtgagttatctcgtcttcgacgaagctgatagaatgtttgacatgggcttcgagtaccaggtccgttcaatcgcctctcacgtgcgcccagaccgacagacacttctgttctcagccacgttccggaaaaagatcgagaagcttgcacgggatattctgattgaccctattcgtgttgttcagggcgatattggggaggctaatgaagacgtcacccagatcgtcgagatacttcactcggggccttcaaagtggaattggctcactagacggctcgttgagttcacttcctcgggcagcgtgttgctgttcgtgactaaaaaagctaatgccgaagaactagcaaacaatttgaagcaggagggtcacaaccttggtctgctacacggagatatggaccagagcgagcgaaataaggtgatctcagatttcaaaaaaaaagacatcccggttctggttgccaccgatgtcgcagcccgtggtctggacattccctctataaaaaccgtgatcaactacgacgtcgcccgtgatatcgatacactgctgacacctaaggactctaacttcgccggagaccttgtgaggaacctcgaaggagccaatcagcatgttagcaaggagctgctggatcttgccatgcagaatgcttggtttcgaaagagccggtttaaaggaggcaagggtaagaaactaaacataggcggtggcggactaggctaccgggagcgcccaggactcgggtctgaaaatatggaccggggaaacaacaacgttatgagcaactatgaagcctacaagcctagtaccggtgctatgggagatcggctcacagccatgaaagcagcgttccagagccaatataaatctcacttcgtagctgcctctctgagcaaccagaaggctgggagtagtgcggcaggcgcttctgggtggaccagcgccggatccctcaattctgttcctaccaacagcgctcagcagggtcacaacagtcctgactcccccgtaacatcagccgctaaggggatcccgggtttcggcaataccggcaatatttccggcgcacctgtgacgtatccgagcgctggcgctcagggcgtgaataacacagccagcgggaacaattcccgggaaggaaccggcggatccaacggtaagcgggagcggtacactgagaatagggggagctctcgccatagtcatggagagactgggaacaggcactcggactcaccccgacatggagatggaggtaggcacggtgatggttaccggcaccccgaatcgtcatctaggcacacagatggtcatagacatggggagaacaggcacgggggtagcgcagggaggcacggggagaacagaggcgctaacgatggcagaaacggcgaatcacgcaaggaggcattcaaccgcgagagcaaaatggaacctcctcccaagcgtaagaaaagcaggtgggactcctag

SEQ ID NO: 263395 - DNA, 2817 bp, Artificial Sequence
  derived and/or modified sequence
atgaattggaataagggaggtccaggcactaaacggggttttggattcggtggtttcgccatctctgctgggaagaaagaagaacctaaactgccacagcagagccacagtgccttcggcgcaacatcaagttcatccggctttggtaaatccgctccccctcagctgccctctttttataaaatcggatccaagcgagctaacttcgacgaggagaacgcctattttgaggacgaggaggaggactccagtaacgtggatctgccctatatccccgcagaaaactctccgacacgtcaacagttccacagcaagccggttgacagcgactccgacgatgaccccctcgaggcctttatggctgaagtggaggaccaggccgcaagagacatgaagcgtttggaggaaaaagataaggagagaaagaatgtgaagggcatcagggacgacattgaagaggaagatgaccaagaagcctattttcggtacatggcggagaaccccaccgctggcgtcgtgcaagaggaggaagaggacaacctggaatatgatagcgacgggaacccaatcgctcctacaaagaagattattgatcccctgcctcccatcgatcattcggagattgattacccaccattcgagaagaatttttataatgagcacgaggagattaccaaccttacaccacaacagctgatcgatctgcgacacaagctcaatctgcgggtgtcaggggctgcgcctcccaggccaggatccagctttgcgcattttggtttcgatgagcagctaatgcatcagatccggaaatctgagtatacgcagccaacccctatacaatgtcaaggtgtgcccgtggctttgtctggcagagatatgattgggatagccaagacaggctccgggaagacggctgccttcatttggccgatgctgattcacattatggatcaaaaagaacttgaaccaggtgacggccctattgctgtgatcgtatgtccaactcgcgaactgtgtcagcagattcacgccgagtgtaagcgtttcggaaaagcctacaacctgcgatccgtggcggtgtacggaggcggatcaatgtgggagcaggcgaaggccctccaggagggcgctgaaattgtggtatgcacacctggcagactaatcgatcatgttaagaaaaaggcaaccaatcttcaacgggtttcttatctggtgttcgacgaagcagaccgcatgtttgacatgggcttcgaataccaggtacggagcatcgcaagccacgtccgccctgacaggcagactttgttgttctcagctacatttcggaagaaaatcgagaagctggcgagagacattctcattgacccaatccgggtcgtacagggcgacataggggaggctaatgaggatgttactcagattgtcgagattctgcactcagggcctagcaagtggaattggctcacaagaagactcgtggaattcacctcatcaggttccgtgctgctgtttgtgaccaagaaagctaacgctgaagagctcgccaacaaccttaagcaggagggacataacctgggcttactgcatggggatatggaccagagcgagcgaaataaagttatctcggactttaagaagaaggacatacccgtcctggtcgccaccgacgttgctgctcggggactcgacattccttctattaagaccgtcatcaactacgatgtggcaagggatatcgacacccatacacacaggatcggacggacgggcagagctggcgaaaagggtgtggcttacaccctgcttacacctaaagacagtaatttcgccggtgatctggtgcgaaacctggagggagccaatcaacacgtttctaaggaactgttggaccttgccatgcagaatgcttggttccgtaagagcaggttcaagggcggtaaaggaaaaaaactgaacattggcggaggtggattgggttatcgagagaggccaggcctgggtagcgaaaacatggataggggcaacaataacgtaatgtcgaactacgaagcctataagcctagcacaggagcaatgggcgatagactgactgctatgaaggccgcttttcagagtcagtacaaatcccattttgtggccgcatctctgtccaatcaaaaagccggaagctccgctgccggtgcaagcggctggacttcggccggttcccttaatagcgtacctacgaacagtgcccaacagggtcataatagcccagactcgcctgtaacctccgccgctaagggaatccctggcttcgggaatacagggaacatctctggggcaccggtcacttacccctccgcaggggcacagggcgtcaataatacggctagcggcaacaactctagggagggtaccgggggttccaacggcaaacgcgagagatacactgagaaccgagggtcttcccgccacagtcacggagagactggcaaccgacatagtgacagtcctcgccatggtgatggtggcaggcacggcgacggatatagacacccagagagctcaagtaggcacacggatgggcatagacacggggagaataggcatgggggatcagccggaagacacggggagaatagaggagcgaacgatgggagaaatggtgagtcgagaaaagaggctttcaacagggagagcaaaatggagccaaagatggagcccaaagtggattcgagcaagatggataaggtcgacagtaagacggataagaccgcagatgggttcgcagtccctgagccgcctaaaaggaagaagtccagatgggactcttag

SEQ ID NO: 263396 - DNA, 2817 bp, Artificial Sequence
  derived and/or modified sequence
atgaactggaataagggaggacctggtaccaaacggggtttcggcttcggcggatttgcgatcagtgctggaaagaaagaagagccaaaactgcctcagcagtcacactccgcattcggagcaacctcctcgagttctggcttcgggaaatcagctcccccacagctgccgtcattctacaagatagggtccaagcgggcaaacttcgacgaagaaaatgcctatttcgaagatgaagaagaggactcttcaaatgttgatctgccatacatccctgctgaaaacagtcccactcgccaacagtttcactccaagcccgttgactccgatagcgacgacgaccccctggaagcgtttatggcagaggtggaggaccaggccgctcgggatatgaagaggttggaagagaaggataaggaacgcaaaaatgtaaagggtataagggacgatatcgaagaggaagatgaccaagaggcctatttccgatatatggctgaaaatccgacagccggagtagtgcaggaggaggaggaagataacttggagtatgactctgacggaaatccaatagcccctacgaagaagatcatcgatcctctcccccctattgatcactccgaaattgattaccccccatttgaaaaaaatttctacaacgagcacgaggagataacaaacctgacacctcagcaactcattgaccttagacacaagctgaatctgagggtcagcggcgctgcccctccccgaccaggatcctcattcgcacatttcggattcgatgaacaactaatgcatcaaattcgaaagtccgagtacacccaacctaccccaatccagtgtcagggcgtccccgtagctctgtcgggccgagacatgatcggcatcgccaagaccgggtccggcaagacagctgcattcatctggcccatgttaatacatatcatggatcagaaggagctggaacctggtgatggaccaatcgccgtgattgtctgtcctacacgggaactgtgccagcagattcatgctgaatgcaaaagattcgggaaggcctacaatctccgcagcgtagccgtctatggcggaggctccatgtgggagcaggcgaaggcacttcaggagggagctgaaatcgttgtatgcaccccaggaaggttaattgatcatgtcaagaaaaaagccacgaacctgcagcgggtgtcgtacctcgtgtttgatgaagctgacaggatgtttgacatggggtttgaataccaggtcaggtctattgcgtctcatgtccgtcctgaccgccagactctgttgttttcggctacatttcgcaaaaagattgagaaactggccagggacattttgatcgaccccatcagagtagtccagggcgacattggggaggccaacgaggatgtcacccagattgtcgaaattctacatagcggtccttccaagtggaactggctgacgagaaggctcgtggaattcactagcagcggctctgtgttgctttttgtgacaaagaaagcaaatgccgaggagctcgcaaataatctgaaacaagagggccacaatctcgggctgctacacggcgatatggatcaaagcgaaaggaacaaggtaatctctgatttcaaaaagaaggatatccccgtcctggtggccactgacgttgccgctcgcggtttggatatacccagtattaaaactgtgattaactatgacgttgcaagggacatcgacacgcacacgcaccgtatcggaagaacagggagggcaggagaaaagggagtggcatacaccctgttgaccccaaaggactctaacttcgcaggagatctagtacgcaatcttgaaggagccaatcaacatgtgtctaaagaacttttggacctagccatgcagaatgcttggtttcgcaagagcagattcaaaggagggaaggggaagaagctgaacatcggtggtggcggattgggataccgtgaaaggcccggattgggatccgaaaacatggacagagggaataacaacgtcatgagcaactacgaagcctacaagccctccaccggcgcaatgggagaccgacttaccgcaatgaaggccgcatttcaatcgcagtacaagtcacatttcgtggccgctagtcttagtaatcagaaagcaggctcttccgccgcaggcgcatccggctggacaagcgcgggatccttgaattccgttccgactaacagtgcacagcagggtcacaactcccctgattccccagtcacgagcgccgctaaaggaatccccggtttcgggaatacaggcaatatttccggtgccccagtgacatacccgtctgcaggcgcacagggggtgaacaataccgccagcgggaacaattctcgggagggaactgggggttccaatggtaaaagagagcgatacaccgaaaaccgaggcagcagcagacatagccatggggagaccggaaataggcattctgactcccctcggcacggcgatggcggtaggcatggtgatggctacaggcatccggaaagttctagtcgacacaccgatggacataggcatggcgagaatagacacgggggatccgctgggaggcacggagagaaccggggagcgaatgatggtcgcaacggcgaatcccgaaaggaagcgttcaaccgcgagtctaagatggagcctaagatggaacccaaggtcgattcgagcaagatggacaaagtggatagcaaaacagacaaaacagcggatggtttcgctgtgcctgagcctcctaaacgcaaaaagtcccgttgggactcttag

SEQ ID NO: 263397 - DNA, 2817 bp, Artificial Sequence
  derived and/or modified sequence
atgaattggaacaagggaggccctggaaccaagcgcggatttggctttggtgggtttgctatcagcgcaggaaaaaaggaagagccaaagttgcctcagcagagccatagtgccttcggagctacctcctcatccagcgggtttgggaaaagtgcgccaccccaactgcctagcttttacaagatcggtagtaaacgggctaatttcgacgaggagaatgcttactttgaggatgaagaagaagatagcagtaacgtggatctcccatacattcccgcagagaattcgcctacacggcagcaattccactccaagccagtcgattccgactccgatgacgacccattagaggccttcatggccgaagtagaagaccaggccgctagagatatgaagaggctggaggagaaagataaggagcgtaagaacgttaaaggcattcgggacgatatagaggaggaagacgatcaggaggcttactttcggtatatggctgaaaatcctacagctggagtagtgcaagaggaagaggaagataatctggaatatgacagcgatgggaaccccatcgccccaacgaaaaagataattgatccgctgcccccaatagaccactctgagatagattatcccccatttgagaaaaacttctacaacgaacacgaggaaataacaaacctaacacctcaacagctcattgacctgagacacaagctgaatctgcgagtgtcaggagccgctccgccacgccctggctctagcttcgcacactttggcttcgacgagcagcttatgcaccaaattcgtaagtctgaatatacacagccaacccctatccagtgtcaaggggttcctgtggctttgagtgggcgtgatatgataggcatcgcaaagactggctcagggaagaccgccgcattcatctggccaatgctcatccatataatggatcaaaaggagctcgagccaggggacggtccgatcgcggtcatagtgtgtcccactcgggagctatgccagcagatccacgcagaatgcaaaaggttcggcaaagcatataatctccgatctgtcgcagtctatggcggaggctctatgtgggaacaggccaaggcactccaggaaggcgctgagatcgttgtgtgcacaccaggacggctcattgaccacgttaagaaaaaagctactaatttacagcgcgtgtcttatttggtattcgatgaggctgacagaatgttcgatatgggattcgagtaccaagtgagatccatcgcctcccacgttagacccgaccggcagactctgcttttttctgccacattcagaaaaaagattgaaaaactcgctcgagacatactcatcgatcccatccgggtggtgcagggagacatcggggaagccaatgaggatgttacccagattgtggaaatcctgcactcaggccctagcaagtggaattggctgacacggcgtctggtagaattcactagttctggctctgtccttttgtttgtgactaaaaaagccaacgccgaggagctggccaacaacctgaaacaggagggccacaacctcgggctcctgcacggagacatggaccagagtgaacgaaataaagtgatttcggactttaaaaagaaggatattccagttctcgtcgcgaccgacgtggcggcaagaggcttagacatcccaagtataaagacagtgataaattatgatgtggctcgggacattgatacacacacacatcggataggtagaacagggagggccggagagaaaggtgtagcctacaccttgcttaccccgaaggattctaatttcgcaggcgatttggttcggaacctcgagggcgcaaaccagcatgtgagcaaggaactactggacctcgcaatgcagaatgcttggtttaggaagtcccgcttcaaaggagggaaagggaaaaagcttaatattggtgggggagggctaggatacagggagaggcccggtttgggaagcgagaatatggaccgtggtaataacaacgtaatgtcgaactacgaagcgtacaagccgtcgaccggagcaatgggtgatcgtctcaccgccatgaaagcggcatttcagagccagtacaagagccatttcgttgcggcatcactctcgaatcagaaagcaggctcatctgccgctggcgcttcaggatggacgagcgcaggatcattaaactccgttccaactaactctgcacaacagggccataactcacccgacagtcctgttacctcagccgctaaggggatacccggattcggcaataccggcaatatttcaggcgcacctgtgacatacccctcagctggggctcagggtgtgaacaacaccgcatcagggaacaattcccgtgaaggcacaggtggctccaacggtaagcgggaacgctacaccgaaaatcgcggtagctccaggcactcccacggcgagactggaaacaggcattccgactcgccccgtcacggggacgggggtcggcacggagacggataccgccatcccgagtcttcaagtaggcatacagacggccatcgccacggcgaaaatagacatggtggatctgctggcaggcatggagaaaaccggggagccaacgacggcagaaatggtgagagccggaaagaggcattcaatagagaaagcaaaatggagccgaagatggagcccaaggtggacagctcaaagatggacaaagtggactcaaaaacggacaagactgcagacggctttgctgtgcccgagccaccaaagcggaaaaagtcccgatgggacagttag

SEQ ID NO: 263398 - DNA, 2817 bp, Artificial Sequence
  derived and/or modified sequence
atgaactggaacaaagggggacccggtacaaaacgtggtttcggcttcgggggattcgcaatttccgccggaaaaaaggaggagccgaagctgccacagcagtcccacagcgccttcggcgctaccagcagttcttctggctttggaaaaagtgccccaccccagcttcctagcttctacaagatcggtagcaagagggctaatttcgatgaagaaaatgcctatttcgaggatgaagaagaggatagctcaaacgttgaccttccctacatcccagcggagaactcacccaccaggcaacagttccattctaaaccggtcgactctgatagtgatgacgacccactagaggcattcatggcagaggttgaggaccaagccgcaagagacatgaaaagactcgaagagaaagataaggaaagaaagaatgtgaaaggcataagggacgacatagaggaagaagacgaccaagaggcttactttcgatatatggccgaaaaccctacagccggagtggtacaagaagaggaagaggacaatctggagtatgactcggacgggaaccccattgcccctacaaaaaagatcatagacccattgccacctatcgaccactccgagatcgactatccgccatttgagaaaaatttctataacgaacatgaggagattaccaacctgacaccccaacagttaattgacctgagacacaagcttaaccttagggtttccggcgctgcccctcctagacctggaagttcttttgcccactttggcttcgacgaacaattgatgcaccagatacgcaagagtgaatatacccaacctactcctatacaatgtcagggcgttccggtagccctttctgggagggacatgatcgggatcgccaaaaccggctctggcaagactgcagccttcatctggcccatgctgatccatatcatggaccagaaggaactggaacctggtgacggacccatcgctgtgatcgtctgtcctacgcgggaactgtgccaacaaattcacgcggaatgcaagaggttcggaaaagcctacaacctccgatccgtcgctgtgtacggaggaggttccatgtgggagcaggccaaagcacttcaggaaggagccgagattgtagtgtgtacaccgggaagactgattgatcacgtgaagaaaaaagccacaaatctccagcgtgtctcttacctggtgtttgatgaggctgatagaatgttcgacatggggtttgagtaccaggttcgctctattgctagccacgtccggccagatcggcagacactgctattctccgctacatttagaaagaagattgaaaagctcgccagggatattttaattgatcccatccgggtggttcaaggggatattggagaggctaatgaagatgttacccagattgtagagatcttgcacagcggacccagcaagtggaactggctgacgcggagattagtcgagtttacctcaagcggtagcgtcttgttgttcgtgactaaaaaagctaacgcggaagagttggctaacaatctcaagcaggagggccacaacttggggctgttgcatggggacatggaccagtccgagaggaataaggtgatctctgacttcaagaaaaaggatatcccagtactggtagcgactgatgtcgcagctcgcggtctcgatatcccaagcataaagaccgtgataaactacgatgtggctagggatatcgatactcatacgcatcgaattggccgtaccggtcgtgccggtgagaaaggggtagcatatactttattgactcccaaggattcaaattttgcaggtgacctggtcaggaacctcgaaggtgcaaatcagcacgtatcaaaggagctgctggatctcgcgatgcagaacgcttggttccgcaaatcccgatttaagggaggcaaaggaaagaagctcaacattggaggaggtgggctgggctaccgtgaacggccaggactcggcagtgagaatatggacagaggtaacaataacgtcatgagcaattatgaagcctacaagccgagtaccggggctatgggagacaggctgacagctatgaaggcagctttccagtcccagtataaatctcactttgttgcagcgagtctgtctaaccagaaggcgggatcctcggccgcaggagcaagtggatggacttctgccggtagtttgaattccgtgcccaccaattccgcccagcagggccacaatagccccgactcccctgttacatcagccgctaagggcatccccggattcggcaatactgggaacatcagtggagctcctgtgacatacccaagtgcaggcgcacagggagtcaacaacaccgcaagtggcaataattcccgggagggaaccggaggttccaacggcaaacgcgaacgttacacagagaatcggggttcatctcggcattcccacggcgaaacaggaaaccgccactccgactcgcccaggcacggtgacgggggtcggcacggggacgggtataggcacccagaaagctcttcccgccacactgatggccatcgccacggcgagaataggcatggcggaagcgccggacggcacggcgagaatcggggagcgaatgacggacggaatggagaatctcgaaaggaagcattcaatcgggagtctaaaatggaacctaagatggagccaaaagtggactcatccaagatggacaaggtcgacagcaaaactgacaagacagccgatggatttgccgtgccagaaccacccaagagaaagaagtcccgatgggattcttag

SEQ ID NO: 263399 - DNA, 2658 bp, Artificial Sequence
  derived and/or modified sequence
ggtggtcctggcactaagcgaggatttggctttggaggttttgccatcagtgctgggaaaaaggaggaacccaaactcccacagcagtcccacagtgcctttggggcaaccagctcttcttctggatttggaaagtcagctccaccacagcttccttctttctacaaaattggatctaagcgggccaactttgatgaagaaaatgcctattttgaagatgaggaagaagattctagcaacgttgatttaccttacattcctgctgaaaactcaccaactcgccagcaattccattccaagccagtagattctgacagcgatgatgatcccttggaggcattcatggctgaagtggaggatcaggcagctagagacatgaagaggcttgaagaaaaggacaaggaaagaaaaaacgtaaagggtattcgagatgacattgaagaggaagatgaccaagaagcttattttcgatacatggcagaaaacccaactgctggtgtggttcaggaggaagaggaagacaatctagaatatgatagtgacggaaatccaattgcacctaccaaaaaaatcattgatcctcttccccccattgatcattcagagattgactatccaccatttgaaaaaaacttttacaatgagcatgaagagataaccaacctcactccacagcagttaatagatctccggcataagctcaatcttcgggtctctggtgctgcacctcctagaccaggaagtagctttgctcattttgggtttgacgaacaacttatgcaccagattcggaaatctgaatacacacagcccactccaatacagtgccagggtgtgcctgtggcattaagtggtagagacatgattggtattgccaaaacaggtagtgggaaaactgcagccttcatttggcccatgttgattcatataatggaccagaaggagttggaaccaggtgatggaccaattgcagtgattgtgtgtcctaccagggagctttgccagcagatccatgcagaatgtaagcggtttggaaaagcatataatcttcgatcagtggccgtatatggaggagggagtatgtgggagcaggccaaggcccttcaggagggggcagagattgttgtgtgtaccccaggtcgactgatagatcatgtgaaaaagaaagctaccaatcttcaaagagtctcttaccttgtgtttgatgaagcagatcgaatgtttgacatgggatttgagtaccaagttcgatccatagcaagtcatgttcgtcctgacaggcagactctcttatttagtgcaacttttcggaagaagattgaaaagttggccagagacatcctgatcgaccctattcgagtggtgcagggagatattggagaggcaaatgaagatgtgacacagattgtggagattctccattctggacctagtaaatggaactggcttacccggcgtctggtagaatttacctcttcagggagtgtcctcctctttgttactaaaaaagccaatgctgaagagctagcgaataaccttaaacaggagggtcataatcttgggctgctccatggggatatggatcagagtgagagaaacaaggtcatttcagactttaagaaaaaggacatcccagtcctggtggccacagatgttgcagcccgtggtctggacattccttcaattaagactgtcattaactatgatgtggcacgagacattgataccctactcactcccaaggacagcaattttgctggtgacctggtccggaacttggaaggagccaatcaacacgtttctaaggaactcctagatctggcaatgcagaatgcctggtttcggaaatctcgattcaaaggagggaaaggaaaaaagctgaacattggtggaggaggcctaggctacagggagcggcctggcctgggctctgagaacatggatcgaggaaataacaatgtaatgagcaattatgaggcctacaagccttccacaggagctatgggagatcgactaacggcaatgaaagcagctttccagtcacagtacaagagtcactttgttgcagccagtttaagtaatcagaaggctggaagttctgctgctggggcaagtgggtggactagtgcagggagcttgaattctgttccaactaactcagcacaacagggccataacagtcctgacagccccgtcaccagtgccgccaagggcatcccaggctttggcaatactggcaacatcagtggtgcccctgtgacctacccgtctgccggagcccaaggagtcaacaacacagcttcagggaataacagccgagaagggactgggggcagcaacgggaaaagagagagatatactgagaaccggggcagcagccgtcacagtcacggagagactggcaatcggcatagcgatagtccacgtcacggagatggtggtcgccatggagatggataccgccatccagaaagcagcagccgtcatactgatggccatcggcacggggagaacagacatggaggaagcgcaggccggcatggggagaaccggggtgcaaatgatggtcggaatggggaaagcaggaaagaagcttttaatcgtgagagcaagatggagcccccgcctaaacgcaagaaaagtcgatgggacagttag

SEQ ID NO: 263400 - DNA, 3921 bp, Artificial Sequence
  derived and/or modified sequence
tggcggtggtggcggtggcggcggcggtggtggtggtggcggcggcggcggcgaagggggcggagaggaaggagcgcggcgggaccgggccgggacagcgcgtactttgggctccgggattcgctccgcgcccgcggttgtagcagctgccgctgcagccatagcagcaggtcagtcattggcaccatgaactggaataaaggtggtcctggcactaagcgaggatttggctttggaggttttgccatcagtgctgggaaaaaggaggaacccaaactcccacagcagtcccacagtgcctttggggcaaccagctcttcttctggatttggaaagtcagctccaccacagcttccttctttctacaaaattggatctaagcgggccaactttgatgaagaaaatgcctattttgaagatgaggaagaagattctagcaacgttgatttaccttacattcctgctgaaaactcaccaactcgccagcaattccattccaagccagtagattctgacagcgatgatgatcccttggaggcattcatggctgaagtggaggatcaggcagctagagacatgaagaggcttgaagaaaaggacaaggaaagaaaaaacgtaaagggtattcgagatgacattgaagaggaagatgaccaagaagcttattttcgatacatggcagaaaacccaactgctggtgtggttcaggaggaagaggaagacaatctagaatatgatagtgacggaaatccaattgcacctaccaaaaaaatcattgatcctcttccccccattgatcattcagagattgactatccaccatttgaaaaaaacttttacaatgagcatgaagagataaccaacctcactccacagcagttaatagatctccggcataagctcaatcttcgggtctctggtgctgcacctcctagaccaggaagtagctttgctcattttgggtttgacgaacaacttatgcaccagattcggaaatctgaatacacacagcccactccaatacagtgccagggtgtgcctgtggcattaagtggtagagacatgattggtattgccaaaacaggtagtgggaaaactgcagccttcatttggcccatgttgattcatataatggaccagaaggagttggaaccaggtgatggaccaattgcagtgattgtgtgtcctaccagggagctttgccagcagatccatgcagaatgtaagcggtttggaaaagcatataatcttcgatcagtggccgtatatggaggagggagtatgtgggagcaggccaaggcccttcaggagggggcagagattgttgtgtgtaccccaggtcgactgatagatcatgtgaaaaagaaagctaccaatcttcaaagagtctcttaccttgtgtttgatgaagcagatcgaatgtttgacatgggatttgagtaccaagttcgatccatagcaagtcatgttcgtcctgacaggcagactctcttatttagtgcaacttttcggaagaagattgaaaagttggccagagacatcctgatcgaccctattcgagtggtgcagggagatattggagaggcaaatgaagatgtgacacagattgtggagattctccattctggacctagtaaatggaactggcttacccggcgtctggtagaatttacctcttcagggagtgtcctcctctttgttactaaaaaagccaatgctgaagagctagcgaataaccttaaacaggagggtcataatcttgggctgctccatggggatatggatcagagtgagagaaacaaggtcatttcagactttaagaaaaaggacatcccagtcctggtggccacagatgttgcagcccgtggtctggacattccttcaattaagactgtcattaactatgatgtggcacgagacattgatacccacacgcataggattggccgcacaggaagagcgggtgagaaaggtgtggcctataccctactcactcccaaggacagcaattttgctggtgacctggtccggaacttggaaggagccaatcaacacgtttctaaggaactcctagatctggcaatgcagaatgcctggtttcggaaatctcgattcaaaggagggaaaggaaaaaagctgaacattggtggaggaggcctaggctacagggagcggcctggcctgggctctgagaacatggatcgaggaaataacaatgtaatgagcaattatgaggcctacaagccttccacaggagctatgggagatcgactaacggcaatgaaagcagctttccagtcacagtacaagagtcactttgttgcagccagtttaagtaatcagaaggctggaagttctgctgctggggcaagtgggtggactagtgcagggagcttgaattctgttccaactaactcagcacaacagggccataacagtcctgacagccccgtcaccagtgccgccaagggcatcccaggctttggcaatactggcaacatcagtggtgcccctgtgacctacccgtctgccggagcccaaggagtcaacaacacagcttcagggaataacagccgagaagggactgggggcagcaacgggaaaagagagagatatactgagaaccggggcagcagccgtcacagtcacggagagactggcaatcggcatagcgatagtccacgtcacggagatggtggtcgccatggagatggataccgccatccagaaagcagcagccgtcatactgatggccatcggcacggggagaacagacatggaggaagcgcaggccggcatggggagaaccggggtgcaaatgatggtcggaatggggaaagcaggaaagaagcttttaatcgtgagagcaagatggagcccaagatggaacccaaagtggacagcagcaagatggacaaggtggacagcaagacagataagacagctgacggctttgctgtcccagagccgcctaaacgcaagaaaagtcgatgggacagttagaggggatgtgctaaagcgtgaaatcagttgtccttaatttttagaaagattttggtaactaggtgtctcagggctgggttggggtccaaagtgtaaggaccccctgcccttagtggagagctggagcttggagacattaccccttcatcagaaggaattttcggatgttttcttgggaagctgttttggtccttggaagcagtgagagctgggaagcttcttttggctctaggtgagttgtcatgtgggtaagttgaggttatcttgggataaagggtcttctagggcacaaaactcactctaggtttatattgtatgtagcttatattttttactaaggtgtcaccttataagcatctataaattgacttctttttcttagttgtatggccaggcagtccccattttaggagttggcttctgcaaattcaatccattgagctaactgttggggagcaatttggtagttgtagacatttgcagggaagggagatgtctgattctaaatgggagttgatgctcaggtccccagccaggtttgcatccagccctgagacatgtaggaaacacctttcagacccaggctctgaagattcccagaagccacaaggattgaagggaaaaggtgatcctggtaactgttccaggattgctccaggtttgagatggtattgctaaatttaaaattaaacaagaaacccaacaacagcttttaaagtgtcttctatctcattgtattttttttaacttgccccaatgatagaaaagtcttttgctgaaatgattttgatgatttttgtttatcgtttataaaaaggaaaagaaatatacaaactttgacttttgtgactttgtgaaggtttctttaagatgtgcattcctttctgcttgctctctagtaaatgttttactaccggg

SEQ ID NO: 263401 - DNA, 3735 bp, Artificial Sequence
  derived and/or modified sequence
atgaactggaataaaggtggtcctggcactaagcgaggatttggctttggaggttttgccatcagtgctgggaaaaaggaggaacccaaactcccacagcagtcccacagtgcctttggggcaaccagctcttcttctggatttggaaagtcagctccaccacagcttccttctttctacaaaattggatctaagcgggccaactttgatgaagaaaatgcctattttgaagatgaggaagaagattctagcaacgttgatttaccttacattcctgctgaaaactcaccaactcgccagcaattccattccaagccagtagattctgacagcgatgatgatcccttggaggcattcatggctgaagtggaggatcaggcagctagagacatgaagaggcttgaagaaaaggacaaggaaagaaaaaacgtaaagggtattcgagatgacattgaagaggaagatgaccaagaagcttattttcgatacatggcagaaaacccaactgctggtgtggttcaggaggaagaggaagacaatctagaatatgatagtgacggaaatccaattgcacctaccaaaaaaatcattgatcctcttccccccattgatcattcagagattgactatccaccatttgaaaaaaacttttacaatgagcatgaagagataaccaacctcactccacagcagttaatagatctccggcataagctcaatcttcgggtctctggtgctgcacctcctagaccaggaagtagctttgctcattttgggtttgacgaacaacttatgcaccagattcggaaatctgaatacacacagcccactccaatacagtgccagggtgtgcctgtggcattaagtggtagagacatgattggtattgccaaaacaggtagtgggaaaactgcagccttcatttggcccatgttgattcatataatggaccagaaggagttggaaccaggtgatggaccaattgcagtgattgtgtgtcctaccagggagctttgccagcagatccatgcagaatgtaagcggtttggaaaagcatataatcttcgatcagtggccgtatatggaggagggagtatgtgggagcaggccaaggcccttcaggagggggcagagattgttgtgtgtaccccaggtcgactgatagatcatgtgaaaaagaaagctaccaatcttcaaagagtctcttaccttgtgtttgatgaagcagatcgaatgtttgacatgggatttgagtaccaagttcgatccatagcaagtcatgttcgtcctgacaggcagactctcttatttagtgcaacttttcggaagaagattgaaaagttggccagagacatcctgatcgaccctattcgagtggtgcagggagatattggagaggcaaatgaagatgtgacacagattgtggagattctccattctggacctagtaaatggaactggcttacccggcgtctggtagaatttacctcttcagggagtgtcctcctctttgttactaaaaaagccaatgctgaagagctagcgaataaccttaaacaggagggtcataatcttgggctgctccatggggatatggatcagagtgagagaaacaaggtcatttcagactttaagaaaaaggacatcccagtcctggtggccacagatgttgcagcccgtggtctggacattccttcaattaagactgtcattaactatgatgtggcacgagacattgatacccacacgcataggattggccgcacaggaagagcgggtgagaaaggtgtggcctataccctactcactcccaaggacagcaattttgctggtgacctggtccggaacttggaaggagccaatcaacacgtttctaaggaactcctagatctggcaatgcagaatgcctggtttcggaaatctcgattcaaaggagggaaaggaaaaaagctgaacattggtggaggaggcctaggctacagggagcggcctggcctgggctctgagaacatggatcgaggaaataacaatgtaatgagcaattatgaggcctacaagccttccacaggagctatgggagatcgactaacggcaatgaaagcagctttccagtcacagtacaagagtcactttgttgcagccagtttaagtaatcagaaggctggaagttctgctgctggggcaagtgggtggactagtgcagggagcttgaattctgttccaactaactcagcacaacagggccataacagtcctgacagccccgtcaccagtgccgccaagggcatcccaggctttggcaatactggcaacatcagtggtgcccctgtgacctacccgtctgccggagcccaaggagtcaacaacacagcttcagggaataacagccgagaagggactgggggcagcaacgggaaaagagagagatatactgagaaccggggcagcagccgtcacagtcacggagagactggcaatcggcatagcgatagtccacgtcacggagatggtggtcgccatggagatggataccgccatccagaaagcagcagccgtcatactgatggccatcggcacggggagaacagacatggaggaagcgcaggccggcatggggagaaccggggtgcaaatgatggtcggaatggggaaagcaggaaagaagcttttaatcgtgagagcaagatggagcccaagatggaacccaaagtggacagcagcaagatggacaaggtggacagcaagacagataagacagctgacggctttgctgtcccagagccgcctaaacgcaagaaaagtcgatgggacagttagaggggatgtgctaaagcgtgaaatcagttgtccttaatttttagaaagattttggtaactaggtgtctcagggctgggttggggtccaaagtgtaaggaccccctgcccttagtggagagctggagcttggagacattaccccttcatcagaaggaattttcggatgttttcttgggaagctgttttggtccttggaagcagtgagagctgggaagcttcttttggctctaggtgagttgtcatgtgggtaagttgaggttatcttgggataaagggtcttctagggcacaaaactcactctaggtttatattgtatgtagcttatattttttactaaggtgtcaccttataagcatctataaattgacttctttttcttagttgtatggccaggcagtccccattttaggagttggcttctgcaaattcaatccattgagctaactgttggggagcaatttggtagttgtagacatttgcagggaagggagatgtctgattctaaatgggagttgatgctcaggtccccagccaggtttgcatccagccctgagacatgtaggaaacacctttcagacccaggctctgaagattcccagaagccacaaggattgaagggaaaaggtgatcctggtaactgttccaggattgctccaggtttgagatggtattgctaaatttaaaattaaacaagaaacccaacaacagcttttaaagtgtcttctatctcattgtattttttttaacttgccccaatgatagaaaagtcttttgctgaaatgattttgatgatttttgtttatcgtttataaaaaggaaaagaaatatacaaactttgacttttgtgactttgtgaaggtttctttaagatgtgcattcctttctgcttgctctctagtaaatgttttactaccggg

SEQ ID NO: 263402 - DNA, 4337 bp, Artificial Sequence
  derived and/or modified sequence
caagagtgtcgctctagtagtatatgcaacagtttaaactataggcatgttcatgtaaatatggtttctgtccaacccgttttctcttgggatttttggctagccccttgacgccactttttcttcattcgcagacccactttctagatgggtcatgaacactgtccacccaactgcagtttcccgtcagagtatctgaggagcctgtgaggcgttctggagctttaaggtcaggcgccttccgggagccgtagccccggccccgcccttctgcccgcgcgttcctcactgcgcatgtcgcgtttttgttcccctccccccttcagcaacgggccgtgaggcggtggcggtggtggcggtggcggcggcggtggtggtggtggcggcggcggcggcgaagggggcggagaggaaggagcgcggcgggaccgggccgggacagcgcgtactttgggctccgggattcgctccgcgcccgcggttgtagcagctgccgctgcagccatagcagcaggacttcctcaagcgcagggactatgtcttaaggcgctttgcagagccaagctcatttctggcacataagaggtcagtcattggcaccatgaactggaataaaggtggtcctggcactaagcgaggatttggctttggaggttttgccatcagtgctgggaaaaaggaggaacccaaactcccacagcagtcccacagtgcctttggggcaaccagctcttcttctggatttggaaagtcagctccaccacagcttccttctttctacaaaattggatctaagcgggccaactttgatgaagaaaatgcctattttgaagatgaggaagaagattctagcaacgttgatttaccttacattcctgctgaaaactcaccaactcgccagcaattccattccaagccagtagattctgacagcgatgatgatcccttggaggcattcatggctgaagtggaggatcaggcagctagagacatgaagaggcttgaagaaaaggacaaggaaagaaaaaacgtaaagggtattcgagatgacattgaagaggaagatgaccaagaagcttattttcgatacatggcagaaaacccaactgctggtgtggttcaggaggaagaggaagacaatctagaatatgatagtgacggaaatccaattgcacctaccaaaaaaatcattgatcctcttccccccattgatcattcagagattgactatccaccatttgaaaaaaacttttacaatgagcatgaagagataaccaacctcactccacagcagttaatagatctccggcataagctcaatcttcgggtctctggtgctgcacctcctagaccaggaagtagctttgctcattttgggtttgacgaacaacttatgcaccagattcggaaatctgaatacacacagcccactccaatacagtgccagggtgtgcctgtggcattaagtggtagagacatgattggtattgccaaaacaggtagtgggaaaactgcagccttcatttggcccatgttgattcatataatggaccagaaggagttggaaccaggtgatggaccaattgcagtgattgtgtgtcctaccagggagctttgccagcagatccatgcagaatgtaagcggtttggaaaagcatataatcttcgatcagtggccgtatatggaggagggagtatgtgggagcaggccaaggcccttcaggagggggcagagattgttgtgtgtaccccaggtcgactgatagatcatgtgaaaaagaaagctaccaatcttcaaagagtctcttaccttgtgtttgatgaagcagatcgaatgtttgacatgggatttgagtaccaagttcgatccatagcaagtcatgttcgtcctgacaggcagactctcttatttagtgcaacttttcggaagaagattgaaaagttggccagagacatcctgatcgaccctattcgagtggtgcagggagatattggagaggcaaatgaagatgtgacacagattgtggagattctccattctggacctagtaaatggaactggcttacccggcgtctggtagaatttacctcttcagggagtgtcctcctctttgttactaaaaaagccaatgctgaagagctagcgaataaccttaaacaggagggtcataatcttgggctgctccatggggatatggatcagagtgagagaaacaaggtcatttcagactttaagaaaaaggacatcccagtcctggtggccacagatgttgcagcccgtggtctggacattccttcaattaagactgtcattaactatgatgtggcacgagacattgatacccacacgcataggattggccgcacaggaagagcgggtgagaaaggtgtggcctataccctactcactcccaaggacagcaattttgctggtgacctggtccggaacttggaaggagccaatcaacacgtttctaaggaactcctagatctggcaatgcagaatgcctggtttcggaaatctcgattcaaaggagggaaaggaaaaaagctgaacattggtggaggaggcctaggctacagggagcggcctggcctgggctctgagaacatggatcgaggaaataacaatgtaatgagcaattatgaggcctacaagccttccacaggagctatgggagatcgactaacggcaatgaaagcagctttccagtcacagtacaagagtcactttgttgcagccagtttaagtaatcagaaggctggaagttctgctgctggggcaagtgggtggactagtgcagggagcttgaattctgttccaactaactcagcacaacagggccataacagtcctgacagccccgtcaccagtgccgccaagggcatcccaggctttggcaatactggcaacatcagtggtgcccctgtgacctacccgtctgccggagcccaaggagtcaacaacacagcttcagggaataacagccgagaagggactgggggcagcaacgggaaaagagagagatatactgagaaccggggcagcagccgtcacagtcacggagagactggcaatcggcatagcgatagtccacgtcacggagatggtggtcgccatggagatggataccgccatccagaaagcagcagccgtcatactgatggccatcggcacggggagaacagacatggaggaagcgcaggccggcatggggagaaccggggtgcaaatgatggtcggaatggggaaagcaggaaagaagcttttaatcgtgagagcaagatggagcccaagatggaacccaaagtggacagcagcaagatggacaaggtggacagcaagacagataagacagctgacggctttgctgtcccagagccgcctaaacgcaagaaaagtcgatgggacagttagaggggatgtgctaaagcgtgaaatcagttgtccttaatttttagaaagattttggtaactaggtgtctcagggctgggttggggtccaaagtgtaaggaccccctgcccttagtggagagctggagcttggagacattaccccttcatcagaaggaattttcggatgttttcttgggaagctgttttggtccttggaagcagtgagagctgggaagcttcttttggctctaggtgagttgtcatgtgggtaagttgaggttatcttgggataaagggtcttctagggcacaaaactcactctaggtttatattgtatgtagcttatattttttactaaggtgtcaccttataagcatctataaattgacttctttttcttagttgtatggccaggcagtccccattttaggagttggcttctgcaaattcaatccattgagctaactgttggggagcaatttggtagttgtagacatttgcagggaagggagatgtctgattctaaatgggagttgatgctcaggtccccagccaggtttgcatccagccctgagacatgtaggaaacacctttcagacccaggctctgaagattcccagaagccacaaggattgaagggaaaaggtgatcctggtaactgttccaggattgctccaggtttgagatggtattgctaaatttaaaattaaacaagaaacccaacaacagcttttaaagtgtcttctatctcattgtattttttttaacttgccccaatgatagaaaagtcttttgctgaaatgattttgatgatttttgtttatcgtttataaaaaggaaaagaaatatacaaactttgacttttgtgactttgtgaaggtttctttaagatgtgcattcctttctgcttgctctctagtaaatgttttactaccggga

SEQ ID NO: 263403 - DNA, 4148 bp, Artificial Sequence
  derived and/or modified sequence
atatgcaacagtttaaactataggcatgttcatgtaaatatggtttctgtccaacccgttttctcttgggatttttggctagccccttgacgccactttttcttcattcgcagacccactttctagatgggtcatgaacactgtccacccaactgcagtttcccgtcagagtatctgaggagcctgtgaggcgttctggagctttaagcaacgggccgtgaggcggtggcggtggtggcggtggcggcggcggtggtggtggtggcggcggcggcggcgaagggggcggagaggaaggagcgcggcgggaccgggccgggacagcgcgtactttgggctccgggattcgctccgcgcccgcggttgtagcagctgccgctgcagccatagcagcaggtcagtcattggcaccatgaactggaataaaggtggtcctggcactaagcgaggatttggctttggaggttttgccatcagtgctgggaaaaaggaggaacccaaactcccacagcagtcccacagtgcctttggggcaaccagctcttcttctggatttggaaagtcagctccaccacagcttccttctttctacaaaattggatctaagcgggccaactttgatgaagaaaatgcctattttgaagatgaggaagaagattctagcaacgttgatttaccttacattcctgctgaaaactcaccaactcgccagcaattccattccaagccagtagattctgacagcgatgatgatcccttggaggcattcatggctgaagtggaggatcaggcagctagagacatgaagaggcttgaagaaaaggacaaggaaagaaaaaacgtaaagggtattcgagatgacattgaagaggaagatgaccaagaagcttattttcgatacatggcagaaaacccaactgctggtgtggttcaggaggaagaggaagacaatctagaatatgatagtgacggaaatccaattgcacctaccaaaaaaatcattgatcctcttccccccattgatcattcagagattgactatccaccatttgaaaaaaacttttacaatgagcatgaagagataaccaacctcactccacagcagttaatagatctccggcataagctcaatcttcgggtctctggtgctgcacctcctagaccaggaagtagctttgctcattttgggtttgacgaacaacttatgcaccagattcggaaatctgaatacacacagcccactccaatacagtgccagggtgtgcctgtggcattaagtggtagagacatgattggtattgccaaaacaggtagtgggaaaactgcagccttcatttggcccatgttgattcatataatggaccagaaggagttggaaccaggtgatggaccaattgcagtgattgtgtgtcctaccagggagctttgccagcagatccatgcagaatgtaagcggtttggaaaagcatataatcttcgatcagtggccgtatatggaggagggagtatgtgggagcaggccaaggcccttcaggagggggcagagattgttgtgtgtaccccaggtcgactgatagatcatgtgaaaaagaaagctaccaatcttcaaagagtctcttaccttgtgtttgatgaagcagatcgaatgtttgacatgggatttgagtaccaagttcgatccatagcaagtcatgttcgtcctgacaggcagactctcttatttagtgcaacttttcggaagaagattgaaaagttggccagagacatcctgatcgaccctattcgagtggtgcagggagatattggagaggcaaatgaagatgtgacacagattgtggagattctccattctggacctagtaaatggaactggcttacccggcgtctggtagaatttacctcttcagggagtgtcctcctctttgttactaaaaaagccaatgctgaagagctagcgaataaccttaaacaggagggtcataatcttgggctgctccatggggatatggatcagagtgagagaaacaaggtcatttcagactttaagaaaaaggacatcccagtcctggtggccacagatgttgcagcccgtggtctggacattccttcaattaagactgtcattaactatgatgtggcacgagacattgatacccacacgcataggattggccgcacaggaagagcgggtgagaaaggtgtggcctataccctactcactcccaaggacagcaattttgctggtgacctggtccggaacttggaaggagccaatcaacacgtttctaaggaactcctagatctggcaatgcagaatgcctggtttcggaaatctcgattcaaaggagggaaaggaaaaaagctgaacattggtggaggaggcctaggctacagggagcggcctggcctgggctctgagaacatggatcgaggaaataacaatgtaatgagcaattatgaggcctacaagccttccacaggagctatgggagatcgactaacggcaatgaaagcagctttccagtcacagtacaagagtcactttgttgcagccagtttaagtaatcagaaggctggaagttctgctgctggggcaagtgggtggactagtgcagggagcttgaattctgttccaactaactcagcacaacagggccataacagtcctgacagccccgtcaccagtgccgccaagggcatcccaggctttggcaatactggcaacatcagtggtgcccctgtgacctacccgtctgccggagcccaaggagtcaacaacacagcttcagggaataacagccgagaagggactgggggcagcaacgggaaaagagagagatatactgagaaccggggcagcagccgtcacagtcacggagagactggcaatcggcatagcgatagtccacgtcacggagatggtggtcgccatggagatggataccgccatccagaaagcagcagccgtcatactgatggccatcggcacggggagaacagacatggaggaagcgcaggccggcatggggagaaccggggtgcaaatgatggtcggaatggggaaagcaggaaagaagcttttaatcgtgagagcaagatggagcccaagatggaacccaaagtggacagcagcaagatggacaaggtggacagcaagacagataagacagctgacggctttgctgtcccagagccgcctaaacgcaagaaaagtcgatgggacagttagaggggatgtgctaaagcgtgaaatcagttgtccttaatttttagaaagattttggtaactaggtgtctcagggctgggttggggtccaaagtgtaaggaccccctgcccttagtggagagctggagcttggagacattaccccttcatcagaaggaattttcggatgttttcttgggaagctgttttggtccttggaagcagtgagagctgggaagcttcttttggctctaggtgagttgtcatgtgggtaagttgaggttatcttgggataaagggtcttctagggcacaaaactcactctaggtttatattgtatgtagcttatattttttactaaggtgtcaccttataagcatctataaattgacttctttttcttagttgtatggccaggcagtccccattttaggagttggcttctgcaaattcaatccattgagctaactgttggggagcaatttggtagttgtagacatttgcagggaagggagatgtctgattctaaatgggagttgatgctcaggtccccagccaggtttgcatccagccctgagacatgtaggaaacacctttcagacccaggctctgaagattcccagaagccacaaggattgaagggaaaaggtgatcctggtaactgttccaggattgctccaggtttgagatggtattgctaaatttaaaattaaacaagaaacccaacaacagcttttaaagtgtcttctatctcattgtattttttttaacttgccccaatgatagaaaagtcttttgctgaaatgattttgatgatttttgtttatcgtttataaaaaggaaaagaaatatacaaactttgacttttgtgactttgtgaaggtttctttaagatgtgcattcctttctgcttgctctctagtaaatgttttactaccggga

SEQ ID NO: 263404 - DNA, 1881 bp, Artificial Sequence
  derived and/or modified sequence
atgcaccagatcagaaagagcgagtacacccagcccacccccatccagtgccagggcgtgcccgtggccctgagcggcagagacatgatcggcatcgccaagaccggcagcggcaagaccgccgccttcatctggcccatgctgatccacatcatggaccagaaggagctggagcccggcgacggccccatcgccgtgatcgtgtgccccaccagagagctgtgccagcagatccacgccgagtgcaagagattcggcaaggcctacaacctgagaagcgtggccgtgtacggcggcggcagcatgtgggagcaggccaaggccctgcaggagggcgccgagatcgtggtgtgcacccccggcagactgatcgaccacgtgaagaagaaggccaccaacctgcagagagtgagctacctggtgttcgacgaggccgacagaatgttcgacatgggcttcgagtaccaggtgagaagcatcgccagccacgtgagacccgacagacagaccctgctgttcagcgccaccttcagaaagaagatcgagaagctggccagagacatcctgatcgaccccatcagagtggtgcagggcgacatcggcgaggccaacgaggacgtgacccagatcgtggagatcctgcacagcggccccagcaagtggaactggctgaccagaagactggtggagttcaccagcagcggcagcgtgctgctgttcgtgaccaagaaggccaacgccgaggagctggccaacaacctgaagcaggagggccacaacctgggcctgctgcacggcgacatggaccagagcgagagaaacaaggtgatcagcgacttcaagaagaaggacatccccgtgctggtggccaccgacgtggccgccagaggcctggacatccccagcatcaagaccgtgatcaactacgacgtggccagagacatcgacaccctgctgacccccaaggacagcaacttcgccggcgacctggtgagaaacctggagggcgccaaccagcacgtgagcaaggagctgctggacctggccatgcagaacgcctggttcagaaagagcagattcaagggcggcaagggcaagaagctgaacatcggcggcggcggcctgggctacagagagagacccggcctgggcagcgagaacatggacagaggcaacaacaacgtgatgagcaactacgaggcctacaagcccagcaccggcgccatgggcgacagactgaccgccatgaaggccgccttccagagccagtacaagagccacttcgtggccgccagcctgagcaaccagaaggccggcagcagcgccgccggcgccagcggctggaccagcgccggcagcctgaacagcgtgcccaccaacagcgcccagcagggccacaacagccccgacagccccgtgaccagcgccgccaagggcatccccggcttcggcaacaccggcaacatcagcggcgcccccgtgacctaccccagcgccggcgcccagggcgtgaacaacaccgccagcggcaacaacagcagagagggcaccggcggcagcaacggcaagagagagagatacaccgagaacagaggcagcagcagacacagccacggcgagaccggcaacagacacagcgacagccccagacacggcgacggcggcagacacggcgacggctacagacaccccgagagcagcagcagacacaccgacggccacagacacggcgagaacagacacggcggcagcgccggcagacacggcgagaacagaggcgccaacgacggcagaaacggcgagagcagaaaggaggccttcaacagagagagcaagatggagcccccccccaagagaaagaagagcagatgggacagctag

SEQ ID NO: 263405 - DNA, 2817 bp, Artificial Sequence
  derived and/or modified sequence
atgaactggaacaagggcggccccggcaccaagagaggcttcggcttcggcggcttcgccatcagcgccggcaagaaggaggagcccaagctgccccagcagagccacagcgccttcggcgccaccagcagcagcagcggcttcggcaagagcgcccccccccagctgcccagcttctacaagatcggcagcaagagagccaacttcgacgaggagaacgcctacttcgaggacgaggaggaggacagcagcaacgtggacctgccctacatccccgccgagaacagccccaccagacagcagttccacagcaagcccgtggacagcgacagcgacgacgaccccctggaggccttcatggccgaggtggaggaccaggccgccagagacatgaagagactggaggagaaggacaaggagagaaagaacgtgaagggcatcagagacgacatcgaggaggaggacgaccaggaggcctacttcagatacatggccgagaaccccaccgccggcgtggtgcaggaggaggaggaggacaacctggagtacgacagcgacggcaaccccatcgcccccaccaagaagatcatcgaccccctgccccccatcgaccacagcgagatcgactacccccccttcgagaagaacttctacaacgagcacgaggagatcaccaacctgaccccccagcagctgatcgacctgagacacaagctgaacctgagagtgagcggcgccgccccccccagacccggcagcagcttcgcccacttcggcttcgacgagcagctgatgcaccagatcagaaagagcgagtacacccagcccacccccatccagtgccagggcgtgcccgtggccctgagcggcagagacatgatcggcatcgccaagaccggcagcggcaagaccgccgccttcatctggcccatgctgatccacatcatggaccagaaggagctggagcccggcgacggccccatcgccgtgatcgtgtgccccaccagagagctgtgccagcagatccacgccgagtgcaagagattcggcaaggcctacaacctgagaagcgtggccgtgtacggcggcggcagcatgtgggagcaggccaaggccctgcaggagggcgccgagatcgtggtgtgcacccccggcagactgatcgaccacgtgaagaagaaggccaccaacctgcagagagtgagctacctggtgttcgacgaggccgacagaatgttcgacatgggcttcgagtaccaggtgagaagcatcgccagccacgtgagacccgacagacagaccctgctgttcagcgccaccttcagaaagaagatcgagaagctggccagagacatcctgatcgaccccatcagagtggtgcagggcgacatcggcgaggccaacgaggacgtgacccagatcgtggagatcctgcacagcggccccagcaagtggaactggctgaccagaagactggtggagttcaccagcagcggcagcgtgctgctgttcgtgaccaagaaggccaacgccgaggagctggccaacaacctgaagcaggagggccacaacctgggcctgctgcacggcgacatggaccagagcgagagaaacaaggtgatcagcgacttcaagaagaaggacatccccgtgctggtggccaccgacgtggccgccagaggcctggacatccccagcatcaagaccgtgatcaactacgacgtggccagagacatcgacacccacacccacagaatcggcagaaccggcagagccggcgagaagggcgtggcctacaccctgctgacccccaaggacagcaacttcgccggcgacctggtgagaaacctggagggcgccaaccagcacgtgagcaaggagctgctggacctggccatgcagaacgcctggttcagaaagagcagattcaagggcggcaagggcaagaagctgaacatcggcggcggcggcctgggctacagagagagacccggcctgggcagcgagaacatggacagaggcaacaacaacgtgatgagcaactacgaggcctacaagcccagcaccggcgccatgggcgacagactgaccgccatgaaggccgccttccagagccagtacaagagccacttcgtggccgccagcctgagcaaccagaaggccggcagcagcgccgccggcgccagcggctggaccagcgccggcagcctgaacagcgtgcccaccaacagcgcccagcagggccacaacagccccgacagccccgtgaccagcgccgccaagggcatccccggcttcggcaacaccggcaacatcagcggcgcccccgtgacctaccccagcgccggcgcccagggcgtgaacaacaccgccagcggcaacaacagcagagagggcaccggcggcagcaacggcaagagagagagatacaccgagaacagaggcagcagcagacacagccacggcgagaccggcaacagacacagcgacagccccagacacggcgacggcggcagacacggcgacggctacagacaccccgagagcagcagcagacacaccgacggccacagacacggcgagaacagacacggcggcagcgccggcagacacggcgagaacagaggcgccaacgacggcagaaacggcgagagcagaaaggaggccttcaacagagagagcaagatggagcccaagatggagcccaaggtggacagcagcaagatggacaaggtggacagcaagaccgacaagaccgccgacggcttcgccgtgcccgagccccccaagagaaagaagagcagatgggacagctag

SEQ ID NO: 263406 - protein, 182 aa, Artificial Sequence
  derived and/or modified sequence
MVPEEEPQDRVPHNFMYSKTVKRLSKLREYQQYHPSLTCVMEGKDIEDWSCCPTPWTSFQSSCYFISTGMQSWTKSQKNCSVMGADLVVINTREEQDFIIQNLKRNSSYFLGLSDPGGRRHWQWVDQTPYNENVTFWHSGEPNNLDERCAIINFRSSEEWGWNDIHCHVPQKSICKMKKIYI

SEQ ID NO: 263407 - DNA, 549 bp, Artificial Sequence
  derived and/or modified sequence
atggtccccgaagaagaacctcaggaccgcgtgccacacaattttatgtatagtaagaccgtaaagagattgagcaagctgagagagtatcagcagtaccatccttccctgacctgcgtcatggagggtaaggatatagaagactggagttgctgtccgacaccctggacatcattccagtcctcttgttattttatctcaacgggcatgcagtcttggacaaaatcccagaagaactgtagcgtgatgggtgccgacttggtggtgattaataccagagaggagcaggactttatcatccagaatctgaagcgaaatagtagctatttcctcggcctgtctgatcccggaggaagaagacactggcagtgggtggatcagaccccatataacgaaaatgttacattctggcacagcggcgaacctaataacctcgacgaacgatgtgccatcatcaattttaggagtagcgaagaatgggggtggaacgacattcattgccatgtgccccagaagtcaatctgcaagatgaaaaagatctacatttag

SEQ ID NO: 263408 - DNA, 549 bp, Artificial Sequence
  derived and/or modified sequence
atggtgcctgaagaggagccacaggatcgggtgcctcataatttcatgtattctaaaaccgtcaagaggttaagcaaactgagagagtatcagcaataccaccccagtctgacatgtgtaatggaaggaaaagatattgaggactggagctgttgccccactccctggacctcctttcaatcctcctgttactttatctcgaccggcatgcagagctggaccaagagccaaaaaaactgttcggtcatgggagctgacttagtggttataaatactagggaggaacaggattttatcatccagaacctcaaacgcaacagctcctactttctgggcctctccgatccagggggccgtagacactggcagtgggtggatcaaaccccttacaacgagaatgtgaccttttggcacagtggtgagcctaacaatttggatgagagatgtgcgataatcaacttcagaagctcagaagaatggggatggaatgacatccactgtcatgtgccccagaagtcgatctgcaagatgaaaaagatctacatctag

SEQ ID NO: 263409 - DNA, 549 bp, Artificial Sequence
  derived and/or modified sequence
atggtgcctgaggaggagccccaggacagagtgccccacaacttcatgtacagcaagacagtgaagaggctgagcaagctgcgggagtaccagcagtaccaccccagcctgacctgtgtgatggagggcaaggacatcgaggactggagctgctgccccaccccctggaccagcttccagagcagctgctacttcatcagcacaggcatgcagagctggaccaagagccagaagaactgcagcgtgatgggcgctgacctggtggtgatcaacacccgggaggagcaggacttcatcatccagaacctgaagaggaacagcagctacttcctgggcctgagtgaccccggcggcagaagacactggcagtgggtggaccagaccccctacaatgaaaatgtgaccttctggcacagcggggagcccaacaacctggatgagcgctgtgccatcatcaacttccgcagcagcgaggagtggggctggaatgacatccactgccacgtgccccagaagagcatctgcaagatgaagaagatctacatctag

SEQ ID NO: 263410 - DNA, 549 bp, Artificial Sequence
  derived and/or modified sequence
atggtgcccgaggaggagccccaggaccgggtgccccacaacttcatgtactcaaagacagtgaagcgccttagtaaattgagggagtaccagcagtatcatccatccctaacttgtgtgatggagggcaaagacattgaggactggtcatgctgtcctacgccttggacttcctttcagtcttcttgctactttatatccaccggaatgcagtcatggactaaatctcaaaaaaactgctcggttatgggtgcagatctggtagtgataaacacccgtgaagagcaagactttattatccaaaatctgaaaaggaattcctcctacttcctaggccttagtgatcccggaggtcgtcgccattggcagtgggtggaccaaaccccctataatgaaaacgtaacattctggcattcaggcgaacccaataatttagatgagcggtgcgccatcatcaattttcggagttctgaggaatgggggtggaatgatatccattgtcatgtgcctcagaaatccatatgtaagatgaaaaagatatacatatag

SEQ ID NO: 263411 - DNA, 549 bp, Artificial Sequence
  derived and/or modified sequence
atggtgcccgaggaggagccccaggaccgggtgccccacaacttcatgtattctaagacagtgaagcgcctctccaagctccgagagtatcagcagtaccacccaagtctaacttgtgtcatggaagggaaggacatcgaggattggagctgttgccctactccttggacatcatttcagagttcctgttatttcatctcaacaggaatgcagtcttggactaagagtcagaaaaactgttccgtgatgggcgctgaccttgtcgtgattaacacacgtgaagagcaagatttcattatccagaatctaaagcgcaatagctcttactttctgggactgtccgaccccggggggcgcaggcactggcagtgggtcgatcagacaccgtacaacgaaaatgtcactttctggcactccggagagccaaataatttagatgaacgctgcgccataatcaacttccgctccagtgaagagtggggttggaacgacatccactgtcacgtgccacagaagagtatatgcaaaatgaaaaagatctacatttag

SEQ ID NO: 263412 - DNA, 549 bp, Artificial Sequence
  derived and/or modified sequence
atggtgcccgaggaggagcctcaggacagggtccctcataacttcatgtattccaagaccgtcaaaagactatctaagctgcgcgagtaccagcagtaccatccaagtcttacatgtgttatggagggaaaggatatcgaggactggagctgttgcccgactccatggacttcttttcagtcctcctgctacttcatttctacggggatgcaaagttggacaaaatcccaaaagaattgttccgtgatgggggctgatttagtggttattaacactagagaggaacaggattttattatccagaacttgaagaggaatagctcctacttcttgggcctatccgatcctggcggaaggagacattggcaatgggtggatcagaccccctataatgagaacgtgacgttctggcacagtggtgagccaaacaacttagacgaaagatgcgccattattaatttcaggtccagtgaagagtggggatggaacgatatccactgccacgtgccccagaaatccatttgcaaaatgaagaaaatctatatctag

SEQ ID NO: 263413 - DNA, 549 bp, Artificial Sequence
  derived and/or modified sequence
atggtccctgaagaagaaccccaggatagggtccctcacaactttatgtacagcaagaccgttaagcggctgtcaaagcttagagaatatcagcaatatcatccctccctgacttgtgtaatggaagggaaagatatcgaagattggtcttgctgtccaacaccttggaccagctttcagtctagctgttattttatttctacaggcatgcagtcctggaccaagtcccagaagaattgttcagtcatgggagccgatctcgtggttatcaatactcgagaagaacaggactttattattcagaatctcaagaggaacagcagctactttctaggactgagtgacccgggagggcgaagacattggcagtgggtggatcagaccccctacaatgaaaacgtgactttctggcactctggagagccaaacaacttagacgagcggtgcgctataattaacttcaggagttcagaggagtggggatggaatgacattcattgtcacgtgcctcaaaagtccatatgcaagatgaaaaaaatatatatttag

SEQ ID NO: 263414 - DNA, 1126 bp, Artificial Sequence
  derived and/or modified sequence
ttgctttctgtgctgtgcaagctttgttctttcgctgtttgggtccacggttcttttatgagctgtgataccgcggaagtctgtagcttcactcctgaagctagcaagaccacaagctcgccgagagaaacgagtaactctagacgtgccatcttaaaagctgtaacaccgcgaggcagatcctgcctcccacagtcaccctgctcccaagtgcaacctctgtctgaccctgcatggtgtgcggtgccctcctgcctcaggcctaggcgaagaaggatctaagggcttggcttgtttgaaagaaccacaccccgaaagtaacatctttggagaaagtgatacaagagcttctgcacccacctgatagaggaagtccaaagggtgtgcgcacacacaatggtgcctgaagaagagcctcaagaccgagtgcctcacaattttatgtatagcaaaactgtcaagaggctgtccaagttacgagagtatcaacagtatcatccaagcctgacctgcgtcatggaaggaaaggacatagaagattggagctgctgcccaaccccttggacttcatttcagtctagttgctactttatttctactgggatgcaatcttggactaagagtcaaaagaactgttctgtgatgggggctgatctggtggtgatcaacaccagggaagaacaggatttcatcattcagaatctgaaaagaaattcttcttattttctggggctgtcagatccagggggtcggcgacattggcaatgggttgaccagacaccatacaatgaaaatgtcacattctggcactcaggtgaacccaataaccttgatgagcgttgtgcgataataaatttccgttcttcagaagaatggggctggaatgacattcactgtcatgtacctcagaagtcaatttgcaagatgaagaagatctacatataaatgaaatattctccctggaaatgtgtttgggttggcatccaccgttgtagaaagctaaattgattttttaatttatgtgtaagttttgtacaaggaatgcccctaaaatgtttcagcaggctgtcacctattacacttatgatataatccattcacacattcatttattcatttattcatt

SEQ ID NO: 263415 - DNA, 1221 bp, Artificial Sequence
  derived and/or modified sequence
cagtgattctcgtgcctcagcctcctgagtagccgaaattacagacgtgtgccaccatgcttggctaattttttggatttttagtagagatggggtttcactatgttggccaggctagtcttgaactcctggcctgaagcaatccgcccacctcagcctcccaaagtgctgagattataggcacgagccactacacctggccacaaaattctttaaagaagccaatcccatcctccctcaagagccaaggggccacctcaccctcttgttacagcagatcctgcctcccacagtcaccctgctcccaagtgcaacctctgtctgaccctgcatggtgtgcggtgccctcctgcctcaggccgcgaagaaggatctaagggcttggcttgtttgaaagaaccacaccccgaaagtaacatctttggagaaagtgatacaagagcttctgcacccacctgatagaggaagtccaaagggtgtgcgcacacacaatggtgcctgaagaagagcctcaagaccgagtgcctcacaattttatgtatagcaaaactgtcaagaggctgtccaagttacgagagtatcaacagtatcatccaagcctgacctgcgtcatggaaggaaaggacatagaagattggagctgctgcccaaccccttggacttcatttcagtctagttgctactttatttctactgggatgcaatcttggactaagagtcaaaagaactgttctgtgatgggggctgatctggtggtgatcaacaccagggaagaacaggatttcatcattcagaatctgaaaagaaattcttcttattttctggggctgtcagatccagggggtcggcgacattggcaatgggttgaccagacaccatacaatgaaaatgtcacattctggcactcaggtgaacccaataaccttgatgagcgttgtgcgataataaatttccgttcttcagaagaatggggctggaatgacattcactgtcatgtacctcagaagtcaatttgcaagatgaagaagatctacatataaatgaaatattctccctggaaatgtgtttgggttggcatccaccgttgtagaaagctaaattgattttttaatttatgtgtaagttttgtacaaggaatgcccctaaaatgtttcagcaggctgtcacctattacacttatgatataatccattcacacattcatttattcatttattcatt

SEQ ID NO: 263416 - DNA, 549 bp, Artificial Sequence
  derived and/or modified sequence
atggtgcccgaggaggagccccaggacagagtgccccacaacttcatgtacagcaagaccgtgaagagactgagcaagctgagagagtaccagcagtaccaccccagcctgacctgcgtgatggagggcaaggacatcgaggactggagctgctgccccaccccctggaccagcttccagagcagctgctacttcatcagcaccggcatgcagagctggaccaagagccagaagaactgcagcgtgatgggcgccgacctggtggtgatcaacaccagagaggagcaggacttcatcatccagaacctgaagagaaacagcagctacttcctgggcctgagcgaccccggcggcagaagacactggcagtgggtggaccagaccccctacaacgagaacgtgaccttctggcacagcggcgagcccaacaacctggacgagagatgcgccatcatcaacttcagaagcagcgaggagtggggctggaacgacatccactgccacgtgccccagaagagcatctgcaagatgaagaagatctacatctag

SEQ ID NO: 263417 - protein, 176 aa, Artificial Sequence
  derived and/or modified sequence
MEAIAKYDFKATADDELSFKRGDILKVLNEECDQNWYKAELNGKDGFIPKNYIEMKPHPFGNDVQHFKVLRDGAGKYFLWVVKFNSLNELVDYHRSTSVSRNQQIFLRDIEQVPQQPTYVQALFDFDPQEDGELGFRRGDFIHVMDNSDPNWWKGACHGQTGMFPRNYVTPVNRNV

SEQ ID NO: 263418 - DNA, 531 bp, Artificial Sequence
  derived and/or modified sequence
atggaggccatcgccaagtacgacttcaaggccaccgccgacgacgagctgagcttcaagagaggcgacatcctgaaggtgctgaacgaggagtgcgaccagaactggtacaaggccgagctgaacggcaaggacggcttcatccccaagaactacatcgagatgaagccccaccccttcggcaacgacgtgcagcacttcaaggtgctgagagacggcgccggcaagtacttcctgtgggtggtgaagttcaacagcctgaacgagctggtggactaccacagaagcaccagcgtgagcagaaaccagcagatcttcctgagagacatcgagcaggtgccccagcagcccacctacgtgcaggccctgttcgacttcgacccccaggaggacggcgagctgggcttcagaagaggcgacttcatccacgtgatggacaacagcgaccccaactggtggaagggcgcctgccacggccagaccggcatgttccccagaaactacgtgacccccgtgaacagaaacgtgtag

SEQ ID NO: 263419 - DNA, 531 bp, Artificial Sequence
  derived and/or modified sequence
atggaagcaatcgcaaagtacgatttcaaggcgacagctgatgatgagttaagttttaagcgcggcgacatcctcaaagtgctgaatgaagagtgcgaccagaattggtacaaggcagaactcaacgggaaagatggcttcataccgaaaaactacatagagatgaaaccccacccatttggtaacgacgtgcagcattttaaggtgctccgggatggcgcgggcaagtatttcctctgggtggtaaaatttaattccctgaatgagttagtggattaccaccgctcgactagcgtatctagaaaccagcaaatcttccttagggacattgagcaagttccccagcaacccacctatgtgcaggcactcttcgactttgacccccaggaagacggggaattgggcttccggcgcggtgactttatccacgtgatggataattcggatccaaactggtggaagggcgcttgccacggccaaacaggcatgttcccgagaaattacgtaacccccgtgaaccgcaacgtgtag

SEQ ID NO: 263420 - DNA, 3181 bp, Artificial Sequence
  derived and/or modified sequence
aagttctcgcgggacaccgacggggagcggaagccaggaggtattgctgcttcggcgaccgggcggcggcagcggcggcggcggctgtggcagagtctgtgcctgtggcggtgacggcggcgggagcaagcgctgccctcgcagagcagccttggggtcgccggccgctcgcagcgttgtggaggggcgggccggacgctgagcggagcagctgcgccacgggtggcattgtgtgtcccagagtgccggagcgagtcccagaagagaggcgaggctaagcccagagcgctgggttgcttcagcagggaagactcccttccccctgcttcaggctgctgagcactgagcagcgctcagaatggaagccatcgccaaatatgacttcaaagctactgcagacgacgagctgagcttcaaaaggggggacatcctcaaggttttgaacgaagaatgtgatcagaactggtacaaggcagagcttaatggaaaagacggcttcattcccaagaactacatagaaatgaaaccacatccgtttggaaacgatgtgcagcacttcaaggtgctccgagatggagccgggaagtacttcctctgggtggtgaagttcaattctttgaatgagctggtggattatcacagatctacatctgtctccagaaaccagcagatattcctgcgggacatagaacaggtgccacagcagccgacatacgtccaggccctctttgactttgatccccaggaggatggagagctgggcttccgccggggagattttatccatgtcatggataactcagaccccaactggtggaaaggagcttgccacgggcagaccggcatgtttccccgcaattatgtcacccccgtgaaccggaacgtctaagagtcaagaagcaattatttaaagaaagtgaaaaatgtaaaacacatacaaaagaattaaacccacaagctgcctctgacagcagcctgtgagggagtgcagaacacctggccgggtcaccctgtgaccctctcactttggttggaactttagggggtgggagggggcgttggatttaaaaatgccaaaacttacctataaattaagaagagtttttattacaaattttcactgctgctcctctttcccctcctttgtcttttttttcatccttttttctcttctgtccatcagtgcatgacgtttaaggccacgtatagtcctagctgacgccaataataaaaaacaagaaaccaagtgggctggtattctctctatgcaaaatgtctgttttagttggaatgactgaaagaagaacagctgttcctgtgttcttcgtatatacacacaaaaaggagcgggcagggccgctcgatgcctttgctgtttagcttcctccagaggaggggacttgtaggaatctgccttccagcccagacccccagtgtattttgtccaagttcacagtagagtagggtagaaggaaagcatgtctctgcttccatggcttcctgagaaagcccacctgggctgggcgcggtggctcacgcctgtaatcccagcactttgggaggccaaggtgggcggatcacaaggtcaggagttcgagaccaacctagccaacatggtgaaaccccgtctctactaaaaataagaaattagccgggtgtggcacgcacctgtagtcccagctacttgggagcctgaggcaggagaatcgcttgaacctgggaagtggaggttgagtgagccgggaccgtgccattgtactccagcctgggtgacagagcgagattccgtctcaaaaaaaaaaaaaaaaagcccacctgaaagcctgtctctttccactttgttggcccttccagtgggattatcgagcatgttgttttttcatagtgcctttttccttatttcaagggttgcttctgagtggtgttttttttttttttttaatttgttttgttttaaaataagttaaaggcagtccagagcttttcagccaatttgtctcctactctgtgtaaatatttttccctccgggcaggggagccagggtagagcaaaggagacaaagcaggagtggaaggtgaggcgttctcctgcttgtactaagccaggaggctttaagctccagctttaagggttgtgagccccttgggggttcagggaactgcttgcccagggtgcagtgtgagtgtgatgggccaccggggcaagagggaaggtgaccgcccagctctcccacatcccactggatctggcttacaggggggtcggaagcctgtcctcaccgtctcgggggttgtggcccccgccccctccctatatgcacccctggaaccagcaagtcccagacaaggagagcggaggaggaagtcatgggaacgcagcctccagttgtagcaggtttcactattcctatgctggggtacacagtgagagtactcacttttcacttgtcttgctcttagattgggccatggctttcatcctgtgtcccctgacctgtccaggtgagtgtgagggcagcactgggaagctggagtgctgcttgtgcctcccttcccagtgggctgtgttgactgctgctccccacccctaccgatggtcccaggaagcagggagagttggggaaggcaagattggaaagacaggaagaccaaggcctcggcagaactctctgtcttctctccacttctggtcccctgtggtgatgtgcctgtaatctttttctccacccaaaccccttcccacgacaaaaacaagactgcctccctctcttccgggagctggtgacagccttgggcctttcagtcccaaagcggccgatgggagtctccctccgactccagatatgaacagggcccaggcctggagcgtttgctgtgccaggaggcggcagctcttctgggcagagcctgtccccgccttccctcactcttcctcatcctgcttctcttttcctcgcagatgataaaaggaatctggcattctacacctggaccatttgattgttttattttggaattggtgtatatcatgaagccttgctgaactaagttttgtgtgtatatatttaaaaaaaaaatcagtgtttaaataaagacctatgtacttaatcctttaactctgcggatagcatttggtaggtagtgattaactgtgaataataaatacacaatgaattcttca

SEQ ID NO: 263421 - DNA, 531 bp, Artificial Sequence
  derived and/or modified sequence
atggaggccatcgccaagtatgacttcaaggccacagcagatgatgagctgtccttcaagagaggagacatcctgaaggtgctgaatgaagaatgtgaccagaactggtacaaggccgagctgaatggcaaggatggcttcatccccaagaactacatcgagatgaagccccacccctttggaaatgatgtgcagcacttcaaggtgctgagagatggagctgggaagtacttcctgtgggtggtgaagttcaacagcctgaatgagctggtggactaccacaggagcacctctgtgtccaggaaccagcagatcttcctgcgggacatcgagcaggtgccccagcagcccacctacgtgcaggccctgtttgattttgacccccaggaggatggagagctgggcttcagaagaggagacttcatccacgtgatggacaacagcgaccccaactggtggaagggggcctgccacggccagacaggcatgttccccaggaactacgtgacccctgtgaacagaaatgtgtag

SEQ ID NO: 263422 - DNA, 531 bp, Artificial Sequence
  derived and/or modified sequence
atggaggccatcgccaagtacgacttcaaggccaccgccgacgacgagctgagctttaagagaggcgacatcctcaaggtcttaaatgaagaatgtgatcagaattggtacaaagcagagttaaacggcaaagatggctttattcccaagaactacattgagatgaaacctcacccgttcggcaacgatgtgcagcacttcaaagtgctgagggacggagctggaaagtactttctttgggtggtgaagtttaattctctgaatgaactggttgattaccacagatcaaccagtgtctcccgaaatcagcagatctttcttagagacatcgaacaggtgcctcagcaacccacatacgtacaggctctgttcgatttcgacccgcaagaggacggggaacttggctttcgaaggggcgactttatccatgtgatggacaattctgaccccaactggtggaagggcgcctgccatggacagacaggcatgttccccaggaattacgtcacgcctgtgaaccgtaacgtttag

SEQ ID NO: 263423 - DNA, 531 bp, Artificial Sequence
  derived and/or modified sequence
atggaagccattgctaagtatgatttcaaagcgactgccgacgacgagctgagttttaaacggggagatatcttgaaggtgctaaacgaggagtgcgatcagaactggtataaagccgagctgaatggtaaggatggattcatccccaagaactatatcgaaatgaagccacacccattcggtaacgacgtgcaacatttcaaagtactgcgtgacggggcagggaagtactttctgtgggtcgtgaagttcaactctctgaatgagctggtggattatcacaggtcaaccagtgtctcacgaaaccagcagattttcctgcgcgatatagagcaggtccctcaacaaccgacctatgtgcaggccttatttgactttgatcctcaagaggatggggagctgggcttcaggcggggtgatttcatccatgtgatggacaacagtgatccaaactggtggaaaggggcttgtcacggccagactgggatgtttcctcggaattacgtgactccggttaatcgcaacgtgtag

SEQ ID NO: 263424 - protein, 125 aa, Artificial Sequence
  derived and/or modified sequence
MRGTRLALLALVLAACGELAPALRCYVCPEPTGVSDCVTIATCTTNETMCKTTLYSREIVYPFQGDSTVTKSCASKCKPSDVDGIGQTLPVSCCNTELCNVDGAPALNSLHCGALTLLPLLSLRL

SEQ ID NO: 263425 - DNA, 378 bp, Artificial Sequence
  derived and/or modified sequence
atgagaggcaccagactggccctgctggccctggtgctggccgcctgcggcgagctggcccccgccctgagatgctacgtgtgccccgagcccaccggcgtgagcgactgcgtgaccatcgccacctgcaccaccaacgagaccatgtgcaagaccaccctgtacagcagagagatcgtgtaccccttccagggcgacagcaccgtgaccaagagctgcgccagcaagtgcaagcccagcgacgtggacggcatcggccagaccctgcccgtgagctgctgcaacaccgagctgtgcaacgtggacggcgcccccgccctgaacagcctgcactgcggcgccctgaccctgctgcccctgctgagcctgagactgtag

SEQ ID NO: 263426 - DNA, 378 bp, Artificial Sequence
  derived and/or modified sequence
atgaggggtacgcggctggccctcctcgccctggtgctcgctgcttgtggggaactggcccccgccctacggtgttacgtttgcccggaacccacaggcgtgagcgattgcgtcacgatcgcaacatgtaccaccaatgagaccatgtgtaagactacactgtacagtcgagagattgtgtatcccttccaaggagatagcaccgttacaaaatcctgtgcaagcaaatgtaagccttcagacgtcgacggaatcgggcagaccctgccggtctcatgctgcaacacagagctatgcaatgtggacggagccccagcactcaattcattacattgcggggcactaaccctcctgcctctactgtccctgcgcctgtag

SEQ ID NO: 263427 - DNA, 594 bp, Artificial Sequence
  derived and/or modified sequence
ccagtctgtcgccacctcacttggtgtctgctgtccccgccaggcaagcctggggtgagagcacagaggagtgggccgggaccatgcgggggacgcggctggcgctcctggcgctggtgctggctgcctgcggagagctggcgccggccctgcgctgctacgtctgtccggagcccacaggagtgtcggactgtgtcaccatcgccacctgcaccaccaacgaaaccatgtgcaagaccacactctactcccgggagatagtgtaccccttccagggggactccacggtgaccaagtcctgtgccagcaagtgtaagccctcggatgtggatggcatcggccagaccctgcccgtgtcctgctgcaatactgagctgtgcaatgtagacggggcgcccgctctgaacagcctccactgcggggccctcacgctcctcccactcttgagcctccgactgtagagtccccgcccacccccatggccctatgcggcccagccccgaatgccttgaagaagtgccccctgcaccaggactcctgagtctcctttctgggcacagacctgccctgctgcatctctgacctcgtcgatgt

SEQ ID NO: 263428 - DNA, 378 bp, Artificial Sequence
  derived and/or modified sequence
atgaggggcacccggctggccctgctggccctggtgctggccgcctgtggggagctggccccagccctgcgctgctacgtgtgcccagagcccaccggggtgtctgactgtgtgaccatcgccacctgcaccaccaatgagaccatgtgcaagaccaccctgtacagccgggagatcgtgtaccccttccagggcgacagcacagtgaccaagagctgtgccagcaagtgcaagcccagtgatgtggatggcatcggccagaccctgcctgtgtcctgctgcaacacagagctgtgcaatgtggatggagccccagccctgaacagcctgcactgtggggccctgaccctgctgcccctgctgagcctgcggctgtag

SEQ ID NO: 263429 - DNA, 378 bp, Artificial Sequence
  derived and/or modified sequence
atgcggggcacccggctggccctgctggccctggtgctggccgcctgtggagagctggctcccgctcttagatgctacgtgtgccccgagcctacaggggtctcggattgcgttactatcgcaacttgtacaaccaatgagactatgtgtaaaaccacgctatactccagggagattgtctacccttttcagggcgatagcactgtaacaaaaagttgtgcgagcaagtgcaaaccatccgatgtagacgggataggacagacccttccagtgagttgttgcaatacagaattatgtaacgtggacggcgcccctgctctgaattccttgcattgcggagccctgaccctacttcctcttttgtccctgaggctttag

SEQ ID NO: 263430 - DNA, 378 bp, Artificial Sequence
  derived and/or modified sequence
atgagaggcacgcgactcgcactcctggccctggttctggccgcatgcggagagctggcgccagctctccgctgctacgtttgcccagaaccaactggagttagtgactgcgtaacaatcgccacatgcaccacaaacgaaactatgtgtaagacgaccctgtactctcgggaaattgtttacccatttcaaggggattcgaccgttactaaaagttgtgcctctaagtgtaaaccaagcgacgtggatgggatcgggcagacactgcccgtttcatgctgcaacaccgaactgtgtaatgtagatggtgcgcctgctctgaattccctccactgcggagctctgaccctactgccattacttagccttcgcctgtag

SEQ ID NO: 263431 - protein, 531 aa, Artificial Sequence
  derived and/or modified sequence
MCPKGYEDSMEFPDHSRHLLQCLSEQRHQGFLCDCTVLVGDAQFRAHRAVLASCSMYFHLFYKDQLDKRDIVHLNSDIVTAPAFALLLEFMYEGKLQFKDLPIEDVLAAASYLHMYDIVKVCKKKLKEKATTEADSTKKEEDASSCSDKVESLSDGSSHIAGDLPSDEDEGEDEKLNILPSKRDLAAEPGNMWMRLPSDSAGIPQAGGEAEPHATAAGKTVASPCSSTESLSQRSVTSVRDSADVDCVLDLSVKSSLSGVENLNSSYFSSQDVLRSNLVQVKVEKEASCDESDVGTNDYDMEHSTVKESVSTNNRVQYEPAHLAPLREDSVLRELDREDKASDDEMMTPESERVQVEGGMESSLLPYVSNILSPAGQIFMCPLCNKVFPSPHILQIHLSTHFREQDGIRSKPAADVNVPTCSLCGKTFSCMYTLKRHERTHSGEKPYTCTQCGKSFQYSHNLSRHAVVHTREKPHACKWCERRFTQSGDLYRHIRKFHCELVNSLSVKSEALSLPTVRDWTLEDSSQELWK

SEQ ID NO: 263432 - protein, 487 aa, Artificial Sequence
  derived and/or modified sequence
MCPKGYEDSMEFPDHSRHLLQCLSEQRHQGFLCDCTVLVGDAQFRAHRAVLASCSMYFHLFYKDQLDKRDIVHLNSDIVTAPAFALLLEFMYEGKLQFKDLPIEDVLAAASYLHMYDIVKVCKKKLKEKATTEADSTKKEEDASSCSDKVESLSDGSSHIAGDLPSDEDEGEDEKLNILPSKRDLAAEPGNMWMRLPSDSAGIPQAGGEAEPHATAAGKTVASPCSSTESLSQRSVTSVRDSADVDCVLDLSVKSSLSGVENLNSSYFSSQDVLRSNLVQVKVEKEASCDESDVGTNDYDMEHSTVKESVSTNNRVQYEPAHLAPLREDSVLRELDREDKASDDEMMTPESERVQVEGGMESSLLPYVSNILSPAGQIFMCPLCNKVFPSPHILQIHLSTHFREQDGIRSKPAADVNVPTCSLCGKTFSCMYTLKRHERTHSGEKPYTCTQCGKSFQYSHNLSRLQVVRAQVHAVRGPVQTHSQVPL

SEQ ID NO: 263433 - DNA, 4244 bp, Artificial Sequence
  derived and/or modified sequence
tttaaactgtgctttctaagcacagtcaggtagcaaaagtaataaaaaggatggttgaacaagttttcttgtatgttccaggatatgtttgggacttttctttgtttattatatgagttgttccctttgaaattaaagctattttgtaggttttgtgggacataatttgataagtagagttaattaaatttcttctggaagagatctaaattcttattcttagtgagagactgtagttaaaggaaggcttttagaacttgggttcaaggaagatggagatgcgtcggaagctctttggcgggggtgaggaagttcagaaagtgtgcattttccttctggcatttaggtcttgtccgtgtgatttggtggtgcttgggtcataagcctgattaaaattcagggacatgtaccacggcggccaaagcggaattaatttttttatatggggactggagcgctgaaaagttgttcctgaccaggctctaatgagaaattcctctctccccaggttatgaagacagtatggagtttccagaccatagtagacatttgctacagtgtctgagcgagcagagacaccagggttttctttgtgactgcactgttctggtgggagatgcccagttccgagcgcaccgagctgtactggcttcatgcagcatgtatttccacctcttttacaaggaccagctggacaaaagagacattgttcatctgaacagcgacattgttacagcccccgctttcgctctcctgcttgaattcatgtatgaagggaaactccagttcaaagacttgcccattgaagacgtgctagcagctgccagttatctccacatgtatgacattgtcaaagtctgcaaaaagaagctgaaagagaaagccaccacggaggcagacagcaccaaaaaggaagaagatgcttcaagttgttcggacaaagtcgagagtctctccgatggcagcagccacatagcaggcgatttgcccagtgatgaagatgaaggagaagatgaaaaattgaacatcctgcccagcaaaagggacttggcggccgagcctgggaacatgtggatgcgattgccctcagactcagcaggcatcccccaggctggcggagaggcagagccacacgccacagcagctggaaaaacagtagccagcccctgcagctcaacagagtctttgtcccagaggtctgtcacctccgtgagggattcggcagatgttgactgtgtgctggacctgtctgtcaagtccagcctttcaggagttgaaaatctgaacagctcttatttctcttcacaggacgtgctgagaagcaacctggtgcaggtgaaggtggagaaagaggcttcctgtgatgagagtgatgttggcactaatgactatgacatggaacatagcactgtgaaagaaagtgtgagcactaataacagggtacagtatgagccggcccatctggctcccctgagggaggactcggtcttgagggagctggaccgggaggacaaagccagtgatgatgagatgatgaccccagagagcgagcgtgtccaggtggagggaggcatggagagcagtctgctcccctacgtctccaacatcctgagccccgcgggccagatcttcatgtgccccctgtgcaacaaggtcttccccagcccccacatcctgcagatccacctgagcacgcacttccgcgagcaggacggcatccgcagcaagcccgccgccgatgtcaacgtgcccacgtgctcgctgtgtgggaagactttctcttgcatgtacaccctcaagcgccacgagaggactcactcgggggagaagccctacacatgcacccagtgcggcaagagcttccagtactcgcacaacctgagccgccatgccgtggtgcacacccgcgagaagccgcacgcctgcaagtggtgcgagcgcaggttcacgcagtccggggacctgtacagacacattcgcaagttccactgtgagttggtgaactccttgtcggtcaaaagcgaagcactgagcttgcctactgtcagagactggaccttagaagatagctctcaagaactttggaaataattttatatatatataaataatatatatatatatacatatatataaatagatctctatatagttgtggtacggtctaaaagcagtcttgtttcctggaaataaaaagttgggatattaacttgtttttgcactttagaatagcatgagaatctcactaatttagcattctgataaaagaaactttagagcaagtcagaatagagaggtgtttttcctttgaggggataggggaagtaagccaataagaaccttttaaacaaatcgtcctgtcacaaaatgctttcatatggcttaattttgtcaacactgcattgtcttttgagctcttttttcccccccaacaaagtttttttgttttttgtttttttttttaagtagaaattccctccagttttattagcctctttatatgtctcaaattgcatgaattttttctggctgttggaaacctgaatgcttttagacccaaatggaaaatttctgaaatgctggattatctatttttaaacaagcagttgacttaaaactttctgtggcaacttctggttttctgacagttcccagtgagagaaatgctgaaagtacactgggatcactgggacactgtcttatgaaggtttgcttgggatgaaaaaggatattgcagcttcagcagtgttgaactgtgtgtttaaaaatgtgaattactgttattgtatactgtaattgattacatgggctgggggggtgtcaaagaacttgacaggttgtgttgatgctcttagttgagtcttgaaaagtaaatattaacgctacagaaatgcatgagtttcaatatattttttgtctttgtttgcattgtataactttaacgagtgagtttaaaattatttaatttccttagaaaaatagcaccatttggaaaaaaaaactggtgttatgaagaacgtaaatgcactgtttttatttttattttatataatttaaattgactttcccactgtctttaagttgaaactgttaagctgaataaaaacttaagctgcaaattgataacttcgctacataacaaggaaaatataaatgtttacaaacagcttaaagatttgcatgtgcagtgtgcatttataacaaacttctaattgcacaaaacccatgccagctcagagtttaggtgtacacatttacccagttgagcgttcttagaataactactgcacaagttgacaataggtcgttctctctttttttttgtttgctccctttttctttttctccccttcctccttaccctccctcccttactctccccccccaccaccaccctccacccccaactcatgaaaagattctatggactgaaaaagccccaggctgaaaggactggactgccttgattgacatggggaagggggttagtagactatgtggattgcggcagcagaggctgcagcctaacgtgtggttttaatgaccagcacgcaaggcaaaagcattttgcacagtgtttgttttcctgtcttgcacttacaaataaggtctatgggagtagcatggaaaacgtttgctgtttttcccttttttttttaattgcttttgtttaaaatttgatcgccttaactactgtaaacatagcctatttttgtgcttaagatactgaatggaaaactccattgtgtgttgctggactgttttggaaatatttggttaaatgtgtgttaatttggctgtaatggcatttaaagcaaacaaacaaacaaaaaaagctgtgaaaatggccttggagcattatctttagttacttgaagagtttctagtttttttaaaatacagtttatgttaaaataatttttattaatttagagaagacaatcaatgtctgtgagaaaacggactttcttttggattttctttttgtggtcattgtgagtgattgctttttccttttcttagtttcacattcttcctttgttctaaaacttagactgacatctagctttgacaatcatagtatgttttattttcctgagggggaataacttataatgctgtttagttttgtactattggtgtgttggtgaatttttaaactgtgtgctaactgcaataaattatatgaactgagaaaaaaaaaaaaaaaaaaaaaaaaaaaaaaaaaaaaaaaaaaaaaaaaa

SEQ ID NO: 263434 - DNA, 83 bp, Artificial Sequence
  derived and/or modified sequence
tagaaggaatttgatacatgctcagaaatacaggcaaaggaagtaggtgcctgccagtgaacacaggggaactatggctccta

SEQ ID NO: 263435 - DNA, 1596 bp, Artificial Sequence
  derived and/or modified sequence
atgtgccccaagggctacgaggacagcatggagttccccgaccacagcagacacctgctgcagtgcctgagcgagcagagacaccagggcttcctgtgcgactgcaccgtgctggtgggcgacgcccagttcagagcccacagagccgtgctggccagctgcagcatgtacttccacctgttctacaaggaccagctggacaagagagacatcgtgcacctgaacagcgacatcgtgaccgcccccgccttcgccctgctgctggagttcatgtacgagggcaagctgcagttcaaggacctgcccatcgaggacgtgctggccgccgccagctacctgcacatgtacgacatcgtgaaggtgtgcaagaagaagctgaaggagaaggccaccaccgaggccgacagcaccaagaaggaggaggacgccagcagctgcagcgacaaggtggagagcctgagcgacggcagcagccacatcgccggcgacctgcccagcgacgaggacgagggcgaggacgagaagctgaacatcctgcccagcaagagagacctggccgccgagcccggcaacatgtggatgagactgcccagcgacagcgccggcatcccccaggccggcggcgaggccgagccccacgccaccgccgccggcaagaccgtggccagcccctgcagcagcaccgagagcctgagccagagaagcgtgaccagcgtgagagacagcgccgacgtggactgcgtgctggacctgagcgtgaagagcagcctgagcggcgtggagaacctgaacagcagctacttcagcagccaggacgtgctgagaagcaacctggtgcaggtgaaggtggagaaggaggccagctgcgacgagagcgacgtgggcaccaacgactacgacatggagcacagcaccgtgaaggagagcgtgagcaccaacaacagagtgcagtacgagcccgcccacctggcccccctgagagaggacagcgtgctgagagagctggacagagaggacaaggccagcgacgacgagatgatgacccccgagagcgagagagtgcaggtggagggcggcatggagagcagcctgctgccctacgtgagcaacatcctgagccccgccggccagatcttcatgtgccccctgtgcaacaaggtgttccccagcccccacatcctgcagatccacctgagcacccacttcagagagcaggacggcatcagaagcaagcccgccgccgacgtgaacgtgcccacctgcagcctgtgcggcaagaccttcagctgcatgtacaccctgaagagacacgagagaacccacagcggcgagaagccctacacctgcacccagtgcggcaagagcttccagtacagccacaacctgagcagacacgccgtggtgcacaccagagagaagccccacgcctgcaagtggtgcgagagaagattcacccagagcggcgacctgtacagacacatcagaaagttccactgcgagctggtgaacagcctgagcgtgaagagcgaggccctgagcctgcccaccgtgagagactggaccctggaggacagcagccaggagctgtggaagtag

SEQ ID NO: 263436 - DNA, 1464 bp, Artificial Sequence
  derived and/or modified sequence
atgtgccccaagggctacgaggacagcatggagttccccgaccacagcagacacctgctgcagtgcctgagcgagcagagacaccagggcttcctgtgcgactgcaccgtgctggtgggcgacgcccagttcagagcccacagagccgtgctggccagctgcagcatgtacttccacctgttctacaaggaccagctggacaagagagacatcgtgcacctgaacagcgacatcgtgaccgcccccgccttcgccctgctgctggagttcatgtacgagggcaagctgcagttcaaggacctgcccatcgaggacgtgctggccgccgccagctacctgcacatgtacgacatcgtgaaggtgtgcaagaagaagctgaaggagaaggccaccaccgaggccgacagcaccaagaaggaggaggacgccagcagctgcagcgacaaggtggagagcctgagcgacggcagcagccacatcgccggcgacctgcccagcgacgaggacgagggcgaggacgagaagctgaacatcctgcccagcaagagagacctggccgccgagcccggcaacatgtggatgagactgcccagcgacagcgccggcatcccccaggccggcggcgaggccgagccccacgccaccgccgccggcaagaccgtggccagcccctgcagcagcaccgagagcctgagccagagaagcgtgaccagcgtgagagacagcgccgacgtggactgcgtgctggacctgagcgtgaagagcagcctgagcggcgtggagaacctgaacagcagctacttcagcagccaggacgtgctgagaagcaacctggtgcaggtgaaggtggagaaggaggccagctgcgacgagagcgacgtgggcaccaacgactacgacatggagcacagcaccgtgaaggagagcgtgagcaccaacaacagagtgcagtacgagcccgcccacctggcccccctgagagaggacagcgtgctgagagagctggacagagaggacaaggccagcgacgacgagatgatgacccccgagagcgagagagtgcaggtggagggcggcatggagagcagcctgctgccctacgtgagcaacatcctgagccccgccggccagatcttcatgtgccccctgtgcaacaaggtgttccccagcccccacatcctgcagatccacctgagcacccacttcagagagcaggacggcatcagaagcaagcccgccgccgacgtgaacgtgcccacctgcagcctgtgcggcaagaccttcagctgcatgtacaccctgaagagacacgagagaacccacagcggcgagaagccctacacctgcacccagtgcggcaagagcttccagtacagccacaacctgagcagactgcaggtggtgagagcccaggtgcacgccgtgagaggccccgtgcagacccacagccaggtgcccctgtag

SEQ ID NO: 263437 - DNA, 1596 bp, Artificial Sequence
  derived and/or modified sequence
atgtgtcccaaggggtacgaggatagtatggaattcccagatcacagcagacacctattgcagtgcctctctgaacagagacaccagggattcctgtgcgactgtacagtgctggtcggagatgcccagtttcgggcacaccgtgccgtgctcgctagctgctccatgtatttccacctgttctacaaagaccagcttgataaaagggacattgtccatctcaacagtgatattgtgaccgccccggcctttgcacttctgcttgaattcatgtacgagggtaagctgcagttcaaggatctgccaatcgaagacgtattggctgcggcatcatacctgcacatgtacgatatcgtaaaggtgtgtaaaaagaaactcaaggaaaaggctacgactgaagccgatagcacgaagaaggaagaggatgccagcagctgctccgacaaagttgaatctctgtctgatgggtcaagccatattgccggcgaccttcctagtgacgaagatgagggcgaggatgagaagttaaacatcctccctagcaagcgcgacttagcagccgaaccggggaatatgtggatgcgacttccatctgattcagctggaattcctcaagcgggaggagaagccgaacctcacgccacggccgccggtaagacagtggcctcaccctgtagttcaaccgagtcccttagtcagagatctgtgacttcggttcgggacagcgccgatgtggactgcgtacttgacctgtccgtcaagtctagccttagcggcgtcgaaaaccttaactcttcgtactttagttcacaggatgtgctcaggagcaatctagtgcaggtcaaggtagagaaagaggcctcatgtgacgaaagcgacgtggggacaaacgactacgacatggagcattcaactgtgaaagaaagcgtttccactaacaacagggttcagtatgagcctgcacacttggcccccctgagagaagatagcgtgctccgggaactggacagagaagataaagcctctgacgacgaaatgatgacccccgaatccgagcgcgtccaggtggagggagggatggaatcttctttgttaccgtatgtgagcaacattctgagtccagcagggcagatcttcatgtgtccgctttgcaataaagtgttccctagccctcatatcctccaaatacacttaagcacacatttcagagagcaggatggtataagatctaagcctgccgctgacgtgaatgtccctacctgcagcctgtgcgggaagacgttcagctgtatgtatactttaaagagacacgagcgaactcactcaggcgaaaagccctacacctgtactcagtgcgggaaatcgttccaatactcccataacctttcgagacatgcggtggtgcacacacgggagaagcctcacgcgtgcaaatggtgtgagagaagattcacacagtcaggggatctatatcggcatattcgcaagtttcattgcgagctggtgaactccctaagtgtcaagtcagaggccctttctctgccaaccgtgcgggattggacgcttgaagattcatcacaggaactctggaagtag

SEQ ID NO: 263438 - DNA, 1464 bp, Artificial Sequence
  derived and/or modified sequence
atgtgcccaaaaggttacgaggattctatggaattccctgaccactcacgtcacctgctgcagtgtcttagcgaacaacggcaccaggggttcctgtgtgactgcactgtgctcgttggcgacgcacaatttagggctcacagagccgtcttagccagctgctcaatgtatttccatttgttttataaagatcaattagataaaagggacatcgtgcacctgaattctgacatagtaactgctcctgctttcgcattactcctggaattcatgtacgagggtaagctccagtttaaagatctgcctatcgaggatgtcctggctgccgcttcctacctgcacatgtacgacatcgtgaaggtgtgtaaaaaaaaattaaaggaaaaggctaccaccgaagccgattctacaaaaaaggaggaagacgcttcttcttgctcagacaaggtcgaatccctttcagatgggtcttcccacatcgccggagatctccccagcgatgaggacgagggcgaggacgagaagctcaacatactgccctctaagagggatctggcagcggaacctgggaacatgtggatgcggctccccagcgatagcgccggtatcccacaggccggtggagaggcggagccgcacgcaaccgccgccgggaaaacagtggcctcaccctgctctagtacagaatcgctatctcagcgctctgttacatctgtcagggattctgctgatgtagattgtgtgttggatttatctgtgaagtcatctctcagcggggtggagaatttgaacagcagttacttctcttcgcaagacgttctgaggagtaatcttgtgcaggttaaggttgagaaagaagcctcttgtgacgaatctgatgtcggaactaacgactatgacatggagcactcaacagtgaaagaatcggttagcaccaacaaccgcgtccagtacgaacccgcccacttagcccctctgagagaagactccgtactgagggagctcgaccgggaggataaagcctctgatgacgagatgatgacacccgaaagcgagcgcgtgcaggtggaaggcggcatggagagctccctgttgccgtacgtgagtaacatcctgtcaccagcgggccagatctttatgtgccccctgtgtaacaaggttttcccatccccacacatactgcaaattcatctgtcgacccacttcagggagcaagatggaattagaagtaagcccgccgccgacgtgaacgtgccaacctgttccctttgtggaaaaactttctcttgcatgtatacgctcaaacgacacgagcgcacccattccggggagaaaccttacacttgtactcaatgtgggaaatcctttcagtacagccataacctatcccgtctccaggtggtcagggctcaagtgcacgctgttcgtgggccagtccaaacgcactcccaggtgcccctttag

SEQ ID NO: 263439 - DNA, 1596 bp, Artificial Sequence
  derived and/or modified sequence
atgtgccccaagggctatgaagattccatggagttcccagaccacagccgccacctgctgcagtgcctgtctgagcagaggcaccagggcttcctgtgtgactgcaccgtgctggtgggagatgcccagttccgggcccacagagctgtgctggccagctgcagcatgtacttccacctgttctacaaggaccagctggacaagagggacatcgtgcacctgaacagcgacatcgtgacagccccagcctttgccctgctgctggagttcatgtatgagggcaagctgcagttcaaggacctgcccattgaagatgtgctggccgccgccagctacctgcacatgtatgacatcgtgaaggtgtgcaagaagaagctgaaggagaaggccaccacagaggccgacagcaccaagaaggaggaggatgccagcagctgcagcgacaaggtggagagcctgagtgatggcagcagccacatcgccggggacctgcccagtgatgaagatgaaggagaagatgagaagctgaacatcctgcccagcaagagggacctggccgctgagcccggcaacatgtggatgaggctgcccagcgacagcgctggcatcccccaggccggcggggaggccgagccccacgccacagctgctgggaagacagtggccagcccctgcagcagcacagagagcctgagccagaggtctgtgacctctgtgcgggacagcgcagatgtggactgtgtgctggacctgtctgtgaagagcagcctgagcggcgtggagaacctgaacagcagctacttcagcagccaggatgtgctgcggagcaacctggtgcaggtgaaggtggagaaggaggccagctgtgatgaaagtgatgtgggcaccaatgactatgacatggagcacagcacagtgaaggagagcgtgtccaccaacaacagagtgcagtatgagcccgcccacctggcccccctgcgggaggacagcgtgctgcgggagctggaccgggaggacaaggccagtgatgatgagatgatgaccccagagagcgagcgggtgcaggtggagggcggcatggagagcagcctgctgccctacgtgagcaacatcctgagccctgctggccagatcttcatgtgccccctgtgcaacaaggtgttccccagcccccacatcctgcagatccacctgagcacccacttccgggagcaggacggcatccgcagcaagccagctgctgatgtgaatgtgcccacctgcagcctgtgtgggaagaccttcagctgcatgtacaccctgaagagacatgagaggacccacagcggggagaagccctacacctgcacccagtgtgggaagagcttccagtacagccacaacctgagcagacatgctgtggtgcacacccgggagaagccccacgcctgcaagtggtgtgagcggcgcttcacccagagcggggacctgtaccgccacatcaggaagttccactgtgagctggtgaacagcctgtctgtgaagtctgaggccctgagcctgcccaccgtgcgggactggaccctggaggacagcagccaggagctgtggaagtag

SEQ ID NO: 263440 - DNA, 1464 bp, Artificial Sequence
  derived and/or modified sequence
atgtgccccaagggctatgaagattccatggagttcccagaccacagccgccacctgctgcagtgcctgtctgagcagaggcaccagggcttcctgtgtgactgcaccgtgctggtgggagatgcccagttccgggcccacagagctgtgctggccagctgcagcatgtacttccacctgttctacaaggaccagctggacaagagggacatcgtgcacctgaacagcgacatcgtgacagccccagcctttgccctgctgctggagttcatgtatgagggcaagctgcagttcaaggacctgcccattgaagatgtgctggccgccgccagctacctgcacatgtatgacatcgtgaaggtgtgcaagaagaagctgaaggagaaggccaccacagaggccgacagcaccaagaaggaggaggatgccagcagctgcagcgacaaggtggagagcctgagtgatggcagcagccacatcgccggggacctgcccagtgatgaagatgaaggagaagatgagaagctgaacatcctgcccagcaagagggacctggccgctgagcccggcaacatgtggatgaggctgcccagcgacagcgctggcatcccccaggccggcggggaggccgagccccacgccacagctgctgggaagacagtggccagcccctgcagcagcacagagagcctgagccagaggtctgtgacctctgtgcgggacagcgcagatgtggactgtgtgctggacctgtctgtgaagagcagcctgagcggcgtggagaacctgaacagcagctacttcagcagccaggatgtgctgcggagcaacctggtgcaggtgaaggtggagaaggaggccagctgtgatgaaagtgatgtgggcaccaatgactatgacatggagcacagcacagtgaaggagagcgtgtccaccaacaacagagtgcagtatgagcccgcccacctggcccccctgcgggaggacagcgtgctgcgggagctggaccgggaggacaaggccagtgatgatgagatgatgaccccagagagcgagcgggtgcaggtggagggcggcatggagagcagcctgctgccctacgtgagcaacatcctgagccctgctggccagatcttcatgtgccccctgtgcaacaaggtgttccccagcccccacatcctgcagatccacctgagcacccacttccgggagcaggacggcatccgcagcaagccagctgctgatgtgaatgtgcccacctgcagcctgtgtgggaagaccttcagctgcatgtacaccctgaagagacatgagaggacccacagcggggagaagccctacacctgcacccagtgtgggaagagcttccagtacagccacaacctgagccggctgcaggtggtgcgggcccaggtgcatgctgtgcggggccctgtgcagacccacagccaggtgcccctgtag

SEQ ID NO: 263441 - DNA, 1596 bp, Artificial Sequence
  derived and/or modified sequence
atgtgccccaagggctacgaggacagcatggagttccccgaccactccaggcacctgttgcaatgcctcagtgaacagcgacatcagggctttctgtgcgattgcacggtgttagtcggcgacgctcagtttagagcacaccgggctgtgcttgcctcttgcagcatgtactttcacttgttctacaaggaccagctggacaaaagagatattgttcacctcaacagtgacatcgttactgcacctgcctttgctttgctactggaattcatgtatgagggcaagttacagttcaaggatctgccgatcgaggacgttctcgctgccgcctcgtacctacatatgtatgacattgttaaagtgtgcaaaaaaaagctcaaagagaaggccacaaccgaggcagacagtactaagaaagaggaggatgcttcctcatgcagcgacaaggtggaatcactgagcgacggctcttcccacattgctggggacctcccatccgacgaggatgaaggcgaagacgagaagctgaatattctgcccagtaaacgcgatctcgcagcggagccaggaaacatgtggatgcgcctgccctcagacagtgccggaatccctcaagcaggcggagaggctgagcctcacgcaacggccgccggaaagacggtggcctccccctgttctagcacagagagcctctcgcagcgctcagttacttctgtgcgagatagcgcagatgtggactgtgtgcttgacttatctgttaagtcgagccttagtggagttgaaaatctgaattcctcgtacttctctagtcaagatgtactgcggtcaaacctggtacaggtgaaggtggagaaggaagcctcctgtgacgagagtgacgttggaaccaatgattacgatatggagcacagtaccgtgaaagaatctgtgtccacaaacaatcgagtgcagtatgagccagctcacctggcccctctgagagaggacagtgtacttcgcgagttagaccgagaggataaagcatccgatgacgagatgatgacacctgagagcgagcgcgtacaagtcgaaggaggaatggagagctctctgctaccctatgtgtctaatatcctgtctcccgcgggccaaatctttatgtgtcccctctgcaataaagtgttccctagcccacatattctccagattcacctgagcacacacttcagagaacaggatggcatcagatctaagccagcggcagacgtaaatgtgcccacatgcagcttatgtggtaagacgttttcatgcatgtataccctgaagagacacgagagaacacatagcggcgagaagccctatacttgtacgcagtgcgggaaaagtttccaatattcacataacctgagtcgtcacgccgtggttcacactcgcgagaaaccgcatgcgtgcaagtggtgcgagagacgattcacccagtcgggagacctatataggcacatacggaaattccactgtgagctggtgaattcgcttagcgtcaagagcgaggcgttgtccctccctaccgttagagattggactctggaagattcctcacaggagctctggaagtag

SEQ ID NO: 263442 - DNA, 1464 bp, Artificial Sequence
  derived and/or modified sequence
atgtgccccaagggctacgaggacagcatggagttccccgaccactcccgccatttgctccaatgcctgagcgagcagaggcaccagggttttctgtgtgactgcacagttctggtcggagacgctcaatttcgcgcccaccgggccgttcttgcttcctgcagtatgtatttccatctattctataaggatcagcttgataagagggacattgtccatctcaacagcgacattgttactgccccagctttcgcgctcctcctggagtttatgtacgaggggaagctccagttcaaggatttacctattgaggatgtgctggccgcagcctcatacctgcatatgtacgacatcgtcaaggtgtgtaaaaaaaagctgaaagagaaggccactacggaggccgactctacgaaaaaggaggaggatgccagcagttgtagcgataaagtagagagcctttcggacggatcgtctcatattgccggagatcttccttcagacgaggacgagggagaggacgaaaaactgaacatccttcccagcaagcgggacctagctgctgaaccgggtaatatgtggatgagactgccgtccgactctgcaggtattcctcaggctggcggagaagccgagccgcacgctactgccgccggcaagaccgtagcatctccctgctctagtacagagagtctcagccaacggtctgtgaccagtgtaagggattccgccgatgtggactgtgtactggatttgtcggttaagtcgtctctgagcggcgtggagaacttgaattctagttacttttcaagtcaggatgtcctgagatctaatttggtgcaggtgaaggtcgaaaaggaggcaagctgcgacgaaagtgacgtgggcaccaatgactacgacatggagcatagtacagtaaaggagtccgtgagcacaaacaacagagttcagtatgagcctgcccatctcgctccactccgtgaggactctgttcttagggaactggatagagaagataaggctagtgatgatgagatgatgaccccagaaagcgagagagtacaggttgaggggggcatggagagcagtctgctgccttatgtgagtaacatcctgtccccagcggggcaaatcttcatgtgccctctgtgtaataaggtcttcccgtccccgcacattcttcaaatccacctttcgacacattttcgagagcaggacggcatcagaagtaagccagccgctgacgtgaatgttcccacatgctctctgtgtggcaaaactttctcttgtatgtataccctgaagagacatgaacgaactcactctggggagaagccatatacctgcacacagtgcgggaaatcatttcagtatagccacaatctttcgagactccaggtcgttagagcccaagtccatgctgttcgaggccccgtgcaaacacactctcaggtgcccctctag

SEQ ID NO: 263443 - DNA, 1596 bp, Artificial Sequence
  derived and/or modified sequence
atgtgtcctaagggatacgaggattctatggaatttcctgatcattctaggcacctcctgcaatgcctgagcgagcaaaggcaccagggatttctctgcgactgtaccgtgctcgttggcgacgctcagtttagagctcacagagccgtgctggccagttgttccatgtactttcacctgttctataaggatcagctggacaagagggacatagtgcacctcaattctgacatcgtgacggcccctgccttcgcactcctcctcgagtttatgtatgagggcaagctgcagtttaaggaccttcccatcgaagatgtgcttgctgctgcgagttatctccacatgtatgatattgttaaagtctgtaagaaaaaactcaaagagaaggcaactacagaggctgattctactaagaaggaggaggacgcctcatcgtgttccgacaaagtcgagagcctctctgatggatcgagccatattgcgggtgatctgccatctgacgaagatgagggggaagatgaaaaactgaacatcctgccgtccaaaagagacctggcagctgagccgggtaatatgtggatgagattaccctccgacagcgccggaattccccaggccggaggcgaggctgaaccacacgccacagccgctggcaagacagtggccagcccctgctccagcactgagtctctcagccagagatctgtgactagtgtcagagatagcgccgacgtggattgtgtgttggacttgtctgtaaagtctagtctgtcgggcgtggagaatctgaacagcagctacttctcgtctcaggacgtactcaggagtaacctggtccaagtgaaggttgaaaaagaggctagctgtgacgagagtgatgtgggtactaacgattacgatatggaacactctaccgttaaagaaagtgtctcaaccaacaacagagtgcaatatgagcccgctcacttagcccctttgcgagaagactcagtactgcgggagctcgacagggaagataaagcgagcgacgatgaaatgatgacaccggagtcagaacgcgtgcaggtggagggaggtatggagagttcgttactgccttacgtgtccaatatcctttcaccggctggacagatcttcatgtgccccctttgcaacaaagttttccccagtccacatatcctccaaatccacctgtcaactcatttcagagaacaggacgggatcaggtcgaagccggctgctgacgtgaatgttcctacatgctctctgtgtggcaaaaccttctcctgtatgtataccctgaagcgacatgagaggacccacagtggggagaaaccatacacatgcactcagtgtggcaagtcctttcagtatagtcacaatctaagcaggcacgccgtggtgcacacgagagagaagccccacgcttgcaaatggtgtgaaaggagatttacgcagagtggcgacctgtataggcatatccggaaattccactgtgagctggtgaactccctctccgtgaaatctgaagcgctgtcactgccaactgttagagattggacgctggaggattcttcccaggaattatggaaatag

SEQ ID NO: 263444 - DNA, 1464 bp, Artificial Sequence
  derived and/or modified sequence
atgtgtcctaagggttatgaagactcaatggagtttccagaccactcccgccacctcctgcagtgcttatctgagcagcggcaccaaggattcctctgtgattgcacagtgctggtcggggatgcgcagtttagagcccaccgcgcagttctcgcctcatgtagcatgtatttccatcttttttataaagatcagctggataaaagggacatagtgcatctcaactccgatatcgttacagctcctgcattcgcccttttgctagaattcatgtacgagggcaagctgcagttcaaggatctccccattgaggacgtgcttgctgccgcatcttacctccacatgtatgacatcgttaaggtctgcaaaaaaaaactgaaggagaaggccacaaccgaggccgacagcaccaaaaaggaagaggacgcttcctcttgctctgacaaagtagagtctctgagtgatgggtcctctcatattgccggtgacctgccaagcgacgaggacgaaggggaagatgagaaactgaacatattacctagtaagcgagatctcgcagcggagcccggtaacatgtggatgagactgccatcagacagcgccggaattccccaggcgggtggggaagcagagcctcacgccacagctgccggtaagacggtggcgagtccttgtagcagcaccgagtctctgagtcagagatcagtgaccagcgtaagagacagcgccgacgttgactgcgtgctggatcttagcgtgaagagctcactgtcaggagtagaaaatctcaattcttcatacttttcttcacaggacgttctgagatcaaatttagtgcaggtgaaggtagagaaagaggcctcatgcgacgagagcgacgtgggcactaacgactatgacatggagcacagcacagtgaaagaaagcgtgtccacaaacaatagagtgcagtacgaaccagcgcatctggcccctctccgggaggactctgtgctgcgtgaactggacagagaggataaggcatccgatgatgagatgatgacccccgagtcagagcgcgtacaggtggaaggcggaatggagagcagcctactgccctatgtaagtaacatcttatcccccgcagggcagatatttatgtgccctctttgcaataaagtgttcccctctcctcatattcttcagatccatcttagtacacactttcgagaacaggatggaattagatcaaagccagctgcagacgtcaatgtacctacctgttctctctgtggtaagaccttttcttgcatgtatactttgaagagacacgaacgcactcatagtggagagaagccctacacctgcacccagtgcgggaagtccttccagtactctcacaatctgagtagacttcaagttgtgagggcccaggtccacgccgtaaggggcccagtgcagactcactcccaggtgcccctgtag

SEQ ID NO: 263445 - DNA, 3851 bp, Artificial Sequence
  derived and/or modified sequence
agtgtgtgcggatctgtggtggagaaggtatctcattcctctctaacatcatctccactttgcatctgtctctcttagtctgctttttttccaccgatgtaacagacctggagccagcaggactcagaggaaaggacttaatcaggtttatgtgtcctaaaggttatgaagacagtatggagtttccagaccatagtagacatttgctacagtgtctgagcgagcagagacaccagggttttctttgtgactgcactgttctggtgggagatgcccagttccgagcgcaccgagctgtactggcttcatgcagcatgtatttccacctcttttacaaggaccagctggacaaaagagacattgttcatctgaacagcgacattgttacagcccccgctttcgctctcctgcttgaattcatgtatgaagggaaactccagttcaaagacttgcccattgaagacgtgctagcagctgccagttatctccacatgtatgacattgtcaaagtctgcaaaaagaagctgaaagagaaagccaccacggaggcagacagcaccaaaaaggaagaagatgcttcaagttgttcggacaaagtcgagagtctctccgatggcagcagccacatagcaggcgatttgcccagtgatgaagatgaaggagaagatgaaaaattgaacatcctgcccagcaaaagggacttggcggccgagcctgggaacatgtggatgcgattgccctcagactcagcaggcatcccccaggctggcggagaggcagagccacacgccacagcagctggaaaaacagtagccagcccctgcagctcaacagagtctttgtcccagaggtctgtcacctccgtgagggattcggcagatgttgactgtgtgctggacctgtctgtcaagtccagcctttcaggagttgaaaatctgaacagctcttatttctcttcacaggacgtgctgagaagcaacctggtgcaggtgaaggtggagaaagaggcttcctgtgatgagagtgatgttggcactaatgactatgacatggaacatagcactgtgaaagaaagtgtgagcactaataacagggtacagtatgagccggcccatctggctcccctgagggaggactcggtcttgagggagctggaccgggaggacaaagccagtgatgatgagatgatgaccccagagagcgagcgtgtccaggtggagggaggcatggagagcagtctgctcccctacgtctccaacatcctgagccccgcgggccagatcttcatgtgccccctgtgcaacaaggtcttccccagcccccacatcctgcagatccacctgagcacgcacttccgcgagcaggacggcatccgcagcaagcccgccgccgatgtcaacgtgcccacgtgctcgctgtgtgggaagactttctcttgcatgtacaccctcaagcgccacgagaggactcactcgggggagaagccctacacatgcacccagtgcggcaagagcttccagtactcgcacaacctgagccgccatgccgtggtgcacacccgcgagaagccgcacgcctgcaagtggtgcgagcgcaggttcacgcagtccggggacctgtacagacacattcgcaagttccactgtgagttggtgaactccttgtcggtcaaaagcgaagcactgagcttgcctactgtcagagactggaccttagaagatagctctcaagaactttggaaataattttatatatatataaataatatatatatatatacatatatataaatagatctctatatagttgtggtacggtctaaaagcagtcttgtttcctggaaataaaaagttgggatattaacttgtttttgcactttagaatagcatgagaatctcactaatttagcattctgataaaagaaactttagagcaagtcagaatagagaggtgtttttcctttgaggggataggggaagtaagccaataagaaccttttaaacaaatcgtcctgtcacaaaatgctttcatatggcttaattttgtcaacactgcattgtcttttgagctcttttttcccccccaacaaagtttttttgttttttgtttttttttttaagtagaaattccctccagttttattagcctctttatatgtctcaaattgcatgaattttttctggctgttggaaacctgaatgcttttagacccaaatggaaaatttctgaaatgctggattatctatttttaaacaagcagttgacttaaaactttctgtggcaacttctggttttctgacagttcccagtgagagaaatgctgaaagtacactgggatcactgggacactgtcttatgaaggtttgcttgggatgaaaaaggatattgcagcttcagcagtgttgaactgtgtgtttaaaaatgtgaattactgttattgtatactgtaattgattacatgggctgggggggtgtcaaagaacttgacaggttgtgttgatgctcttagttgagtcttgaaaagtaaatattaacgctacagaaatgcatgagtttcaatatattttttgtctttgtttgcattgtataactttaacgagtgagtttaaaattatttaatttccttagaaaaataacaccatttggaaaaaaaaactggtgttatgaagaacgtaaatgcactgtttttatttttattttatataatttaaattgactttcccactgtctttaagttgaaactgttaagctgaataaaaacttaagctgcaaattgataacttcgctacataacaaggaaaatataaatgtttacaaacagcttaaagatttgcatgtgcagtgtgcatttataacaaacttctaattgcacaaaacccatgccagctcagagtttaggtgtacacatttacccagttgagcgttcttagaataactactgcacaagttgacaataggtcgttctctctttttttttgtttgctccctttttctttttctccccttcctccttaccctccctcccttactctccccccccaccaccaccctccacccccaactcatgaaaagattctatggactgaaaaagccccaggctgaaaggactggactgccttgattgacatggggaagggggttagtagactatgtggattgcggcagcagaggctgcagcctaacgtgtggttttaatgaccagcacgcaaggcaaaagcattttgcacagtgtttgttttcctgtcttgcacttacaaataaggtctatgggagtagcatggaaaacgtttgctgtttttcccttttttttttaattgcttttgtttaaaatttgatcgccttaactactgtaaacatagcctatttttgtgcttaagatactgaatggaaaactccattgtgtgttgctggactgttttggaaatatttggttaaatgtgtgttaatttggctgtaatggcatttaaagcaaacaaacaaacaaaaaaagctgtgaaaatggccttggagcattatctttagttacttgaagagtttctagtttttttaaaatacagtttatgttaaaataatttttattaatttagagaagacaatcaatgtctgtgagaaaacggactttcttttggattttctttttgtggtcattgtgagtgattgctttttccttttcttagtttcacattcttcctttgttctaaaacttagactgacatctagctttgacaatcatagtatgttttattttcctgagggggaataacttataatgctgtttagttttgtactattggtgtgttggtgaatttttaaactgtgtgctaactgcaataaattatatgaactgagaa

SEQ ID NO: 263446 - DNA, 2283 bp, Artificial Sequence
  derived and/or modified sequence
ttagtgtgtgcggatctgtggtggagaaggtatctcattcctctctaacatcatctccactttgcatctgtctctcttagtctgctttttttccaccgatgtaacagacctggagccagcaggactcagaggaaaggacttaatcaggtttatgtgtcctaaaggttatgaagacagtatggagtttccagaccatagtagacatttgctacagtgtctgagcgagcagagacaccagggttttctttgtgactgcactgttctggtgggagatgcccagttccgagcgcaccgagctgtactggcttcatgcagcatgtatttccacctcttttacaaggaccagctggacaaaagagacattgttcatctgaacagcgacattgttacagcccccgctttcgctctcctgcttgaattcatgtatgaagggaaactccagttcaaagacttgcccattgaagacgtgctagcagctgccagttatctccacatgtatgacattgtcaaagtctgcaaaaagaagctgaaagagaaagccaccacggaggcagacagcaccaaaaaggaagaagatgcttcaagttgttcggacaaagtcgagagtctctccgatggcagcagccacatagcaggcgatttgcccagtgatgaagatgaaggagaagatgaaaaattgaacatcctgcccagcaaaagggacttggcggccgagcctgggaacatgtggatgcgattgccctcagactcagcaggcatcccccaggctggcggagaggcagagccacacgccacagcagctggaaaaacagtagccagcccctgcagctcaacagagtctttgtcccagaggtctgtcacctccgtgagggattcggcagatgttgactgtgtgctggacctgtctgtcaagtccagcctttcaggagttgaaaatctgaacagctcttatttctcttcacaggacgtgctgagaagcaacctggtgcaggtgaaggtggagaaagaggcttcctgtgatgagagtgatgttggcactaatgactatgacatggaacatagcactgtgaaagaaagtgtgagcactaataacagggtacagtatgagccggcccatctggctcccctgagggaggactcggtcttgagggagctggaccgggaggacaaagccagtgatgatgagatgatgaccccagagagcgagcgtgtccaggtggagggaggcatggagagcagtctgctcccctacgtctccaacatcctgagccccgcgggccagatcttcatgtgccccctgtgcaacaaggtcttccccagcccccacatcctgcagatccacctgagcacgcacttccgcgagcaggacggcatccgcagcaagcccgccgccgatgtcaacgtgcccacgtgctcgctgtgtgggaagactttctcttgcatgtacaccctcaagcgccacgagaggactcactcgggggagaagccctacacatgcacccagtgcggcaagagcttccagtactcgcacaacctgagccgcctgcaagtggtgcgagcgcaggttcacgcagtccggggacctgtacagacacattcgcaagttccactgtgagttggtgaactccttgtcggtcaaaagcgaagcactgagcttgcctactgtcagagactggaccttagaagatagctctcaagaactttggaaataattttatatatatataaataatatatatatatatacatatatataaatagatctctatatagttgtggtacggtctaaaagcagtcttgtttcctggaaataaaaagttgggatattaacttgtttttgcactttagaatagcatgagaatctcactaatttagcattctgataaaagaaactttagagcaagtcagaatagagaggtgtttttcctttgaggggataggggaagtaagccaataagaaccttttaaacaaatcgtcctgtcacaaaatgctttcatatggcttaattttgtcaacactgcattgtcttttgagctcttttttcccccccaacaaagtttttttgttttttgtttttttttttaagtagaaattccctccagttttattagcctctttatatgtctcaaattgcatgaattttttctggctgttggaaacctgaatgcttttagacccaaatggaaaatttctgaaatgctggattatctatttttaaacaagcagttgacttaaaactttctgtggcaacttctggttttctgacagttcccagtgagaga

SEQ ID NO: 263447 - protein, 242 aa, Artificial Sequence
  derived and/or modified sequence
MTLDRPGEGATMLKTFTVLLFCIRMSLGMTSIVMDPQPELWIESNYPQAPWENITLWCRSPSRISSKFLLLKDKTQMTWIRPSHKTFQVSFLIGALTESNAGLYRCCYWKETGWSKPSKVLELEAPGQLPKPIFWIQAETPALPGCNVNILCHGWLQDLVFMLFKEGYAEPVDYQVPTGTMAIFSIDNLTPEDEGVYICRTHIQMLPTLWSEPSNPLKLVVAGGCGYGCWHLAIVVPGIMAG

SEQ ID NO: 263448 - DNA, 729 bp, Artificial Sequence
  derived and/or modified sequence
atgacattggacaggcccggcgaaggcgcgaccatgctaaagaccttcaccgtgctgctgttctgcattaggatgtcactcggcatgactagcatcgttatggatccacaacctgagctgtggatcgagtccaactatccacaggcaccctgggagaacatcacactttggtgtcgttccccctcaaggatctcatcgaagtttctcctgctgaaagacaaaacacagatgacctggattcgcccttcacacaagacctttcaggtgagtttcctcataggcgcgctaaccgaatcaaacgcaggcctttatcgctgctgctattggaaagaaaccggctggtcaaaaccttctaaggtactcgaactggaggctccaggacagctgcctaaacccatcttctggatccaggctgagactcccgcgctgcccgggtgtaacgtgaacattctctgtcacggttggctccaagatctagtgttcatgctgttcaaagaaggctatgctgagcccgttgactaccaagtccccaccggaactatggccatattctccattgacaacctcactccagaagacgagggggtttatatatgcaggactcatatccagatgttaccaaccctatggtctgagccatcaaacccactgaagctcgtcgtcgccgggggttgcggatacgggtgttggcacttggccattgtagtgcctggcattatggcaggctag

SEQ ID NO: 263449 - DNA, 729 bp, Artificial Sequence
  derived and/or modified sequence
atgaccctggatagaccaggcgaaggcgcgacaatgctgaaaactttcaccgtgctcttgttttgtattaggatgtccttgggaatgactagcattgtgatggaccctcagccggagctttggattgagtctaactacccgcaggctccctgggagaacatcactctttggtgccggtcaccctcacgaattagtagcaaattcctcttgcttaaagacaaaacacaaatgacctggattagaccctcacacaagacattccaggtgtcattcctgattggagcactcacggagtcaaatgcaggcctatacaggtgctgctactggaaggagaccggctggtcaaagccaagcaaagtgctcgagttagaagctcctggccaacttcctaagcctatcttttggattcaggctgaaacgccagcattacccggttgcaatgtgaacatcctctgccacggatggctgcaagatcttgtgtttatgctgttcaaagagggatatgccgaacctgtcgactatcaggtcccgactgggacaatggccattttttccattgataatctaacccccgaggatgagggcgtatatatctgccgcactcatatccagatgcttccgacactctggagtgaaccctctaacccattgaagctagttgtcgccgggggctgcggctacggctgttggcacttagccatagttgtgccgggtattatggccggatag

SEQ ID NO: 263450 - DNA, 1786 bp, Artificial Sequence
  derived and/or modified sequence
gcctttctcctttccttcccggatcccagacctgcctcgatcccaccacctgctgaggagaaaaattcttcaagactcagagcacacagccagcaccagaggccccatgaccctggacagaccaggggagggggccaccatgctgaagacattcactgttttgctcttttgcattcggatgagtctgggtatgacatcaatagtgatggaccctcaaccagagttgtggatagagtccaactacccccaggccccttgggagaacatcacgctttggtgccgaagcccctctcggatatcaagcaagttcctgctgctgaaggataagacacagatgacctggatccgcccttcccacaagaccttccaagtttcattccttataggtgcccttactgagtccaatgcaggtctttaccggtgctgctactggaaggagacaggctggtcaaagcccagtaaagttctagagttggaggcaccaggccaactgcccaagcccatcttctggattcaggctgagacccccgctcttcctgggtgtaatgttaacatcctctgccatggctggctgcaggatttggtattcatgctgtttaaagagggatatgcagagcctgtggattaccaagtcccaactgggacaatggccatattctccattgacaacctgacacctgaggatgaaggggtttacatctgccgcactcatatccagatgctccccaccctgtggtcagagcccagcaaccccctgaagctggttgtagcaggtgggtgtggctatggctgctggcatctggcaattgttgtcccaggtatcatggctggctgagctagggtttctgattttactttcctcagccagtttctaggccctgcaaggccccatgagctacagtcgtttgaagttttactgagatataaattagaatggcatgtgctgcaaggcagatgtatgggagccaatcatttggctagtaaaggagcccagccaactggccagcagcttcagctcatcacagctttgttgttctcaacttgttgaatatcatgcattcattcattaattcaaccagtatttattgagcacctaatatgtgccaggcactgccactgcaatcttataaatggagttttaaatttgcaaatgtattttatttgtaattgttatttttatgtgtggaaaacagaatggattgctagtgttggtgagtaaaaacaaaaaaaaacaaatgacaaagaatgtgatagctcatattttagaaatggctttataaatcaccttggttccctatcagtagagctagtaaggcagcaccaatctctaaatatagaagaaatttccccaaaatgtaaaatgccagacatgtcccagcccgaactcccccaccccatggcctggaggtttctagatggaattggccacatttgctttagtctctctatccagctaaataggcttggggaaagctgtggtgctacagaaagtaccctagacttagaagcagtaatactggtttctagttctatttctgacactgcctccctgtgtggtcttgagcaagtcacttcacttttctgtgctttggcttcctctactctaaaaatgggataacagtatctatctgatctactgtgtaatgcttctctctgtgcctcagcttcctgatctgcaaaattggtttaataataatgcctacctcacagggttgttgtgaggatttgcctaaatatatatgtacagtgcctggcatataagttctcaataaatggtagatattaa

SEQ ID NO: 263451 - DNA, 1820 bp, Artificial Sequence
  derived and/or modified sequence
atgccgggcagtttgctgcatctggaggagctcactggagaatctccaacatcggagcgggccttcaactaccatcccaccacctgctgaggagaaaaattcttcaagactcagagcacacagccagcaccagaggccccatgaccctggacagaccaggggagggggccaccatgctgaagacattcactgttttgctcttttgcattcggatgagtctgggtatgacatcaatagtgatggaccctcaaccagagttgtggatagagtccaactacccccaggccccttgggagaacatcacgctttggtgccgaagcccctctcggatatcaagcaagttcctgctgctgaaggataagacacagatgacctggatccgcccttcccacaagaccttccaagtttcattccttataggtgcccttactgagtccaatgcaggtctttaccggtgctgctactggaaggagacaggctggtcaaagcccagtaaagttctagagttggaggcaccaggccaactgcccaagcccatcttctggattcaggctgagacccccgctcttcctgggtgtaatgttaacatcctctgccatggctggctgcaggatttggtattcatgctgtttaaagagggatatgcagagcctgtggattaccaagtcccaactgggacaatggccatattctccattgacaacctgacacctgaggatgaaggggtttacatctgccgcactcatatccagatgctccccaccctgtggtcagagcccagcaaccccctgaagctggttgtagcaggtgggtgtggctatggctgctggcatctggcaattgttgtcccaggtatcatggctggctgagctagggtttctgattttactttcctcagccagtttctaggccctgcaaggccccatgagctacagtcgtttgaagttttactgagatataaattagaatggcatgtgctgcaaggcagatgtatgggagccaatcatttggctagtaaaggagcccagccaactggccagcagcttcagctcatcacagctttgttgttctcaacttgttgaatatcatgcattcattcattaattcaaccagtatttattgagcacctaatatgtgccaggcactgccactgcaatcttataaatggagttttaaatttgcaaatgtattttatttgtaattgttatttttatgtgtggaaaacagaatggattgctagtgttggtgagtaaaaacaaaaaaaaacaaatgacaaagaatgtgatagctcatattttagaaatggctttataaatcaccttggttccctatcagtagagctagtaaggcagcaccaatctctaaatatagaagaaatttccccaaaatgtaaaatgccagacatgtcccagcccgaactcccccaccccatggcctggaggtttctagatggaattggccacatttgctttagtctctctatccagctaaataggcttggggaaagctgtggtgctacagaaagtaccctagacttagaagcagtaatactggtttctagttctatttctgacactgcctccctgtgtggtcttgagcaagtcacttcacttttctgtgctttggcttcctctactctaaaaatgggataacagtatctatctgatctactgtgtaatgcttctctctgtgcctcagcttcctgatctgcaaaattggtttaataataatgcctacctcacagggttgttgtgaggatttgcctaaatatatatgtacagtgcctggcatataagttctcaataaatggtagatattaa

SEQ ID NO: 263452 - DNA, 729 bp, Artificial Sequence
  derived and/or modified sequence
atgaccctggacaggcctggagagggcgccaccatgctgaagaccttcaccgtgctgctcttctgcatccgcatgagcctgggcatgaccagcatcgtgatggacccccagcctgagctgtggattgagagcaactacccccaggccccctgggagaacatcaccctgtggtgccgcagccccagccgcatcagcagcaagttcctgctgctgaaggacaagacccagatgacctggatccggcccagccacaagaccttccaggtgtccttcctgattggagccctgacagagagcaatgccggcctgtaccgctgctgctactggaaggagaccggctggagcaagcccagcaaggtgctggagctggaggcccctggccagctgcccaagcccatcttctggatccaggccgagaccccagccctgcccggctgcaatgtgaacatcctgtgccacggctggctgcaggacctggtgttcatgctgttcaaggagggctatgcagagcctgtggactaccaggtgcccaccggcaccatggccatcttcagcattgacaacctgaccccagaagatgaaggagtgtacatctgcaggacccacatccagatgctgcccaccctgtggagcgagcccagcaaccccctgaagctggtggtggccggcggctgcggctacggctgctggcacctggccatcgtggtgcccggcatcatggccggctag

SEQ ID NO: 263453 - DNA, 729 bp, Artificial Sequence
  derived and/or modified sequence
atgaccctggaccggcccggcgagggcgccaccatgctgaagacctttactgtcctgttgttttgtattcgaatgtccttgggcatgacatctatcgtgatggatccccagccagaattatggatagagagtaattaccctcaggccccctgggaaaatatcacgctttggtgtagatcaccatcccggatcagctctaaattccttctcttgaaggataagacccagatgacctggatccgaccgtcgcataagaccttccaggtgtcttttcttattggagcactgacggagtctaatgccgggttatatcgctgctgctactggaaagaaacgggttggtcaaagccctccaaggtcttggagctcgaggcacccgggcagttaccaaagcctatcttctggattcaggcggagactccagccctccctggctgcaatgtaaatattctgtgccatgggtggctgcaggacctggtgttcatgctatttaaggagggctacgccgagccagtggactaccaggtccccaccggcacgatggcaatcttctccattgataatttgactcctgaggacgagggagtctatatctgcagaactcacatacagatgctccccacgttgtggtctgagccatcaaatcctctcaagttggttgtagcaggtggctgtggatatggctgttggcatctggccattgtggtcccaggtattatggcaggatag

SEQ ID NO: 263454 - DNA, 729 bp, Artificial Sequence
  derived and/or modified sequence
atgaccctggaccggcccggcgagggcgccaccatgctgaagaccttcaccgtcctgctgttctgcatcagaatgagtctcggcatgacctccattgtaatggatcctcagccagagctgtggatcgaaagtaactacccgcaggcaccttgggaaaacattaccctgtggtgccgatccccaagccggatcagctcaaaattcctgctgctcaaggataagacccaaatgacctggattagaccttctcacaaaacattccaagtgtcatttctgatcggggcccttaccgaatctaatgcaggtctgtacaggtgttgttattggaaagaaactggttggtcaaaaccttctaaggtgttggaactcgaagcaccagggcagctccccaagcctatcttttggatccaagctgagaccccggcactgcctggatgtaatgtaaacatactgtgccacggctggttacaggatttggtgtttatgctcttcaaggagggttatgctgagccggtcgattatcaagttccgacaggtacaatggcgatcttctccattgataatctgaccccggaggatgaaggcgtttacatctgtcggacgcatatccagatgcttcctactctatggtccgaaccatctaatcctttgaagctagtggtggctggcggatgtgggtacgggtgctggcatctggccattgttgtaccagggattatggcagggtag

SEQ ID NO: 263455 - DNA, 729 bp, Artificial Sequence
  derived and/or modified sequence
atgaccctggacaggcccggtgagggcgctaccatgctcaagacatttacagtgcttctgttttgtatcagaatgtcgctgggcatgacctctatcgtgatggatccacagccggaattatggattgaatctaactatcctcaggctccctgggagaacattaccctctggtgccgttccccctcccgaatctcgtcgaagtttctgttgctcaaggacaagactcagatgacatggatccggccaagtcacaaaacatttcaggtgtccttcctaatcggagctctcaccgagtcaaacgcaggcctgtaccggtgctgctattggaaggaaacaggttggtccaagcctagcaaggttttagaactggaagctcccggtcagttgccaaagcctatcttttggattcaggcagagaccccggcattacctggctgcaacgtaaatatcctttgccacggatggctgcaggacctggtgtttatgctgtttaaggagggctacgccgagcccgttgactaccaggtgcccactgggaccatggccatcttctccattgacaacttgaccccagaggacgagggcgtgtacatctgccggactcacatccagatgttgccaacactctggagcgaacctagcaatccgctgaaattagtggttgcagggggatgcggctatggctgttggcacctggccattgtggtccccggaataatggccggatag

SEQ ID NO: 263456 - DNA, 729 bp, Artificial Sequence
  derived and/or modified sequence
atgacactcgatcgacctggggagggggctaccatgctcaagacctttaccgtcctgctcttttgtataagaatgtcgctgggaatgacttcaattgttatggatccacaacccgaactgtggatcgagtccaactatcctcaggccccttgggagaatattacactgtggtgcagatcaccgagtcgaatcagtagcaagtttctgctgctgaaagacaaaactcaaatgacatggattcgccctagccataagactttccaggtgagttttctgatcggagccctgactgagtccaacgctggcctttacagatgctgttattggaaagaaacggggtggtccaaaccttctaaggttttagaactcgaggccccaggtcagctgccaaagcctatcttctggattcaagcagagacccccgcactgccaggttgcaacgtgaacatactgtgccatggctggctgcaggacctggtgttcatgctgttcaaagaggggtatgccgaacctgtggactaccaggtgcccaccgggactatggccattttcagcattgacaatctcacccctgaagacgagggcgtttacatatgcagaactcatatccaaatgctccccacgctgtggagcgagccatccaatccactaaaactggtagtggctggaggctgcgggtacgggtgctggcacctggccatcgtagttccgggaattatggctggatag

SEQ ID NO: 263457 - DNA, 729 bp, Artificial Sequence
  derived and/or modified sequence
atgaccctggacagacccggcgagggcgccaccatgctgaagaccttcaccgtgctgctgttctgcatcagaatgagcctgggcatgaccagcatcgtgatggacccccagcccgagctgtggatcgagagcaactacccccaggccccctgggagaacatcaccctgtggtgcagaagccccagcagaatcagcagcaagttcctgctgctgaaggacaagacccagatgacctggatcagacccagccacaagaccttccaggtgagcttcctgatcggcgccctgaccgagagcaacgccggcctgtacagatgctgctactggaaggagaccggctggagcaagcccagcaaggtgctggagctggaggcccccggccagctgcccaagcccatcttctggatccaggccgagacccccgccctgcccggctgcaacgtgaacatcctgtgccacggctggctgcaggacctggtgttcatgctgttcaaggagggctacgccgagcccgtggactaccaggtgcccaccggcaccatggccatcttcagcatcgacaacctgacccccgaggacgagggcgtgtacatctgcagaacccacatccagatgctgcccaccctgtggagcgagcccagcaaccccctgaagctggtggtggccggcggctgcggctacggctgctggcacctggccatcgtggtgcccggcatcatggccggctag

SEQ ID NO: 263458 - protein, 649 aa, Artificial Sequence
  derived and/or modified sequence
MQQDGLGVGTRNGSGKGRSVHPSWPWCAPRPLRYFGRDARARRAQTAAMALLAGGLSRGLGSHPAAAGRDAVVFVWLLLSTWCTAPARAIQVTVSNPYHVVILFQPVTLPCTYQMTSTPTQPIVIWKYKSFCRDRIADAFSPASVDNQLNAQLAAGNPGYNPYVECQDSVRTVRVVATKQGNAVTLGDYYQGRRITITGNADLTFDQTAWGDSGVYYCSVVSAQDLQGNNEAYAELIVLGRTSGVAELLPGFQAGPIEDWLFVVVVCLAAFLIFLLLGICWCQCCPHTCCCYVRCPCCPDKCCCPEALYAAGKAATSGVPSIYAPSTYAHLSPAKTPPPPAMIPMGPAYNGYPGGYPGDVDRSSSAGGQGSYVPLLRDTDSSVASEVRSGYRIQASQQDDSMRVLYYMEKELANFDPSRPGPPSGRVERAMSEVTSLHEDDWRSRPSRGPALTPIRDEEWGGHSPRSPRGWDQEPAREQAGGGWRARRPRARSVDALDDLTPPSTAESGSRSPTSNGGRSRAYMPPRSRSRDDLYDQDDSRDFPRSRDPHYDDFRSRERPPADPRSHHHRTRDPRDNGSRSGDLPYDGRLLEEAVRKKGSEERRRPHKEEEEEAYYPPAPPPYSETDSQASRERRLKKNLALSRESLVV

SEQ ID NO: 263459 - DNA, 1950 bp, Artificial Sequence
  derived and/or modified sequence
atgcaacaggatggcctgggtgtagggaccagaaatggcagtggtaagggtcggagcgttcatccaagctggccctggtgcgcacctcgtcccctacggtacttcggacgggacgctcgagctcgacgggctcagactgccgcaatggcccttctggccggaggtttgtctcgcggtctcggttcacatccagcggctgctggacgggacgcagtggttttcgtttggctgcttttgagtacctggtgcaccgctcctgctcgggcaatccaggtcaccgtctcaaacccataccatgtggtaattctctttcagccagttaccttgccctgtacttatcaaatgacgtctactcctacacagccaatcgtgatttggaagtacaagtcattctgcagggaccgcattgccgacgcattctctcctgcctcggtggataaccagctaaacgcccagcttgccgctggaaacccaggctataacccttacgtggaatgccaagactcagtgcggacggtgagagtggtcgctactaagcagggaaacgctgttacgctgggagattactaccaggggagaaggattacaatcacaggaaacgcagatctcacattcgaccagacagcctggggggactcaggcgtctattactgttctgtggttagtgcacaagacttgcagggcaacaacgaggcatatgccgaacttatcgttttggggaggacgtctggcgtggctgagctgctgcctggattccaagccggacccatagaggattggttattcgtggtcgttgtgtgtctggccgcattcctaattttccttttgctcggcatttgttggtgccagtgctgtcctcatacttgctgctgctatgtcagatgcccatgttgcccggataaatgttgctgtccggaggctctttacgccgcagggaaagccgcaaccagcggcgtcccctctatttacgcacccagcacctatgcccaccttagccctgccaagacgccaccgcctcccgctatgatccccatgggacccgcttataacggctacccaggcggatacccaggcgatgtggaccggtcttcgagcgctggagggcagggctcatatgtcccattactccgggacaccgacagcagtgttgcctctgaagtgagaagcggctacaggatacaggcatcccagcaagacgactctatgagggtactgtactatatggagaaagaactggcaaacttcgacccatcacgtccaggtccaccctcagggagagtagaacgcgctatgtccgaggtcaccagcctgcatgaagacgattggcgctcacggcctagccgtggccctgcccttacaccaattagggatgaggagtggggaggtcacagcccgagaagtccccgagggtgggaccaagaacccgctcgggagcaggccggtggcggatggagggctagaaggccccgagccagaagtgtggatgctctggatgacctaactccaccgtccaccgctgagagcgggagccgctccccgactagcaacgggggtagaagccgggcttatatgccccctcggagccgctctagagatgacctgtacgatcaggatgattctcgagatttcccaaggagccgcgaccctcactatgacgattttcggtccagggagcggccaccagccgatcctcgctcacaccaccatcggacgcgcgatccccgtgacaatggcagtagatcgggcgatctgccgtatgatggcagactgttggaggaagctgtcaggaagaagggctccgaggagaggaggaggccacataaggaggaagaagaggaggcttattatccccctgcgcctcccccatatagtgagaccgacagccaagcatcacgggagaggcgtttaaaaaagaatctggcactgtcccgagaatctctcgttgtgtag

SEQ ID NO: 263460 - DNA, 1950 bp, Artificial Sequence
  derived and/or modified sequence
atgcagcaggacggactcggagttggcacgcggaatgggtccggtaagggtagaagtgtgcatccttcatggccttggtgtgcacctagacctctcagatacttcggccgcgacgccagggccaggcgcgctcagactgcggcaatggccctgctggccggcggactctcgcgcggtctaggatctcatccagccgctgctggacgagatgccgtagttttcgtctggctccttcttagcacctggtgcactgcccctgccagagcaattcaagttaccgtctcaaacccctatcatgtagtgattctcttccagccagtcacactaccatgtacataccagatgaccagtactcccacccaacctatcgtgatatggaaatataaatccttctgcagggataggatcgccgacgccttctctcctgcgtccgtggataaccagcttaacgcacaactggccgcaggcaatcctgggtataatccatacgtagaatgtcaggacagtgttcggacagttcgagtagtcgccacaaagcaaggcaacgctgtgaccctgggtgattattaccaagggcggagaatcacaatcacaggaaacgctgatctaacctttgaccaaaccgcctggggcgattcaggtgtttattattgtagtgtggtcagtgcccaggatcttcaggggaacaatgaggcctatgctgaattgattgtccttggccgaacatctggcgtcgccgaacttctcccaggattccaagccggccccattgaggattggttattcgtggtcgtagtctgcttggctgcctttctgattttcctcttattgggcatttgctggtgccagtgctgcccacacacgtgttgctgctatgttcggtgcccttgttgtcccgataaatgctgctgccccgaggccctctacgcagcggggaaagccgcgacctcgggagttccaagcatttacgctccgtccacttacgcccacctctctcctgcaaagacgcccccccccccggctatgatccccatggggccagcctacaacgggtatccaggcggctatcccggggacgtagatcggtcaagtagcgccggaggacaaggcagttatgtccccttactacgagacactgacagctccgtggcaagcgaagtgcggtccggctatagaatacaggctagccagcaagatgattccatgagagtgctgtactatatggaaaaagaattggctaatttcgacccttctagacccgggccccctagtgggcgagtggagcgggcaatgtctgaggtgacgagcctccacgaggacgattggaggagtcggccatcacggggcccagcactgacaccaatccgtgacgaggaatggggaggccatagcccccgaagccctcgtggttgggatcaagaaccggcaagagagcaggccggagggggatggagagctcgcagaccccgcgctaggagtgtggatgctctcgatgacctgacgcccccttctacagctgaaagcggaagccggtctcccaccagtaatggggggcgaagcagggcctacatgcctcctcggtccaggtctcgggatgatttgtatgaccaggacgactcacgggacttccctagatctagggatccccattacgacgatttccgctctcgggaaaggccaccagccgaccccagaagtcaccatcaccgtaccagggatcccagagacaacgggtcccgctccggcgatctcccctatgatggtcgcctgctagaggaggcggtcaggaagaaggggtccgaggagcgaagaagaccacataaagaagaagaggaagaggcctattacccccctgcaccccctccttatagcgaaaccgatagtcaggcttcccgtgaacgaagactgaaaaagaatctggccctgtcacgcgaaagcctcgtggtctag

SEQ ID NO: 263461 - DNA, 1950 bp, Artificial Sequence
  derived and/or modified sequence
atgcaacaggacggccttggcgtgggtactagaaatggatctggaaaaggtagaagtgtgcacccctcctggccttggtgcgctcctcgtccactgcgttattttggaagagatgcaagagccagacgcgcccagactgccgcaatggccctgttggccggcggattaagcagaggtctcggatcacaccccgctgctgccggtcgggacgccgtggttttcgtttggctactgctgtctacttggtgtaccgcccccgcaagagccattcaggtgaccgtgagtaatccttaccacgtggtcatattgtttcaacctgttactctcccctgtacataccagatgacatcaacccccacacaacccatcgttatttggaagtataaaagtttttgtagagaccggatcgcggatgcgttctctccagcttctgtcgataatcagctgaacgcacagctggccgccgggaacccaggatataatccctatgttgaatgccaggatagtgttcgaaccgtcagagtggtagcgactaagcaggggaatgcagttacgctgggcgattactaccagggaagacggataaccattaccggcaacgccgatctgaccttcgatcaaacagcttggggagattcaggtgtgtattactgctccgtggttagcgcccaagatctgcagggaaacaacgaggcctacgccgagctcatagtcctgggtcgtacatctggtgtagccgaattattgccgggattccaggctggacccatcgaagactggctgtttgtggtcgtggtgtgtctggcagcctttctgatcttcttgcttctcggtatttgttggtgtcaatgctgtccccacacttgttgttgctacgtacgttgcccttgttgccctgataaatgttgctgcccagaggccttatatgctgccggcaaagctgcaacctcgggagtgccctcaatctacgctccttccacctacgcccacctgtccccagctaaaacccccccaccacctgccatgatccccatgggcccagcatacaatggttacccgggcggatatcctggggatgtcgacagatcttcgtcagcaggaggtcagggttcgtacgtgccattacttcgtgatacagattcaagcgtggcttcagaagtgaggtccggctacaggattcaggccagccaacaagatgactcaatgcgcgttttgtactatatggaaaaggaactggcgaacttcgacccatctcgccccggtccacctagcggaagagtcgaaagagcaatgtctgaggtgacttcactacatgaggatgattggcgcagcagacccagtcgagggccagcattgacacccattagagacgaggagtggggaggacattcaccacgatctccaaggggctgggatcaggaacccgcccgggaacaagcgggagggggctggagagctcgcagaccccgggccagatcagtggatgccttggatgatttgacaccaccgagtacagctgaatcaggcagtagatctcctacaagcaacggcggaagatcacgggcttatatgccaccccgttctcgcagccgggacgacctgtatgaccaggacgattcacgggatttccccagatccagagacccccactatgacgacttcagaagccgggaaaggcctccggccgaccctagatcacatcaccaccgcacccgggacccgagggacaacggatcacgaagcggagacttaccgtacgacggcagacttctggaggaggctgtccgcaaaaaaggcagcgaagagcgccgaaggcctcacaaagaagaagaagaggaggcatactatccacctgctcccccaccctattctgaaaccgacagtcaagccagccgcgagcgcagattaaaaaaaaacctggccttaagtcgtgaatccctagtcgtttag

SEQ ID NO: 263462 - DNA, 1950 bp, Artificial Sequence
  derived and/or modified sequence
atgcagcaggacggcctgggcgtgggcaccagaaacggcagcggcaagggcagaagcgtgcaccccagctggccctggtgcgcccccagacccctgagatacttcggcagagacgccagagccagaagagcccagaccgccgccatggccctgctggccggcggcctgagcagaggcctgggcagccaccccgccgccgccggcagagacgccgtggtgttcgtgtggctgctgctgagcacctggtgcaccgcccccgccagagccatccaggtgaccgtgagcaacccctaccacgtggtgatcctgttccagcccgtgaccctgccctgcacctaccagatgaccagcacccccacccagcccatcgtgatctggaagtacaagagcttctgcagagacagaatcgccgacgccttcagccccgccagcgtggacaaccagctgaacgcccagctggccgccggcaaccccggctacaacccctacgtggagtgccaggacagcgtgagaaccgtgagagtggtggccaccaagcagggcaacgccgtgaccctgggcgactactaccagggcagaagaatcaccatcaccggcaacgccgacctgaccttcgaccagaccgcctggggcgacagcggcgtgtactactgcagcgtggtgagcgcccaggacctgcagggcaacaacgaggcctacgccgagctgatcgtgctgggcagaaccagcggcgtggccgagctgctgcccggcttccaggccggccccatcgaggactggctgttcgtggtggtggtgtgcctggccgccttcctgatcttcctgctgctgggcatctgctggtgccagtgctgcccccacacctgctgctgctacgtgagatgcccctgctgccccgacaagtgctgctgccccgaggccctgtacgccgccggcaaggccgccaccagcggcgtgcccagcatctacgcccccagcacctacgcccacctgagccccgccaagaccccccccccccccgccatgatccccatgggccccgcctacaacggctaccccggcggctaccccggcgacgtggacagaagcagcagcgccggcggccagggcagctacgtgcccctgctgagagacaccgacagcagcgtggccagcgaggtgagaagcggctacagaatccaggccagccagcaggacgacagcatgagagtgctgtactacatggagaaggagctggccaacttcgaccccagcagacccggcccccccagcggcagagtggagagagccatgagcgaggtgaccagcctgcacgaggacgactggagaagcagacccagcagaggccccgccctgacccccatcagagacgaggagtggggcggccacagccccagaagccccagaggctgggaccaggagcccgccagagagcaggccggcggcggctggagagccagaagacccagagccagaagcgtggacgccctggacgacctgaccccccccagcaccgccgagagcggcagcagaagccccaccagcaacggcggcagaagcagagcctacatgccccccagaagcagaagcagagacgacctgtacgaccaggacgacagcagagacttccccagaagcagagacccccactacgacgacttcagaagcagagagagaccccccgccgaccccagaagccaccaccacagaaccagagaccccagagacaacggcagcagaagcggcgacctgccctacgacggcagactgctggaggaggccgtgagaaagaagggcagcgaggagagaagaagaccccacaaggaggaggaggaggaggcctactacccccccgccccccccccctacagcgagaccgacagccaggccagcagagagagaagactgaagaagaacctggccctgagcagagagagcctggtggtgtag

SEQ ID NO: 263463 - DNA, 1950 bp, Artificial Sequence
  derived and/or modified sequence
atgcagcaggacggcttaggggtcggaacacgtaatggcagtggtaaaggaaggagcgtgcatcctagttggccgtggtgcgcacctcggcccctgagatatttcgggcgcgacgcccgagctaggcgcgcacagacggccgcgatggctctgctagcaggaggattgagccgcggtctcggatctcacccggctgcagctggcagggacgcggtcgttttcgtgtggctccttctctccacctggtgtaccgctcctgctcgcgctattcaagtcacagtaagtaacccatatcacgtcgtgattctatttcagcctgtgaccttaccttgtacttaccagatgacatcaacacccacccagccgatcgtgatctggaaatacaagagtttctgccgagacagaatcgcagacgctttttcccctgcctcagtcgataatcaactcaacgcacaactggccgctggtaaccccgggtacaatccttacgtggaatgccaggattcagttcgcactgttcgcgtggtggcaactaagcagggtaatgcggtgactcttggcgactattaccaaggaagaaggattacgattacaggcaatgccgacctgacctttgatcagaccgcctggggggattctggcgtgtactattgctcggtagtgagtgcccaagacctacaggggaacaatgaggcatacgcagagctcattgttctgggtcgaacatccggggtggcggagctcttgccaggattccaggcagggcccatcgaggactggctgttcgtagtcgtggtttgtcttgccgccttccttatctttttgctgctgggaatctgctggtgtcagtgttgtccccatacgtgctgttgttacgttcgatgcccatgctgccctgacaaatgttgctgtccggaggccttgtatgcggccgggaaggcggcaacttcaggcgtgccttctatttatgcacctagcacgtatgcacatctgagcccggctaaaaccccccctcctcctgctatgattccaatggggcccgcatataacggatatcctggcggctatccaggcgacgtggatcgctcgtcctcagctgggggtcaaggctcttacgtcccactgctccgggacaccgattcttctgtcgcatccgaggtgaggagcggctaccggatccaagctagtcagcaggatgactcaatgagagtgttgtactatatggagaaggaactggccaacttcgaccccagcagacccggaccaccatcagggagagtggaacgggccatgtccgaggtcacatcactgcacgaagacgattggcggtcccgcccatcacggggtccagccctcacacccatccgcgacgaagagtgggggggacactcaccacggagccctagaggttgggatcaggagcccgcaagggagcaagctgggggtggatggcgcgccagacgcccacgggctaggagcgtagacgctctggatgacttaacccctccatcaactgctgagtccggctcacggtcaccaacttccaacggcgggaggtccagggcttatatgccacccagatccaggtccagggacgacctatacgaccaagatgactcccgggacttcccgaggtcgcgagacccacactatgacgactttagatcccgcgaaagacccccagcagacccaaggtctcatcatcaccggacaagagaccccagagataacgggtcaagaagtggagatctgccatatgatggccggcttctggaggaagccgtgaggaagaaggggtctgaggagcggcgccgtccgcataaggaggaggaggaggaagcctactatcctcctgcgccccccccttacagtgaaaccgattcgcaggcatcaagggaaaggaggttgaagaaaaacctggcactgagccgggagtcactggttgtctag

SEQ ID NO: 263464 - DNA, 2274 bp, Artificial Sequence
  derived and/or modified sequence
tcagcccacttccggggagggaggcagaggaacccctccccgccgctcacccctaagcccagccctcggctcccacccttgtgtacctgggccgaaccattcaccggagcgcgcagcgggtggagtgtggctcggaggaccgcggcgggtcaagcacctttctcccccatatctgaaagcatgccctttgtccacgtcgtttacgctcattaaaacttccagaatgcaacaggacggacttggagtagggacaaggaacggaagtgggaaggggaggagcgtgcacccctcctggccttggtgcgcgccgcgccccctaaggtactttggaagggacgcgcgggccagacgcgcccagacggccgcgatggcgctgttggccggcgggctctccagagggctgggctcccacccggccgccgcaggccgggacgcggtcgtcttcgtgtggcttctgcttagcacctggtgcacagctcctgccagggccatccaggtgaccgtgtccaacccctaccacgtggtgatcctcttccagcctgtgaccctgccctgtacctaccagatgacctcgacccccacgcaacccatcgtcatctggaagtacaagtctttctgccgggaccgcatcgccgatgccttctccccggccagcgtcgacaaccagctcaatgcccagctggcagccgggaacccaggctacaacccctacgttgagtgccaggacagcgtgcgcaccgtcagggtcgtggccaccaagcagggcaacgctgtgaccctgggagattactaccagggccggaggattaccatcaccggaaatgctgacctgacctttgaccagacggcgtggggggacagtggtgtgtattactgctccgtggtctcagcccaggacctccaggggaacaatgaggcctacgcagagctcatcgtccttgggaggacctcaggggtggctgagctcttacctggttttcaggcggggcccatagaagactggctcttcgtggttgtggtatgcctggctgccttcctcatcttcctcctcctgggcatctgctggtgccagtgctgcccgcacacttgctgctgctacgtcaggtgcccctgctgcccagacaagtgctgctgccccgaggccctgtatgccgccggcaaagcagccacctcaggtgttcccagcatttatgcccccagcacctatgcccacctgtctcccgccaagaccccacccccaccagctatgattcccatgggccctgcctacaacgggtaccctggaggataccctggagacgttgacaggagtagctcagctggtggccaaggctcctatgtacccctgcttcgggacacggacagcagtgtggcctctgaagtccgcagtggctacaggattcaggccagccagcaggacgactccatgcgggtcctgtactacatggagaaggagctggccaacttcgacccttctcgacctggcccccccagtggccgtgtggagcgggccatgagtgaagtcacctccctccacgaggacgactggcgatctcggccttcccggggccctgccctcaccccgatccgggatgaggagtggggtggccactccccccggagtcccaggggatgggaccaggagcccgccagggagcaggcaggcgggggctggcgggccaggcggccccgggcccgctccgtggacgccctggacgacctcaccccgccgagcaccgccgagtcagggagcaggtctcccacgagtaatggtgggagaagccgggcctacatgcccccgcggagccgcagccgggacgacctctatgaccaagacgactcgagggacttcccacgctcccgggacccccactacgacgacttcaggtctcgggagcgccctcctgccgaccccaggtcccaccaccaccgtacccgggaccctcgggacaacggctccaggtccggggacctcccctatgatgggcggctactggaggaggctgtgaggaagaaggggtcggaggagaggaggagaccccacaaggaggaggaggaagaggcctactacccgcccgcgccgcccccgtactcggagaccgactcgcaggcgtcccgagagcgcaggctcaagaagaacttggccctgagtcgggaaagtttagtcgtctgatctgacgttttctacgtagcttttgtatttttttttttaatttgaaggaacactgatgaagccctgccatacccctcccgagtctaataaaacgtataatc

SEQ ID NO: 263465 - DNA, 1950 bp, Artificial Sequence
  derived and/or modified sequence
atgcagcaggacggcctgggcgtgggcaccagaaatggcagcggcaagggccgctctgtgcaccccagctggccctggtgtgccccccggcccctgcgctacttcggcagagatgcccgggcccggcgggcccagacagctgccatggccctgctggccggcggcctgagccggggcctgggcagccaccctgctgctgctggaagagatgctgtggtgtttgtgtggctgctgctgagcacctggtgcacagccccagcccgggccatccaggtgacagtgagcaacccctaccacgtggtgatcctcttccagcctgtgaccctgccctgcacctaccagatgaccagcacccccacccagcccatcgtcatctggaagtacaagagcttctgccgggacagaattgctgatgccttcagccctgcctctgtggacaaccagctgaatgcccagctggccgccggcaaccctggctacaacccctacgtggagtgccaggacagcgtgaggacagtgcgggtggtggccaccaagcagggcaatgctgtgaccctgggggactactaccagggccgccgcatcaccatcactggaaatgctgacctgacctttgaccagacagcctggggagacagcggcgtgtactactgcagcgtggtgtctgcccaggacctgcagggcaacaatgaggcctatgcagagctgattgtgctgggccgcaccagcggcgtggccgagctgctgcccggcttccaggccggccccatcgaggactggctgtttgtggtggtggtgtgcctggccgccttcctgatcttcctgctgctgggcatctgctggtgccagtgctgcccccacacctgctgctgctacgtgcgctgcccctgctgcccagacaagtgctgctgcccagaggccctgtatgctgctgggaaggccgccaccagcggcgtgcccagcatctatgcccccagcacctacgcccacctgagccctgccaagaccccacctcctccagccatgatccccatgggccctgcctacaacggctacccaggcggctacccaggagatgtggacaggagcagcagcgctgggggccagggcagctatgtgcccctgctgcgggacacagacagctctgtggccagcgaggtgcgcagcggctaccgcatccaggccagccagcaggatgacagcatgagggtgctgtactacatggagaaggagctggccaactttgaccccagccggcccggcccccccagcggccgggtggagcgggccatgtctgaggtgaccagcctgcatgaagatgactggaggagccggcccagccggggccctgccctgacccccatcagagatgaggagtggggcggccacagccccaggagcccccggggctgggaccaggagcccgcccgggagcaggccggcggcggctggagggcccggcggccccgggcccggtctgtggatgccctggatgacctgaccccacccagcacagctgagagcggcagccgcagccccaccagcaatggaggccgcagccgggcctacatgccacccaggagccgcagcagagatgacctgtatgaccaggatgacagccgggacttccccaggagccgggacccccactatgatgacttccgcagccgggagcggcccccagctgaccccaggagccaccaccacaggacccgggacccccgggacaatggcagccgcagcggggacctgccctatgatggccgcctgctggaggaggccgtgaggaagaagggcagcgaggagcggcggcggccccacaaggaggaggaggaggaggcctactaccccccagcccccccaccctacagcgagacagacagccaggccagccgggagcggcggctgaagaagaacctggccctgagccgggagagcctggtggtgtag

SEQ ID NO: 263466 - DNA, 1950 bp, Artificial Sequence
  derived and/or modified sequence
atgcagcaggacggcctgggcgtgggcacccggaacggcagcggcaaagggaggagtgtgcatccatcttggccgtggtgtgcccctaggccgttgagatacttcgggcgggatgctagagcacgaagggcccagacagcagccatggccctactggctggaggactttccaggggactgggcagtcaccccgcagccgctgggcgggacgccgtggtgttcgtctggctgttattaagcacctggtgcacagcacccgctcgggctatccaggttacagtgtctaacccttatcatgtcgtgattctttttcagcctgttaccttaccctgcacttaccaaatgacttcaactccaacccagcctatcgtcatttggaagtataagtcattctgtcgggaccgcatcgccgacgccttctcacctgcttcagtggacaatcaactcaacgcacaactagccgccggcaaccctggctacaatccatatgtagagtgtcaggatagtgttcgcacagtaagggtggtagcgaccaagcaggggaacgctgtgacgctcggggattattatcagggcaggcgcatcaccattactggtaatgctgatttaacctttgaccagactgcttggggcgattccggcgtgtattattgtagcgtggtgagtgcacaggacctgcaaggaaataatgaagcctatgcagagctgatcgttctggggagaacgtccggcgttgccgagctgttacctggttttcaagctggaccaatcgaggactggctgttcgttgtcgtcgtctgcctggcggcttttctgatatttctgctcctgggcatctgttggtgccagtgctgcccccacacatgctgttgttacgtacgatgtccgtgttgcccggataaatgctgctgtcccgaagccttgtatgctgcagggaaagctgctactagcggcgtgcccagcatctatgccccttccacttatgcccatttaagcccagccaagaccccaccaccccccgctatgatccctatgggccctgcctacaatggctatcccgggggatatcccggtgatgtagataggtcatcaagcgctggtgggcaggggtcttatgtgcccctacttagagacaccgattccagcgtggcatccgaagtgcggagtgggtatagaatccaggcaagccagcaggacgattccatgcgagtgctttactatatggagaaagagctcgctaatttcgacccttccagacctggacctcctagcggtcgagtggaacgcgccatgtctgaggttaccagcttacatgaagatgattggcgtagcaggccgtccagggggccagctctgactcctatcagagacgaagaatggggcgggcactctcctaggagccctcgaggatgggatcaagagccagcaagggagcaggctggaggtgggtggcgggcaaggcgacccagagctaggagcgtcgacgctttagatgatcttacccctccgtcaacagctgagtcaggatcacgtagccctacatctaacggaggccgctccagagcctatatgcctccgaggtccagaagcagggatgacctgtatgaccaggatgacagtcgcgatttcccaagaagtcgcgatccccactacgacgactttaggtcacgggaaaggccgccggccgatccacgcagtcaccaccaccggacacgcgatccgcgggacaatggctctcggtccggagacttaccatacgacgggagactgctggaagaggctgtccgcaaaaaagggtcggaagaaaggagaaggccacacaaggaggaggaggaagaagcttactatccccccgcccctcccccatacagcgagactgactcacaagcctccagggaaaggcgactgaagaagaatctggccctgagtcgggagtcactggttgtgtag

SEQ ID NO: 263467 - RNA, 1950 nt, Artificial Sequence
  derived and/or modified sequence
augcagcaggacggacucggaguuggcacgcggaauggguccgguaaggguagaagugugcauccuucauggccuuggugugcaccuagaccucucagauacuucggccgcgacgccagggccaggcgcgcucagacugcggcaauggcccugcuggccggcggacucucgcgcggucuaggaucucauccagccgcugcuggacgagaugccguaguuuucgucuggcuccuucuuagcaccuggugcacugccccugccagagcaauucaaguuaccgucucaaaccccuaucauguagugauucucuuccagccagucacacuaccauguacauaccagaugaccaguacucccacccaaccuaucgugauauggaaauauaaauccuucugcagggauaggaucgccgacgccuucucuccugcguccguggauaaccagcuuaacgcacaacuggccgcaggcaauccuggguauaauccauacguagaaugucaggacaguguucggacaguucgaguagucgccacaaagcaaggcaacgcugugacccugggugauuauuaccaagggcggagaaucacaaucacaggaaacgcugaucuaaccuuugaccaaaccgccuggggcgauucagguguuuauuauuguaguguggucagugcccaggaucuucaggggaacaaugaggccuaugcugaauugauuguccuuggccgaacaucuggcgucgccgaacuucucccaggauuccaagccggccccauugaggauugguuauucguggucguagucugcuuggcugccuuucugauuuuccucuuauugggcauuugcuggugccagugcugcccacacacguguugcugcuauguucggugcccuuguugucccgauaaaugcugcugccccgaggcccucuacgcagcggggaaagccgcgaccucgggaguuccaagcauuuacgcuccguccacuuacgcccaccucucuccugcaaagacgcccccccccccggcuaugauccccauggggccagccuacaacggguauccaggcggcuaucccggggacguagaucggucaaguagcgccggaggacaaggcaguuauguccccuuacuacgagacacugacagcuccguggcaagcgaagugcgguccggcuauagaauacaggcuagccagcaagaugauuccaugagagugcuguacuauauggaaaaagaauuggcuaauuucgacccuucuagacccgggcccccuagugggcgaguggagcgggcaaugucugaggugacgagccuccacgaggacgauuggaggagucggccaucacggggcccagcacugacaccaauccgugacgaggaauggggaggccauagcccccgaagcccucgugguugggaucaagaaccggcaagagagcaggccggagggggauggagagcucgcagaccccgcgcuaggaguguggaugcucucgaugaccugacgcccccuucuacagcugaaagcggaagccggucucccaccaguaauggggggcgaagcagggccuacaugccuccucgguccaggucucgggaugauuuguaugaccaggacgacucacgggacuucccuagaucuagggauccccauuacgacgauuuccgcucucgggaaaggccaccagccgaccccagaagucaccaucaccguaccagggaucccagagacaacgggucccgcuccggcgaucuccccuaugauggucgccugcuagaggaggcggucaggaagaagggguccgaggagcgaagaagaccacauaaagaagaagaggaagaggccuauuaccccccugcacccccuccuuauagcgaaaccgauagucaggcuucccgugaacgaagacugaaaaagaaucuggcccugucacgcgaaagccucguggucuag

SEQ ID NO: 263468 - RNA, 1950 nt, Artificial Sequence
  derived and/or modified sequence
augcaacaggacggccuuggcguggguacuagaaauggaucuggaaaagguagaagugugcaccccuccuggccuuggugcgcuccucguccacugcguuauuuuggaagagaugcaagagccagacgcgcccagacugccgcaauggcccuguuggccggcggauuaagcagaggucucggaucacaccccgcugcugccggucgggacgccgugguuuucguuuggcuacugcugucuacuugguguaccgcccccgcaagagccauucaggugaccgugaguaauccuuaccacguggucauauuguuucaaccuguuacucuccccuguacauaccagaugacaucaacccccacacaacccaucguuauuuggaaguauaaaaguuuuuguagagaccggaucgcggaugcguucucuccagcuucugucgauaaucagcugaacgcacagcuggccgccgggaacccaggauauaaucccuauguugaaugccaggauaguguucgaaccgucagagugguagcgacuaagcaggggaaugcaguuacgcugggcgauuacuaccagggaagacggauaaccauuaccggcaacgccgaucugaccuucgaucaaacagcuuggggagauucagguguguauuacugcuccgugguuagcgcccaagaucugcagggaaacaacgaggccuacgccgagcucauaguccugggucguacaucugguguagccgaauuauugccgggauuccaggcuggacccaucgaagacuggcuguuuguggucguggugugucuggcagccuuucugaucuucuugcuucucgguauuuguuggugucaaugcuguccccacacuuguuguugcuacguacguugcccuuguugcccugauaaauguugcugcccagaggccuuauaugcugccggcaaagcugcaaccucgggagugcccucaaucuacgcuccuuccaccuacgcccaccuguccccagcuaaaacccccccaccaccugccaugauccccaugggcccagcauacaaugguuacccgggcggauauccuggggaugucgacagaucuucgucagcaggaggucaggguucguacgugccauuacuucgugauacagauucaagcguggcuucagaagugagguccggcuacaggauucaggccagccaacaagaugacucaaugcgcguuuuguacuauauggaaaaggaacuggcgaacuucgacccaucucgccccgguccaccuagcggaagagucgaaagagcaaugucugaggugacuucacuacaugaggaugauuggcgcagcagacccagucgagggccagcauugacacccauuagagacgaggaguggggaggacauucaccacgaucuccaaggggcugggaucaggaacccgcccgggaacaagcgggagggggcuggagagcucgcagaccccgggccagaucaguggaugccuuggaugauuugacaccaccgaguacagcugaaucaggcaguagaucuccuacaagcaacggcggaagaucacgggcuuauaugccaccccguucucgcagccgggacgaccuguaugaccaggacgauucacgggauuuccccagauccagagacccccacuaugacgacuucagaagccgggaaaggccuccggccgacccuagaucacaucaccaccgcacccgggacccgagggacaacggaucacgaagcggagacuuaccguacgacggcagacuucuggaggaggcuguccgcaaaaaaggcagcgaagagcgccgaaggccucacaaagaagaagaagaggaggcauacuauccaccugcucccccacccuauucugaaaccgacagucaagccagccgcgagcgcagauuaaaaaaaaaccuggccuuaagucgugaaucccuagucguuuag

SEQ ID NO: 263469 - protein, 581 aa, Artificial Sequence
  derived and/or modified sequence
MQQDGLGVGTRNGSGKGRSVHPSWPWCAPRPLRYFGRDARARRAQTAAMALLAGGLSRGLGSHPAAAGRDAVVFVWLLLSTWCTAPARAIQVTVSNPYHVVILFQPVTLPCTYQMTSTPTQPIVIWKYKSFCRDRIADAFSPASVDNQLNAQLAAGNPGYNPYVECQDSVRTVRVVATKQGNAVTLGDYYQGRRITITGNADLTFDQTAWGDSGVYYCSVVSAQDLQGNNEAYAELIVLVYAAGKAATSGVPSIYAPSTYAHLSPAKTPPPPAMIPMGPAYNGYPGGYPGDVDRSSSAGGQGSYVPLLRDTDSSVASEVRSGYRIQASQQDDSMRVLYYMEKELANFDPSRPGPPSGRVERAMSEVTSLHEDDWRSRPSRGPALTPIRDEEWGGHSPRSPRGWDQEPAREQAGGGWRARRPRARSVDALDDLTPPSTAESGSRSPTSNGGRSRAYMPPRSRSRDDLYDQDDSRDFPRSRDPHYDDFRSRERPPADPRSHHHRTRDPRDNGSRSGDLPYDGRLLEEAVRKKGSEERRRPHKEEEEEAYYPPAPPPYSETDSQASRERRLKKNLALSRESLVV

SEQ ID NO: 263470 - DNA, 1746 bp, Artificial Sequence
  derived and/or modified sequence
atgcagcaagacggcttgggagtcggtacacggaacggatccggcaagggacggtccgtgcacccatcttggccttggtgtgcacctagaccactgcgctatttcggccgagatgcccgtgcgaggagggcacagacagctgcaatggccttactcgcgggtggccttagcagagggctgggtagtcatccagcagctgcgggacgcgacgcagtcgtgtttgtctggctcctcctcagcacgtggtgcacggccccagcgagagccattcaggtgaccgtgagtaatccatatcacgttgtcattctattccaaccagtgactctcccctgcacgtaccagatgaccagcacaccaacacaaccaattgtcatctggaagtataaaagcttttgccgggatagaatcgctgacgctttcagccctgcttcagtggacaaccaactcaacgcacaactcgctgctggaaaccccggatacaacccctatgtcgaatgtcaggactctgtccggaccgttcgggtagtcgccaccaagcaaggaaacgcagttacgctcggagattactaccagggccgtaggatcactattacggggaatgcagacctaacctttgaccaaacggcttggggcgactccggcgtctattactgcagtgtggtctccgcacaggaccttcaaggaaacaatgaagcctatgcagagcttatagtcctggtgtacgcagcaggcaaagccgctacatctggcgttccttcgatttatgcaccctccacctatgcccatctttcacccgcaaagacaccgccaccacccgctatgatcccaatgggtcccgcatataacggctaccccggaggatatccaggagacgttgaccggagctccagcgcaggagggcaggggagctacgtgccacttttacgcgatactgactcatccgtagcttcagaggtgcgatccgggtaccgaattcaggcttcacaacaagacgactccatgcgagtgctgtattatatggaaaaggagctggccaattttgatccttcgagaccgggtcccccatccgggagagtggagagagctatgtccgaggtcacctccttacatgaggatgattggaggagtaggccatctcgcggtcctgctcttacccccatacgagacgaggagtggggcggtcacagccccaggtctccaagaggatgggatcaggaacccgcaagagaacaagctggcggaggatggagggctaggaggccacgtgctcgttctgtcgacgccctggatgacctcactcccccaagcaccgccgagtccggttcacggagcccgaccagcaacggtggccgtagtcgggcatacatgcccccacggtcaaggagcagggacgatttgtacgaccaggatgactcacgcgactttccacgatcacgcgacccccattacgacgattttaggagccgcgagaggcccccagcagatcctcgatcgcaccaccatagaacccgtgatccaagggacaatggcagcagaagcggagatctgccatacgacggcaggctgctggaggaggcggtgcggaagaagggatcggaagaacgtcgcagaccccacaaagaggaggaggaagaggcttactacccccctgcaccacctccctactcagaaactgattcccaggcatctcgggaaaggaggctgaagaaaaatcttgctctgtctagagagtctctggtggtgtag

SEQ ID NO: 263471 - DNA, 1746 bp, Artificial Sequence
  derived and/or modified sequence
atgcagcaggacggacttggagtcggcactcgcaacggttcaggaaaagggagaagcgtccatccctcttggccctggtgtgccccaagaccattgcgatacttcggccgtgatgctcgtgccaggagagcacagaccgccgcgatggctttattggctggtggcctatctagaggactgggctcccaccccgctgcagccggacgagacgcagtggtgttcgtctggcttctgctgtccacatggtgcaccgccccagcccgcgctatccaggtcaccgtgagcaatccttaccacgtcgtgatcctgttccaacctgttactttgccttgcacatatcagatgactagtacacccacgcagcctattgtgatctggaagtacaaatccttctgtagagatcgcattgccgacgcattttcaccagccagcgtggataaccagctcaacgcccagctggccgcggggaatcccggctacaatccttacgttgagtgccaggactccgtgagaaccgttagggtggtagcaaccaaacagggtaacgcagtaaccctgggggattactaccagggtcggagaattacaattaccggcaatgccgatctcaccttcgatcagacagcttggggtgatagtggtgtatactactgctccgtggtctccgcccaggacctccaagggaataacgaagcttatgccgagctgatcgtacttgtctacgcagccggcaaggctgcaaccagcggcgtcccaagcatttacgctccgtcgacctacgctcatctatccccggcgaagaccccccctccccccgcgatgatacctatggggcctgcctataacgggtacccgggcggctaccccggagacgtcgacaggagttcttccgctggcggccagggctcttatgtgcccctcttgagggacacagattcatcggtagctagtgaggtgagatccggttaccgtatacaagcttctcagcaggacgatagcatgcgggtgctgtattacatggagaaggaactcgcaaactttgacccaagtagacctggtcccccttcgggtcgagttgaaagggcaatgagcgaagtcaccagtctgcacgaggacgactggagaagccggccctctcggggcccggctcttacccccatcagagacgaggagtggggaggacattcccccaggtcccctagagggtgggaccaagagcctgccagggaacaggctggcggtggatggagggcccggagaccgagagcaaggagtgtcgatgctctcgatgatctcactcccccaagtacagctgaatctggctcccggagcccaactagcaacggcggcagatcgagggcctatatgccgccacgctctagatcccgggacgacctgtacgaccaggatgactcccgcgactttccccgatcccgagacccccactatgacgatttccggtccagggaacgcccgccagcagacccccgatcacatcatcacagaacacgagatccacgggacaatgggtctaggtcaggcgacctgccctatgacggccgtctacttgaagaggcagttcgcaagaagggatcagaggaacggagacggccccacaaggaggaagaagaggaggcttattacccccctgcccctccaccctatagcgaaacggattctcaggcttctcgcgaacggaggctgaaaaaaaacttagcactgtctagagagtcacttgtggtttag

SEQ ID NO: 263472 - DNA, 1746 bp, Artificial Sequence
  derived and/or modified sequence
atgcagcaggacggacttggagtcggcactcgcaacggttcaggaaaagggagaagcgtccatccctcttggccctggtgtgccccaagaccattgcgatacttcggccgtgatgctcgtgccaggagagcacagaccgccgcgatggctttattggctggtggcctatctagaggactgggctcccaccccgctgcagccggacgagacgcagtggtgttcgtctggcttctgctgtccacatggtgcaccgccccagcccgcgctatccaggtcaccgtgagcaatccttaccacgtcgtcatactgtttcaaccagtgacactaccatgcacctatcagatgaccagtactccaactcagcccatagttatctggaagtacaagagtttctgtagagatcgaatagccgatgcttttagcccagcctcagtggacaatcagcttaacgcccagctcgcagctggcaaccccggatacaacccctatgtggaatgccaagacagcgtgagaactgttagagtcgtggcaactaaacaaggaaatgctgtaacattaggcgattactaccaaggtcgccgcatcaccatcaccggaaacgcagacctaacatttgaccagacagcatggggagactctggtgtgtattattgctctgtcgtcagtgctcaggacctgcaggggaacaacgaagcatacgccgaactcatcgtgctggtatacgcagctggaaaggccgcaacttcaggtgtgcctagcatttatgctccttccacttacgcccacctgtctcccgccaaaacccctccaccaccagctatgataccgatgggcccagcctacaacgggtaccctggaggataccccggcgacgttgaccgcagcagctctgctggtgggcaaggctcttacgttccactgttgcgcgacacagattcaagtgtggccagtgaggtgaggagcggttatcggattcaggccagccagcaggatgactctatgcgcgtgctctactatatggaaaaagagcttgctaacttcgacccctcacgacctgggccccctagcggccgcgtagagcgagccatgtctgaggtgacttctttgcacgaggatgactggcggagtagaccttcacggggacctgcattaacccccatacgcgatgaagagtggggcggacattctcctagatctcccaggggatgggatcaggagcccgcccgagaacaggctggcggtggttggagagccagaagacctcgtgcgagatctgtcgacgctttagacgacctaactccaccttctactgccgaatcaggctcccgctccccaaccagtaatgggggccgctcaagggcgtatatgccgccacgcagtaggagccgcgacgatctctacgaccaagatgatagccgcgactttcccagatcacgcgacccacactacgacgacttccgatcaagggagagaccaccagcggatccacgaagtcaccaccatcgtacaagggatcctagggacaatggttctcgatccggcgatttgccctatgatggaaggttactggaggaagcagtgcggaaaaaaggctcagaggaaagaagacgccctcataaagaagaagaagaagaagcgtattatccgcccgcacctcccccttactctgaaaccgactcacaagccagtcgggagaggagactgaagaaaaatctggcccttagccgagaaagcctagtcgtttag

SEQ ID NO: 263473 - DNA, 1746 bp, Artificial Sequence
  derived and/or modified sequence
atgcagcaggacggcctgggcgtgggcaccagaaacggcagcggcaagggcagaagcgtgcaccccagctggccctggtgcgcccccagacccctgagatacttcggcagagacgccagagccagaagagcccagaccgccgccatggccctgctggccggcggcctgagcagaggcctgggcagccaccccgccgccgccggcagagacgccgtggtgttcgtgtggctgctgctgagcacctggtgcaccgcccccgccagagccatccaggtgaccgtgagcaacccctaccacgtggtgatcctgttccagcccgtgaccctgccctgcacctaccagatgaccagcacccccacccagcccatcgtgatctggaagtacaagagcttctgcagagacagaatcgccgacgccttcagccccgccagcgtggacaaccagctgaacgcccagctggccgccggcaaccccggctacaacccctacgtggagtgccaggacagcgtgagaaccgtgagagtggtggccaccaagcagggcaacgccgtgaccctgggcgactactaccagggcagaagaatcaccatcaccggcaacgccgacctgaccttcgaccagaccgcctggggcgacagcggcgtgtactactgcagcgtggtgagcgcccaggacctgcagggcaacaacgaggcctacgccgagctgatcgtgctggtgtacgccgccggcaaggccgccaccagcggcgtgcccagcatctacgcccccagcacctacgcccacctgagccccgccaagaccccccccccccccgccatgatccccatgggccccgcctacaacggctaccccggcggctaccccggcgacgtggacagaagcagcagcgccggcggccagggcagctacgtgcccctgctgagagacaccgacagcagcgtggccagcgaggtgagaagcggctacagaatccaggccagccagcaggacgacagcatgagagtgctgtactacatggagaaggagctggccaacttcgaccccagcagacccggcccccccagcggcagagtggagagagccatgagcgaggtgaccagcctgcacgaggacgactggagaagcagacccagcagaggccccgccctgacccccatcagagacgaggagtggggcggccacagccccagaagccccagaggctgggaccaggagcccgccagagagcaggccggcggcggctggagagccagaagacccagagccagaagcgtggacgccctggacgacctgaccccccccagcaccgccgagagcggcagcagaagccccaccagcaacggcggcagaagcagagcctacatgccccccagaagcagaagcagagacgacctgtacgaccaggacgacagcagagacttccccagaagcagagacccccactacgacgacttcagaagcagagagagaccccccgccgaccccagaagccaccaccacagaaccagagaccccagagacaacggcagcagaagcggcgacctgccctacgacggcagactgctggaggaggccgtgagaaagaagggcagcgaggagagaagaagaccccacaaggaggaggaggaggaggcctactacccccccgccccccccccctacagcgagaccgacagccaggccagcagagagagaagactgaagaagaacctggccctgagcagagagagcctggtggtgtag

SEQ ID NO: 263474 - DNA, 1746 bp, Artificial Sequence
  derived and/or modified sequence
atgcagcaggatggtctgggagtgggtactaggaacggctcaggcaaagggcgcagcgttcacccaagctggccatggtgcgctccacgtccactcagatatttcgggagagatgcgcgggccaggcgtgctcagactgccgccatggcgcttttggcaggggggctcagcagggggttaggaagccacccagctgctgccggcagagacgccgttgtatttgtgtggcttcttctctccacgtggtgcacagcgccagcaagagctatccaggttactgtgtccaatccttaccatgttgttatcctgtttcagcccgtcactctgccatgtacctatcaaatgacaagcacgcctacccagcctattgtgatatggaagtacaaatctttctgtagggaccgaatagccgacgccttttcacccgcctctgtagacaatcagttaaatgcccaattggccgcagggaacccaggatataatccgtacgtcgaatgtcaggactcggtaaggactgttcgcgtggtggccaccaaacagggtaatgctgtgacactcggagactactaccagggtaggaggatcacaataaccggaaacgctgatttgacatttgaccagacggcgtggggtgactcgggagtttactactgcagcgtagtttcagcccaggacctccagggcaataacgaggcttatgctgaactaatcgttctggtttatgcggccgggaaagccgctactagcggggttccgtctatctatgcaccttctacgtacgcccacttaagtccagccaaaacaccaccaccccccgccatgatccctatgggaccagcgtataatggttatcccgggggctaccctggagatgtggatcgcagtagctccgcgggcggccaggggtcttatgtaccacttcttcgagacaccgatagttcagttgcgagcgaggttagaagtggctatagaatacaggcatcccagcaagacgattctatgagggtgctctactatatggagaaggagcttgccaattttgacccgtctagaccgggccccccatccggccgtgtggaacgggcgatgagtgaagtgacgtcccttcacgaagatgattggagaagtagacctagtaggggcccggctttaacacccatccgagatgaagagtggggagggcactcgcccaggtctccaagaggatgggatcaggagccagcgcgggaacaggctgggggcgggtggcgcgcgagacggccccgtgccagaagtgtagatgcactggatgatctgactcctcccagcacggctgagtccgggtccaggtctccaacctctaatggaggtcggtctcgagcttatatgcctcctcggtccaggtctagggacgacctgtacgatcaggacgactcacgggactttccacgatccagggatccacactacgatgactttcgctcccgcgagcggccccccgccgatcctcgcagccatcatcaccgcacaagggacccaagggacaatggttccaggtcaggtgatcttccatacgacggacgtcttttagaagaggccgttcggaaaaaggggtccgaggagcgtcggcggcctcacaaagaagaagaggaggaagcctactatcctccagccccacctccatactccgagactgatagccaggcatcgagagaaagacggctgaaaaagaatttagcgttatcaagggagagcctggtggtgtag

SEQ ID NO: 263475 - DNA, 2070 bp, Artificial Sequence
  derived and/or modified sequence
tcagcccacttccggggagggaggcagaggaacccctccccgccgctcacccctaagcccagccctcggctcccacccttgtgtacctgggccgaaccattcaccggagcgcgcagcgggtggagtgtggctcggaggaccgcggcgggtcaagcacctttctcccccatatctgaaagcatgccctttgtccacgtcgtttacgctcattaaaacttccagaatgcaacaggacggacttggagtagggacaaggaacggaagtgggaaggggaggagcgtgcacccctcctggccttggtgcgcgccgcgccccctaaggtactttggaagggacgcgcgggccagacgcgcccagacggccgcgatggcgctgttggccggcgggctctccagagggctgggctcccacccggccgccgcaggccgggacgcggtcgtcttcgtgtggcttctgcttagcacctggtgcacagctcctgccagggccatccaggtgaccgtgtccaacccctaccacgtggtgatcctcttccagcctgtgaccctgccctgtacctaccagatgacctcgacccccacgcaacccatcgtcatctggaagtacaagtctttctgccgggaccgcatcgccgatgccttctccccggccagcgtcgacaaccagctcaatgcccagctggcagccgggaacccaggctacaacccctacgttgagtgccaggacagcgtgcgcaccgtcagggtcgtggccaccaagcagggcaacgctgtgaccctgggagattactaccagggccggaggattaccatcaccggaaatgctgacctgacctttgaccagacggcgtggggggacagtggtgtgtattactgctccgtggtctcagcccaggacctccaggggaacaatgaggcctacgcagagctcatcgtccttgtgtatgccgccggcaaagcagccacctcaggtgttcccagcatttatgcccccagcacctatgcccacctgtctcccgccaagaccccacccccaccagctatgattcccatgggccctgcctacaacgggtaccctggaggataccctggagacgttgacaggagtagctcagctggtggccaaggctcctatgtacccctgcttcgggacacggacagcagtgtggcctctgaagtccgcagtggctacaggattcaggccagccagcaggacgactccatgcgggtcctgtactacatggagaaggagctggccaacttcgacccttctcgacctggcccccccagtggccgtgtggagcgggccatgagtgaagtcacctccctccacgaggacgactggcgatctcggccttcccggggccctgccctcaccccgatccgggatgaggagtggggtggccactccccccggagtcccaggggatgggaccaggagcccgccagggagcaggcaggcgggggctggcgggccaggcggccccgggcccgctccgtggacgccctggacgacctcaccccgccgagcaccgccgagtcagggagcaggtctcccacgagtaatggtgggagaagccgggcctacatgcccccgcggagccgcagccgggacgacctctatgaccaagacgactcgagggacttcccacgctcccgggacccccactacgacgacttcaggtctcgggagcgccctcctgccgaccccaggtcccaccaccaccgtacccgggaccctcgggacaacggctccaggtccggggacctcccctatgatgggcggctactggaggaggctgtgaggaagaaggggtcggaggagaggaggagaccccacaaggaggaggaggaagaggcctactacccgcccgcgccgcccccgtactcggagaccgactcgcaggcgtcccgagagcgcaggctcaagaagaacttggccctgagtcgggaaagtttagtcgtctgatctgacgttttctacgtagcttttgtatttttttttttaatttgaaggaacactgatgaagccctgccatacccctcccgagtctaataaaacgtataatc

SEQ ID NO: 263476 - DNA, 1746 bp, Artificial Sequence
  derived and/or modified sequence
atgcagcaggacggcctgggcgtgggcaccagaaatggcagcggcaagggccgctctgtgcaccccagctggccctggtgtgccccccggcccctgcgctacttcggcagagatgcccgggcccggcgggcccagacagctgccatggccctgctggccggcggcctgagccggggcctgggcagccaccctgctgctgctggaagagatgctgtggtgtttgtgtggctgctgctgagcacctggtgcacagccccagcccgggccatccaggtgacagtgagcaacccctaccacgtggtgatcctcttccagcctgtgaccctgccctgcacctaccagatgaccagcacccccacccagcccatcgtcatctggaagtacaagagcttctgccgggacagaattgctgatgccttcagccctgcctctgtggacaaccagctgaatgcccagctggccgccggcaaccctggctacaacccctacgtggagtgccaggacagcgtgaggacagtgcgggtggtggccaccaagcagggcaatgctgtgaccctgggggactactaccagggccgccgcatcaccatcactggaaatgctgacctgacctttgaccagacagcctggggagacagcggcgtgtactactgcagcgtggtgtctgcccaggacctgcagggcaacaatgaggcctatgcagagctgattgtgctggtgtatgctgctgggaaggccgccaccagcggcgtgcccagcatctatgcccccagcacctacgcccacctgagccctgccaagaccccacctcctccagccatgatccccatgggccctgcctacaacggctacccaggcggctacccaggagatgtggacaggagcagcagcgctgggggccagggcagctatgtgcccctgctgcgggacacagacagctctgtggccagcgaggtgcgcagcggctaccgcatccaggccagccagcaggatgacagcatgagggtgctgtactacatggagaaggagctggccaactttgaccccagccggcccggcccccccagcggccgggtggagcgggccatgtctgaggtgaccagcctgcatgaagatgactggaggagccggcccagccggggccctgccctgacccccatcagagatgaggagtggggcggccacagccccaggagcccccggggctgggaccaggagcccgcccgggagcaggccggcggcggctggagggcccggcggccccgggcccggtctgtggatgccctggatgacctgaccccacccagcacagctgagagcggcagccgcagccccaccagcaatggaggccgcagccgggcctacatgccacccaggagccgcagcagagatgacctgtatgaccaggatgacagccgggacttccccaggagccgggacccccactatgatgacttccgcagccgggagcggcccccagctgaccccaggagccaccaccacaggacccgggacccccgggacaatggcagccgcagcggggacctgccctatgatggccgcctgctggaggaggccgtgaggaagaagggcagcgaggagcggcggcggccccacaaggaggaggaggaggaggcctactaccccccagcccccccaccctacagcgagacagacagccaggccagccgggagcggcggctgaagaagaacctggccctgagccgggagagcctggtggtgtag

SEQ ID NO: 263477 - DNA, 1746 bp, Artificial Sequence
  derived and/or modified sequence
atgcagcaggacggcctgggcgtgggcacccggaacggcagcggcaaagggcggagcgtgcacccctcttggccatggtgtgcgccccggcctttaagatacttcgggagagatgctagagcgcggcgcgcccagacagcggctatggctctacttgctggcggattgagtagagggctgggcagtcaccccgcagccgccggccgcgatgctgtagtatttgtttggttacttcttagcacttggtgcacagccccagctagggctatccaggtcacagtgtccaatccttaccacgtcgtgattctgttccagccagttacactcccgtgtacttatcagatgacaagtacgccgacccagcccatcgttatttggaagtacaagagtttctgtagggaccggattgccgatgcgttttctccagcttccgtggacaatcagctgaacgcccagctggccgccggtaatcctggctacaatccttacgtcgagtgccaggactctgtgagaacggttagggtggtagctaccaaacagggcaatgccgtcacgttaggagattactatcagggaaggaggatcacaataactgggaacgccgatttgacatttgatcaaaccgcctggggagacagcggtgtatactattgttccgtggtgtccgctcaagatttgcagggtaataatgaagcctatgcagagctgatcgtgctagtctacgccgctggtaaggccgccacttctggagtcccatccatatacgccccctctacctacgcacatctgtcgcctgcgaaaacccccccccctccagctatgattccaatgggtcctgcttataacggatatccgggcggctaccctggcgacgtggatcggtcttcttcggcgggaggccagggtagttatgtcccgctgttaagggacacagattcgtccgtcgcgtcagaggttcggtccggataccgaattcaggcctcacagcaggatgactcgatgcgagtgctgtactatatggaaaaggaactggctaattttgacccttctcgcccggggccacccagtggtagggtggaacgagcgatgagcgaggtgactagcctgcatgaggacgactggcgtagccgcccaagtcgtggaccagccctgacacctatccgcgatgaggagtgggggggccatagtccacgttcccccaggggttgggatcaggaacctgccagggagcaagctggcggcgggtggagagctcgcaggccccgcgctcgctctgtagatgcactggacgacctgactccacccagcacggctgaatctggcagtaggtctcctacaagcaatggtggcaggtctagggcttatatgccacctagatctaggtcccgggacgatctgtacgaccaagacgattctcgcgactttccccggagccgggatccacactacgatgactttaggtcaagagaacgaccccctgctgatcctcggagccaccatcatcgaactcgcgacccccgcgataatgggagccgctctggggacctcccttacgacgggcgcctgctggaggaagccgtgcgcaagaagggaagtgaggagcgccggcggccacataaagaggaggaggaggaagcctattacccccccgctccaccaccctatagtgagaccgactcccaagcatcccgtgaacgacggttaaagaagaacctggccctctcccgcgaaagtcttgttgtgtag

SEQ ID NO: 263478 - RNA, 1746 nt, Artificial Sequence
  derived and/or modified sequence
augcagcaggacggacuuggagucggcacucgcaacgguucaggaaaagggagaagcguccaucccucuuggcccuggugugccccaagaccauugcgauacuucggccgugaugcucgugccaggagagcacagaccgccgcgauggcuuuauuggcugguggccuaucuagaggacugggcucccaccccgcugcagccggacgagacgcagugguguucgucuggcuucugcuguccacauggugcaccgccccagcccgcgcuauccaggucaccgugagcaauccuuaccacgucgugauccuguuccaaccuguuacuuugccuugcacauaucagaugacuaguacacccacgcagccuauugugaucuggaaguacaaauccuucuguagagaucgcauugccgacgcauuuucaccagccagcguggauaaccagcucaacgcccagcuggccgcggggaaucccggcuacaauccuuacguugagugccaggacuccgugagaaccguuagggugguagcaaccaaacaggguaacgcaguaacccugggggauuacuaccagggucggagaauuacaauuaccggcaaugccgaucucaccuucgaucagacagcuuggggugauagugguguauacuacugcuccguggucuccgcccaggaccuccaagggaauaacgaagcuuaugccgagcugaucguacuugucuacgcagccggcaaggcugcaaccagcggcgucccaagcauuuacgcuccgucgaccuacgcucaucuauccccggcgaagacccccccuccccccgcgaugauaccuauggggccugccuauaacggguacccgggcggcuaccccggagacgucgacaggaguucuuccgcuggcggccagggcucuuaugugccccucuugagggacacagauucaucgguagcuagugaggugagauccgguuaccguauacaagcuucucagcaggacgauagcaugcgggugcuguauuacauggagaaggaacucgcaaacuuugacccaaguagaccuggucccccuucgggucgaguugaaagggcaaugagcgaagucaccagucugcacgaggacgacuggagaagccggcccucucggggcccggcucuuacccccaucagagacgaggaguggggaggacauucccccagguccccuagagggugggaccaagagccugccagggaacaggcuggcgguggauggagggcccggagaccgagagcaaggagugucgaugcucucgaugaucucacucccccaaguacagcugaaucuggcucccggagcccaacuagcaacggcggcagaucgagggccuauaugccgccacgcucuagaucccgggacgaccuguacgaccaggaugacucccgcgacuuuccccgaucccgagacccccacuaugacgauuuccgguccagggaacgcccgccagcagacccccgaucacaucaucacagaacacgagauccacgggacaaugggucuaggucaggcgaccugcccuaugacggccgucuacuugaagaggcaguucgcaagaagggaucagaggaacggagacggccccacaaggaggaagaagaggaggcuuauuaccccccugccccuccacccuauagcgaaacggauucucaggcuucucgcgaacggaggcugaaaaaaaacuuagcacugucuagagagucacuugugguuuag

SEQ ID NO: 263479 - RNA, 1746 nt, Artificial Sequence
  derived and/or modified sequence
augcagcaggacggacuuggagucggcacucgcaacgguucaggaaaagggagaagcguccaucccucuuggcccuggugugccccaagaccauugcgauacuucggccgugaugcucgugccaggagagcacagaccgccgcgauggcuuuauuggcugguggccuaucuagaggacugggcucccaccccgcugcagccggacgagacgcagugguguucgucuggcuucugcuguccacauggugcaccgccccagcccgcgcuauccaggucaccgugagcaauccuuaccacgucgucauacuguuucaaccagugacacuaccaugcaccuaucagaugaccaguacuccaacucagcccauaguuaucuggaaguacaagaguuucuguagagaucgaauagccgaugcuuuuagcccagccucaguggacaaucagcuuaacgcccagcucgcagcuggcaaccccggauacaaccccuauguggaaugccaagacagcgugagaacuguuagagucguggcaacuaaacaaggaaaugcuguaacauuaggcgauuacuaccaaggucgccgcaucaccaucaccggaaacgcagaccuaacauuugaccagacagcauggggagacucugguguguauuauugcucugucgucagugcucaggaccugcaggggaacaacgaagcauacgccgaacucaucgugcugguauacgcagcuggaaaggccgcaacuucaggugugccuagcauuuaugcuccuuccacuuacgcccaccugucucccgccaaaaccccuccaccaccagcuaugauaccgaugggcccagccuacaacggguacccuggaggauaccccggcgacguugaccgcagcagcucugcuggugggcaaggcucuuacguuccacuguugcgcgacacagauucaaguguggccagugaggugaggagcgguuaucggauucaggccagccagcaggaugacucuaugcgcgugcucuacuauauggaaaaagagcuugcuaacuucgaccccucacgaccugggcccccuagcggccgcguagagcgagccaugucugaggugacuucuuugcacgaggaugacuggcggaguagaccuucacggggaccugcauuaacccccauacgcgaugaagaguggggcggacauucuccuagaucucccaggggaugggaucaggagcccgcccgagaacaggcuggcggugguuggagagccagaagaccucgugcgagaucugucgacgcuuuagacgaccuaacuccaccuucuacugccgaaucaggcucccgcuccccaaccaguaaugggggccgcucaagggcguauaugccgccacgcaguaggagccgcgacgaucucuacgaccaagaugauagccgcgacuuucccagaucacgcgacccacacuacgacgacuuccgaucaagggagagaccaccagcggauccacgaagucaccaccaucguacaagggauccuagggacaaugguucucgauccggcgauuugcccuaugauggaagguuacuggaggaagcagugcggaaaaaaggcucagaggaaagaagacgcccucauaaagaagaagaagaagaagcguauuauccgcccgcaccucccccuuacucugaaaccgacucacaagccagucgggagaggagacugaagaaaaaucuggcccuuagccgagaaagccuagucguuuag

SEQ ID NO: 263480 - protein, 66 aa, Artificial Sequence
  derived and/or modified sequence
MLSRNDDICIYGGLGLGGLLLLAVVLLSACLCWLHRRAPSVLVPGPGLLRAGTPLCISAEAASAQQ

SEQ ID NO: 263481 - protein, 35 aa, Artificial Sequence
  derived and/or modified sequence
MLSRNDAPSVLVPGPGLLRAGTPLCISAEAASAQQ

SEQ ID NO: 263482 - DNA, 201 bp, Artificial Sequence
  derived and/or modified sequence
atgctcagcaggaacgatgacatctgtatatacggaggactaggcctcggggggctcctcctgctagccgtcgtactcctttccgcctgtttatgctggttgcatcggagagcaccaagtgtgctggtgcccggacccggccttctgagggccggaacacccctatgcatcagcgcagaagccgcgtccgcccaacaatag

SEQ ID NO: 263483 - DNA, 108 bp, Artificial Sequence
  derived and/or modified sequence
atgttaagccgaaatgatgcaccgtcggttctcgtcccgggcccggggctgctgagggccggcacacccttatgcatctccgccgaagccgcttcagcacagcaatag

SEQ ID NO: 263484 - DNA, 108 bp, Artificial Sequence
  derived and/or modified sequence
atgttatcacggaatgacgccccctctgtcctagttcccgggccgggcttgctaagagccggaactccactctgcatttcagctgaagccgccagtgctcagcagtag

SEQ ID NO: 263485 - DNA, 108 bp, Artificial Sequence
  derived and/or modified sequence
atgctttctaggaacgacgctcctagcgtcctggtcccaggtccagggctcttgcgcgccggaactccgctgtgtatttccgccgaagccgcatctgcccagcagtag

SEQ ID NO: 263486 - DNA, 201 bp, Artificial Sequence
  derived and/or modified sequence
atgctgagtagaaacgacgacatctgcatttatggcggactggggctgggcggtctcctcctgctggctgtggtgctcctgagcgcttgcttgtgttggcttcataggagggctccatcggtgcttgtgccaggcccaggcctgctcagggctggtacccctttgtgcatcagcgcagaggcagccagcgcccaacagtag

SEQ ID NO: 263487 - DNA, 108 bp, Artificial Sequence
  derived and/or modified sequence
atgcttagtcgaaacgatgccccatccgtcctcgtcccaggacccggcctgctccgcgctgggacccctttatgcatcagcgccgaggctgcgtccgcgcagcagtag

SEQ ID NO: 263488 - DNA, 201 bp, Artificial Sequence
  derived and/or modified sequence
atgctctctcgcaatgacgatatttgtatctatggcggcctgggcctgggcggtctcctgctcttagccgtggtcctgttgtctgcatgtctgtgttggctccatcgccgggccccctctgtgctggtccccggtccgggccttctgagagcagggacaccgctttgtataagcgcggaagcagcctctgcacaacagtag

SEQ ID NO: 263489 - DNA, 108 bp, Artificial Sequence
  derived and/or modified sequence
atgctttctcggaatgacgccccctccgtactagttcctggacccggattactgcgcgcagggacacctctgtgtatatctgctgaagctgccagcgctcaacagtag

SEQ ID NO: 263490 - DNA, 108 bp, Artificial Sequence
  derived and/or modified sequence
atgctatctcgtaatgacgcaccctccgtccttgttcctggtcctggtcttctgcgggcagggacccctctgtgtatctcggctgaggcggccagcgctcaacagtag

SEQ ID NO: 263491 - DNA, 201 bp, Artificial Sequence
  derived and/or modified sequence
atgctttcccggaacgacgacatttgcatctatggcgggctcggtcttggagggctgctgctgctggccgtggtgctgctaagcgcctgtttatgctggctgcacaggcgggccccctccgtgctcgtgcctggtcccggcctcctcagagccggcacacctctgtgtatatccgctgaggccgcgtcagcacaacagtag

SEQ ID NO: 263492 - DNA, 108 bp, Artificial Sequence
  derived and/or modified sequence
atgctctccaggaacgatgcgcccagcgtgctggtgccgggccctggattactccgggcaggtaccccactctgcatctcggctgaggccgcttccgcacaacaatag

SEQ ID NO: 263493 - DNA, 108 bp, Artificial Sequence
  derived and/or modified sequence
atgctgtcccggaatgatgcaccctccgttctagttcctggaccaggtctgctaagagcgggtactcccttgtgcatcagtgcagaggctgctagtgcgcagcagtag

SEQ ID NO: 263494 - DNA, 201 bp, Artificial Sequence
  derived and/or modified sequence
atgctcagtcgcaacgacgacatttgcatctacggcgggctagggttggggggcctcttgcttttggccgtcgttctgctgagtgcctgcctctgttggttgcacagacgggcaccatcagtcctcgtgcccggcccagggctactgcgcgccggtactcctctgtgtattagcgcagaagcagcctccgcgcaacagtag

SEQ ID NO: 263495 - DNA, 108 bp, Artificial Sequence
  derived and/or modified sequence
atgcttagccgtaacgacgccccatccgtacttgtgcccggcccaggcctactgagggctggaacaccactatgtatttctgctgaggccgcctccgcccaacagtag

SEQ ID NO: 263496 - DNA, 201 bp, Artificial Sequence
  derived and/or modified sequence
atgctaagtcggaatgatgacatctgcatttatggcggattaggtctaggtggactcttgttgctagctgtggtccttctttctgcatgcctatgctggctgcaccgccgagctccatctgtactggtgcccggacctggcctcctccgagcaggcactcctctctgcatttccgcagaagccgcttcggcccagcagtag

SEQ ID NO: 263497 - DNA, 201 bp, Artificial Sequence
  derived and/or modified sequence
atgctgagcaggaacgacgacatctgtatctacggcggtctggggctcggcggtcttttattattagccgtagtcctgttgtccgcttgcctgtgctggctacacagacgggcgccatccgttctggttcccggccccggcctcctaagagccggcacacccctgtgtatctctgcagaggccgccagtgcgcagcagtag

SEQ ID NO: 263498 - DNA, 201 bp, Artificial Sequence
  derived and/or modified sequence
atgctatcacggaatgacgatatctgtatctatggaggcctcggactgggcgggctgctccttcttgccgtcgtcttactgagtgcgtgcctgtgttggttgcatcggagagcaccaagtgtgctcgtccccggcccgggcctccttagagccggcactccactgtgcatctctgctgaggctgcctcggcccaacagtag

SEQ ID NO: 263499 - DNA, 108 bp, Artificial Sequence
  derived and/or modified sequence
atgttatcacgtaacgacgccccctccgtgttagtgcccggccccggccttctcagagctggcactccattatgcatctcagcagaggccgcgagcgcccagcagtag

SEQ ID NO: 263500 - DNA, 108 bp, Artificial Sequence
  derived and/or modified sequence
atgttgtcccggaacgacgctccatcagtcctagtcccaggccccgggttgctgcgggccggtactcctctctgtattagtgccgaggccgcctccgctcagcaatag

SEQ ID NO: 263501 - DNA, 108 bp, Artificial Sequence
  derived and/or modified sequence
atgctctcacggaatgacgccccctctgtgctcgtgcctgggcccggcctgttgcgggccggaacacctttatgcatctcagcagaggcggccagcgcacagcagtag

SEQ ID NO: 263502 - DNA, 108 bp, Artificial Sequence
  derived and/or modified sequence
atgctctctaggaacgacgcccccagtgtcctggtgcccggtcccgggctgctccgagcagggaccccactgtgcatcagtgctgaggcagcatctgcacagcagtag

SEQ ID NO: 263503 - DNA, 108 bp, Artificial Sequence
  derived and/or modified sequence
atgctctctaggaacgacgcaccaagcgttctcgttcctggaccaggccttctgcgggccggcacccccctgtgtataagtgcagaggcagccagtgctcagcagtag

SEQ ID NO: 263504 - DNA, 108 bp, Artificial Sequence
  derived and/or modified sequence
atgttgagcaggaacgacgcaccatcggttttggtgccaggccccggactattgagggcggggacacccttgtgtatcagcgcggaagctgcatctgcccagcagtag

SEQ ID NO: 263505 - DNA, 108 bp, Artificial Sequence
  derived and/or modified sequence
atgctgagcaggaacgatgctccgtcggtcctcgtccctggtcctgggttactgcgcgccggcactcccctttgtatcagtgcggaggctgccagcgcacagcaatag

SEQ ID NO: 263506 - DNA, 201 bp, Artificial Sequence
  derived and/or modified sequence
atgctgagcagaaatgatgacatctgcatctatggaggcctgggcctgggcggcctgctgctgctggccgtggtgctgctgagcgcctgcctgtgctggctgcaccggcgggcccccagcgtgctggtgcccggccctggcctgctgcgggccggcacccccctgtgcatctctgctgaggccgccagcgcccagcagtag

SEQ ID NO: 263507 - DNA, 108 bp, Artificial Sequence
  derived and/or modified sequence
atgctgagcagaaatgatgcccccagcgtgctggtgcccggccctggcctgctgcgggccggcacccccctgtgcatctctgctgaggccgccagcgcccagcagtag

SEQ ID NO: 263508 - DNA, 201 bp, Artificial Sequence
  derived and/or modified sequence
atgctgagccggaacgacgacatctgcatctacggcggcctgggcctcggaggtttgctcctactcgcagttgtgctgttgagcgcctgcctgtgctggctccatagaagagcccccagcgtgctggttcctggccccggcttgttgcgtgcaggcaccccattgtgtatttcggccgaggcagcaagcgcccagcaatag

SEQ ID NO: 263509 - DNA, 108 bp, Artificial Sequence
  derived and/or modified sequence
atgctgagccggaacgacgcccccagcgtgctggtgcccggccccggactgctgagagctggcaccccgctctgtattagcgcggaggctgcgagcgcgcagcaatag

SEQ ID NO: 263510 - DNA, 108 bp, Artificial Sequence
  derived and/or modified sequence
atgctgagccggaacgacgcccccagcgtgctggtgcccggccccggactattaagagcgggtacaccattgtgcatctcagcagaggcagcatccgctcagcaatag

SEQ ID NO: 263511 - DNA, 108 bp, Artificial Sequence
  derived and/or modified sequence
atgctgagccggaacgacgcccccagcgtgctggtgcccggccccggcctgttgcgtgctggcactcccctctgtatctctgccgaagctgccagtgcccagcagtag

SEQ ID NO: 263512 - DNA, 201 bp, Artificial Sequence
  derived and/or modified sequence
atgctgagccggaacgacgacatctgcatctacggcggcctgggcctcggcggattactgctgttggctgtggtgctcttgagcgcgtgtctttgctggctacaccgccgtgccccgagtgtgctggtcccaggccctggcctcttgagagcagggactccattgtgtatttctgccgaggcagcctctgctcaacagtag

SEQ ID NO: 263513 - DNA, 108 bp, Artificial Sequence
  derived and/or modified sequence
atgctgagccggaacgacgcccccagcgtgctggtgcccggccccggactgttacgggctggcacccccctctgcatctcggctgaggctgccagcgcccagcagtag

SEQ ID NO: 263514 - DNA, 201 bp, Artificial Sequence
  derived and/or modified sequence
atgctgagccggaacgacgacatctgcatctacggcggcctgggcctcggaggtttattgcttctggcggtcgtccttctgagcgcttgtctttgctggttacaccgaagagcaccctccgtgctggtgccaggtcccggtctcctccgggctggtactcccctctgtatttccgcagaggctgcatctgcccaacaatag

SEQ ID NO: 263515 - DNA, 108 bp, Artificial Sequence
  derived and/or modified sequence
atgctgagccggaacgacgcccccagcgtgctggtgcccggccccgggctgctcagagctggcacacccctgtgcatctcagctgaagcagcgtccgcccagcagtag

SEQ ID NO: 263516 - DNA, 108 bp, Artificial Sequence
  derived and/or modified sequence
atgctgagccggaacgacgcccccagcgtgctggtgcccggccccggtctcttgcgcgccggcaccccactgtgcatctctgcagaggctgcctccgcacagcagtag

SEQ ID NO: 263517 - DNA, 201 bp, Artificial Sequence
  derived and/or modified sequence
atgctgagccggaacgacgacatctgcatctacggcggcctgggcctggggggtcttctgctgctcgctgtcgtgcttttatccgcatgtctgtgctggttgcatcggcgtgctccctctgttcttgtgcctggccctggcctcctgagagctgggacccctttgtgcatctccgcggaagccgcttctgcccaacagtag

SEQ ID NO: 263518 - DNA, 108 bp, Artificial Sequence
  derived and/or modified sequence
atgctgagccggaacgacgcccccagcgtgctggtgcccggccccggactactgcgcgccggcactcccttgtgcatctctgctgaagcagcttccgctcagcagtag

SEQ ID NO: 263519 - DNA, 108 bp, Artificial Sequence
  derived and/or modified sequence
atgctgagccggaacgacgcccccagcgtgctggtgcccggccccggcttgttacgcgccggtacacccctgtgcatctccgctgaagcagcatcggcacagcagtag

SEQ ID NO: 263520 - DNA, 201 bp, Artificial Sequence
  derived and/or modified sequence
atgctgagccggaacgacgacatctgcatctacggcggcctgggcctgggaggactcctactgttggcagtggttcttctgtccgcctgtctttgttggctccacagaagggcgccttctgtgctggtgcccggtccaggtctactccgagctggtaccccactctgcatcagtgccgaggctgctagcgctcagcagtag

SEQ ID NO: 263521 - DNA, 108 bp, Artificial Sequence
  derived and/or modified sequence
atgctgagccggaacgacgcccccagcgtgctggtgcccggccccggtctgctgcgagccggaaccccactgtgtatttctgccgaggcggcatcagcccagcagtag

SEQ ID NO: 263522 - DNA, 201 bp, Artificial Sequence
  derived and/or modified sequence
atgctgagccggaacgacgacatctgcatctacggcggcctgggcctgggaggactcctgctactagctgtagtattgctatctgcttgtctgtgttggttacatcgaagagcaccttccgtgctcgtccccggtccgggactgctgcgggccggcactcctctatgcataagtgccgaggccgccagcgcacagcagtag

SEQ ID NO: 263523 - DNA, 201 bp, Artificial Sequence
  derived and/or modified sequence
atgctgagccggaacgacgacatctgcatctacggcggcctgggcctgggcggcctgctcctgcttgctgttgtgttattgtcggcctgcctctgttggttgcaccgtcgggccccctcagtattagtgcccggcccagggctgctccgtgctggcactcccttatgtatctctgccgaggccgccagtgcccagcagtag

SEQ ID NO: 263524 - DNA, 201 bp, Artificial Sequence
  derived and/or modified sequence
atgctgagccggaacgacgacatctgcatctacggcggcctgggcctgggtgggctcctcctgctagctgtcgtgctcctgtcagcttgcctgtgctggctccaccgccgcgcccctagtgttctcgttcccggacccggccttctgagagccggcactccactgtgtatatcggctgaagccgcttcggcacaacaatag

SEQ ID NO: 263525 - DNA, 108 bp, Artificial Sequence
  derived and/or modified sequence
atgctgagccggaacgacgcccccagcgtgctggtgcccggccccgggctcctaagggcaggcacccccttatgtatcagcgcagaggctgctagtgcacaacaatag

SEQ ID NO: 263526 - DNA, 108 bp, Artificial Sequence
  derived and/or modified sequence
atgctgagccggaacgacgcccccagcgtgctggtgcccggccccggacttctccgagccggcaccccgttatgcatcagcgcagaggctgcttcagcacaacaatag

SEQ ID NO: 263527 - DNA, 108 bp, Artificial Sequence
  derived and/or modified sequence
atgctgagccggaacgacgcccccagcgtgctggtgcccggccccggcctgctgcgtgcaggcactcctctgtgcattagcgccgaggcggcctccgcccagcagtag

SEQ ID NO: 263528 - DNA, 108 bp, Artificial Sequence
  derived and/or modified sequence
atgctgagccggaacgacgcccccagcgtgctggtgcccggccccggtctgctgcgggcggggactccattgtgtatttccgccgaggcagcctctgcccagcaatag

SEQ ID NO: 263529 - DNA, 108 bp, Artificial Sequence
  derived and/or modified sequence
atgctgagccggaacgacgcccccagcgtgctggtgcccggccccggactgcttcgggcaggcactcctctgtgtatctccgctgaagccgctagtgcccagcagtag

SEQ ID NO: 263530 - DNA, 108 bp, Artificial Sequence
  derived and/or modified sequence
atgctgagccggaacgacgcccccagcgtgctggtgcccggccccgggctgcttcgcgctgggacccccctatgcatcagcgccgaggctgccagcgcccagcagtag

SEQ ID NO: 263531 - DNA, 108 bp, Artificial Sequence
  derived and/or modified sequence
atgctgagccggaacgacgcccccagcgtgctggtgcccggccccgggttactaagagctgggacccctctgtgcatttccgccgaggccgcaagcgcgcagcagtag

SEQ ID NO: 263532 - DNA, 201 bp, Artificial Sequence
  derived and/or modified sequence
atgctctcacgcaacgatgatatctgtatctatggaggcttaggactgggcggattactgctgctcgccgtggtattgttgtctgcatgcctctgctggctccataggcgagcgccaagtgtcctggtgcccggacctggacttctacgggctgggacacccctatgtatttctgctgaagctgcttctgcccaacagtag

SEQ ID NO: 263533 - DNA, 108 bp, Artificial Sequence
  derived and/or modified sequence
atgcttagtcgaaatgacgctccttctgtcctagtgcctggtccaggcctgttgcgcgctggaacccctctgtgtatctctgcagaggcagcctccgctcagcagtag

SEQ ID NO: 263534 - DNA, 108 bp, Artificial Sequence
  derived and/or modified sequence
atgttatcccggaatgatgcaccgtctgtgctggtaccagggccaggactgctccgcgctggcacacctttatgcatttcggcagaagctgcttcagcccagcagtag

SEQ ID NO: 263535 - DNA, 108 bp, Artificial Sequence
  derived and/or modified sequence
atgctgtcccggaatgacgccccaagcgtgttagttcccggacccggactgctacgagccggaacacccttgtgcatttccgccgaggctgccagcgctcaacagtag

SEQ ID NO: 263536 - DNA, 201 bp, Artificial Sequence
  derived and/or modified sequence
atgcttagcagaaacgatgatatctgtatatacgggggtctcgggttaggtggtctactgttactcgcggtcgtcctgctgagcgcctgcctatgttggctgcaccggagagctccatccgtgttggtgccaggccctgggttgttacgtgctggcacacctctctgcatctccgctgaggcagcgtcagcgcagcagtag

SEQ ID NO: 263537 - DNA, 108 bp, Artificial Sequence
  derived and/or modified sequence
atgctgtcccgaaacgacgcgccaagcgtcttggtccccggtccgggattgctgagggctggaacgcctttgtgcatcagtgcggaagccgctagcgctcagcagtag

SEQ ID NO: 263538 - DNA, 201 bp, Artificial Sequence
  derived and/or modified sequence
atgttaagccgaaacgatgacatttgcatttacgggggactgggcctcggcggactcctgctcctggctgtggtgctgctttcagcatgcctttgctggctgcaccggagagcccctagtgtgctcgttccagggcctggactcctgagagctggaacgccgctctgtatcagcgccgaggctgcttctgctcaacagtag

SEQ ID NO: 263539 - DNA, 108 bp, Artificial Sequence
  derived and/or modified sequence
atgttgagccgcaacgatgcgccaagcgtcctggtgccaggcccaggactgctcagggcagggactcctttgtgcatcagcgcggaggccgcatctgcacagcagtag

SEQ ID NO: 263540 - DNA, 108 bp, Artificial Sequence
  derived and/or modified sequence
atgttgtctaggaatgatgccccttccgtgctagttccaggccctggtctgcttcgtgccggaactccactgtgtatatccgcagaagccgcatccgcacagcagtag

SEQ ID NO: 263541 - DNA, 201 bp, Artificial Sequence
  derived and/or modified sequence
atgctctcaaggaatgatgacatctgtatctacggagggctgggcctgggaggcctcctgctcctcgccgtggtcctcctcagtgcctgtttgtgctggttacaccgacgggctccatctgtgctcgttcccggacctggtttgttaagggctggaacaccactgtgcatcagcgccgaagctgcctccgcccagcaatag

SEQ ID NO: 263542 - DNA, 108 bp, Artificial Sequence
  derived and/or modified sequence
atgttgagccggaatgatgctccctccgttctcgttcctgggcctggcttgctgcgagctggcacaccactctgcatcagtgctgaagccgcttccgcccagcagtag

SEQ ID NO: 263543 - DNA, 108 bp, Artificial Sequence
  derived and/or modified sequence
atgctgtctcggaatgacgccccttccgtcctggttccaggacctggcctcctcagggccggaacacctttgtgcataagcgccgaggccgcatcagctcaacagtag

SEQ ID NO: 263544 - DNA, 201 bp, Artificial Sequence
  derived and/or modified sequence
atgttatctcggaacgatgatatctgcatctacggcggactaggactcggtggactgctattactggcagtggtgttgctgtccgcgtgcctatgttggctgcacaggcgggctccctcagtactggtaccgggaccgggactgctcagagcaggaacgcccttatgcatttctgcagaggctgcttctgcgcagcagtag

SEQ ID NO: 263545 - DNA, 108 bp, Artificial Sequence
  derived and/or modified sequence
atgttaagcagaaatgacgccccatcagtgctcgtacctggcccagggttgctccgagccggaactcccctctgcatttccgctgaagccgctagcgcccagcaatag

SEQ ID NO: 263546 - DNA, 201 bp, Artificial Sequence
  derived and/or modified sequence
atgttgagcagaaatgatgacatctgcatctatggcggacttggcctcgggggtctcctactactcgctgtcgtgttgctgagtgcttgcttgtgctggctgcaccggcgtgcccctagcgtacttgtgcctggtccgggtctcctccgcgctggcacccccctctgtatctccgctgaggcagctagcgcacagcagtag

SEQ ID NO: 263547 - DNA, 201 bp, Artificial Sequence
  derived and/or modified sequence
atgctctccagaaacgacgacatttgcatctatggtggtttaggactcggcggactactgttgctggcagtagtgctgttgtctgcgtgtctgtgttggctacatcggcgtgcaccttcggtcctggtaccaggcccaggcctgctcagagccggaacccccctctgtatctctgccgaggctgcaagcgcacaacagtag

SEQ ID NO: 263548 - DNA, 201 bp, Artificial Sequence
  derived and/or modified sequence
atgctcagcagaaacgatgatatttgcatctatgggggactaggcctgggcggtcttttgttgctggctgtcgtcctgctcagtgcttgcttatgttggctgcacagacgagcacctagcgttctggtgccgggaccaggcttgctaagggctggcacccccctgtgcatcagcgcagaagcagcctcagcccaacaatag

SEQ ID NO: 263549 - DNA, 108 bp, Artificial Sequence
  derived and/or modified sequence
atgcttagccgcaacgacgctccctccgttttagtgcctggacctgggctcctcagggcgggaacccctttgtgtatcagcgccgaagcagcctccgcacagcaatag

SEQ ID NO: 263550 - DNA, 108 bp, Artificial Sequence
  derived and/or modified sequence
atgttgagcagaaatgacgcaccctcagtgctagtgcctggtccaggtttgcttcgggctgggactcccctgtgtatatcggccgaggcagcctctgcacagcagtag

SEQ ID NO: 263551 - DNA, 108 bp, Artificial Sequence
  derived and/or modified sequence
atgctgagccgcaacgatgccccaagcgtgttggttcccggacctgggcttctgcgtgctggcacgccactgtgcatctccgctgaagcagccagtgcacaacagtag

SEQ ID NO: 263552 - DNA, 108 bp, Artificial Sequence
  derived and/or modified sequence
atgttgagccgcaacgacgctccttccgtgttggttcccggacccggactgctgcgagccggaactcccctatgcatttcagcagaggccgcatccgcacagcagtag

SEQ ID NO: 263553 - DNA, 108 bp, Artificial Sequence
  derived and/or modified sequence
atgctgagtagaaacgacgcaccatctgtcctggtgccgggacccggtctgctgagagccggtacacctctgtgcatttcagccgaggccgcttcagctcaacagtag

SEQ ID NO: 263554 - DNA, 108 bp, Artificial Sequence
  derived and/or modified sequence
atgctcagccgaaacgacgcacctagcgtattggtgccagggcctgggctgcttcgcgcagggacccccctatgtatatctgccgaggctgcctctgcacagcagtag

SEQ ID NO: 263555 - DNA, 108 bp, Artificial Sequence
  derived and/or modified sequence
atgctgtccaggaacgatgctccgtctgtgttagtgcctggtcctgggctactgagagccggaactcccctgtgtatcagcgcagaagctgcctccgctcagcagtag

SEQ ID NO: 263556 - DNA, 201 bp, Artificial Sequence
  derived and/or modified sequence
atgctgagcagaaacgacgacatctgcatctacggcggcctgggcctgggcggcctgctgctgctggccgtggtgctgctgagcgcctgcctgtgctggctgcacagaagagcccccagcgtgctggtgcccggccccggcctgctgagagccggcacccccctgtgcatcagcgccgaggccgccagcgcccagcagtag

SEQ ID NO: 263557 - DNA, 108 bp, Artificial Sequence
  derived and/or modified sequence
atgctgagcagaaacgacgcccccagcgtgctggtgcccggccccggcctgctgagagccggcacccccctgtgcatcagcgccgaggccgccagcgcccagcagtag

SEQ ID NO: 263558 - protein, 66 aa, Artificial Sequence
  derived and/or modified sequence
MLSRNDVKRLERSWAQGSSEQELHYASLQRLPVPSSEGPDLRGRDKRGTKEDPRADYACIAENKPT

SEQ ID NO: 263559 - protein, 51 aa, Artificial Sequence
  derived and/or modified sequence
MLSRNDVKRLERSWRLPVPSSEGPDLRGRDKRGTKEDPRADYACIAENKPT

SEQ ID NO: 263560 - DNA, 201 bp, Artificial Sequence
  derived and/or modified sequence
atgctgtcacggaacgacgtgaagcgcctcgagcgcagctgggcacagggttcatccgagcaggaactgcattatgctagtcttcagcgcctgccagtgccatcctcagaaggccccgatcttaggggacgggacaaaaggggcaccaaggaagacccaagagcagactatgcatgtatcgcagagaacaagcccacatag

SEQ ID NO: 263561 - DNA, 156 bp, Artificial Sequence
  derived and/or modified sequence
atgctgagtcggaacgacgtcaagaggctcgaacggagctggcggctgcccgtcccttcctctgagggccccgatctgcgcggcagagacaaacgaggcaccaaagaagacccaagagcagattacgcctgcatcgccgaaaataagcctacttag

SEQ ID NO: 263562 - DNA, 201 bp, Artificial Sequence
  derived and/or modified sequence
atgcttagccgcaatgatgtcaaacggttggagcgaagttgggcccagggctctagcgagcaagagttacattacgcgtcactgcaaagacttccagtgccaagctctgagggcccagacctgcggggacgcgacaaaagggggaccaaagaggatcccagggctgactatgcctgcatcgctgagaacaagcctacctag

SEQ ID NO: 263563 - DNA, 201 bp, Artificial Sequence
  derived and/or modified sequence
atgttgtcgagaaatgatgttaagaggctggaacgctcctgggctcagggctcatcagagcaggaactgcattatgccagtctgcagcgactgcccgtccccagcagcgagggcccggatttgcgaggcagagataagaggggaacgaaggaagatcctagggctgattacgcttgcattgccgagaataaaccaacctag

SEQ ID NO: 263564 - DNA, 201 bp, Artificial Sequence
  derived and/or modified sequence
atgcttagcaggaatgacgtgaagcggctggagagatcctgggcacagggatctagtgaacaggaactgcattacgccagcctgcagcgtctgcctgtgcccagcagcgaaggtcctgacctccggggcagagacaagcggggaacgaaagaggaccctcgggccgattatgcttgcatcgccgaaaacaaacccacctag

SEQ ID NO: 263565 - DNA, 156 bp, Artificial Sequence
  derived and/or modified sequence
atgctgtcccggaatgatgtgaaaaggctggaaagaagttggaggcttcccgttccctctagtgagggacccgacctaagaggacgcgacaaaaggggtacaaaggaagatcctagagcagattatgcctgtattgccgagaacaaaccaacttag

SEQ ID NO: 263566 - DNA, 201 bp, Artificial Sequence
  derived and/or modified sequence
atgctctcccgtaatgatgtgaaacggctagagcgatcttgggctcaggggtcttccgagcaggaactacactacgcctccctacagcgcctgcctgtgccatcctctgaaggacccgacctgcggggcagagataaaaggggtaccaaagaggaccctagagcagactacgcttgcatcgccgaaaacaaacccacctag

SEQ ID NO: 263567 - DNA, 156 bp, Artificial Sequence
  derived and/or modified sequence
atgctgtctaggaacgatgtcaagaggctggaacggagttggcgactgcccgtgccctcttcagaaggccccgacctgcgaggcagggacaaacgggggaccaaggaggatcccagagcagattacgcctgtatcgctgagaataagcctacctag

SEQ ID NO: 263568 - DNA, 201 bp, Artificial Sequence
  derived and/or modified sequence
atgttatccagaaacgacgtgaaacggctcgagagatcttgggctcagggatcctctgaacaagagctccattatgcaagtctacagaggctgccagtcccctcttccgaagggccggaccttcgcgggcgcgacaagcgcggtacaaaggaggaccctcgtgcagattatgcctgcattgctgagaataagccgacatag

SEQ ID NO: 263569 - DNA, 201 bp, Artificial Sequence
  derived and/or modified sequence
atgctgtctcgaaatgacgtgaagagactggaaagaagctgggctcaggggtcttctgagcaggaactgcactacgctagcctgcaacggctccccgtgccatccagcgagggtcccgatctgagaggcagagacaagagagggacaaaggaggatcccagagctgattatgcttgcatcgccgaaaataagcctacttag

SEQ ID NO: 263570 - DNA, 201 bp, Artificial Sequence
  derived and/or modified sequence
atgctgtctcgtaacgacgtgaaaaggctggagcgttcatgggcccaaggttcctctgagcaggaactccattatgcaagcctgcagcgtctgcctgtcccaagttccgagggaccagaccttcgagggcgcgacaagagaggcactaaggaggaccctcgggctgattatgcgtgcattgccgagaataaacctacttag

SEQ ID NO: 263571 - DNA, 156 bp, Artificial Sequence
  derived and/or modified sequence
atgttgagccgaaatgatgttaaaaggctcgagcggagttggagactgcccgtgcctagcagcgaaggacccgaccttcgggggcgggacaaaagggggactaaggaagacccaagggctgactacgcttgtatcgcagaaaataaacccacttag

SEQ ID NO: 263572 - DNA, 201 bp, Artificial Sequence
  derived and/or modified sequence
atgttaagccgaaatgacgtcaaaaggttggaaaggtcctgggcacagggtagtagcgaacaggaactgcactacgctagcctccagaggctgcccgtcccgagctctgaaggccctgaccttcggggcagagataaacggggcacaaaagaagacccacgggccgattatgcatgcatcgccgaaaataaacctacctag

SEQ ID NO: 263573 - DNA, 156 bp, Artificial Sequence
  derived and/or modified sequence
atgctgagccgcaatgacgtgaaacgcctggaacgcagttggcggctgcctgttccctcatccgagggacccgatctgcgggggcgggataaaagaggaaccaaagaagatccccgcgcagactacgcctgcatcgccgaaaataagcctacatag

SEQ ID NO: 263574 - DNA, 201 bp, Artificial Sequence
  derived and/or modified sequence
atgctgtcgcgtaatgacgtgaaacgactggagcgctcctgggctcagggctcaagtgagcaagaactgcactacgcatcactgcagcgactgcccgtgccaagctcagaggggcctgatctgcgtggacgcgacaagcgcgggaccaaggaggaccctcgcgccgactacgcttgtattgcagaaaataaaccgacctag

SEQ ID NO: 263575 - DNA, 201 bp, Artificial Sequence
  derived and/or modified sequence
atgctatcccgaaatgacgtaaagaggctggagcgttcttgggcccagggcagctccgagcaggagctgcactacgccagcttgcagcgcctaccagtaccatccagcgagggccctgaccttcgtggtcgagacaaacgcgggacaaaagaggatccacgggcggattatgcgtgtatcgctgaaaataaacctacctag

SEQ ID NO: 263576 - DNA, 201 bp, Artificial Sequence
  derived and/or modified sequence
atgctatctagaaacgacgtcaagagactggagcgatcctgggcccaaggcagttccgagcaagagctacattatgcttcattgcagaggcttccagtgccttcaagtgagggacccgatttgagaggccgagataaaaggggcaccaaggaagatcctagggctgattatgcatgcattgctgaaaataagccgacttag

SEQ ID NO: 263577 - DNA, 201 bp, Artificial Sequence
  derived and/or modified sequence
atgctaagtaggaatgatgtgaagaggctggaaaggtcctgggctcaaggctcaagcgagcaggaactgcactatgcctccctgcagcggctacctgtgccaagcagtgaagggcctgaccttcgagggcgcgataagagaggaactaaagaggatccccgagcggactatgcctgcatcgctgagaacaagcctacctag

SEQ ID NO: 263578 - DNA, 201 bp, Artificial Sequence
  derived and/or modified sequence
atgctaagcaggaacgacgtgaagcggctcgaaaggagctgggcccaaggctcttctgaacaagagctccattacgcttcactacagcgactgccagtaccctcgtccgaaggccccgatttgagaggccgggataaacgcggcactaaagaggatcctcgcgcagactatgcttgtatcgccgagaacaagcccacctag

SEQ ID NO: 263579 - DNA, 201 bp, Artificial Sequence
  derived and/or modified sequence
atgctctcaaggaacgatgttaagcgccttgaaaggtcgtgggcacaagggtcttctgagcaagagcttcattatgcttcccttcagaggctgcccgtccccagcagcgagggaccagatctgcgtgggagagacaaacgagggacaaaggaggaccccagagcggattatgcatgcatagcagagaacaagcctacctag

SEQ ID NO: 263580 - DNA, 156 bp, Artificial Sequence
  derived and/or modified sequence
atgttgagtcggaatgacgtaaaaagactggaaaggtcttggagattgcccgtcccgtcatccgagggtcctgatctccgcggccgcgacaagaggggcacaaaagaagacccacgcgccgactacgcgtgcatagctgagaataaaccaacctag

SEQ ID NO: 263581 - DNA, 156 bp, Artificial Sequence
  derived and/or modified sequence
atgctgtctagaaatgacgtgaaacgccttgagagaagctggcgattgcccgtgcccagttccgaggggccggaccttagaggcagggacaagcgcggtaccaaagaagacccaagagccgactacgcatgcatcgccgaaaataagcccacctag

SEQ ID NO: 263582 - DNA, 201 bp, Artificial Sequence
  derived and/or modified sequence
atgcttagtagaaacgatgtcaaacgtctggaaaggtcatgggcccagggcagctccgagcaggaactgcattacgcgtcattacagcgattgcccgtccctagcagcgaaggtccagacttgagaggccgcgacaagcgcggcaccaaagaggacccaagggccgactacgcatgtatagcagaaaataaacctacttag

SEQ ID NO: 263583 - DNA, 201 bp, Artificial Sequence
  derived and/or modified sequence
atgctatctagaaacgacgtgaaaagactggaacggtcttgggctcagggaagcagcgagcaagaactgcactacgcgagcttacagagactacctgtgccatcctcagaggggccggacctccggggacgagataagcgggggaccaaagaggacccaagagccgattacgcgtgtatagccgagaataagcccacatag

SEQ ID NO: 263584 - DNA, 156 bp, Artificial Sequence
  derived and/or modified sequence
atgctcagtagaaatgatgtcaagcgcctggaacgatcctggagattgccggtcccttcctcagagggccccgacttgaggggtagggacaaacggggcaccaaggaggatccccgtgctgactatgcctgtatcgccgaaaataagcccacttag

SEQ ID NO: 263585 - DNA, 201 bp, Artificial Sequence
  derived and/or modified sequence
atgctgtctaggaacgacgttaaaaggcttgaacggagttgggcccagggatctagcgagcaggagctccactatgctagtctgcagagattaccggtgccttcctccgagggcccggacctacggggcagagacaaacgcggtacgaaagaagacccgagggcagattatgcatgcattgccgagaataagcctacttag

SEQ ID NO: 263586 - DNA, 201 bp, Artificial Sequence
  derived and/or modified sequence
atgctgtctaggaacgatgtaaaacgcttagagagatcctgggcccaagggagttctgaacaggaactgcattacgcctcacttcaaaggctgccagttccatcatctgaaggccccgatttgcggggccgcgacaaacgcggtaccaaggaggatcctcgtgccgactacgcttgcattgcagagaataaaccaacatag

SEQ ID NO: 263587 - DNA, 201 bp, Artificial Sequence
  derived and/or modified sequence
atgttaagcaggaacgatgtgaaacgactcgagcgatcgtgggcccaggggagcagcgagcaggagctccattatgcaagcttacagcggctgcctgtaccttcttcagaaggacctgatctcaggggaagagataagcgcggaactaaggaagatcccagggccgactacgcatgtattgctgagaataagccaacatag

SEQ ID NO: 263588 - DNA, 201 bp, Artificial Sequence
  derived and/or modified sequence
atgctgagccgaaatgacgttaagaggctcgagcggagttgggcccagggcagcagtgagcaggaacttcactacgcttctctgcagcgcttaccagtgccatcgtccgaaggcccggacctgagaggccgagataaacgggggaccaaagaagacccacgtgccgactacgcctgtatcgcagagaataagcccacatag

SEQ ID NO: 263589 - DNA, 201 bp, Artificial Sequence
  derived and/or modified sequence
atgctttcacgcaacgacgtaaaacggctcgagaggtcttgggcacaaggcagctctgagcaggagctacattatgcatcgctgcagcggttacccgtccccagtagcgagggcccagacttgagagggagggacaagcgcgggaccaaagaagacccccgggcagattatgcatgtattgctgagaataagccaacttag

SEQ ID NO: 263590 - DNA, 201 bp, Artificial Sequence
  derived and/or modified sequence
atgctctcccgcaacgacgtgaaaaggctcgagcgaagttgggcccagggcagctccgagcaggaattacactatgcatcgcttcagcggttacccgtcccctccagcgaaggaccagatcttagaggccgggataagcgggggacaaaagaggatcccagggcagattacgcttgcatcgcagagaacaaaccaacgtag

SEQ ID NO: 263591 - DNA, 201 bp, Artificial Sequence
  derived and/or modified sequence
atgctgtccaggaatgacgtgaagagactggaaaggtcgtgggcccaggggtcgagtgagcaagaactgcactatgcctcactacagagacttcctgtgccttccagtgaaggacccgatctgagaggtcgggacaagaggggaaccaaagaggatcctagagcagactatgcctgcatcgccgaaaacaagcctacttag

SEQ ID NO: 263592 - DNA, 201 bp, Artificial Sequence
  derived and/or modified sequence
atgctgagcagaaatgatgtgaagaggctggagaggtcctgggcccagggcagcagcgagcaggagctgcactacgccagcctgcagaggctgcctgtgcccagcagcgagggccctgacctgcggggccgggacaagaggggcaccaaggaggaccccagggctgactatgcctgcatcgccgagaacaagcccacctag

SEQ ID NO: 263593 - DNA, 156 bp, Artificial Sequence
  derived and/or modified sequence
atgctgagcagaaatgatgtgaagaggctggagaggtcctggaggctgcctgtgcccagcagcgagggccctgacctgcggggccgggacaagaggggcaccaaggaggaccccagggctgactatgcctgcatcgccgagaacaagcccacctag

SEQ ID NO: 263594 - DNA, 680 bp, Artificial Sequence
  derived and/or modified sequence
ggtctttacttgggcaacgggcaccatgataccctatgttctggggattagcagtgaggaatggaaagtgcccagctcagggttggcacataagggaggctccccagcctgggaacgattataacagagggcccctcacttcacagatgaggaacttgaggcaagtcaccagcccctgatcatttcgcctaaaagagcaaggactagagttcctgacctccaggccagtccctgatccctgacctaatgttatcgcggaatgatgtaaagaggctggagaggagctgggcccagggctcctcagagcaggaactccactatgcatctctgcagaggctgccagtgcccagcagtgagggacctgacctcaggggcagagacaagagaggcaccaaggaggatccaagagctgactatgcctgcattgctgagaacaaacccacctgagcaccccagacaccttcctcaacccaggcgggtggacagggtccccctgtggtccagccagtaaaaaccatggtccccccacttctgtgtctcagtcctctcagtccatctcgagcctccgttcaaattgatcatcatcaaaacttatgtggctttttgacctttgaatagggaattttttaaattttttaaaaattaaaataaaaaaaacacatggctcacccttccaccca

SEQ ID NO: 263595 - DNA, 565 bp, Artificial Sequence
  derived and/or modified sequence
agaggaggggcaggaatgtctgaggtggcaacacttctcttcagccagacagcactggccagtttggagtctgtccatcctgcaggccacaagctctggatgaggaacttgaggcaagtcaccagcccctgatcatttcgcctaaaagagcaaggactagagttcctgacctccaggccagtccctgatccctgacctaatgttatcgcggaatgatgaggctgccagtgcccagcagtgagggacctgacctcaggggcagagacaagagaggcaccaaggaggatccaagagctgactatgcctgcattgctgagaacaaacccacctgagcaccccagacaccttcctcaacccaggcgggtggacagggtccccctgtggtccagccagtaaaaaccatggtccccccacttctgtgtctcagtcctctcagtccatctcgagcctccgttcaaattgatcatcatcaaaacttatgtggctttttgacctttgaatagggaattttttaaattttttaaaaattaaaataaaaaaaacacatggctcacccttccaccca

SEQ ID NO: 263596 - DNA, 433 bp, Artificial Sequence
  derived and/or modified sequence
ggaggggcaggaatgtctgaggtggcaacacttctcttcagccagacagcactggccagtttggagtctgtccatcctgcaggccacaagctctggatgaggaacttgaggcaagtcaccagcccctgatcatttcgcctaaaagagcaaggactagagttcctgacctccaggccagtccctgatccctgacctaatgttatcgcggaatgatgtaaagaggctggagaggagctggaggctgccagtgcccagcagtgagggacctgacctcaggggcagagacaagagaggcaccaaggaggatccaagagctgactatgcctgcattgctgagaacaaacccacctgagcaccccagacaccttcctcaacccaggcgggtggacagggtccccctgtggtccagccagtaaaaaccatggtcccccca

SEQ ID NO: 263597 - DNA, 459 bp, Artificial Sequence
  derived and/or modified sequence
atgttatcgcggaatgatgatatatgtatctacgggggcctggggctgggcgggctcctgcttctggcagtggtccttctgtccgcctgcctgtgttggctgcatcgaagagaggctgccagtgcccagcagtgagggacctgacctcaggggcagagacaagagaggcaccaaggaggatccaagagctgactatgcctgcattgctgagaacaaacccacctgagcaccccagacaccttcctcaacccaggcgggtggacagggtccccctgtggtccagccagtaaaaaccatggtccccccacttctgtgtctcagtcctctcagtccatctcgagcctccgttcaaattgatcatcatcaaaacttatgtggctttttgacctttgaatagggaattttttaaattttttaaaaattaaaataaaaaaaacacatggctcacccttccaccca

SEQ ID NO: 263598 - DNA, 496 bp, Artificial Sequence
  derived and/or modified sequence
ctttctgggatgggtgacctagtaaagtccaggcttgaatctcgggtctttacttgggcaacgggcaccatgataccctatgttctggggattagcagtgaggaatgatgaggaacttgaggcaagtcaccagcccctgatcatttcgcctaaaagagcaaggactagagttcctgacctccaggccagtccctgatccctgacctaatgttatcgcggaatgatgtaaagaggctggagaggagctgggcccagggctcctcagagcaggaactccactatgcatctctgcagaggctgccagtgcccagcagtgagggacctgacctcaggggcagagacaagagaggcaccaaggaggatccaagagctgactatgcctgcattgctgagaacaaacccacctgagcaccccagacaccttcctcaacccaggcgggtggacagggtccccctgtggtccagccagtaaaaaccatggtccccccacttctgt

SEQ ID NO: 263599 - DNA, 689 bp, Artificial Sequence
  derived and/or modified sequence
ggtgacctagtaaagtccaggcttgaatctcgggtctttacttgggcaacgggcaccatgataccctatgttctggggattagcagtgaggaatggaaagtgcccagctcagggttggcacataagggaggctccccagcctgggaacgattataacagagggcccctcacttcacagatgaggaacttgaggcaagtcaccagcccctgatcatttcgcctaaaagagcaaggactagagttcctgacctccaggccagtccctgatccctgacctaatgttatcgcggaatgatggcccagggctcctcagagcaggaactccactatgcatctctgcagaggctgccagtgcccagcagtgagggacctgacctcaggggcagagacaagagaggcaccaaggaggatccaagagctgactatgcctgcattgctgagaacaaacccacctgagcaccccagacaccttcctcaacccaggcgggtggacagggtccccctgtggtccagccagtaaaaaccatggtccccccacttctgtgtctcagtcctctcagtccatctcgagcctccgttcaaattgatcatcatcaaaacttatgtggctttttgacctttgaatagggaattttttaaattttttaaaaattaaaataaaaaaaacacatggctcacccttccaccca

SEQ ID NO: 263600 - DNA, 619 bp, Artificial Sequence
  derived and/or modified sequence
cctttctgggatgggtgacctagtaaagtccaggcttgaatctcgggtctttacttgggcaacgggcaccatgataccctatgttctggggattagcagtgaggaatgatgaggaacttgaggcaagtcaccagcccctgatcatttcgcctaaaagagcaaggactagagttcctgacctccaggccagtccctgatccctgacctaatgttatcgcggaatgatggcccagggctcctcagagcaggaactccactatgcatctctgcagaggctgccagtgcccagcagtgagggacctgacctcaggggcagagacaagagaggcaccaaggaggatccaagagctgactatgcctgcattgctgagaacaaacccacctgagcaccccagacaccttcctcaacccaggcgggtggacagggtccccctgtggtccagccagtaaaaaccatggtccccccacttctgtgtctcagtcctctcagtccatctcgagcctccgttcaaattgatcatcatcaaaacttatgtggctttttgacctttgaatagggaattttttaaattttttaaaaattaaaataaaaaaaacacatggctcacccttccaccca

SEQ ID NO: 263601 - DNA, 603 bp, Artificial Sequence
  derived and/or modified sequence
cacccacccaggcccaggctccttcccctccatcatccccttaccagcacctagaaccatccagggctgaaaagtcccctccaaaccacgtgatgaggaacttgaggcaagtcaccagcccctgatcatttcgcctaaaagagcaaggactagagttcctgacctccaggccagtccctgatccctgacctaatgttatcgcggaatgatggcccagggctcctcagagcaggaactccactatgcatctctgcagaggctgccagtgcccagcagtgagggacctgacctcaggggcagagacaagagaggcaccaaggaggatccaagagctgactatgcctgcattgctgagaacaaacccacctgagcaccccagacaccttcctcaacccaggcgggtggacagggtccccctgtggtccagccagtaaaaaccatggtccccccacttctgtgtctcagtcctctcagtccatctcgagcctccgttcaaattgatcatcatcaaaacttatgtggctttttgacctttgaatagggaattttttaaattttttaaaaattaaaataaaaaaaacacatggctcacccttccaccca

SEQ ID NO: 263602 - DNA, 610 bp, Artificial Sequence
  derived and/or modified sequence
agaggaggggcaggaatgtctgaggtggcaacacttctcttcagccagacagcactggccagtttggagtctgtccatcctgcaggccacaagctctggatgaggaacttgaggcaagtcaccagcccctgatcatttcgcctaaaagagcaaggactagagttcctgacctccaggccagtccctgatccctgacctaatgttatcgcggaatgatggcccagggctcctcagagcaggaactccactatgcatctctgcagaggctgccagtgcccagcagtgagggacctgacctcaggggcagagacaagagaggcaccaaggaggatccaagagctgactatgcctgcattgctgagaacaaacccacctgagcaccccagacaccttcctcaacccaggcgggtggacagggtccccctgtggtccagccagtaaaaaccatggtccccccacttctgtgtctcagtcctctcagtccatctcgagcctccgttcaaattgatcatcatcaaaacttatgtggctttttgacctttgaatagggaattttttaaattttttaaaaattaaaataaaaaaaacacatggctcacccttccaccca

SEQ ID NO: 263603 - DNA, 571 bp, Artificial Sequence
  derived and/or modified sequence
tgataccctatgttctggggattagcagtgaggaatgatgaggaacttgaggcaagtcaccagcccctgatcatttcgcctaaaagagcaaggactagagttcctgacctccaggccagtccctgatccctgacctaatgttatcgcggaatgatgtaaagaggctggagaggagctgggcccagggctcctcagagcaggaactccactatgcatctctgcagaggctgccagtgcccagcagtgagggacctgacctcaggggcagagacaagagaggcaccaaggaggatccaagagctgactatgcctgcattgctgagaacaaacccacctgagcaccccagacaccttcctcaacccaggcgggtggacagggtccccctgtggtccagccagtaaaaaccatggtccccccacttctgtgtctcagtcctctcagtccatctcgagcctccgttcaaattgatcatcatcaaaacttatgtggctttttgacctttgaatagggaattttttaaattttttaaaaattaaaataaaaaaaacacatggctcacccttccaccca

SEQ ID NO: 263604 - DNA, 668 bp, Artificial Sequence
  derived and/or modified sequence
ggcaacgggcaccatgataccctatgttctggggattagcagtgaggaatggaaagtgcccagctcagggttggcacataagggaggctccccagcctgggaacgattataacagagggcccctcacttcacagatgaggaacttgaggcaagtcaccagcccctgatcatttcgcctaaaagagcaaggactagagttcctgacctccaggccagtccctgatccctgacctaatgttatcgcggaatgatgtaaagaggctggagaggagctgggcccagggctcctcagagcaggaactccactatgcatctctgcagaggctgccagtgcccagcagtgagggacctgacctcaggggcagagacaagagaggcaccaaggaggatccaagagctgactatgcctgcattgctgagaacaaacccacctgagcaccccagacaccttcctcaacccaggcgggtggacagggtccccctgtggtccagccagtaaaaaccatggtccccccacttctgtgtctcagtcctctcagtccatctcgagcctccgttcaaattgatcatcatcaaaacttatgtggctttttgacctttgaatagggaattttttaaattttttaaaaattaaaataaaaaaaacacatggctcacccttccaccca

SEQ ID NO: 263605 - DNA, 585 bp, Artificial Sequence
  derived and/or modified sequence
ggaggggcaggaatgtctgaggtggcaacacttctcttcagccagacagcactggccagtttggagtctgtccatcctgcaggccacaagctctggatgaggaacttgaggcaagtcaccagcccctgatcatttcgcctaaaagagcaaggactagagttcctgacctccaggccagtccctgatccctgacctaatgttatcgcggaatgatgtaaagaggctggagaggagctggaggctgccagtgcccagcagtgagggacctgacctcaggggcagagacaagagaggcaccaaggaggatccaagagctgactatgcctgcattgctgagaacaaacccacctgagcaccccagacaccttcctcaacccaggcgggtggacagggtccccctgtggtccagccagtaaaaaccatggtccccccacttctgtgtctcagtcctctcagtccatctcgagcctccgttcaaattgatcatcatcaaaacttatgtggctttttgacctttgaatagggaattttttaaattttttaaaaattaaaataaaaaaaacacatggctcacccttccaccca

SEQ ID NO: 263606 - DNA, 455 bp, Artificial Sequence
  derived and/or modified sequence
tatcgcggaatgatgatatatgtatctacgggggcctggggctgggcgggctcctgcttctggcagtggtccttctgtccgcctgcctgtgttggctgcatcgaagagaggctgccagtgcccagcagtgagggacctgacctcaggggcagagacaagagaggcaccaaggaggatccaagagctgactatgcctgcattgctgagaacaaacccacctgagcaccccagacaccttcctcaacccaggcgggtggacagggtccccctgtggtccagccagtaaaaaccatggtccccccacttctgtgtctcagtcctctcagtccatctcgagcctccgttcaaattgatcatcatcaaaacttatgtggctttttgacctttgaatagggaattttttaaattttttaaaaattaaaataaaaaaaacacatggctcacccttccaccca

SEQ ID NO: 263607 - DNA, 619 bp, Artificial Sequence
  derived and/or modified sequence
cctttctgggatgggtgacctagtaaagtccaggcttgaatctcgggtctttacttgggcaacgggcaccatgataccctatgttctggggattagcagtgaggaatgatgaggaacttgaggcaagtcaccagcccctgatcatttcgcctaaaagagcaaggactagagttcctgacctccaggccagtccctgatccctgacctaatgttatcgcggaatgatggcccagggctcctcagagcaggaactccactatgcatctctgcagaggctgccagtgcccagcagtgagggacctgacctcaggggcagagacaagagaggcaccaaggaggatccaagagctgactatgcctgcattgctgagaacaaacccacctgagcaccccagacaccttcctcaacccaggcgggtggacagggtccccctgtggtccagccagtaaaaaccatggtccccccacttctgtgtctcagtcctctcagtccatctcgagcctccgttcaaaatgatcatcatcaaaacttatgtggctttttgacctttgaatagggaattttttaaattttttaaaaattaaaattaaaaaaacacatggctcacccttccaccca

SEQ ID NO: 263608 - DNA, 571 bp, Artificial Sequence
  derived and/or modified sequence
tgataccctatgttctggggattagcagtgaggaatgatgaggaacttgaggcaagtcaccagcccctgatcatttcgcctaaaagagcaaggactagagttcctgacctccaggccagtccctgatccctgacctaatgttatcgcggaatgatgtaaagaggctggagaggagctgggcccagggctcctcagagcaggaactccactatgcatctctgcagaggctgccagtgcccagcagtgagggacctgacctcaggggcagagacaagagaggcaccaaggaggatccaagagctgactatgcctgcattgctgagaacaaacccacctgagcaccccagacaccttcctcaacccaggcgggtggacagggtccccctgtggtccagccagtaaaaaccatggtccccccacttctgtgtctcagtcctctcagtccatctcgagcctccgttcaaaatgatcatcatcaaaacttatgtggctttttgacctttgaatagggaattttttaaattttttaaaaattaaaattaaaaaaacacatggctcacccttccaccca

SEQ ID NO: 263609 - DNA, 455 bp, Artificial Sequence
  derived and/or modified sequence
tatcgcggaatgatgatatatgtatctacgggggcctggggctgggcgggctcctgcttctggcagtggtccttctgtccgcctgcctgtgttggctgcatcgaagagaggctgccagtgcccagcagtgagggacctgacctcaggggcagagacaagagaggcaccaaggaggatccaagagctgactatgcctgcattgctgagaacaaacccacctgagcaccccagacaccttcctcaacccaggcgggtggacagggtccccctgtggtccagccagtaaaaaccatggtccccccacttctgtgtctcagtcctctcagtccatctcgagcctccgttcaaaatgatcatcatcaaaacttatgtggctttttgacctttgaatagggaattttttaaattttttaaaaattaaaataaaaaaaacacatggctcacccttccaccca

SEQ ID NO: 263610 - DNA, 726 bp, Artificial Sequence
  derived and/or modified sequence
gaaaagaaagatgttgtaaccctaaccctggagccgaacttcctctcctaacaatgctggggaggaacccaggctgggggagaagttaaagccagaggaggggcaggaatgtctgaggtggcaacacttctcttcagccagacagcactggccagtttggagtctgtccatcctgcaggccacaagctctggatgaggaacttgaggcaagtcaccagcccctgatcatttcgcctaaaagagcaaggactagagttcctgacctccaggccagtccctgatccctgacctaatgttatcgcggaatgatgtaaagaggctggagaggagctgggcccagggctcctcagagcaggaactccactatgcatctctgcagaggctgccagtgcccagcagtgagggacctgacctcaggggcagagacaagagaggcaccaaggaggatccaagagctgactatgcctgcattgctgagaacaaacccacctgagcaccccagacaccttcctcaacccaggcgggtggacagggtccccctgtggtccagccagtaaaaaccatggtccccccacttctgtgtctcagtcctctcagtccatctcgagcctccgttcaaattgatcatcatcaaaacttatgtggctttttgacctttgaatagggaattttttaaattttttaaaaattaaaataaaaaaaacacatggctcacccttccaccca

SEQ ID NO: 263611 - DNA, 603 bp, Artificial Sequence
  derived and/or modified sequence
cacccacccaggcccaggctccttcccctccatcatccccttaccagcacctagaaccatccagggctgaaaagtcccctccaaaccacgtgatgaggaacttgaggcaagtcaccagcccctgatcatttcgcctaaaagagcaaggactagagttcctgacctccaggccagtccctgatccctgacctaatgttatcgcggaatgatggcccagggctcctcagagcaggaactccactatgcatctctgcagaggctgccagtgcccagcagtgagggacctgacctcaggggcagagacaagagaggcaccaaggaggatccaagagctgactatgcctgcattgctgagaacaaacccacctgagcaccccagacaccttcctcaacccaggcgggtggacagggtccccctgtggtccagccagtaaaaaccatggtccccccacttctgtgtctcagtcctctcagtccatctcgagcctccgttcaaaatgatcatcatcaaaacttatgtggctttttgacctttgaatagggaattttttaaattttttaaaaattaaaataaaaaaaacacatggctcacccttccaccca

SEQ ID NO: 263612 - DNA, 726 bp, Artificial Sequence
  derived and/or modified sequence
gaaaagaaagatgttgtaaccctaaccctggagccgaacttcctctcctaacaatgctggggaggaacccaggctgggggagaagttaaagccagaggaggggcaggaatgtctgaggtggcaacacttctcttcagccagacagcactggccagtttggagtctgtccatcctgcaggccacaagctctggatgaggaacttgaggcaagtcaccagcccctgatcatttcgcctaaaagagcaaggactagagttcctgacctccaggccagtccctgatccctgacctaatgttatcgcggaatgatgtaaagaggctggagaggagctgggcccagggctcctcagagcaggaactccactatgcatctctgcagaggctgccagtgcccagcagtgagggacctgacctcaggggcagagacaagagaggcaccaaggaggatccaagagctgactatgcctgcattgctgagaacaaacccacctgagcaccccagacaccttcctcaacccaggcgggtggacagggtccccctgtggtccagccagtaaaaaccatggtccccccacttctgtgtctcagtcctctcagtccatctcgagcctccgttcaaaatgatcatcatcaaaacttatgtggctttttgacctttgaatagggaattttttaaattttttaaaaattaaaataaaaaaaacacatggctcacccttccaccca

SEQ ID NO: 263613 - DNA, 585 bp, Artificial Sequence
  derived and/or modified sequence
ggaggggcaggaatgtctgaggtggcaacacttctcttcagccagacagcactggccagtttggagtctgtccatcctgcaggccacaagctctggatgaggaacttgaggcaagtcaccagcccctgatcatttcgcctaaaagagcaaggactagagttcctgacctccaggccagtccctgatccctgacctaatgttatcgcggaatgatgtaaagaggctggagaggagctggaggctgccagtgcccagcagtgagggacctgacctcaggggcagagacaagagaggcaccaaggaggatccaagagctgactatgcctgcattgctgagaacaaacccacctgagcaccccagacaccttcctcaacccaggcgggtggacagggtccccctgtggtccagccagtaaaaaccatggtccccccacttctgtgtctcagtcctctcagtccatctcgagcctccgttcaaaatgatcatcatcaaaacttatgtggctttttgacctttgaatagggaattttttaaattttttaaaaattaaaattaaaaaaacacatggctcacccttccaccca

SEQ ID NO: 263614 - DNA, 689 bp, Artificial Sequence
  derived and/or modified sequence
ggtgacctagtaaagtccaggcttgaatctcgggtctttacttgggcaacgggcaccatgataccctatgttctggggattagcagtgaggaatggaaagtgcccagctcagggttggcacataagggaggctccccagcctgggaacgattataacagagggcccctcacttcacagatgaggaacttgaggcaagtcaccagcccctgatcatttcgcctaaaagagcaaggactagagttcctgacctccaggccagtccctgatccctgacctaatgttatcgcggaatgatggcccagggctcctcagagcaggaactccactatgcatctctgcagaggctgccagtgcccagcagtgagggacctgacctcaggggcagagacaagagaggcaccaaggaggatccaagagctgactatgcctgcattgctgagaacaaacccacctgagcaccccagacaccttcctcaacccaggcgggtggacagggtccccctgtggtccagccagtaaaaaccatggtccccccacttctgtgtctcagtcctctcagtccatctcgagcctccgttcaaaatgatcatcatcaaaacttatgtggctttttgacctttgaatagggaattttttaaattttttaaaaattaaaattaaaaaaacacatggctcacccttccaccca

SEQ ID NO: 263615 - DNA, 571 bp, Artificial Sequence
  derived and/or modified sequence
tgataccctatgttctggggattagcagtgaggaatgatgaggaacttgaggcaagtcaccagcccctgatcatttcgcctaaaagagcaaggactagagttcctgacctccaggccagtccctgatccctgacctaatgttatcgcggaatgatgtaaagaggctggagaggagctgggcccagggctcctcagagcaggaactccactatgcatctctgcagaggctgccagtgcccagcagtgagggacctgacctcaggggcagagacaagagaggcaccaaggaggatccaagagctgactatgcctgcattgctgagaacaaacccacctgagcaccccagacaccttcctcaacccaggcgggtggacagggtccccctgtggtccagccagtaaaaaccatggtccccccacttctgtgtctcagtcctctcagtccatctcgagcctccgttcaaaatgatcatcatcaaaacttatgtggctttttgacctttgaatagggaattttttaaattttttaaaaattaaaataaaaaaaacacatggctcacccttccaccca

SEQ ID NO: 263616 - DNA, 619 bp, Artificial Sequence
  derived and/or modified sequence
cctttctgggatgggtgacctagtaaagtccaggcttgaatctcgggtctttacttgggcaacgggcaccatgataccctatgttctggggattagcagtgaggaatgatgaggaacttgaggcaagtcaccagcccctgatcatttcgcctaaaagagcaaggactagagttcctgacctccaggccagtccctgatccctgacctaatgttatcgcggaatgatggcccagggctcctcagagcaggaactccactatgcatctctgcagaggctgccagtgcccagcagtgagggacctgacctcaggggcagagacaagagaggcaccaaggaggatccaagagctgactatgcctgcattgctgagaacaaacccacctgagcaccccagacaccttcctcaacccaggcgggtggacagggtccccctgtggtccagccagtaaaaaccatggtccccccacttctgtgtctcagtcctctcagtccatctcgagcctccgttcaaaatgatcatcatcaaaacttatgtggctttttgacctttgaatagggaattttttaaattttttaaaaattaaaataaaaaaaacacatggctcacccttccaccca

SEQ ID NO: 263617 - DNA, 455 bp, Artificial Sequence
  derived and/or modified sequence
tatcgcggaatgatgatatatgtatctacgggggcctggggctgggcgggctcctgcttctggcagtggtccttctgtccgcctgcctgtgttggctgcatcgaagagaggctgccagtgcccagcagtgagggacctgacctcaggggcagagacaagagaggcaccaaggaggatccaagagctgactatgcctgcattgctgagaacaaacccacctgagcaccccagacaccttcctcaacccaggcgggtggacagggtccccctgtggtccagccagtaaaaaccatggtccccccacttctgtgtctcagtcctctcagtccatctcgagcctccgttcaaaatgatcatcatcaaaacttatgtggctttttgacctttgaatagggaattttttaaattttttaaaaattaaaattaaaaaaacacatggctcacccttccaccca

SEQ ID NO: 263618 - DNA, 585 bp, Artificial Sequence
  derived and/or modified sequence
ggaggggcaggaatgtctgaggtggcaacacttctcttcagccagacagcactggccagtttggagtctgtccatcctgcaggccacaagctctggatgaggaacttgaggcaagtcaccagcccctgatcatttcgcctaaaagagcaaggactagagttcctgacctccaggccagtccctgatccctgacctaatgttatcgcggaatgatgtaaagaggctggagaggagctggaggctgccagtgcccagcagtgagggacctgacctcaggggcagagacaagagaggcaccaaggaggatccaagagctgactatgcctgcattgctgagaacaaacccacctgagcaccccagacaccttcctcaacccaggcgggtggacagggtccccctgtggtccagccagtaaaaaccatggtccccccacttctgtgtctcagtcctctcagtccatctcgagcctccgttcaaaatgatcatcatcaaaacttatgtggctttttgacctttgaatagggaattttttaaattttttaaaaattaaaataaaaaaaacacatggctcacccttccaccca

SEQ ID NO: 263619 - DNA, 668 bp, Artificial Sequence
  derived and/or modified sequence
ggcaacgggcaccatgataccctatgttctggggattagcagtgaggaatggaaagtgcccagctcagggttggcacataagggaggctccccagcctgggaacgattataacagagggcccctcacttcacagatgaggaacttgaggcaagtcaccagcccctgatcatttcgcctaaaagagcaaggactagagttcctgacctccaggccagtccctgatccctgacctaatgttatcgcggaatgatgtaaagaggctggagaggagctgggcccagggctcctcagagcaggaactccactatgcatctctgcagaggctgccagtgcccagcagtgagggacctgacctcaggggcagagacaagagaggcaccaaggaggatccaagagctgactatgcctgcattgctgagaacaaacccacctgagcaccccagacaccttcctcaacccaggcgggtggacagggtccccctgtggtccagccagtaaaaaccatggtccccccacttctgtgtctcagtcctctcagtccatctcgagcctccgttcaaaatgatcatcatcaaaacttatgtggctttttgacctttgaatagggaattttttaaattttttaaaaattaaaattaaaaaaacacatggctcacccttccaccca

SEQ ID NO: 263620 - DNA, 610 bp, Artificial Sequence
  derived and/or modified sequence
agaggaggggcaggaatgtctgaggtggcaacacttctcttcagccagacagcactggccagtttggagtctgtccatcctgcaggccacaagctctggatgaggaacttgaggcaagtcaccagcccctgatcatttcgcctaaaagagcaaggactagagttcctgacctccaggccagtccctgatccctgacctaatgttatcgcggaatgatggcccagggctcctcagagcaggaactccactatgcatctctgcagaggctgccagtgcccagcagtgagggacctgacctcaggggcagagacaagagaggcaccaaggaggatccaagagctgactatgcctgcattgctgagaacaaacccacctgagcaccccagacaccttcctcaacccaggcgggtggacagggtccccctgtggtccagccagtaaaaaccatggtccccccacttctgtgtctcagtcctctcagtccatctcgagcctccgttcaaaatgatcatcatcaaaacttatgtggctttttgacctttgaatagggaattttttaaattttttaaaaattaaaattaaaaaaacacatggctcacccttccaccca

SEQ ID NO: 263621 - DNA, 726 bp, Artificial Sequence
  derived and/or modified sequence
gaaaagaaagatgttgtaaccctaaccctggagccgaacttcctctcctaacaatgctggggaggaacccaggctgggggagaagttaaagccagaggaggggcaggaatgtctgaggtggcaacacttctcttcagccagacagcactggccagtttggagtctgtccatcctgcaggccacaagctctggatgaggaacttgaggcaagtcaccagcccctgatcatttcgcctaaaagagcaaggactagagttcctgacctccaggccagtccctgatccctgacctaatgttatcgcggaatgatgtaaagaggctggagaggagctgggcccagggctcctcagagcaggaactccactatgcatctctgcagaggctgccagtgcccagcagtgagggacctgacctcaggggcagagacaagagaggcaccaaggaggatccaagagctgactatgcctgcattgctgagaacaaacccacctgagcaccccagacaccttcctcaacccaggcgggtggacagggtccccctgtggtccagccagtaaaaaccatggtccccccacttctgtgtctcagtcctctcagtccatctcgagcctccgttcaaaatgatcatcatcaaaacttatgtggctttttgacctttgaatagggaattttttaaattttttaaaaattaaaattaaaaaaacacatggctcacccttccaccca

SEQ ID NO: 263622 - DNA, 610 bp, Artificial Sequence
  derived and/or modified sequence
agaggaggggcaggaatgtctgaggtggcaacacttctcttcagccagacagcactggccagtttggagtctgtccatcctgcaggccacaagctctggatgaggaacttgaggcaagtcaccagcccctgatcatttcgcctaaaagagcaaggactagagttcctgacctccaggccagtccctgatccctgacctaatgttatcgcggaatgatggcccagggctcctcagagcaggaactccactatgcatctctgcagaggctgccagtgcccagcagtgagggacctgacctcaggggcagagacaagagaggcaccaaggaggatccaagagctgactatgcctgcattgctgagaacaaacccacctgagcaccccagacaccttcctcaacccaggcgggtggacagggtccccctgtggtccagccagtaaaaaccatggtccccccacttctgtgtctcagtcctctcagtccatctcgagcctccgttcaaaatgatcatcatcaaaacttatgtggctttttgacctttgaatagggaattttttaaattttttaaaaattaaaataaaaaaaacacatggctcacccttccaccca

SEQ ID NO: 263623 - DNA, 689 bp, Artificial Sequence
  derived and/or modified sequence
ggtgacctagtaaagtccaggcttgaatctcgggtctttacttgggcaacgggcaccatgataccctatgttctggggattagcagtgaggaatggaaagtgcccagctcagggttggcacataagggaggctccccagcctgggaacgattataacagagggcccctcacttcacagatgaggaacttgaggcaagtcaccagcccctgatcatttcgcctaaaagagcaaggactagagttcctgacctccaggccagtccctgatccctgacctaatgttatcgcggaatgatggcccagggctcctcagagcaggaactccactatgcatctctgcagaggctgccagtgcccagcagtgagggacctgacctcaggggcagagacaagagaggcaccaaggaggatccaagagctgactatgcctgcattgctgagaacaaacccacctgagcaccccagacaccttcctcaacccaggcgggtggacagggtccccctgtggtccagccagtaaaaaccatggtccccccacttctgtgtctcagtcctctcagtccatctcgagcctccgttcaaaatgatcatcatcaaaacttatgtggctttttgacctttgaatagggaattttttaaattttttaaaaattaaaataaaaaaaacacatggctcacccttccaccca

SEQ ID NO: 263624 - DNA, 668 bp, Artificial Sequence
  derived and/or modified sequence
ggcaacgggcaccatgataccctatgttctggggattagcagtgaggaatggaaagtgcccagctcagggttggcacataagggaggctccccagcctgggaacgattataacagagggcccctcacttcacagatgaggaacttgaggcaagtcaccagcccctgatcatttcgcctaaaagagcaaggactagagttcctgacctccaggccagtccctgatccctgacctaatgttatcgcggaatgatgtaaagaggctggagaggagctgggcccagggctcctcagagcaggaactccactatgcatctctgcagaggctgccagtgcccagcagtgagggacctgacctcaggggcagagacaagagaggcaccaaggaggatccaagagctgactatgcctgcattgctgagaacaaacccacctgagcaccccagacaccttcctcaacccaggcgggtggacagggtccccctgtggtccagccagtaaaaaccatggtccccccacttctgtgtctcagtcctctcagtccatctcgagcctccgttcaaaatgatcatcatcaaaacttatgtggctttttgacctttgaatagggaattttttaaattttttaaaaattaaaataaaaaaaacacatggctcacccttccaccca

SEQ ID NO: 263625 - DNA, 603 bp, Artificial Sequence
  derived and/or modified sequence
cacccacccaggcccaggctccttcccctccatcatccccttaccagcacctagaaccatccagggctgaaaagtcccctccaaaccacgtgatgaggaacttgaggcaagtcaccagcccctgatcatttcgcctaaaagagcaaggactagagttcctgacctccaggccagtccctgatccctgacctaatgttatcgcggaatgatggcccagggctcctcagagcaggaactccactatgcatctctgcagaggctgccagtgcccagcagtgagggacctgacctcaggggcagagacaagagaggcaccaaggaggatccaagagctgactatgcctgcattgctgagaacaaacccacctgagcaccccagacaccttcctcaacccaggcgggtggacagggtccccctgtggtccagccagtaaaaaccatggtccccccacttctgtgtctcagtcctctcagtccatctcgagcctccgttcaaaatgatcatcatcaaaacttatgtggctttttgacctttgaatagggaattttttaaattttttaaaaattaaaattaaaaaaacacatggctcacccttccaccca

SEQ ID NO: 263626 - DNA, 565 bp, Artificial Sequence
  derived and/or modified sequence
agaggaggggcaggaatgtctgaggtggcaacacttctcttcagccagacagcactggccagtttggagtctgtccatcctgcaggccacaagctctggatgaggaacttgaggcaagtcaccagcccctgatcatttcgcctaaaagagcaaggactagagttcctgacctccaggccagtccctgatccctgacctaatgttatcgcggaatgatgaggctgccagtgcccagcagtgagggacctgacctcaggggcagagacaagagaggcaccaaggaggatccaagagctgactatgcctgcattgctgagaacaaacccacctgagcaccccagacaccttcctcaacccaggcgggtggacagggtccccctgtggtccagccagtaaaaaccatggtccccccacttctgtgtctcagtcctctcagtccatctcgagcctccgttcaaaatgatcatcatcaaaacttatgtggctttttgacctttgaatagggaattttttaaattttttaaaaattaaaattaaaaaaacacatggctcacccttccaccca

SEQ ID NO: 263627 - DNA, 565 bp, Artificial Sequence
  derived and/or modified sequence
agaggaggggcaggaatgtctgaggtggcaacacttctcttcagccagacagcactggccagtttggagtctgtccatcctgcaggccacaagctctggatgaggaacttgaggcaagtcaccagcccctgatcatttcgcctaaaagagcaaggactagagttcctgacctccaggccagtccctgatccctgacctaatgttatcgcggaatgatgaggctgccagtgcccagcagtgagggacctgacctcaggggcagagacaagagaggcaccaaggaggatccaagagctgactatgcctgcattgctgagaacaaacccacctgagcaccccagacaccttcctcaacccaggcgggtggacagggtccccctgtggtccagccagtaaaaaccatggtccccccacttctgtgtctcagtcctctcagtccatctcgagcctccgttcaaaatgatcatcatcaaaacttatgtggctttttgacctttgaatagggaattttttaaattttttaaaaattaaaataaaaaaaacacatggctcacccttccaccca

SEQ ID NO: 263628 - DNA, 201 bp, Artificial Sequence
  derived and/or modified sequence
atgctgagccggaacgacgtgaagcggctggagcggagctgggcccagggcagctcagaacaggagttgcactacgcctcactgcagagattacccgtgccttcctctgaggggcctgatctgaggggccgagataaacggggaaccaaagaggatcccagagctgactatgcttgcatcgcagagaacaaaccaacttag

SEQ ID NO: 263629 - DNA, 156 bp, Artificial Sequence
  derived and/or modified sequence
atgctgagccggaacgacgtgaagcggctggagcggagctggcggctgcctgtcccttcttcagaaggacctgacttaagaggtcgtgataaaagagggaccaaggaggatccacgtgcagactatgcctgtattgccgagaacaaacccacgtag

SEQ ID NO: 263630 - DNA, 201 bp, Artificial Sequence
  derived and/or modified sequence
atgctgagccggaacgacgtgaagcggctggagcggagctgggcccaggggagcagcgaacaggagctgcactatgcatctctgcagaggctgcccgttccatccagcgaaggtccagacctgagaggcagagacaaacgcggcacaaaagaggacccacgggccgattacgcttgtattgccgagaacaaacccacgtag

SEQ ID NO: 263631 - DNA, 201 bp, Artificial Sequence
  derived and/or modified sequence
atgctgagccggaacgacgtgaagcggctggagcggagctgggcccaggggtctagcgagcaagagctgcactacgcgtccctccagaggctgcccgtaccttccagtgaagggccagatctgcgcggacgagataaaagggggacgaaggaggatccaagagcagactatgcgtgcatagccgagaacaaaccaacctag

SEQ ID NO: 263632 - DNA, 201 bp, Artificial Sequence
  derived and/or modified sequence
atgctgagccggaacgacgtgaagcggctggagcggagctgggcccaaggttcgagtgagcaagagctgcactacgcaagccttcagagactgcctgtgccctcttccgaaggacctgatctgcggggaagggacaagcgaggaacaaaggaggatcccagagccgactacgcctgtattgctgaaaataagcctacttag

SEQ ID NO: 263633 - DNA, 156 bp, Artificial Sequence
  derived and/or modified sequence
atgctgagccggaacgacgtgaagcggctggagcggagctggcggttgcccgtcccatccagtgaggggccggatcttcggggcagggacaaaagaggaaccaaggaggatcccagggccgactacgcctgcatcgccgaaaataagcccacatag

SEQ ID NO: 263634 - DNA, 201 bp, Artificial Sequence
  derived and/or modified sequence
atgctgagccggaacgacgtgaagcggctggagcggagctgggcccaaggcagcagtgaacaggagctgcactatgcatctttacaaagactgccagtgccatcttcggagggcccagacttaagaggacgggacaagcgcggcacaaaggaggatccacgcgctgactacgcatgcatcgcggaaaacaagcccacttag

SEQ ID NO: 263635 - DNA, 156 bp, Artificial Sequence
  derived and/or modified sequence
atgctgagccggaacgacgtgaagcggctggagcggagctggcggcttccagtaccttcgtccgagggccccgacctgcggggccgggataaacgagggactaaggaagacccgcgcgcagactatgcttgtattgccgaaaacaaaccaacatag

SEQ ID NO: 263636 - DNA, 201 bp, Artificial Sequence
  derived and/or modified sequence
atgctgagccggaacgacgtgaagcggctggagcggagctgggcccagggttcctctgagcaggagctgcactacgcctcactgcagaggttacccgttccatcctccgagggacctgacctgcggggcagagacaaacgggggacaaaagaagatcccagagccgactacgcctgcatagccgaaaataagcctacctag

SEQ ID NO: 263637 - DNA, 201 bp, Artificial Sequence
  derived and/or modified sequence
atgctgagccggaacgacgtgaagcggctggagcggagctgggcccagggctctagcgagcaggagcttcattatgccagcctgcagagactgccagtgccatccagcgagggtccagacctccgaggacgcgacaaaagagggaccaaagaggacccccgggcggactacgcgtgcatcgccgagaataagccaacctag

SEQ ID NO: 263638 - DNA, 201 bp, Artificial Sequence
  derived and/or modified sequence
atgctgagccggaacgacgtgaagcggctggagcggagctgggcccaagggtctagcgaacaggaactgcactatgcaagtctgcaacgcttgcccgttccttcatcggaggggcctgatctgaggggtagagacaaacgagggactaaggaggacccccgggccgattacgcctgcattgctgagaacaaaccgacctag

SEQ ID NO: 263639 - DNA, 156 bp, Artificial Sequence
  derived and/or modified sequence
atgctgagccggaacgacgtgaagcggctggagcggagctggcggctgcctgtcccttccagcgagggccctgatctccgcggtagggacaagcggggcacaaaggaggatccaagagctgattacgcctgcattgccgagaacaagccaacctag

SEQ ID NO: 263640 - DNA, 201 bp, Artificial Sequence
  derived and/or modified sequence
atgctgagccggaacgacgtgaagcggctggagcggagctgggcccaaggcagttccgaacaggaactgcattacgcatccctacagagactccctgtgccttcctccgagggcccagatcttcgtggtagagacaagagaggtactaaagaggaccctagagcggactatgcttgtatagccgagaataaacctacatag

SEQ ID NO: 263641 - DNA, 156 bp, Artificial Sequence
  derived and/or modified sequence
atgctgagccggaacgacgtgaagcggctggagcggagctggcggctgcccgtgccatcctccgagggtccagatctgcggggacgcgataaaaggggcacgaaagaagacccacgcgctgactacgcctgtatcgccgagaataaacccacttag

SEQ ID NO: 263642 - DNA, 201 bp, Artificial Sequence
  derived and/or modified sequence
atgctgagccggaacgacgtgaagcggctggagcggagctgggcccagggctcaagcgaacaggagctgcattatgccagtctgcagcggctaccggtgcctagttccgagggccctgacctgcggggccgcgacaagcgaggcacaaaggaagatccccgggcagactacgcatgcattgccgaaaacaaacctacatag

SEQ ID NO: 263643 - DNA, 201 bp, Artificial Sequence
  derived and/or modified sequence
atgctgagccggaacgacgtgaagcggctggagcggagctgggcccagggatctagtgaacaggaactccattacgcgagtctgcagaggttacccgtcccaagctctgaaggcccagatcttcgtggacgcgacaaaaggggtacgaaggaggatcctcgcgccgactacgcttgcattgctgaaaataagccgacatag

SEQ ID NO: 263644 - DNA, 201 bp, Artificial Sequence
  derived and/or modified sequence
atgctgagccggaacgacgtgaagcggctggagcggagctgggcccaggggtcgtccgaacaggaactgcactatgcaagtctgcagcgacttccggtcccctcaagcgaaggccccgatcttcgcggccgggacaagagaggtacaaaagaagacccaagagccgactacgcatgcattgccgaaaacaaaccaacatag

SEQ ID NO: 263645 - DNA, 201 bp, Artificial Sequence
  derived and/or modified sequence
atgctgagccggaacgacgtgaagcggctggagcggagctgggcccagggctcttccgagcaagagctgcactatgcttctttacagagactgcctgtcccgagtagtgaggggcctgatctgaggggccgggacaaaaggggaaccaaggaggaccccagagcggactatgcctgtattgctgaaaacaaaccaacatag

SEQ ID NO: 263646 - DNA, 201 bp, Artificial Sequence
  derived and/or modified sequence
atgctgagccggaacgacgtgaagcggctggagcggagctgggcccaaggaagctccgaacaggaactgcattatgctagtctccagcggcttcccgtaccttccagtgagggccctgaccttaggggtcgcgacaagcggggaacgaaggaggatcctcgagccgattatgcatgcatcgccgagaataaaccgacttag

SEQ ID NO: 263647 - DNA, 201 bp, Artificial Sequence
  derived and/or modified sequence
atgctgagccggaacgacgtgaagcggctggagcggagctgggcccagggatctagcgagcaggaactccattacgcaagcctgcagcgcctgccagtgccatccagcgaggggccggacctccgaggcagggataagagggggaccaaagaagatccaagagctgattacgcctgcatcgctgagaacaagccgacatag

SEQ ID NO: 263648 - DNA, 156 bp, Artificial Sequence
  derived and/or modified sequence
atgctgagccggaacgacgtgaagcggctggagcggagctggcggcttccggtgccatcatctgagggccccgatctgaggggccgtgataagcgtggaactaaagaagaccccagggccgactatgcctgcattgctgaaaataagcctacatag

SEQ ID NO: 263649 - DNA, 156 bp, Artificial Sequence
  derived and/or modified sequence
atgctgagccggaacgacgtgaagcggctggagcggagctggcggcttcctgtcccctcctcagagggccccgatctgcggggtagggacaaaagaggcactaaggaggacccccgcgccgactatgcatgcattgcggaaaacaagcctacatag

SEQ ID NO: 263650 - DNA, 201 bp, Artificial Sequence
  derived and/or modified sequence
atgctgagccggaacgacgtgaagcggctggagcggagctgggcccagggaagttctgaacaggagctgcattatgctagcctccaaaggctccccgtgccatctagcgagggtcctgacttacgagggagggataagcggggcacaaaagaggaccctcgagctgattatgcttgtattgccgagaataagccgacctag

SEQ ID NO: 263651 - DNA, 201 bp, Artificial Sequence
  derived and/or modified sequence
atgctgagccggaacgacgtgaagcggctggagcggagctgggcccaggggtcctcggagcaagagctacattacgcttcactgcagaggctgcctgtacccagcagcgaaggccccgatttaagagggcgcgacaagaggggcacaaaggaggacccccgggccgactacgcatgcattgctgagaataagcctacttag

SEQ ID NO: 263652 - DNA, 156 bp, Artificial Sequence
  derived and/or modified sequence
atgctgagccggaacgacgtgaagcggctggagcggagctggcggctccctgtgccatcatcagagggcccagacctccgggggagggataagcgagggacaaaagaggaccccagggctgactacgcgtgcatcgcagagaataaacctacatag

SEQ ID NO: 263653 - DNA, 201 bp, Artificial Sequence
  derived and/or modified sequence
atgctgagccggaacgacgtgaagcggctggagcggagctgggcccagggatcttccgaacaggaactccattacgcaagtttgcagcgtcttccagtacctagttctgaaggtccggatctcaggggccgtgacaaaaggggaacgaaggaggacccaagggctgattacgcctgtatcgccgaaaacaaacccacctag

SEQ ID NO: 263654 - DNA, 201 bp, Artificial Sequence
  derived and/or modified sequence
atgctgagccggaacgacgtgaagcggctggagcggagctgggcccagggctccagtgagcaggagctgcattacgcaagcctgcagagactgcccgtgccttcatccgagggcccagacctgcgagggagagacaagcgaggaaccaaggaagatcctcgggcagattacgcgtgtattgcagaaaacaagccaacatag

SEQ ID NO: 263655 - DNA, 201 bp, Artificial Sequence
  derived and/or modified sequence
atgctgagccggaacgacgtgaagcggctggagcggagctgggcccaaggcagcagtgagcaggaactccattatgcctctctgcagagattgccagttccaagttctgaaggaccggatttgcgcggaagagataagagggggactaaagaggatcccagggcagactacgcttgcatagcagagaacaaacccacctag

SEQ ID NO: 263656 - DNA, 201 bp, Artificial Sequence
  derived and/or modified sequence
atgctgagccggaacgacgtgaagcggctggagcggagctgggcccaggggtcttctgagcaggagcttcactacgccagccttcagcgactgcctgtgccgtcctccgaaggccctgacttgagaggaagagataaaaggggtaccaaggaagacccgcgggctgattatgcttgcatagcagaaaacaagcccacatag

SEQ ID NO: 263657 - DNA, 201 bp, Artificial Sequence
  derived and/or modified sequence
atgctgagccggaacgacgtgaagcggctggagcggagctgggcccagggctccagtgagcaggaactccattacgcgtccctgcagaggttgcctgtgcctagctccgagggccctgatctgagaggccgtgataaacggggcacaaaggaagatcccagagcagattacgcctgcatagctgagaataagcccacctag

SEQ ID NO: 263658 - DNA, 201 bp, Artificial Sequence
  derived and/or modified sequence
atgctgagccggaacgacgtgaagcggctggagcggagctgggcccaggggagcagcgagcaggagttgcattatgcttctctacagagactgcctgtacctagcagcgagggtcctgacctcagaggaagagataaacgcggcactaaggaagatccaagggctgactacgcatgcatagccgagaacaagccaacttag

SEQ ID NO: 263659 - DNA, 201 bp, Artificial Sequence
  derived and/or modified sequence
atgctgagccggaacgacgtgaagcggctggagcggagctgggcccagggctcctctgagcaggagctgcactatgcctccctccagcgtctcccagtgccatcatctgaaggacctgatttgagagggagggacaaaaggggaaccaaagaagaccccagggcagactacgcgtgtatcgccgagaataagccaacttag

SEQ ID NO: 263660 - DNA, 201 bp, Artificial Sequence
  derived and/or modified sequence
atgctgtcaaggaacgatgtcaagcgtttggagagatcctgggcacaggggtcctccgaacaggaacttcactacgcctccctgcagcggcttcccgtccccagctcggaggggccagacctgcggggaagagataaacggggaaccaaagaggaccctcgggcagattacgcctgcattgcagagaataagcccacttag

SEQ ID NO: 263661 - DNA, 156 bp, Artificial Sequence
  derived and/or modified sequence
atgttatccaggaacgatgttaagaggctagagcgcagctggcgtctgccagtcccctcttccgaaggtcccgaccttagagggagggacaagagagggactaaggaggacccccgagctgattacgcttgcatcgctgagaacaaacctacttag

SEQ ID NO: 263662 - DNA, 201 bp, Artificial Sequence
  derived and/or modified sequence
atgttgagcaggaatgatgtaaagcggctcgagcgctcttgggctcagggctcatcagaacaggagctgcattatgcctccttgcagcgtctcccagtcccttccagtgaaggaccagatctcaggggtcgggataagcgcggaacaaaggaagacccccgagccgattacgcttgtatcgccgaaaacaagcccacgtag

SEQ ID NO: 263663 - DNA, 201 bp, Artificial Sequence
  derived and/or modified sequence
atgttgtcaagaaatgatgtcaaacggctggaacgctcctgggctcaaggctcttccgagcaggaactccattacgcaagcctccagcgattgcctgtgccgtctagcgaaggcccagatttgcgcggacgcgataagaggggcacaaaagaggacccacgcgcagattacgcttgtatagcagaaaacaagccgacctag

SEQ ID NO: 263664 - DNA, 201 bp, Artificial Sequence
  derived and/or modified sequence
atgctctcacggaacgacgttaagcgattggaacggagttgggcacaggggtcatcagaacaggaactgcattacgcgagtcttcagcgtctcccggtcccgtcctcggagggacccgacctgcgtgggagagacaagaggggaactaaggaagaccccagggcggactacgcttgtattgccgaaaataagcctacgtag

SEQ ID NO: 263665 - DNA, 156 bp, Artificial Sequence
  derived and/or modified sequence
atgttaagtaggaacgatgttaaaaggctcgaacgtagttggaggctgccagtgccaagtagtgaaggcccagacctcagggggcgagataagagggggaccaaagaagatcccagggcggactacgcctgcatcgcagaaaataagcccacatag

SEQ ID NO: 263666 - DNA, 201 bp, Artificial Sequence
  derived and/or modified sequence
atgctgagtcgaaatgatgtcaaaaggttagagagatcctgggcgcaaggctcttctgagcaagagctgcattacgcctccctccaacggttgcccgtgccatcttccgagggtccagacttgcgcggaagagacaagcgaggaacgaaggaggatcctcgcgcagattatgcctgcatcgcagagaacaagcccacctag

SEQ ID NO: 263667 - DNA, 156 bp, Artificial Sequence
  derived and/or modified sequence
atgctgagtcgaaacgacgtgaaacgcctggagcgcagttggcgactgccggtcccctccagcgagggcccagacttgcgcggacgggacaaaagaggcacaaaggaagaccctcgagcagactatgcctgcatagctgaaaataagcccacttag

SEQ ID NO: 263668 - DNA, 201 bp, Artificial Sequence
  derived and/or modified sequence
atgctgagtcgtaacgacgtgaagcggctggagagaagttgggcccaaggatcttcggaacaggagttgcactatgcaagcttgcagaggcttcccgtcccttcatccgaaggacccgatctgcgaggccgtgacaagcgaggaacgaaggaggatccaagggccgattacgcatgcatagctgagaataagcctacgtag

SEQ ID NO: 263669 - DNA, 201 bp, Artificial Sequence
  derived and/or modified sequence
atgttgagcaggaatgatgtcaagcgcctggaacgcagttgggcccaagggtctagcgagcaggaactgcactacgcctcattacagcgattgcctgtccctagcagcgaaggcccagatctgcgcggtagggacaagcgcggaaccaaagaagatccgagagccgattatgcctgtattgcagagaataagccaacctag

SEQ ID NO: 263670 - DNA, 201 bp, Artificial Sequence
  derived and/or modified sequence
atgctctcacggaatgacgtgaagagactcgagcgctcctgggctcaaggttctagcgagcaagagctgcactacgccagcctgcagagactcccggtgccctcctctgaaggacccgacctcagagggcgagataagagaggcacaaaagaggatcctcgggctgactacgcatgcatcgccgaaaacaaacccacctag

SEQ ID NO: 263671 - DNA, 156 bp, Artificial Sequence
  derived and/or modified sequence
atgttgagtaggaacgatgttaagagactcgagagaagctggcgactgccggtgccatctagtgaaggtcctgacttgcgaggcagagacaaacggggaactaaagaagatcctcgggcagactatgcttgcattgcagaaaataaaccaacttag

SEQ ID NO: 263672 - DNA, 201 bp, Artificial Sequence
  derived and/or modified sequence
atgctgtccagaaacgatgtgaaaagacttgaacgatcgtgggctcagggctctagcgagcaagagttacattatgcctccctgcagaggctcccagtgccttcaagcgaaggacctgacctgagagggcgtgataaaaggggaaccaaagaggaccccagagctgactacgcctgcatagcagagaacaagccaacttag

SEQ ID NO: 263673 - DNA, 156 bp, Artificial Sequence
  derived and/or modified sequence
atgctgtcgcgaaacgacgttaaacgccttgagcgatcatggcgcctgcctgtgcccagcagtgaggggccagacctccggggaagagataagagaggcactaaagaagaccctcgggctgattatgcctgtatcgctgaaaacaagccaacctag

SEQ ID NO: 263674 - DNA, 201 bp, Artificial Sequence
  derived and/or modified sequence
atgctgagccgcaacgacgtgaaaagactggagcgctcttgggcgcaggggtctagcgaacaagaactgcattacgctagtctgcagaggctgcctgtgcctagctccgagggcccagacttgcgtggacgcgataagcggggaacaaaggaggatcctagggccgactacgcatgtatcgccgaaaacaaacctacctag

SEQ ID NO: 263675 - DNA, 201 bp, Artificial Sequence
  derived and/or modified sequence
atgctgagccggaacgacgtgaagcgactggagagatcctgggcacagggctcgagcgaacaagaacttcactacgctagcctgcagcgactgccagtgccaagttcagaaggccctgatctccgcggtcgtgataagaggggtacaaaagaggaccctagagccgactacgcatgcatcgctgagaataaacctacctag

SEQ ID NO: 263676 - DNA, 201 bp, Artificial Sequence
  derived and/or modified sequence
atgctttccaggaacgacgtcaaacggctcgagaggtcttgggctcaaggctcctcggagcaggaattgcattatgcgagtttgcagcgactgcctgttccttctagcgaaggtcctgacctcagggggagagataagcgaggaacaaaggaggatcctcgtgctgattacgcatgcatagcggaaaataagcccacgtag

SEQ ID NO: 263677 - DNA, 201 bp, Artificial Sequence
  derived and/or modified sequence
atgctcagccgaaacgacgtcaagcggttggaacgctcttgggcgcaagggagttccgaacaggaattacactacgcaagcctgcagcgtttgcctgtccctagttcagaaggtcccgatctccgtggcagagacaagaggggaacgaaggaagaccctagggccgattacgcctgcatcgccgaaaataaacctacctag

SEQ ID NO: 263678 - DNA, 201 bp, Artificial Sequence
  derived and/or modified sequence
atgctgtcccggaacgacgtcaaacgactagagcgctcttgggcacaggggtcctcggaacaggaattgcattacgcgtccctccagagactcccggtgcccagctcagaagggccagacctgaggggaagagataagcgtggcacaaaagaggaccccagggctgattacgcgtgcatcgctgagaataaacccacttag

SEQ ID NO: 263679 - DNA, 201 bp, Artificial Sequence
  derived and/or modified sequence
atgctcagtcgcaacgatgtgaagcgcttagagaggagctgggcacagggttcctccgagcaggagctgcattatgcgagtctgcagcgtctcccggtcccttcctcagaggggcctgacctgagaggacgagacaaacgagggaccaaagaagatcctcgggcagactacgcatgcatcgctgagaacaaaccaacctag

SEQ ID NO: 263680 - DNA, 156 bp, Artificial Sequence
  derived and/or modified sequence
atgcttagcaggaatgacgtcaaacgcctcgagagatcctggaggctgcccgttcccagcagcgaagggccagatctgcgcggtcgggacaaaagggggacaaaagaggaccccagggcggattacgcctgcatcgcagagaacaaaccaacttag

SEQ ID NO: 263681 - DNA, 156 bp, Artificial Sequence
  derived and/or modified sequence
atgctgtccaggaatgacgtcaaacgattagaaaggtcctggcggctcccagtgccttcctcagagggcccagacctcagaggacgcgacaagcgcggtactaaggaggatccaagggcggattacgcttgcatagctgagaataaacccacatag

SEQ ID NO: 263682 - DNA, 201 bp, Artificial Sequence
  derived and/or modified sequence
atgctcagccggaatgatgtgaagcgtctggagaggagttgggctcagggcagctccgaacaggagcttcactatgcttccctacagagactgcctgtaccgagctcagagggtcccgatctccgaggtcgggacaagcggggtacgaaggaggacccacgggcagattacgcctgtatcgctgaaaataagcctacctag

SEQ ID NO: 263683 - DNA, 201 bp, Artificial Sequence
  derived and/or modified sequence
atgctgtctcggaatgacgtgaagagactcgaaaggtcctgggcccagggctcctcagagcaggaactgcattacgcctcgctgcagcggctcccagttccatcatctgagggaccagatttgagggggagagataagagaggtaccaaagaggacccccgagccgattacgcgtgtattgctgaaaataagcctacatag

SEQ ID NO: 263684 - DNA, 156 bp, Artificial Sequence
  derived and/or modified sequence
atgctctctagaaatgatgtcaaacgtctcgaacgcagctggcgacttcctgtaccaagcagtgagggccctgacctgcgcggtcgcgataagcgaggcaccaaagaggaccctagagcagattatgcctgcatagccgaaaacaaacccacatag

SEQ ID NO: 263685 - DNA, 201 bp, Artificial Sequence
  derived and/or modified sequence
atgctcagccggaatgacgtgaagcgcctggagaggtcatgggctcagggatcaagcgaacaggagctacactacgctagcctgcagaggttacctgtacccagctctgaggggcctgatctccggggacgcgataagcggggaacaaaagaggatcccagggcagattacgcctgcatcgcagagaacaagccgacatag

SEQ ID NO: 263686 - DNA, 201 bp, Artificial Sequence
  derived and/or modified sequence
atgttatctcggaatgacgtaaaacgattggagcgctcttgggcccagggctcttccgagcaagaattgcactacgccagtctccaacgcctgcctgtgccctcatccgagggtcccgatcttaggggaagagataagagaggcacgaaagaggatccaagggcagactatgcctgcatcgcggaaaataagcctacctag

SEQ ID NO: 263687 - DNA, 201 bp, Artificial Sequence
  derived and/or modified sequence
atgcttagtaggaatgatgtgaagcgcttggaaagaagctgggcacagggctcttccgagcaagagctccactacgccagtctccagaggctgcccgtgccttctagcgagggacctgacctgcggggaagggataaacgtggcaccaaggaggaccctcgagctgattatgcatgcattgcagagaacaagcctacttag

SEQ ID NO: 263688 - DNA, 201 bp, Artificial Sequence
  derived and/or modified sequence
atgctcagccgtaacgatgttaagcgactggaaaggagttgggcacagggttcgtcagaacaagagctacactatgcctccctgcagagactcccggtaccttcgtctgagggccctgatctcagaggcagagacaaacgcggaacaaaagaagacccccgagcagattatgcgtgcattgccgagaataagccaacgtag

SEQ ID NO: 263689 - DNA, 201 bp, Artificial Sequence
  derived and/or modified sequence
atgcttagtagaaacgacgtgaagagactcgagagatcttgggctcagggatcctccgaacaggagcttcactacgccagtctgcagagactacccgtgccctcttccgaggggcctgacctgcgaggaagggacaagagggggaccaaagaagatcctcgcgcagattatgcttgcatcgccgagaacaagcctacatag

SEQ ID NO: 263690 - DNA, 201 bp, Artificial Sequence
  derived and/or modified sequence
atgctgtcaaggaacgacgtaaaacggcttgagcggtcctgggcccaaggctcaagcgagcaggagttgcattatgcctcactgcagaggttaccggtgccaagcagcgagggacctgacctgaggggaagagacaagcggggaaccaaagaggacccgagggccgactatgcttgtatcgcggagaacaagccaacctag

SEQ ID NO: 263691 - DNA, 201 bp, Artificial Sequence
  derived and/or modified sequence
atgttatcccgaaatgatgtgaagcgactggagaggtcttgggcccaggggtcctcagagcaggaactgcactatgcgagcctccagcggctgcctgtcccctcctcagaggggcctgatctgcgcggaagggataagcggggaaccaaggaagacccccgagccgattacgcttgtatcgccgagaataaacccacgtag

SEQ ID NO: 263692 - DNA, 201 bp, Artificial Sequence
  derived and/or modified sequence
atgctgagcagaaacgacgtgaagagactggagagaagctgggcccagggcagcagcgagcaggagctgcactacgccagcctgcagagactgcccgtgcccagcagcgagggccccgacctgagaggcagagacaagagaggcaccaaggaggaccccagagccgactacgcctgcatcgccgagaacaagcccacctag

SEQ ID NO: 263693 - DNA, 156 bp, Artificial Sequence
  derived and/or modified sequence
atgctgagcagaaacgacgtgaagagactggagagaagctggagactgcccgtgcccagcagcgagggccccgacctgagaggcagagacaagagaggcaccaaggaggaccccagagccgactacgcctgcatcgccgagaacaagcccacctag

SEQ ID NO: 263694 - protein, 66 aa, Artificial Sequence
  derived and/or modified sequence
MLSRNDDICIYGGLGLGGLLLLAVVLLSACLCWLHRRVKRLERSWRLPVPSSEGPDLRGRDKRGTK

SEQ ID NO: 263695 - protein, 97 aa, Artificial Sequence
  derived and/or modified sequence
MLSRNDDICIYGGLGLGGLLLLAVVLLSACLCWLHRRVKRLERSWAQGSSEQELHYASLQRLPVPSSEGPDLRGRDKRGTKEDPRADYACIAENKPT

SEQ ID NO: 263696 - protein, 82 aa, Artificial Sequence
  derived and/or modified sequence
MLSRNDDICIYGGLGLGGLLLLAVVLLSACLCWLHRRVKRLERSWRLPVPSSEGPDLRGRDKRGTKEDPRADYACIAENKPT

SEQ ID NO: 263697 - protein, 36 aa, Artificial Sequence
  derived and/or modified sequence
MLSRNDDICIYGGLGLGGLLLLAVVLLSACLCWLHR

SEQ ID NO: 263698 - protein, 46 aa, Artificial Sequence
  derived and/or modified sequence
MLSRNDDICIYGGLGLGGLLLLAVVLLSACLCWLHRREHCLALEPL

SEQ ID NO: 263699 - DNA, 201 bp, Artificial Sequence
  derived and/or modified sequence
atgttgagccgaaatgacgacatatgcatctacggaggcctgggactcggagggctgctactgctcgcagtggttttgctgtcagcctgtctgtgttggcttcaccgacgcgtgaagcggctggagaggagttggcgcctgccagtcccatcatctgaaggccctgatctccgtggacgggacaagcgcggtactaagtag

SEQ ID NO: 263700 - DNA, 294 bp, Artificial Sequence
  derived and/or modified sequence
atgctctcaaggaatgacgacatatgcatctatggggggcttggcctgggaggactactgttacttgctgtcgtgttgctctccgcctgcttatgctggttgcatcgacgggttaaacgattagagaggagctgggctcagggcagctcagaacaggaactgcactatgccagcctgcagagactcccggtgccctccagtgaaggccctgatttgaggggacgagacaagaggggaaccaaagaggatccgagagctgattatgcctgtatagctgagaacaagcctacctag

SEQ ID NO: 263701 - DNA, 249 bp, Artificial Sequence
  derived and/or modified sequence
atgctgtctaggaatgacgatatctgcatctacggggggctgggcctcggcggtctgctgctgcttgccgtggtgttgctaagtgcctgtttgtgctggttgcaccgccgcgtgaagcgcttggaaaggagttggcgtcttcctgttccttcatcagagggtcccgatcttagaggtcgggataagcgggggacaaaagaggaccctcgcgcagactatgcttgcatcgccgagaataagccgacatag

SEQ ID NO: 263702 - DNA, 294 bp, Artificial Sequence
  derived and/or modified sequence
atgctgtctcgtaacgatgacatttgtatctatggcgggctgggacttggaggcctgctgctccttgcggtcgtgctgctgtctgcatgtctgtgttggctccatagaagagtgaagcgcttagagaggtcttgggctcagggtagctccgaacaggagctccattatgcctccttacagcgcctgcctgtgccaagtagtgagggacccgatcttcggggacgggacaaacggggaactaaagaggatccacgtgccgattacgcttgcatcgcggagaataagccaacatag

SEQ ID NO: 263703 - DNA, 294 bp, Artificial Sequence
  derived and/or modified sequence
atgttgtcgcgcaacgacgatatttgcatttacggaggactaggactcgggggccttctcctcctcgccgttgtgctgctaagcgcatgtctgtgttggttacataggagggtgaaaaggttggaacgtagctgggcacaaggttcgagcgagcaggagctgcattatgcatccctccagcggctgccggtcccgtcctccgagggcccagatctgcgcggcagggacaagcggggaaccaaagaggaccccagagccgattatgcttgtatcgcagagaataaacctacctag

SEQ ID NO: 263704 - DNA, 294 bp, Artificial Sequence
  derived and/or modified sequence
atgttgtcaaggaacgatgacatctgcatctacggaggacttgggcttggcggcctgcttctgctggctgtcgtgcttttaagcgcatgtctctgttggttacaccggcgggtcaagcggctcgagcgtagttgggcccagggttcgagtgagcaggaactgcactatgcttccttgcagcgcttacccgtgccctctagcgagggtcctgacctgcgtggacgggataagcgcggtactaaagaggatcctagggcggactacgcatgtatcgccgaaaataaacccacctag

SEQ ID NO: 263705 - DNA, 249 bp, Artificial Sequence
  derived and/or modified sequence
atgttgtctcgcaatgacgacatctgcatttacgggggactcggacttgggggtcttctgctgctggccgttgtactcctgtccgcatgcctttgctggctacacagacgagtgaagagactagagaggtcctggcggctaccagttccatccagcgaaggaccggatctgaggggaagggataagcggggaactaaagaagaccctcgcgccgactacgcctgcattgccgagaataagcccacatag

SEQ ID NO: 263706 - DNA, 249 bp, Artificial Sequence
  derived and/or modified sequence
atgctgagtcggaacgatgacatatgtatttatggcggcttaggactaggaggattattgctcctcgcagtcgtgctcttgtctgcttgtctctgttggttgcatagaagagtgaagagactagaacgcagctggcgcctgcccgtgccatcgtctgaagggcccgatttgagaggccgcgataaaagggggacaaaggaggatcccagggcggactacgcatgtattgcagaaaacaaaccaacttag

SEQ ID NO: 263707 - DNA, 249 bp, Artificial Sequence
  derived and/or modified sequence
atgctatctcggaatgatgatatttgtatctacgggggcctgggcctggggggtctgctgctcctggctgtagtgctgttgtctgcatgcctgtgctggctccatcgtagagtcaagcgcttggaacgctcatggagattacctgtgcctagctccgaagggccagacctgaggggacgcgataagcgaggaaccaaagaggaccctcgggccgattacgcctgtatcgctgaaaataagcccacttag

SEQ ID NO: 263708 - DNA, 294 bp, Artificial Sequence
  derived and/or modified sequence
atgctgtctaggaacgatgacatttgcatctatggcggtctcggccttggggggctcttactcctggccgtggtgctgcttagtgcctgcctctgctggcttcatcgcagagtcaaaagactcgaacgtagctgggcccagggatccagtgagcaggagttacactatgcatctctgcagaggctgccagttccaagtagcgagggtcccgacctgcggggcagggataaacgtggaacaaaggaggaccccagagcagactatgcatgcattgctgaaaataagcccacttag

SEQ ID NO: 263709 - DNA, 294 bp, Artificial Sequence
  derived and/or modified sequence
atgctgagtcgaaacgacgatatttgcatttacggcggactggggcttggtggcctcctgctactcgccgtggtcctcttgtcagcttgtctgtgttggctccatcgtcgggttaagcggttggagaggagttgggcccaggggtccagcgagcaagagttgcattacgcctcattgcaacgtctcccagtgccatcaagcgaaggaccggacctccgcggtcgagataagaggggcaccaaggaggatcccagagcagattatgcttgcattgccgagaataaaccgacatag

SEQ ID NO: 263710 - DNA, 294 bp, Artificial Sequence
  derived and/or modified sequence
atgctttcccgaaatgacgatatttgcatctatggggggctcggtctcggtggcctgttgctcttagcagtggtcctgctctcggcgtgtttgtgttggctgcatagacgcgttaaacgccttgaaagaagttgggctcagggcagctcagagcaggagctacactacgcttcacttcagcgcctgcctgtgccgtcctcagaggggccagatctgagggggagagataaacggggaacaaaagaagacccccgcgcagactatgcctgtattgccgaaaataaacccacctag

SEQ ID NO: 263711 - DNA, 294 bp, Artificial Sequence
  derived and/or modified sequence
atgctgagccgcaacgacgacatctgtatttacggcggtcttgggctaggcggtctcctcctgctggccgtagtgctcctttccgcatgcctgtgctggctgcacaggcgagtgaaaaggcttgagcggtcatgggcccaggggtcttcagagcaggagctacactatgcttcattacagcgcctgccagtccctagttcagagggacctgacctgcggggtcgggacaagagagggaccaaggaggatccccgtgctgattacgcctgcattgctgaaaacaagcctacttag

SEQ ID NO: 263712 - DNA, 294 bp, Artificial Sequence
  derived and/or modified sequence
atgctatcccgtaatgacgatatatgcatctacggtggtctcgggcttggcggcctgctcttgttagcggtcgtactgctgtctgcctgtctttgctggttacacaggcgagttaagcggctggagcggagttgggctcagggaagctctgagcaagaactgcattacgcctcacttcaaaggctgcctgttccatcaagcgaagggcctgatttacgcggtcgggataaacgcggcacgaaagaagatcctagggctgattatgcctgcatcgcggaaaacaaaccaacgtag

SEQ ID NO: 263713 - DNA, 294 bp, Artificial Sequence
  derived and/or modified sequence
atgctatcaaggaatgacgatatttgtatctacggcggactgggattaggcggcctcttattactggccgtcgtgctcctgtcagcctgcctttgttggcttcaccggagagtgaagcgtctcgaaaggtcttgggcccaggggagtagtgaacaagagcttcattatgcttccctgcagcggctgcctgtgccctcgagcgaaggtcccgatcttcgcggcagggataagagaggaaccaaggaggaccccagggctgattacgcatgtatcgctgagaacaaacctacgtag

SEQ ID NO: 263714 - DNA, 294 bp, Artificial Sequence
  derived and/or modified sequence
atgctgagtaggaatgatgatatatgcatctacggggggctagggcttggcggtttactgctcctggcagtggtgctcctgtcggcttgcttgtgctggctgcaccggcgggttaagcggctggagaggtcgtgggcgcagggcagcagcgagcaagagctacattacgcctctctgcagagactgcctgtcccatctagtgagggaccagacctgcgcggcagggataagcgcggcaccaaagaggatccccgggcagactatgcatgcatcgccgagaataagcccacctag

SEQ ID NO: 263715 - DNA, 294 bp, Artificial Sequence
  derived and/or modified sequence
atgctcagtcggaatgacgacatctgtatctacggaggtttgggccttgggggccttctgttgctggcagtcgtgcttctgagcgcttgtctttgctggctccatcggcgcgtcaagcgcctcgagcgctcgtgggctcaggggtcttccgagcaagagctacactatgcatccctacagcggcttcctgttccatcatctgaggggcctgatctcaggggccgcgataaacgtggcactaaggaagatccacgggctgactatgcctgtattgccgagaataaacccacttag

SEQ ID NO: 263716 - DNA, 294 bp, Artificial Sequence
  derived and/or modified sequence
atgctgagccggaatgacgacatttgtatctacggcggtctgggcctgggtggtctgctgcttctagctgtggtcctgttaagcgcgtgtctgtgctggttgcatcgccgagttaaacgcttggagcgatcttgggcccagggcagctctgaacaagagttacactacgcttctctgcaaaggctgcctgtcccaagcagtgaggggccagacctgagaggccgcgacaagcggggcaccaaagaggatccacgagctgactatgcatgtatagccgagaacaagcccacgtag

SEQ ID NO: 263717 - DNA, 249 bp, Artificial Sequence
  derived and/or modified sequence
atgctaagcaggaatgatgatatctgtatttatggcgggttagggttaggcggcctgctgctattagccgtcgtgctgctttccgcctgcctttgttggctgcaccggagggtaaagcgcctcgaacggagctggaggctcccagtgccgagctccgaggggcccgatctccgcggcagagacaagagaggaacgaaggaggatcctagggccgactatgcctgtatcgccgagaacaagcccacatag

SEQ ID NO: 263718 - DNA, 249 bp, Artificial Sequence
  derived and/or modified sequence
atgctcagtcgcaatgacgatatatgcatatatggcgggctgggcctgggaggcctcctgctattggccgtggtgctcctgtctgcctgcctgtgttggttacaccgtcgggtaaagcgtctagaaagaagctggcggctgcccgtcccgagcagtgagggcccggaccttagaggacgcgacaagaggggtaccaaagaagatcctcgggccgactatgcctgtattgccgagaacaaacccacctag

SEQ ID NO: 263719 - DNA, 249 bp, Artificial Sequence
  derived and/or modified sequence
atgctgtctcgcaacgacgacatttgtatttacggagggttgggtctcggtggactcctgcttctggcagtcgtgctgttgtcagcttgtttgtgctggttgcaccggcgcgtgaagcgccttgagcggtcgtggagactgcccgtaccaagctctgaggggcccgatctgcggggtcgagacaagcgtgggactaaggaggatccgagggcggattacgcctgtatagctgaaaataagccgacgtag

SEQ ID NO: 263720 - DNA, 294 bp, Artificial Sequence
  derived and/or modified sequence
atgctgagtcggaatgacgatatttgtatttatggcgggctgggtctgggcggcctattgttgcttgcagttgtgctgttatcagcttgcctctgctggctacacaggagggttaaacgacttgaacgatcctgggcccagggctcttctgagcaagagctgcactacgcctcactccagcgactccccgttccatcttctgagggcccagatctcagaggacgggacaagagaggaaccaaagaggaccctcgcgcggactacgcttgtattgcggaaaacaagcccacttag

SEQ ID NO: 263721 - DNA, 294 bp, Artificial Sequence
  derived and/or modified sequence
atgctgtcccggaacgacgacatctgcatttacggaggcctgggtctgggcggtcttcttctcctcgctgtggtgctgttatccgcatgtctctgttggcttcaccgacgggttaagaggctcgagaggtcgtgggcacagggcagcagcgaacaggagcttcattacgcgtcccttcagaggcttcccgttccatcctctgaggggcccgatctaagggggcgggataagcgcggcactaaggaagatccccgcgcagattatgcgtgcatagctgagaacaagccaacctag

SEQ ID NO: 263722 - DNA, 294 bp, Artificial Sequence
  derived and/or modified sequence
atgttgtctaggaatgacgatatttgtatctacggaggtctgggtttaggtgggctactccttctggctgtggtcctgctgtccgcatgtctgtgttggcttcaccgtcgcgtgaagcgcctggaacgctcatgggctcagggctcttcagagcaagaactgcactacgctagcttgcagcggctgcctgtcccttcctctgagggtccagatttgagagggcgcgacaaacgtggcactaaagaggaccctcgtgcggattacgcctgcattgccgagaacaagcctacttag

SEQ ID NO: 263723 - DNA, 201 bp, Artificial Sequence
  derived and/or modified sequence
atgctgagcagaaatgatgacatctgcatctatggaggcctgggcctgggcggcctgctgctgctggccgtggtgctgctgagcgcctgcctgtgctggctgcaccggcgggtgaagaggctggagaggtcctggaggctgcctgtgcccagcagcgagggccctgacctgcggggccgggacaagaggggcaccaagtag

SEQ ID NO: 263724 - DNA, 294 bp, Artificial Sequence
  derived and/or modified sequence
atgctgagcagaaatgatgacatctgcatctatggaggcctgggcctgggcggcctgctgctgctggccgtggtgctgctgagcgcctgcctgtgctggctgcaccggcgggtgaagaggctggagaggtcctgggcccagggcagcagcgagcaggagctgcactacgccagcctgcagaggctgcctgtgcccagcagcgagggccctgacctgcggggccgggacaagaggggcaccaaggaggaccccagggctgactatgcctgcatcgccgagaacaagcccacctag

SEQ ID NO: 263725 - DNA, 249 bp, Artificial Sequence
  derived and/or modified sequence
atgctgagcagaaatgatgacatctgcatctatggaggcctgggcctgggcggcctgctgctgctggccgtggtgctgctgagcgcctgcctgtgctggctgcaccggcgggtgaagaggctggagaggtcctggaggctgcctgtgcccagcagcgagggccctgacctgcggggccgggacaagaggggcaccaaggaggaccccagggctgactatgcctgcatcgccgagaacaagcccacctag

SEQ ID NO: 263726 - DNA, 763 bp, Artificial Sequence
  derived and/or modified sequence
gctggggaggaacccaggctgggggagaagttaaagccagaggaggggcaggaatgtctgaggtggcaacacttctcttcagccagacagcactggccagtttggagtctgtccatcctgcaggccacaagctctggatgaggaacttgaggcaagtcaccagcccctgatcatttcgcctaaaagagcaaggactagagttcctgacctccaggccagtccctgatccctgacctaatgttatcgcggaatgatgatatatgtatctacgggggcctggggctgggcgggctcctgcttctggcagtggtccttctgtccgcctgcctgtgttggctgcatcgaagagtaaagaggctggagaggagctgggcccagggctcctcagagcaggaactccactatgcatctctgcagaggctgccagtgcccagcagtgagggacctgacctcaggggcagagacaagagaggcaccaaggaggatccaagagctgactatgcctgcattgctgagaacaaacccacctgagcaccccagacaccttcctcaacccaggcgggtggacagggtccccctgtggtccagccagtaaaaaccatggtccccccacttctgtgtctcagtcctctcagtccatctcgagcctccgttcaaattgatcatcatcaaaacttatgtggctttttgacctttgaatagggaattttttaaattttttaaaaattaaaataaaaaaaacacatggctcacccttccaccc

SEQ ID NO: 263727 - DNA, 382 bp, Artificial Sequence
  derived and/or modified sequence
gaaagtgcccagctcagggttggcacataagggaggctccccagcctgggaacgattataacagagggcccctcacttcacagatgaggaacttgaggcaagtcaccagcccctgatcatttcgcctaaaagagcaaggactagagttcctgacctccaggccagtccctgatccctgacctaatgttatcgcggaatgatgatatatgtatctacgggggcctggggctgggcgggctcctgcttctggcagtggtccttctgtccgcctgcctgtgttggctgcatcgaagagtaaagaggctggagaggagctggaggctgccagtgcccagcagtgagggacctgacctcaggggcagagacaagagaggcaccaagg

SEQ ID NO: 263728 - DNA, 523 bp, Artificial Sequence
  derived and/or modified sequence
taaagtccaggcttgaatctcgggtctttacttgggcaacgggcaccatgataccctatgttctggggattagcagtgaggaatgatgaggaacttgaggcaagtcaccagcccctgatcatttcgcctaaaagagcaaggactagagttcctgacctccaggccagtccctgatccctgacctaatgttatcgcggaatgatgatatatgtatctacgggggcctggggctgggcgggctcctgcttctggcagtggtccttctgtccgcctgcctgtgttggctgcatcgaagagtaaagaggctggagaggagctgggcccagggctcctcagagcaggaactccactatgcatctctgcagaggctgccagtgcccagcagtgagggacctgacctcaggggcagagacaagagaggcaccaaggaggatccaagagctgactatgcctgcattgctgagaacaaacccacctgagcaccccagacaccttcctcaacccaggcgggtggacagggtcc

SEQ ID NO: 263729 - DNA, 665 bp, Artificial Sequence
  derived and/or modified sequence
gaaagtgcccagctcagggttggcacataagggaggctccccagcctgggaacgattataacagagggcccctcacttcacagatgaggaacttgaggcaagtcaccagcccctgatcatttcgcctaaaagagcaaggactagagttcctgacctccaggccagtccctgatccctgacctaatgttatcgcggaatgatgatatatgtatctacgggggcctggggctgggcgggctcctgcttctggcagtggtccttctgtccgcctgcctgtgttggctgcatcgaagagtaaagaggctggagaggagctggaggctgccagtgcccagcagtgagggacctgacctcaggggcagagacaagagaggcaccaaggaggatccaagagctgactatgcctgcattgctgagaacaaacccacctgagcaccccagacaccttcctcaacccaggcgggtggacagggtccccctgtggtccagccagtaaaaaccatggtccccccacttctgtgtctcagtcctctcagtccatctcgagcctccgttcaaattgatcatcatcaaaacttatgtggctttttgacctttgaatagggaattttttaaattttttaaaaattaaaataaaaaaaacacatggctcacccttccaccca

SEQ ID NO: 263730 - DNA, 712 bp, Artificial Sequence
  derived and/or modified sequence
taaagtccaggcttgaatctcgggtctttacttgggcaacgggcaccatgataccctatgttctggggattagcagtgaggaatgatgaggaacttgaggcaagtcaccagcccctgatcatttcgcctaaaagagcaaggactagagttcctgacctccaggccagtccctgatccctgacctaatgttatcgcggaatgatgatatatgtatctacgggggcctggggctgggcgggctcctgcttctggcagtggtccttctgtccgcctgcctgtgttggctgcatcgaagagtaaagaggctggagaggagctgggcccagggctcctcagagcaggaactccactatgcatctctgcagaggctgccagtgcccagcagtgagggacctgacctcaggggcagagacaagagaggcaccaaggaggatccaagagctgactatgcctgcattgctgagaacaaacccacctgagcaccccagacaccttcctcaacccaggcgggtggacagggtccccctgtggtccagccagtaaaaaccatggtccccccacttctgtgtctcagtcctctcagtccatctcgagcctccgttcaaattgatcatcatcaaaacttatgtggctttttgacctttgaatagggaattttttaaattttttaaaaattaaaataaaaaaaacacatggctcacccttccaccca

SEQ ID NO: 263731 - DNA, 712 bp, Artificial Sequence
  derived and/or modified sequence
taaagtccaggcttgaatctcgggtctttacttgggcaacgggcaccatgataccctatgttctggggattagcagtgaggaatgatgaggaacttgaggcaagtcaccagcccctgatcatttcgcctaaaagagcaaggactagagttcctgacctccaggccagtccctgatccctgacctaatgttatcgcggaatgatgatatatgtatctacgggggcctggggctgggcgggctcctgcttctggcagtggtccttctgtccgcctgcctgtgttggctgcatcgaagagtaaagaggctggagaggagctgggcccagggctcctcagagcaggaactccactatgcatctctgcagaggctgccagtgcccagcagtgagggacctgacctcaggggcagagacaagagaggcaccaaggaggatccaagagctgactatgcctgcattgctgagaacaaacccacctgagcaccccagacaccttcctcaacccaggcgggtggacagggtccccctgtggtccagccagtaaaaaccatggtccccccacttctgtgtctcagtcctctcagtccatctcgagcctccgttcaaaatgatcatcatcaaaacttatgtggctttttgacctttgaatagggaattttttaaattttttaaaaattaaaattaaaaaaacacatggctcacccttccaccca

SEQ ID NO: 263732 - DNA, 712 bp, Artificial Sequence
  derived and/or modified sequence
taaagtccaggcttgaatctcgggtctttacttgggcaacgggcaccatgataccctatgttctggggattagcagtgaggaatgatgaggaacttgaggcaagtcaccagcccctgatcatttcgcctaaaagagcaaggactagagttcctgacctccaggccagtccctgatccctgacctaatgttatcgcggaatgatgatatatgtatctacgggggcctggggctgggcgggctcctgcttctggcagtggtccttctgtccgcctgcctgtgttggctgcatcgaagagtaaagaggctggagaggagctgggcccagggctcctcagagcaggaactccactatgcatctctgcagaggctgccagtgcccagcagtgagggacctgacctcaggggcagagacaagagaggcaccaaggaggatccaagagctgactatgcctgcattgctgagaacaaacccacctgagcaccccagacaccttcctcaacccaggcgggtggacagggtccccctgtggtccagccagtaaaaaccatggtccccccacttctgtgtctcagtcctctcagtccatctcgagcctccgttcaaaatgatcatcatcaaaacttatgtggctttttgacctttgaatagggaattttttaaattttttaaaaattaaaataaaaaaaacacatggctcacccttccaccca

SEQ ID NO: 263733 - DNA, 764 bp, Artificial Sequence
  derived and/or modified sequence
gctggggaggaacccaggctgggggagaagttaaagccagaggaggggcaggaatgtctgaggtggcaacacttctcttcagccagacagcactggccagtttggagtctgtccatcctgcaggccacaagctctggatgaggaacttgaggcaagtcaccagcccctgatcatttcgcctaaaagagcaaggactagagttcctgacctccaggccagtccctgatccctgacctaatgttatcgcggaatgatgatatatgtatctacgggggcctggggctgggcgggctcctgcttctggcagtggtccttctgtccgcctgcctgtgttggctgcatcgaagagtaaagaggctggagaggagctgggcccagggctcctcagagcaggaactccactatgcatctctgcagaggctgccagtgcccagcagtgagggacctgacctcaggggcagagacaagagaggcaccaaggaggatccaagagctgactatgcctgcattgctgagaacaaacccacctgagcaccccagacaccttcctcaacccaggcgggtggacagggtccccctgtggtccagccagtaaaaaccatggtccccccacttctgtgtctcagtcctctcagtccatctcgagcctccgttcaaaatgatcatcatcaaaacttatgtggctttttgacctttgaatagggaattttttaaattttttaaaaattaaaattaaaaaaacacatggctcacccttccaccca

SEQ ID NO: 263734 - DNA, 764 bp, Artificial Sequence
  derived and/or modified sequence
gctggggaggaacccaggctgggggagaagttaaagccagaggaggggcaggaatgtctgaggtggcaacacttctcttcagccagacagcactggccagtttggagtctgtccatcctgcaggccacaagctctggatgaggaacttgaggcaagtcaccagcccctgatcatttcgcctaaaagagcaaggactagagttcctgacctccaggccagtccctgatccctgacctaatgttatcgcggaatgatgatatatgtatctacgggggcctggggctgggcgggctcctgcttctggcagtggtccttctgtccgcctgcctgtgttggctgcatcgaagagtaaagaggctggagaggagctgggcccagggctcctcagagcaggaactccactatgcatctctgcagaggctgccagtgcccagcagtgagggacctgacctcaggggcagagacaagagaggcaccaaggaggatccaagagctgactatgcctgcattgctgagaacaaacccacctgagcaccccagacaccttcctcaacccaggcgggtggacagggtccccctgtggtccagccagtaaaaaccatggtccccccacttctgtgtctcagtcctctcagtccatctcgagcctccgttcaaattgatcatcatcaaaacttatgtggctttttgacctttgaatagggaattttttaaattttttaaaaattaaaataaaaaaaacacatggctcacccttccaccca

SEQ ID NO: 263735 - DNA, 665 bp, Artificial Sequence
  derived and/or modified sequence
gaaagtgcccagctcagggttggcacataagggaggctccccagcctgggaacgattataacagagggcccctcacttcacagatgaggaacttgaggcaagtcaccagcccctgatcatttcgcctaaaagagcaaggactagagttcctgacctccaggccagtccctgatccctgacctaatgttatcgcggaatgatgatatatgtatctacgggggcctggggctgggcgggctcctgcttctggcagtggtccttctgtccgcctgcctgtgttggctgcatcgaagagtaaagaggctggagaggagctggaggctgccagtgcccagcagtgagggacctgacctcaggggcagagacaagagaggcaccaaggaggatccaagagctgactatgcctgcattgctgagaacaaacccacctgagcaccccagacaccttcctcaacccaggcgggtggacagggtccccctgtggtccagccagtaaaaaccatggtccccccacttctgtgtctcagtcctctcagtccatctcgagcctccgttcaaaatgatcatcatcaaaacttatgtggctttttgacctttgaatagggaattttttaaattttttaaaaattaaaattaaaaaaacacatggctcacccttccaccca

SEQ ID NO: 263736 - DNA, 665 bp, Artificial Sequence
  derived and/or modified sequence
gaaagtgcccagctcagggttggcacataagggaggctccccagcctgggaacgattataacagagggcccctcacttcacagatgaggaacttgaggcaagtcaccagcccctgatcatttcgcctaaaagagcaaggactagagttcctgacctccaggccagtccctgatccctgacctaatgttatcgcggaatgatgatatatgtatctacgggggcctggggctgggcgggctcctgcttctggcagtggtccttctgtccgcctgcctgtgttggctgcatcgaagagtaaagaggctggagaggagctggaggctgccagtgcccagcagtgagggacctgacctcaggggcagagacaagagaggcaccaaggaggatccaagagctgactatgcctgcattgctgagaacaaacccacctgagcaccccagacaccttcctcaacccaggcgggtggacagggtccccctgtggtccagccagtaaaaaccatggtccccccacttctgtgtctcagtcctctcagtccatctcgagcctccgttcaaaatgatcatcatcaaaacttatgtggctttttgacctttgaatagggaattttttaaattttttaaaaattaaaataaaaaaaacacatggctcacccttccaccca

SEQ ID NO: 263737 - DNA, 764 bp, Artificial Sequence
  derived and/or modified sequence
gctggggaggaacccaggctgggggagaagttaaagccagaggaggggcaggaatgtctgaggtggcaacacttctcttcagccagacagcactggccagtttggagtctgtccatcctgcaggccacaagctctggatgaggaacttgaggcaagtcaccagcccctgatcatttcgcctaaaagagcaaggactagagttcctgacctccaggccagtccctgatccctgacctaatgttatcgcggaatgatgatatatgtatctacgggggcctggggctgggcgggctcctgcttctggcagtggtccttctgtccgcctgcctgtgttggctgcatcgaagagtaaagaggctggagaggagctgggcccagggctcctcagagcaggaactccactatgcatctctgcagaggctgccagtgcccagcagtgagggacctgacctcaggggcagagacaagagaggcaccaaggaggatccaagagctgactatgcctgcattgctgagaacaaacccacctgagcaccccagacaccttcctcaacccaggcgggtggacagggtccccctgtggtccagccagtaaaaaccatggtccccccacttctgtgtctcagtcctctcagtccatctcgagcctccgttcaaaatgatcatcatcaaaacttatgtggctttttgacctttgaatagggaattttttaaattttttaaaaattaaaataaaaaaaacacatggctcacccttccaccca

SEQ ID NO: 263738 - DNA, 201 bp, Artificial Sequence
  derived and/or modified sequence
atgctgagccggaacgacgacatctgcatctacggcggcctgggcctgggtggattactactccttgctgttgttttgctctccgcttgtctatgttggttacacagaagagtgaagcgcctggaaagatcctggagactgccagtcccctcaagtgaagggccggacctgagaggcagagacaagcgcggtactaaatag

SEQ ID NO: 263739 - DNA, 294 bp, Artificial Sequence
  derived and/or modified sequence
atgctgagccggaacgacgacatctgcatctacggcggcctgggcctgggaggtctactgctgctagctgtggttctgctatccgcgtgtctgtgttggctacatcgacgagtcaaaagattggaaaggagctgggcccaaggaagttcagagcaggaattacattacgcaagtctccagcgcttacctgtgcctagctctgagggcccagatctgaggggcagggacaaaaggggaactaaagaagacccccgagctgattacgcctgcatcgctgagaataagccgacctag

SEQ ID NO: 263740 - DNA, 249 bp, Artificial Sequence
  derived and/or modified sequence
atgctgagccggaacgacgacatctgcatctacggcggcctgggcctgggcggacttctactgctggccgtggtgttgctatccgcatgcctttgttggctgcaccgaagggtaaagcggctcgagagatcttggaggttacctgttccatcatccgagggtcccgatctgagggggcgagataagcgggggacaaaagaggatccacgcgccgattacgcatgcatagcggagaacaaacccacgtag

SEQ ID NO: 263741 - DNA, 294 bp, Artificial Sequence
  derived and/or modified sequence
atgctgagccggaacgacgacatctgcatctacggcggcctgggcctgggtggcctgctacttctcgcagtcgtgcttctgtccgcttgcctttgctggctgcacaggcgggtgaaaaggctggagcgttcatgggctcagggttcatcagagcaggaactgcactacgctagcttgcaaaggctgcccgtcccaagctccgaggggcccgacttgcgtggcagagataagagaggaacaaaggaggaccccagggccgactacgcgtgcatcgcagaaaacaagcccacctag

SEQ ID NO: 263742 - DNA, 294 bp, Artificial Sequence
  derived and/or modified sequence
atgctgagccggaacgacgacatctgcatctacggcggcctgggcttaggtggcctgctattgcttgcagtggtgctgctgtccgcgtgtctgtgttggctccacaggagagtgaagcggctcgagcggtcatgggcccaaggcagttcagagcaggaactccactacgcaagcctccaacggctccctgttccatccagtgagggtccggacctccgcggaagagataagcgggggacaaaagaggaccctcgtgcagattacgcttgcatcgcagaaaacaagcccacctag

SEQ ID NO: 263743 - DNA, 294 bp, Artificial Sequence
  derived and/or modified sequence
atgctgagccggaacgacgacatctgcatctacggcggcctgggcctcggaggactgctgctacttgccgtagtgctcctgtccgcatgcctgtgctggttacaccgtcgtgtcaaaaggctcgagaggtcatgggctcaggggagttctgaacaggagctgcactacgcctctctccaaaggctgcctgtgccctctagtgaggggcctgacctgagaggacgggataaacgcggaaccaaagaggaccccagggcagactatgcatgtattgcagaaaacaagccaacgtag

SEQ ID NO: 263744 - DNA, 249 bp, Artificial Sequence
  derived and/or modified sequence
atgctgagccggaacgacgacatctgcatctacggcggcctgggccttggcgggctcctgttgctggctgtcgtgctcctgtccgcatgcctctgttggctgcataggcgagtcaaacgactcgagaggtcatggaggcttcctgtgccttccagtgagggccctgacttgcggggaagggacaaacggggaaccaaggaggatccccgagccgactacgcttgcatcgcagaaaataagcccacctag

SEQ ID NO: 263745 - DNA, 249 bp, Artificial Sequence
  derived and/or modified sequence
atgctgagccggaacgacgacatctgcatctacggcggcctgggcctgggcggactcctcctgttggctgtcgtgctcctgtcagcttgtctctgttggcttcatagacgcgttaagagacttgagcgatcctggaggcttccggtcccctcctcagagggccctgacttacgaggccgtgataaaagaggcactaaggaagatccccgggccgactatgcatgcatcgccgagaacaagcctacctag

SEQ ID NO: 263746 - DNA, 249 bp, Artificial Sequence
  derived and/or modified sequence
atgctgagccggaacgacgacatctgcatctacggcggcctgggccttggaggattgcttctcctcgccgttgttctgctgtcggcgtgtctttgttggctgcaccgcagagtcaagcgactggagcgctcctggcgcctgcccgtcccctcatcggaaggtcccgatctcagggggcgagataaacgcggtacaaaggaggacccccgcgcagactacgcatgtattgccgaaaacaaaccgacctag

SEQ ID NO: 263747 - DNA, 294 bp, Artificial Sequence
  derived and/or modified sequence
atgctgagccggaacgacgacatctgcatctacggcggcctgggcctgggaggtctgctgcttcttgccgtggtgctactatccgcatgcctctgttggctccacagaagggtgaagcggctggagcgatcttgggctcaggggtcctcagagcaggagctgcattacgcttcactccagagactgccagtgccgagctcggaagggccagacctgagaggcagggacaagcgaggtaccaaggaggaccctagggccgattatgcctgcatcgctgagaataaacccacctag

SEQ ID NO: 263748 - DNA, 294 bp, Artificial Sequence
  derived and/or modified sequence
atgctgagccggaacgacgacatctgcatctacggcggcctgggcttaggggggctccttctccttgctgttgtgctgctgagcgcctgtttgtgctggctgcaccggagagtgaaaagactggagcgctcctgggctcagggtagctctgagcaagagctgcactatgcgtccctgcagaggctcccagtcccttcttctgagggcccagacctgcggggtagggacaaaaggggtacaaaggaagaccccagagccgattacgcctgcatcgcagaaaataagccgacgtag

SEQ ID NO: 263749 - DNA, 294 bp, Artificial Sequence
  derived and/or modified sequence
atgctgagccggaacgacgacatctgcatctacggcggcctgggcctgggcggcctcctgcttctggctgttgtgctcctgagcgcctgtctgtgttggttgcaccgacgagtaaagagactggaaaggagctgggctcagggcagcagcgagcaggagcttcattatgcatccctgcagagactgccagtcccatctagtgaggggcctgacctgcgcggaagggataagcgaggcactaaagaggacccaagggctgactacgcctgcatcgctgagaataaacctacatag

SEQ ID NO: 263750 - DNA, 294 bp, Artificial Sequence
  derived and/or modified sequence
atgctgagccggaacgacgacatctgcatctacggcggcctgggcctggggggcctcctgctgttggcagtggtgttgctttctgcgtgtctctgttggctacatagacgggtgaaacgcctcgagagaagctgggcccagggcagctcagaacaggaattgcattacgctagtctgcagaggctgcccgtgccttccagcgaaggccctgacttgcgtggtagagacaagagaggcactaaggaggatccaagggcggactatgcctgtattgctgaaaacaaacccacctag

SEQ ID NO: 263751 - DNA, 294 bp, Artificial Sequence
  derived and/or modified sequence
atgctgagccggaacgacgacatctgcatctacggcggcctgggcttgggtgggctgctcttgttggcggtggtgctgctgagcgcttgcctctgctggctacatcggagggtaaaacgtctcgagcggtcctgggcccaggggagctcggaacaggagctgcactacgcaagcctgcaaaggctgcccgtcccatcgtctgagggacctgatttgaggggtagagacaagcgaggcacgaaagaagatccacgggccgactatgcctgtatcgcggagaataaacccacctag

SEQ ID NO: 263752 - DNA, 294 bp, Artificial Sequence
  derived and/or modified sequence
atgctgagccggaacgacgacatctgcatctacggcggcctgggcttaggaggtctcttgctgttagccgttgttttactgtcggcctgtctctgctggctccacagacgggttaagcgattagaaagatcctgggcccagggttcctccgaacaggaattgcactacgcaagcttacagcgcctgcctgtcccctcatccgaggggcctgacctccgaggacgggataagcggggaaccaaagaggacccaagagcagattatgcctgtattgctgagaacaagcctacgtag

SEQ ID NO: 263753 - DNA, 294 bp, Artificial Sequence
  derived and/or modified sequence
atgctgagccggaacgacgacatctgcatctacggcggcctgggcttggggggcctactcctgctggccgttgttctattgtcggcctgcctttgttggttacacagacgcgtaaaacgattagagcgcagctgggctcaggggagctctgaacaggaattgcactacgctagtctccaacggctcccggttccttccagcgaaggacccgatctgaggggacgagataaaagggggaccaaggaagatccaagggccgactacgcgtgtatagccgaaaataaacctacctag

SEQ ID NO: 263754 - DNA, 294 bp, Artificial Sequence
  derived and/or modified sequence
atgctgagccggaacgacgacatctgcatctacggcggcctgggcctgggcggcctccttctacttgctgtggtgttgctgtcggcatgcctatgttggcttcacagaagggttaagcggctcgagcggtcatgggcccaggggtcgtctgaacaggaactgcactatgcaagtttgcagagactcccggtcccatcttccgaagggcctgacctccgcggtagagataaaaggggcactaaggaggatcctagggctgattacgcctgcattgccgagaataaacccacctag

SEQ ID NO: 263755 - DNA, 294 bp, Artificial Sequence
  derived and/or modified sequence
atgctgagccggaacgacgacatctgcatctacggcggcctgggcctgggcgggctcctcctgcttgccgtcgtgttactctcagcctgcctctgttggctacatcgaagagtgaaacggttggagcgctcatgggcccaaggcagcagcgagcaagaactgcactacgcctctctgcagcgtttaccagttccctccagcgagggaccggatctacgcggacgggacaaaaggggcactaaagaggacccgcgcgctgattacgcatgcatcgccgaaaacaaaccgacatag

SEQ ID NO: 263756 - DNA, 249 bp, Artificial Sequence
  derived and/or modified sequence
atgctgagccggaacgacgacatctgcatctacggcggcctgggcctggggggattgttgttgcttgccgtagtgctgctgtctgcgtgtctgtgttggctgcaccggcgagtgaagaggctcgaaaggtcctggaggctacctgtccctagttccgagggcccagatctccgcggccgggataagaggggaactaaggaggaccctagagccgattatgcctgcatcgcggaaaacaagcccacctag

SEQ ID NO: 263757 - DNA, 249 bp, Artificial Sequence
  derived and/or modified sequence
atgctgagccggaacgacgacatctgcatctacggcggcctgggccttggaggcctgctgctattggccgtggtcctgctatcagcttgtttgtgctggcttcacaggcgagttaagcgactggagcggtcatggagactccccgtgccctcttcagagggtcccgaccttcgtggacgcgacaagaggggcaccaaagaggatccccgcgctgattatgcatgtattgccgagaacaagcctacctag

SEQ ID NO: 263758 - DNA, 249 bp, Artificial Sequence
  derived and/or modified sequence
atgctgagccggaacgacgacatctgcatctacggcggcctgggccttgggggccttttgctgctggctgtggttttactatcggcctgtttatgttggttgcatcgcagggtcaaacgcctcgaaagatcgtggagactgcccgttcctagttcggagggccctgatctacgaggtcgcgacaagagagggactaaggaagaccctcgggcggactacgcatgtattgccgaaaacaagcccacctag

SEQ ID NO: 263759 - DNA, 294 bp, Artificial Sequence
  derived and/or modified sequence
atgctgagccggaacgacgacatctgcatctacggcggcctgggcctcggtggcctgctactgctagcggttgtcctgctgtccgcatgtctgtgctggctgcatcggagagtcaagcgcctggaaagaagttgggctcagggctcaagcgagcaggaactccactatgcaagtctgcagaggttacccgtgccatcctccgaagggcctgatctccggggacgcgataaacgaggtaccaaggaggacccacgggctgattacgcctgcattgcggagaataaaccaacatag

SEQ ID NO: 263760 - DNA, 294 bp, Artificial Sequence
  derived and/or modified sequence
atgctgagccggaacgacgacatctgcatctacggcggcctgggcttagggggcttattgttgctggcggtggtgctgctttcagcctgtttatgttggctgcatcgtcgggtgaagaggctcgaaagatcctgggcccagggatccagtgagcaggagttgcattatgcctccctgcagcggctgccggtgcccagctctgaggggccagatctgagggggagagataagcgtggcactaaagaagatcccagagcggactatgcgtgtatagctgaaaataaacctacctag

SEQ ID NO: 263761 - DNA, 294 bp, Artificial Sequence
  derived and/or modified sequence
atgctgagccggaacgacgacatctgcatctacggcggcctgggccttggcggcttgctgctgctcgcagtggtgctgctctcggcctgtctgtgttggctgcacagacgtgtgaagaggttggagaggtcttgggctcaaggaagttcagaacaggaactccactatgcttcactgcagcggctgccagtgcctagcagtgagggccccgatttgcgcggacgggataagcgagggaccaaggaagatccccgcgccgattacgcctgtatcgccgagaacaaaccaacctag

SEQ ID NO: 263762 - DNA, 201 bp, Artificial Sequence
  derived and/or modified sequence
atgctcagcagaaacgacgatatttgtatctatggaggcctggggctgggcggtctgctattactcgctgtggtcttactgtctgcctgcctgtgctggttgcaccggcgagtcaaaagactggagcgatcatggcgactcccagtcccctctagtgagggtccagatctgcgcggacgggacaaacggggaacaaagtag

SEQ ID NO: 263763 - DNA, 294 bp, Artificial Sequence
  derived and/or modified sequence
atgctgtctcgcaacgatgatatttgtatctatggcggactgggcctgggcggtctcttgctcctcgccgtagttctgctgtctgcctgtctgtgttggctgcatagaagagtgaaaagactggagcgtagctgggcacaagggagctccgaacaggaattgcactatgcgagcctccaacggctgcccgtgccctcgagcgaaggaccagatctgcggggaagagacaaaagaggcactaaggaagacccgagagcagactatgcctgcattgctgaaaacaaaccaacttag

SEQ ID NO: 263764 - DNA, 249 bp, Artificial Sequence
  derived and/or modified sequence
atgctctcaaggaatgacgatatctgcatctacggaggccttggcctcggcggactcttactgctggctgtcgtgctactctccgcctgtctctgctggctgcaccgcagagtcaagcgccttgaacgtagttggagactgcccgtcccatcgtcagaaggacccgaccttcgtggcagagataaacgcggtaccaaagaagatccgagagcagactatgcgtgtatcgcggagaataaacctacgtag

SEQ ID NO: 263765 - DNA, 294 bp, Artificial Sequence
  derived and/or modified sequence
atgctgagtcgcaatgacgatatctgcatctatggaggtctaggactgggaggactactgttgctggctgtggtccttctaagcgcctgtttgtgttggctccatcggagggttaagcgcctggagagatcctgggcacagggtagcagtgaacaggagttgcactacgcaagcctgcagagactgcctgtgccatcatcagaaggacccgacctgaggggacgggataagagaggaacaaaggaggatcctagggcagattacgcgtgcatcgcagaaaacaagcctacctag

SEQ ID NO: 263766 - DNA, 294 bp, Artificial Sequence
  derived and/or modified sequence
atgctttcccgcaatgacgatatctgtatttacggcggtctggggctggggggtctgcttctgcttgccgtggtgttacttagtgcctgcctctgttggcttcatcgccgagtcaagcgactcgaacggagctgggcccaggggtctagcgagcaggagctgcattatgcctcacttcaaaggctgcctgtcccttcctccgaggggccagaccttcgaggcagagataagcgtggaaccaaagaggatcccagagcggactatgcgtgtatagctgagaataagcccacctag

SEQ ID NO: 263767 - DNA, 294 bp, Artificial Sequence
  derived and/or modified sequence
atgctcagccggaacgacgacatctgtatctacggcggtcttggcttgggcggtttgctactgttggcagtggtcctgttgtctgcctgcctgtgttggttgcacagacgcgttaaacggttagaacgaagttgggctcagggatccagtgaacaggaactgcactatgcaagcctgcagagacttcccgtccccagttccgagggacccgatctgagggggcgagataaacgcggaaccaaagaggaccccagggcggattatgcctgcatcgctgaaaacaagcctacttag

SEQ ID NO: 263768 - DNA, 249 bp, Artificial Sequence
  derived and/or modified sequence
atgctgtcacgcaacgatgatatctgcatatacgggggacttggtctcggcggactcctgctacttgccgtggttctcctgtcggcatgcttgtgttggttacaccgcagggtgaagcgtctggagagatcttggaggcttcccgtcccctcttccgaaggaccagatcttcgaggcagggataagaggggaactaaggaagacccacgcgctgattatgcctgcatcgcagagaacaaaccgacttag

SEQ ID NO: 263769 - DNA, 249 bp, Artificial Sequence
  derived and/or modified sequence
atgctgtccagaaacgatgatatttgcatttacgggggattaggcctaggtgggcttctgctgttagccgtggtgttgctcagcgcatgtctctgttggctgcacaggcgcgttaagagattagagaggtcttggcggttacctgtgccaagtagcgagggacctgatctcaggggacgtgacaaaagaggcaccaaagaggaccccagagccgactatgcctgtattgctgaaaataagcctacatag

SEQ ID NO: 263770 - DNA, 249 bp, Artificial Sequence
  derived and/or modified sequence
atgctctctcgcaatgacgatatctgcatctacgggggattgggcctgggtggactcctgctgctcgctgtggtgctcctttctgcttgcctgtgctggctccaccggcgtgtcaaacgcttggaaagatcatggagactgcctgtaccaagctcagaaggacctgatctgcgcggtcgagacaagaggggtactaaggaagatccgcgagctgactatgcttgtattgctgagaacaaacccacgtag

SEQ ID NO: 263771 - DNA, 294 bp, Artificial Sequence
  derived and/or modified sequence
atgctgtctcggaacgacgatatctgcatttatggaggtctgggactgggagggttgctcctgctggcagttgtgttgttgtcagcctgcctatgttggctccaccgcagggtgaagaggttagagaggtcctgggctcaggggagctccgagcaggaattacattatgcctcgctgcaacggcttcccgtgccatctagcgagggacctgacctccggggacgcgataagaggggcactaaggaggatcccagagcggactacgcatgcattgcggagaacaagcctacctag

SEQ ID NO: 263772 - DNA, 294 bp, Artificial Sequence
  derived and/or modified sequence
atgctctctagaaacgacgacatttgcatatacggaggattgggactggggggtctattgctgctggcggtggtgttactgtccgcctgcctatgctggctgcacaggcgtgttaaaaggctggagcgatcctgggcccaaggttcttcagagcaagagcttcactacgcttcactgcagaggttacctgtccctagtagcgaggggccagatctaaggggcagggataaaagaggcacaaaagaggacccccgagcggactatgcctgcatcgcagagaacaagcccacctag

SEQ ID NO: 263773 - DNA, 294 bp, Artificial Sequence
  derived and/or modified sequence
atgttgagccgaaatgatgacatttgcatctacggaggcctgggcctgggaggactgctcttgctggccgtggtgttactgtctgcctgtctgtgctggctgcatcgcagggtgaaacggctcgaacgcagctgggcccaagggagtagcgaacaggagcttcactacgcttctttgcagcgcctccctgtcccatcctccgaaggtccagatctgcgcggtcgtgataagcggggtaccaaggaggacccacgggctgactacgcctgtatcgccgaaaataagccaacctag

SEQ ID NO: 263774 - DNA, 294 bp, Artificial Sequence
  derived and/or modified sequence
atgctaagcagaaacgacgatatctgtatttacgggggactgggcctcggcggactgttactactcgctgtggtgttgctcagcgcctgtctatgctggttgcaccgcagagtaaagcgattggaacgctcctgggcacaaggatcttcagagcaggagcttcactatgcttccctgcagcgattgccagtccccagctccgaggggccagatcttagaggccgagacaaaagagggaccaaggaagacccaagggccgattacgcctgcatcgcggaaaacaaacccacgtag

SEQ ID NO: 263775 - DNA, 294 bp, Artificial Sequence
  derived and/or modified sequence
atgctctcaaggaacgacgatatctgcatctatggcggactggggttggggggactccttttgctggccgtcgtccttcttagcgcctgtctctgttggctgcatagaagggtcaagcgcttggagcggagctgggcacaggggagcagtgaacaggaacttcactatgcatctctgcagcgccttccagttccatcttccgaggggccagatctgaggggtagggataagcggggaacaaaagaagatccccgagccgactatgcttgtatcgccgagaataagcctacctag

SEQ ID NO: 263776 - DNA, 294 bp, Artificial Sequence
  derived and/or modified sequence
atgctctctcgaaacgatgatatctgtatttatggcggattaggcttagggggactcctgctgctcgctgtcgtgctattgtccgcttgcttgtgctggctacaccgtagagtgaagaggctcgaaagatcctgggctcagggctcatctgagcaagagctccactacgcttctctgcagcgactgcctgtgccaagcagtgagggtcccgatctgagagggcgtgataagagagggacgaaggaggacccaagggcagactacgcctgcatcgccgagaacaagccgacatag

SEQ ID NO: 263777 - DNA, 294 bp, Artificial Sequence
  derived and/or modified sequence
atgctcagccggaatgacgacatctgcatctacggagggctgggccttggaggtctgctgctgctcgcggtggtcctgctgtccgcctgtttatgttggctgcaccgtcgggtcaagagactcgagaggagctgggcgcagggaagttctgagcaagagctgcattatgccagtctgcagcgtctaccggtgccctcttcagaaggcccagacttgaggggcagagataagcggggaactaaggaggatcctagggcagactatgcatgcatcgccgagaataaacccacctag

SEQ ID NO: 263778 - DNA, 294 bp, Artificial Sequence
  derived and/or modified sequence
atgttaagcagaaatgacgatatctgtatctatggtggtttaggactggggggactgcttctactcgctgtggtgctgctcagtgcctgtttgtgctggctgcacagaagagtcaagcgcctggagagaagctgggcacagggttccagcgaacaggagttacattacgcatcactgcagcgcctgcccgtgcctagcagtgaaggccctgacctccggggaagggacaagcgcggtactaaagaagatccgagagccgattacgcatgcattgccgagaataaacctacttag

SEQ ID NO: 263779 - DNA, 294 bp, Artificial Sequence
  derived and/or modified sequence
atgttgtcccggaacgacgacatctgtatctacggcggactgggcctcgggggtttactgctcctggccgtggtgctgttgtctgcttgcctgtgttggctgcatagaagagtgaagcgacttgaaaggtcctgggcacagggaagctcggagcaggaactgcactacgccagcctgcagagactccccgttccttccagcgaaggacccgacctgaggggacgggataaacgcggtacgaaggaggatcctcgggctgattatgcctgtattgctgagaacaagccaacatag

SEQ ID NO: 263780 - DNA, 249 bp, Artificial Sequence
  derived and/or modified sequence
atgttatcccgcaacgacgatatttgtatttacgggggactgggcctgggcggtttgctcttgctggccgttgtcctgctgtctgcttgcctttgttggctgcaccgacgcgtgaaacgactagagcgctcttggaggctacctgttcccagctctgaagggccagatttgcgaggtcgcgacaagaggggtacaaaggaggacccacgagctgattacgcatgtatagccgagaacaagccaacatag

SEQ ID NO: 263781 - DNA, 249 bp, Artificial Sequence
  derived and/or modified sequence
atgttgtcacgcaacgacgatatatgcatatatggcggattgggcttaggtgggttgttgctgctcgcagtggtcctgttgtctgcatgcttatgttggttgcacagacgagttaaaaggcttgagagaagttggaggctgccagtcccttcgtcagagggcccagatctgcgcggacgggataagcgagggacaaaggaggacccaagggctgactatgcctgtattgcggagaataagccaacttag

SEQ ID NO: 263782 - DNA, 249 bp, Artificial Sequence
  derived and/or modified sequence
atgctgtctagaaatgatgacatttgtatttatggcggactggggctcggtggtcttctactgctggctgtcgtgctgctttctgcttgtctctgttggttgcacaggcgagtgaaacgattagagcggtcatggcggctaccagtcccttccagcgagggacccgacctgcggggtagagacaagaggggcactaaggaagacccccgtgctgactacgcttgcattgcagaaaataaaccgacatag

SEQ ID NO: 263783 - DNA, 294 bp, Artificial Sequence
  derived and/or modified sequence
atgctttctagaaacgacgacatttgtatttatgggggtctgggcctggggggtctgcttttgctggccgtggtattactatcggcgtgcctgtgctggttgcataggagggttaaaaggctggagcggtcttgggcacagggaagctcagagcaagagctgcattatgccagcctgcagagactgcccgtgcccagttccgagggacctgacttgaggggacgcgacaaacgtggaaccaaggaggatccaagagcggattatgcatgcatcgcagagaacaaaccaacatag

SEQ ID NO: 263784 - DNA, 294 bp, Artificial Sequence
  derived and/or modified sequence
atgctctcgcggaacgatgacatttgtatctatggtggcttagggctggggggattacttcttttagcagtcgtgttactgagcgcctgcctatgctggctacaccggagggtgaaacgtttagagcgtagttgggcacaggggtcctccgaacaggaactccattacgctagcctgcagaggctgcccgtgccttcaagtgagggcccagacctgagaggacgtgacaaaaggggaaccaaagaggacccacgcgcagactacgcttgcattgctgagaataaaccgacttag

SEQ ID NO: 263785 - DNA, 294 bp, Artificial Sequence
  derived and/or modified sequence
atgctttcgcggaatgacgacatctgtatttacgggggtctaggtctgggtggactgctgctgctggcggtggttctgcttagtgcttgcctctgttggctgcaccgacgcgtgaagaggctggaaagatcatgggcccagggatcttccgagcaggaactgcactacgccagtcttcagcgtctcccagttccatcatctgagggtcctgatctccggggacgtgacaaaaggggaacaaaagaggatcctcgcgctgactacgcctgcattgctgaaaataagccaacttag

SEQ ID NO: 263786 - DNA, 201 bp, Artificial Sequence
  derived and/or modified sequence
atgctgagcagaaacgacgacatctgcatctacggcggcctgggcctgggcggcctgctgctgctggccgtggtgctgctgagcgcctgcctgtgctggctgcacagaagagtgaagagactggagagaagctggagactgcccgtgcccagcagcgagggccccgacctgagaggcagagacaagagaggcaccaagtag

SEQ ID NO: 263787 - DNA, 294 bp, Artificial Sequence
  derived and/or modified sequence
atgctgagcagaaacgacgacatctgcatctacggcggcctgggcctgggcggcctgctgctgctggccgtggtgctgctgagcgcctgcctgtgctggctgcacagaagagtgaagagactggagagaagctgggcccagggcagcagcgagcaggagctgcactacgccagcctgcagagactgcccgtgcccagcagcgagggccccgacctgagaggcagagacaagagaggcaccaaggaggaccccagagccgactacgcctgcatcgccgagaacaagcccacctag

SEQ ID NO: 263788 - DNA, 249 bp, Artificial Sequence
  derived and/or modified sequence
atgctgagcagaaacgacgacatctgcatctacggcggcctgggcctgggcggcctgctgctgctggccgtggtgctgctgagcgcctgcctgtgctggctgcacagaagagtgaagagactggagagaagctggagactgcccgtgcccagcagcgagggccccgacctgagaggcagagacaagagaggcaccaaggaggaccccagagccgactacgcctgcatcgccgagaacaagcccacctag

SEQ ID NO: 263789 - protein, 1134 aa, Artificial Sequence
  derived and/or modified sequence
MSRSVLQPSQQKLAEKLTILNDRGVGMLTRLYNIKKQGQVWKACGDPKAKPSYLIDKNLESAVKFIVRKFPAVETRNNNQQLAQLQKEKSEILKNLALYYFTFVDVMEFKDHVCELLNTIDVCQVFFDITVNFDLTKNYLDLIITYTTLMILLSRIEERKAIIGLYNYAHEMTHGASDREYPRLGQMIVDYENPLKKMMEEFVPHSKSLSDALISLQMVYPRRNLSADQWRNAQLLSLISAPSTMLNPAQSDTMPCEYLSLDAMEKWIIFGFILCHGILNTDATALNLWKLALQSSSCLSLFRDEVFHIHKAAEDLFVNIRGYNKRINDIRECKEAAVSHAGSMHRERRKFLRSALKELATVLSDQPGLLGPKALFVFMALSFARDEIIWLLRHADNMPKKSADDFIDKHIAELIFYMEELRAHVRKYGPVMQRYYVQYLSGFDAVVLNELVQNLSVCPEDESIIMSSFVNTMTSLSVKQVEDGEVFDFRGMRLDWFRLQAYTSVSKASLGLADHRELGKMMNTIIFHTKMVDSLVEMLVETSDLSIFCFYSRAFEKMFQQCLELPSQSRYSIAFPLLCTHFMSCTHELCPEERHHIGDRSLSLCNMFLDEMAKQARNLITDICTEQCTLSDQLLPKHCAKTISQAVNKKSKKQTGKKGEPEREKPGVESMRKNRLVVTNLDKLHTALSELCFSINYVPNMVVWEHTFTPREYLTSHLEIRFTKSIVGMTMYNQATQEIAKPSELLTSVRAYMTVLQSIENYVQIDITRVFNNVLLQQTQHLDSHGEPTITSLYTNWYLETLLRQVSNGHIAYFPAMKAFVNLPTENELTFNAEEYSDISEMRSLSELLGPYGMKFLSESLMWHISSQVAELKKLVVENVDVLTQMRTSFDKPDQMAALFKRLSSVDSVLKRMTIIGVILSFRSLAQEALRDVLSYHIPFLVSSIEDFKDHIPRETDMKVAMNVYELSSAAGLPCEIDPALVVALSSQKSENISPEEEYKIACLLMVFVAVSLPTLASNVMSQYSPAIEGHCNNIHCLAKAINQIAAALFTIHKGSIEDRLKEFLALASSSLLKIGQETDKTTTRNRESVYLLLDMIVQESPFLTMDLLESCFPYVLLRNAYHAVYKQSVTSSA

SEQ ID NO: 263790 - DNA, 3405 bp, Artificial Sequence
  derived and/or modified sequence
atgagtaggtccgtgctacagccctcacaacagaaactcgctgaaaagctgaccatactaaacgacagaggcgtagggatgctaacccggctatacaatatcaagaagcaaggacaagtatggaaagcctgtggcgaccccaaagcaaaaccttcatacctcatcgacaagaacctggaaagcgctgtaaaattcatagtgaggaagtttcccgctgtcgagacgaggaacaacaaccaacagctcgcccagctgcagaaagagaagagcgaaattttgaagaatctggccctctactatttcacttttgtagatgttatggagttcaaagaccacgtgtgcgagctgttgaataccatagacgtctgtcaggtgtttttcgatatcacagtcaatttcgatctcaccaagaactatctcgatctgatcataacatatacgactcttatgatattacttagcaggatcgaggaacggaaggccattatcgggctttacaactacgcccacgagatgacccacggcgcatccgatcgggaatatccccggctggggcaaatgatcgtggactatgagaaccctctcaagaagatgatggaggagttcgtcccgcactctaaatctctgtccgatgccctgattagtttgcagatggtgtatcctagaagaaatctttcagctgatcaatggaggaacgcacagcttttatccctcatttctgcacccagcacaatgcttaatcccgcccaaagcgacactatgccttgcgaatatctgtccctggatgctatggagaagtggatcatttttggcttcatcctgtgccacggtattttaaacacagacgccacagctctgaacctgtggaagctcgcattgcaatctagctcatgtctctcgctttttcgtgacgaagtgttccatatacacaaggctgccgaggacctcttcgtcaatatacgaggctacaacaagcgcattaatgatatacgcgagtgtaaggaagctgctgtgtcccacgccggatccatgcaccgagagcgtcgtaagtttttacgaagtgccttgaaagaactggcgactgtcctcagcgaccaacccgggctgcttggtcctaaagcgctgtttgtgtttatggcgctgtccttcgctcgtgatgaaatcatatggttgctgcgacatgcagataacatgcccaagaaatccgcggacgattttattgataagcacattgcggagctgatcttttacatggaggagttgagggctcatgtaagaaaatatggacccgttatgcagcggtactacgtgcagtatttaagcggatttgatgcagtggtgctgaacgagcttgtgcaaaacctcagtgtttgcccagaggacgaaagcatcatcatgtcctctttcgtgaacactatgactagtctgagtgtcaagcaggtggaagacggggaagtttttgacttccgcggtatgagactggactggtttcggctccaggcgtatactagcgttagcaaagcctcactcggactcgctgatcatcgtgaactgggtaagatgatgaataccatcatattccatactaagatggtggactctctcgtcgaaatgctggtggagacttcggatctctctatcttttgtttctatagtagggctttcgagaaaatgtttcagcaatgtctcgaattgcccagtcagtcccggtatagcatcgctttcccactcctgtgcacgcactttatgtcctgcactcacgagctgtgtcctgaggagcgacaccatattggagatcgtagcctgtcactgtgtaatatgtttctcgatgagatggccaagcaagctagaaatctcattaccgatatatgcaccgagcagtgcacacttagtgatcaactgcttcctaaacactgcgctaagaccatctcacaggccgtcaacaagaaaagcaaaaaacagaccgggaaaaaaggggaacctgagcgtgaaaagccgggagttgaaagtatgcggaaaaaccgtctggtggtcaccaatctcgacaaacttcatactgctctgtctgagctctgcttctctatcaattacgtgccgaatatggtcgtgtgggagcatacttttactccaagagaatacctgacgtcacacctggaaatccgttttaccaagtcaatcgtcgggatgacaatgtataatcaggctactcaggagattgccaagccaagtgagttactcacttccgtgcgcgcctacatgaccgtactgcagagtatagagaactacgtgcaaattgatattaccagagtgtttaacaatgtgctgttgcaacaaacccagcacttagatagtcatggcgaaccaaccatcacctcactgtacaccaattggtacctggagaccttactgcgccaggtatcaaacgggcatattgcatacttccccgccatgaaagccttcgtgaacctccccactgaaaacgagctgaccttcaacgccgaggaatactccgacataagcgaaatgaggtctctatcagagctcctgggcccctatggtatgaagttcctgtctgagagtttgatgtggcacatcagctctcaggtagctgaactgaaaaaactggtcgtcgagaatgtggatgtgcttacccaaatgcggacctcattcgataaacccgaccaaatggccgcattgtttaaacgcctctcaagcgtggatagcgtactcaagcgaatgacaattattggcgtcattctgtcatttaggtcactggcacaagaagcgctccgggacgtactgtcctaccacatccccttcttagtatcttccattgaggatttcaaggaccacataccgagagagacagacatgaaagtggctatgaacgtctacgaactgagttcagccgcaggcctcccctgcgaaatcgatcctgccttagtcgtcgctctgagtagccagaagagcgagaatattagccccgaggaggagtacaaaatcgcgtgcctgctcatggtctttgtcgccgtgtccctcccaaccctcgcgtctaatgtgatgtcccagtactcccctgccatagagggccactgcaacaacatccactgcctggccaaggccattaaccaaatcgccgcagccctgtttacaatccacaaggggtctatcgaagatcgactgaaggaattcctggcacttgcatcctcaagccttttgaaaatcgggcaggagacagacaagactacaacccgtaatcgcgaatcagtgtacctccttctcgacatgattgtgcaagagagtccctttcttaccatggatcttctggaaagctgcttcccgtacgtgttacttcgaaatgcttaccacgcagtgtacaagcagagtgtcaccagtagcgcctag

SEQ ID NO: 263791 - DNA, 3405 bp, Artificial Sequence
  derived and/or modified sequence
atgagccgctctgtgctgcagcccagccagcagaagctggccgagaagctgaccatcctgaatgaccggggcgtgggcatgctgacccggctgtacaacatcaagaagcagggccaggtgtggaaggcctgtggggaccccaaggccaagcccagctacctgattgacaagaacctggagagcgctgtgaagttcatcgtgaggaagtttcctgctgtggagaccaggaacaacaaccagcagctggcccagctgcagaaggagaagtctgagatcctgaagaacctggccctgtactacttcacctttgtggatgtgatggagttcaaggaccacgtgtgtgagctgctgaacaccattgatgtgtgccaggtgttctttgacatcaccgtgaactttgacctgaccaagaactacctggacctgatcatcacctacaccaccctgatgatcctgctgagccgcatcgaggagaggaaggccatcatcggcctgtacaactatgcccacgagatgacccacggggccagtgaccgggagtacccccggctgggccagatgattgtggactatgagaaccccctgaagaagatgatggaggagtttgtgccccacagcaagagcctgagtgatgccctgatcagcctgcagatggtgtaccccaggaggaacctgtctgctgaccagtggagaaatgcccagctgctgagcctcatcagcgcccccagcaccatgctgaacccagcccagagcgacaccatgccctgtgagtacctgagcctggatgccatggagaagtggatcatcttcggcttcatcctgtgccacggcatcctgaacacagatgccacagccctgaacctgtggaagctggccctgcagagcagcagctgcctgagcctcttcagagatgaggtgttccacatccacaaggctgctgaggacctgtttgtgaacatccggggctacaacaagaggatcaatgacatccgggagtgcaaggaggccgctgtgtcccatgctggctccatgcaccgggagaggaggaagttcctgcggagcgccctgaaggagctggccaccgtgctgagtgaccagcccggcctgctgggccccaaggccctgtttgtgttcatggccctgagctttgccagagatgagatcatctggctgctgcggcatgctgacaacatgcccaagaagtctgcagatgacttcatcgacaagcacatcgccgagctgatcttctacatggaggagctgcgggcccacgtgaggaaatatggccctgtgatgcagcgctactacgtgcagtacctgagcggctttgatgctgtggtgctgaatgagctggtgcagaacctgtctgtgtgcccagaagatgagagcatcatcatgagcagctttgtgaacaccatgaccagcctgtctgtgaagcaggtggaggatggagaggtgtttgacttccggggcatgaggctggactggttccggctgcaggcctacacctctgtgtccaaggccagcctgggcctggccgaccaccgggagctgggcaagatgatgaacaccatcatcttccacaccaagatggtggacagcctggtggagatgctggtggagaccagtgacctgagcatcttctgcttctacagccgggcctttgagaagatgttccagcagtgcctggagctgcccagccagagccgctacagcatcgccttccccctgctgtgcacccacttcatgagctgcacccatgagctgtgcccagaggagcggcaccacatcggggacaggagcctgagcctgtgcaacatgttcctggatgagatggccaagcaggccaggaacctgatcacagacatctgcacagagcagtgcaccctgagtgaccagctgctgcccaagcactgtgccaagaccatcagccaggccgtgaacaagaagagcaagaagcagacaggcaagaagggggagcctgagcgggagaagccaggagtggagagcatgaggaagaaccggctggtggtgaccaacctggacaagctgcacacagccctgtctgagctgtgcttcagcatcaactacgtgcccaacatggtggtgtgggagcacaccttcaccccccgggagtacctgaccagccacctggagatccgcttcaccaagagcatcgtgggcatgaccatgtacaaccaggccacccaggagatcgccaagcccagcgagctgctgacctctgtgcgggcctacatgacagtgctgcagagcattgagaactacgtgcagattgacatcaccagggtcttcaacaacgtgctgctgcagcagacccagcacctggacagccatggagagcccaccatcaccagcctgtacaccaactggtacctggagaccctgctgcggcaggtgtccaatggccacatcgcctacttccctgccatgaaggcctttgtgaacctgcccacagaaaatgagctgaccttcaatgctgaggagtacagcgacatcagcgagatgaggagcctgtctgagctgctgggcccctacggcatgaagttcctgtctgagagcctgatgtggcacatcagcagccaggtggccgagctgaagaagctggtggtggagaatgtggatgtgctgacccagatgaggaccagctttgacaagccagaccagatggccgccctcttcaagaggctgagctctgtggacagcgtgctgaagaggatgaccatcatcggggtcatcctgtccttccgcagcctggcccaggaggccctgagagatgtgctgagctaccacatccccttcctggtgagcagcattgaggacttcaaggaccacatcccccgggagacagacatgaaggtggccatgaatgtgtatgagctgagcagcgctgctggcctgccctgtgaaattgatcctgccctggtggtggccctgagcagccagaagtctgagaacatcagccctgaggaggagtacaagatcgcctgcctgctgatggtgtttgtggccgtgtccctgcccaccctggccagcaatgtgatgagccagtacagccctgccatcgagggccactgcaacaacatccactgcctggccaaggccatcaaccagattgctgctgccctcttcaccatccacaagggcagcattgaggaccggctgaaggagttcctggccctggccagcagcagcctgctgaagattggccaggagacagacaagaccaccaccaggaaccgggagagcgtgtacctgctgctggacatgattgtgcaggagagccccttcctgaccatggacctgctggagagctgcttcccctacgtgctgctgagaaatgcctaccacgctgtgtacaagcagagcgtgaccagcagcgcctag

SEQ ID NO: 263792 - DNA, 4989 bp, Artificial Sequence
  derived and/or modified sequence
gcggcgagcgcctgtcaagcagtgggaggaaaaagcgcttggagccaccagcccactcttaagcgaaactcgcctggaaaacaccccgcctcccagcagagtttctgccggtttctttagaagggtggtgcggaaaagcaacttttgggaacttgaaggagtggggtgtggggcgaagtggaaagagcacacaacgcgaccccactcagtccccgcttgggactcccatcccggcatcaggcgtagtgggcggtccgggccagggccagggccagagcggcggcggcgaggccatgccgagggcccgtcggccgcagttccccgtccggcctcgcgggggcgccggcgctgccgatcaggtgaccgagggcccgtccggggctgcgggaagcggcctcgttctcagccgccggagacgccgccgccgccgccgccgccgccacacctagtggagcagccggggaaggcggctcgttgggggctggggcggagagcgccgggggtgggggcggaagggcggcgggcggaaggcaggaggctgccggggcgcgggctgctgcgggagaaggggctccgaggagtccgccgcggctcgctctgtcgccggcgcgggattggggcgcgagggccatgggcgcgctctcctaaggcggaggtcgcgggcgggaggggaggaggcccgagagaggctgctgcgaaggccgcgggcccgtgactgggcgcgaggcggccggcggcggcggcggcaccagcaccaccatgtcgcgctcagtgctgcagcccagtcagcagaagctggcggagaagctcaccatcctcaacgaccggggcgtcggcatgctcacccgcctctacaacatcaagaagcaaggacaagtttggaaggcatgtggagaccccaaggcaaaaccatcctatcttatcgacaaaaacctggaatctgctgtgaaattcatagtcagaaaattccctgctgtagaaacccgcaacaacaatcaacagcttgcacaactacagaaagaaaaatcagagattctgaaaaatctggcattatattacttcacatttgtagatgttatggaatttaaggaccatgtttgtgaattgctgaatactattgacgtttgccaagtcttctttgatattactgtaaactttgatttaacaaagaactacttagatttaattataacctatacaacactaatgatactgctgtctcgaattgaagaaaggaaggcaatcattggattatacaactatgcccatgaaatgactcatggagcaagtgacagagaatacccacgccttggccagatgattgtggattatgaaaaccctttaaagaagatgatggaagaatttgtaccccatagcaagtctctttcagatgcactaatttctcttcaaatggtatatcctcgaaggaatctttcagctgaccagtggagaaatgcccagttattgagcctcatcagtgcacctagtacaatgcttaatccagcacagtccgacactatgccttgtgaatacctctctttggatgcaatggaaaagtggattatctttggctttattttgtgccatgggatcctaaatactgacgctacagcactgaacctttggaaactagctcttcaaagtagctcttgcctctctctctttcgggatgaagttttccacattcacaaagctgcagaagacttatttgtaaacatacgaggctataataaacgtattaatgacataagagaatgcaaggaggcagccgtgtcacatgctggttcaatgcacagagaaagacgcaagtttttaagatctgcactgaaggaattggctactgtcctctctgatcaacctggattgctaggtcccaaggcactttttgtttttatggcattatcctttgcccgtgatgaaatcatctggctacttcgtcatgcagataacatgccaaagaagagtgcagacgactttatagataagcacattgctgaattaatattttacatggaagaacttagagcacatgtgaggaaatacggacctgtaatgcagaggtattacgtgcagtacctttctggctttgatgctgttgtcctcaatgaactcgtgcagaatctttctgtttgccctgaagatgaatcaatcatcatgtcctcttttgttaacactatgacttccctaagtgtaaaacaagttgaagatggggaagtatttgatttcagaggaatgagattagattggtttaggttacaggcatatactagtgtctcaaaggcttcacttggccttgcagatcacagagaacttggaaagatgatgaatacaataatttttcatacaaaaatggtagattccttggtggaaatgttggtggaaacatcagatctctccatattttgtttttatagtcgtgcttttgagaagatgtttcaacagtgtttggagttaccctctcaatcaagatactcaattgcatttccactactttgcactcattttatgagttgcacgcatgaactatgtccagaagagcgacatcatattggagatcgcagtctttccttatgtaatatgttcctagatgaaatggccaaacaagctcgaaatctcatcactgatatttgcacagaacagtgtacccttagtgaccagttgctacccaagcattgtgccaaaactatcagtcaagcagtgaataagaaatcaaaaaagcagactggtaagaaaggggaacctgaaagggagaaaccaggtgttgagagcatgaggaaaaacaggctggttgtgaccaaccttgataaattgcacactgcactttctgagttatgcttctctataaattatgtaccaaacatggtggtatgggaacatacctttaccccacgagaatatttgacttctcatctggaaatacgctttaccaagtcaattgttgggatgactatgtataatcaagccacacaggaaattgcaaaaccttcagaacttctaacaagtgtaagagcatacatgaccgtactccagtcaatagaaaactatgtgcagattgatattacaagagtatttaataatgtgcttcttcaacaaacacaacatttagacagtcatggagagccaaccattacaagtctatacacaaattggtatttggaaactttgttacgacaagtcagcaatggccatatagcatattttcctgcaatgaaagcgtttgtgaacttacctacagaaaatgaattaacattcaatgcagaggaatattctgacatatcagaaatgaggtcattatcagaactactaggcccatatggtatgaagtttctaagtgaaagccttatgtggcatatttcatcacaagttgctgaacttaagaaacttgtggtggagaatgttgatgtgttaacacaaatgaggaccagctttgacaaaccagaccagatggctgcactgtttaaaagattatcatctgttgacagtgtcttgaagaggatgacaataattggtgtaattttatccttccgatcattggcacaagaagcacttagagatgtcttatcctaccacattccttttcttgtaagttcaattgaagattttaaggatcacattccaagggaaactgatatgaaggttgcaatgaatgtgtatgagttatcatcagctgccggattaccttgtgagattgatcctgcattggtcgtagctctttcttcacaaaaatcggaaaacattagtccagaagaagagtataaaattgcctgccttctcatggtgtttgtggcagtttctttgccaacactggccagtaatgtgatgtctcagtacagccctgctatagaagggcattgcaacaacatacattgcttggccaaagccatcaaccagattgctgcagctttgtttacaattcacaaaggaagcattgaagaccgtcttaaagaatttctggcgcttgcatcctccagtctactgaaaattggccaggagacagataaaactacaacaagaaatagagaatctgtttatttactgctagatatgattgtacaagaatctccattccttacaatggatcttttggaatcttgttttccttatgtcttgctgagaaatgcataccatgctgtctacaaacaaagtgttacatcttctgcataaaattacctacttaatcaagataagcacgcatttttgttgccttggttttacctgtagactgtggaactattttaccttaagacctgaaaaagttttgtggattataaatttctttcatacggttgtattttctgatcattggtttcttaatatggttgtactacagtatacttggttgatttaggttgcacattcactgaattcactgagattattcctataattttaaagtatcatttatttgaaaaacatacattatcaacatgtttttgatatttgataatgaaaaaaatctttgcttgtttatttctgaaaaagaactgtatttagtgattattttagatagtgatattatagtattcatctgtgtgtaaattatttcatatagggaagagttctgatctgtacctatggttcttattgaaaacaacattggatgtgcatttctgtgatgttatgaatacatttctactttattttgaaacatttgccaaactaaatactgtaacactgtataacatttaaaaatgttaaagaactgcttagtattagaagcagatcatttcccaaaattctaagagcagcagcatatgttgttgcttgtataaagcctagcgataatttttagactaacttccatggtgccctgttggcattagcactaccattgtaccctgctgtataataaacaatcttagacatttatcaactgttgatacaaatgttagtccctaaccactttttatatatgttttaaatttttgaaattcaagtgtacctgccataacataaaataaacactagactgtatcacacttcgattga

SEQ ID NO: 263793 - DNA, 3405 bp, Artificial Sequence
  derived and/or modified sequence
atgagccggagcgtgctgcagcccagccagcagaagctggccgagaagctcactatactgaatgataggggggtgggaatgttaacccggctctacaatatcaagaagcagggtcaggtttggaaagcctgtggcgacccgaaagccaagccttcttacctgattgataaaaatctggagtcggctgtgaaattcattgtgcggaagtttcctgctgtagagacccgcaacaataaccagcaactggcacagctccagaaggaaaaaagtgagattctgaagaatcttgccctgtactatttcacgttcgttgacgtcatggaattcaaggatcacgtctgcgagctcctgaataccatcgatgtctgtcaggtgttctttgatatcaccgttaactttgaccttactaagaattaccttgatctgatcatcacgtatactacattgatgatcctgcttagtcgcatcgaagagcgaaaggctattattggattgtataattatgctcacgagatgacacatggggccagcgatagagagtatcctagactaggacagatgatcgtggactatgagaatccactgaagaagatgatggaggagtttgtccctcacagtaagtctctgtccgatgccctcatctccctgcagatggtgtatccgaggcgaaacctctcagccgatcagtggaggaacgctcagctcctgtccctgattagtgcccccagcacaatgttaaacccagcacagtcagacaccatgccttgcgagtacctttccctggacgccatggagaagtggatcatcttcgggtttatcctgtgtcacggtatcctgaacaccgatgcgacagcccttaatctgtggaagctcgcactgcagagctccagctgtctatccctgttccgcgatgaagtgtttcacatacataaggcagcagaagacctctttgtaaatatccggggatacaacaaaaggattaacgatattagagagtgcaaggaagcagctgtgtcccatgctgggagcatgcacagggagaggagaaagtttctacgctcagctttaaaggagcttgccaccgtgctgagcgatcaaccaggcttactgggccctaaggccttgttcgtgtttatggccctgagcttcgcgagggacgaaatcatctggttgctgcgacatgctgacaatatgcctaagaagagtgcggacgattttattgacaagcacatcgctgagcttattttctacatggaggagcttcgcgctcacgtaagaaagtatggccctgtcatgcagcgttactatgtgcagtacctatcaggcttcgatgctgtggtgctgaatgagttggttcagaacctgagcgtctgccctgaagacgaatcaatcattatgtcatccttcgtcaacacaatgacgtcactgagtgtaaagcaggtggaggacggtgaggtgttcgactttagaggaatgaggttagattggttcaggttgcaggcatacacaagtgttagcaaagcgagcctggggttggctgatcatcgtgagctgggcaaaatgatgaataccatcattttccacaccaaaatggtggactcactggtggagatgctggtggagacatcagatctgagcatcttttgtttttattcccgggccttcgaaaagatgttccagcaatgtttagaattacccagtcagtctcggtactccatcgcatttccactgctctgcacccatttcatgagctgcactcacgagttatgtcccgaggaaaggcaccatattggcgaccggagcttgtcattatgtaacatgttcctggacgaaatggccaaacaggctcggaatttgattacagatatctgtacagaacagtgcacactgtcagaccagctgctaccaaagcattgtgctaaaacgatctcccaggctgtcaacaaaaaaagcaaaaagcagactggcaaaaaaggcgagcccgagagggagaagcccggtgtggagtccatgaggaaaaacaggctcgtggttaccaacctggataaactgcacactgcactgagtgagctctgcttctccattaattacgttccaaacatggtggtgtgggaacacacctttaccccgcgggaatatttaacaagccatctcgaaattagattcactaaatccatcgtgggaatgacaatgtacaaccaggcgacgcaggagattgccaaaccttcagaacttttaacctcagttagggcgtacatgaccgtactgcaatcaatcgaaaactacgtgcagatcgacattacgcgggtgtttaataacgtcttgctccagcaaactcagcaccttgatagtcacggtgagcccacaatcacctcattgtacactaattggtatctggaaactctgttgcgccaagtctctaatggacacatcgcttatttcccagccatgaaagcattcgtgaatttaccgaccgagaatgagctgaccttcaacgccgaagagtactctgatataagcgaaatgcgctcattatcggaactcttaggcccctacgggatgaagttcctgtccgaatctcttatgtggcatatctcgtctcaggtcgccgagctcaaaaagctggtcgtagagaacgtggatgtattaacacagatgagaacatcctttgataagccagatcagatggcggctctctttaaacgtctgagtagcgttgacagcgtcctaaagcgtatgactattattggggtgattctctcctttcggtcgttagcccaagaggcactgcgggatgtgctgtcttaccatatccccttcctggtcagctccatcgaggatttcaaggaccacatcccaagagagacagatatgaaggtggctatgaacgtgtatgaactctcctccgccgccggcctgccctgcgaaatagatcccgcactcgtggtggccttgtcttcacagaaatctgaaaacatcagccccgaggaagagtataagatcgcctgcctcctcatggtgttcgttgccgtgtctctacctactctggcatccaacgtgatgagtcaatatagccctgctatcgaaggccactgtaataacatccactgtctggccaaggccataaatcagatcgctgccgccctgtttacaatccacaagggatccatcgaagatcgcctcaaggaattcctggctctcgcttcgtcctccctgcttaaaatcggccaggaaaccgataagacaacgacacggaatagagaaagcgtgtaccttttgctcgacatgatagtgcaggaatctcctttcctgacaatggacctacttgagtcatgtttcccgtacgtgctgctgcggaatgcctatcacgctgtctacaagcaatctgtgacctctagtgcatag

SEQ ID NO: 263794 - DNA, 3405 bp, Artificial Sequence
  derived and/or modified sequence
atgagcagaagtgttctgcagccgtctcaacagaagcttgccgaaaaattaactatattgaacgaccgtggagttggcatgctgacgcgactgtacaatattaagaagcaggggcaggtttggaaagcgtgcggcgaccccaaagcgaaacctagttacctgatagataagaatctggagtctgccgtcaaattcatcgtccgcaaatttcccgctgtggagacacgcaacaataatcaacagttggctcagctccaaaaagagaaatccgagatcctgaagaacttggccctttactattttaccttcgttgatgttatggagttcaaagaccatgtgtgcgaactgctcaacacgatcgacgtctgccaggtgttctttgatattacagttaattttgatcttacaaagaactatctcgacttaattatcacgtacactacactcatgattctactgtcccggattgaggagaggaaagccatcatcggcttatataactacgctcacgagatgactcatggggcaagcgatcgcgagtatcctcggttggggcagatgatagtggactatgaaaacccacttaaaaaaatgatggaggagttcgtgccacactctaaatccctgtccgatgccctaatctcactgcagatggtgtaccccagacggaatctgagcgctgaccagtggcggaacgcccagctccttagcctcatctcggccccaagcacgatgctgaatcccgctcagtctgacactatgccttgcgagtacctctcattggacgcgatggagaagtggataatttttggtttcattctctgccacggcattctaaacaccgatgctaccgcactgaacctttggaagctggcactacagtcatcatcctgtctgtccctatttcgtgacgaagtgttccacattcacaaggctgcagaggatctctttgtcaatattcggggatacaataagagaataaatgacatcagggagtgtaaagaagccgcagtgagccatgctggttccatgcaccgtgaacgccgaaaatttctcaggtcagcactgaaggagctagccacagtgctgagtgaccagccaggcctgttgggtcctaaggccttatttgtgtttatggccctgtccttcgctcgggatgagatcatttggctcttgaggcacgccgacaacatgcctaaaaagagcgccgatgactttatcgataaacatatagcggagctgattttttacatggaagagttacgagcccatgtccgaaagtatgggcctgtcatgcagagatattatgtccagtatctgtctgggtttgatgccgttgtcctgaacgaacttgtgcaaaacctgtccgtgtgtcccgaggatgagtcaatcattatgagtagctttgtgaataccatgacatccctgtcagtaaagcaggttgaggatggggaggtgttcgattttagaggaatgagactcgactggttcaggctgcaggcgtatacttccgtgtcaaaggcaagcctggggctggcagaccaccgcgagctcggtaagatgatgaacactattattttccacaccaaaatggttgacagcctggtagaaatgctggtggaaacctctgatctgtcaatcttctgcttctactcccgagcctttgaaaaaatgttccaacaatgcctggagctcccatcacagtcaagatactcaattgcctttccactgctctgcacccactttatgagctgcactcacgaactgtgtccagaggaacgacaccatattggcgaccgctctctcagtctttgcaacatgtttctggatgagatggccaagcaggcccgaaacctcattactgatatttgcaccgaacagtgtactctctctgaccagttactgccaaagcattgcgcaaagactatcagccaggcagtgaataaaaaatcaaaaaagcagacgggcaaaaagggggagcctgaaagagagaagcccggagtggagagtatgcggaaaaatcgcctggttgtgacaaacctggacaagcttcacaccgccctctccgaactgtgctttagtatcaactacgttcccaatatggttgtgtgggaacacacatttactccgcgtgagtacctaacaagccacctcgaaatccggttcactaaatcaatcgttggaatgaccatgtataatcaggctacgcaggagatcgcgaaaccatctgaactgttgaccagtgtgcgggcttacatgaccgtgttgcaaagcatcgaaaattacgtgcagatcgatataacccgtgtctttaacaatgtgctgctgcagcagacacagcacctcgattcccacggggaacccacaataacatctctctacacaaactggtacctagaaaccttgcttagacaggtttcaaacggacacatcgcctatttccctgcaatgaaagctttcgtgaacctgccaacagagaacgagctgacatttaacgcggaggaatattccgacatctcagaaatgaggtcactgtcagaattgctgggtccatatggcatgaagttcttgtcggagagtcttatgtggcatatttcctctcaggtggccgagctgaagaagctagtggttgagaatgttgacgtcttgactcaaatgaggacaagcttcgataaacctgatcaaatggcggctctgtttaagcggctctcctcagtggactcagtattgaagcggatgacaataatcggtgtaatcctctcctttcggtcacttgcccaggaagccctccgagacgtgctcagttatcatattccgtttctggtgtcttcaattgaggacttcaaagatcacattcctcgggagactgacatgaaggtggccatgaacgtgtacgagctctcaagtgcagcgggtctcccatgcgagattgacccagccctggttgttgcgctctcctctcaaaagtccgagaatatcagtcccgaggaagagtacaagatcgcgtgcctgctgatggtgtttgtagccgtgtcgctgcctacactcgcttctaacgtgatgagccagtactcgcctgccatcgaagggcattgtaataacatccactgcctcgcgaaagccatcaaccaaatcgccgcagcattatttactattcataaggggagtatcgaagacagactaaaagagttcttggcacttgcctcatctagtcttctgaaaattggacaagagacggacaaaaccactacgcggaacagagagtccgtgtatctcctgctcgacatgatcgtgcaggaatcaccatttttgaccatggacctcctagaaagttgtttcccctatgtgctcctgaggaacgcgtaccacgctgtgtataaacagagcgtgacttctagtgcatag

SEQ ID NO: 263795 - DNA, 3405 bp, Artificial Sequence
  derived and/or modified sequence
atgagcagaagcgtgctgcagcccagccagcagaagctggccgagaagctgaccatcctgaacgacagaggcgtgggcatgctgaccagactgtacaacatcaagaagcagggccaggtgtggaaggcctgcggcgaccccaaggccaagcccagctacctgatcgacaagaacctggagagcgccgtgaagttcatcgtgagaaagttccccgccgtggagaccagaaacaacaaccagcagctggcccagctgcagaaggagaagagcgagatcctgaagaacctggccctgtactacttcaccttcgtggacgtgatggagttcaaggaccacgtgtgcgagctgctgaacaccatcgacgtgtgccaggtgttcttcgacatcaccgtgaacttcgacctgaccaagaactacctggacctgatcatcacctacaccaccctgatgatcctgctgagcagaatcgaggagagaaaggccatcatcggcctgtacaactacgcccacgagatgacccacggcgccagcgacagagagtaccccagactgggccagatgatcgtggactacgagaaccccctgaagaagatgatggaggagttcgtgccccacagcaagagcctgagcgacgccctgatcagcctgcagatggtgtaccccagaagaaacctgagcgccgaccagtggagaaacgcccagctgctgagcctgatcagcgcccccagcaccatgctgaaccccgcccagagcgacaccatgccctgcgagtacctgagcctggacgccatggagaagtggatcatcttcggcttcatcctgtgccacggcatcctgaacaccgacgccaccgccctgaacctgtggaagctggccctgcagagcagcagctgcctgagcctgttcagagacgaggtgttccacatccacaaggccgccgaggacctgttcgtgaacatcagaggctacaacaagagaatcaacgacatcagagagtgcaaggaggccgccgtgagccacgccggcagcatgcacagagagagaagaaagttcctgagaagcgccctgaaggagctggccaccgtgctgagcgaccagcccggcctgctgggccccaaggccctgttcgtgttcatggccctgagcttcgccagagacgagatcatctggctgctgagacacgccgacaacatgcccaagaagagcgccgacgacttcatcgacaagcacatcgccgagctgatcttctacatggaggagctgagagcccacgtgagaaagtacggccccgtgatgcagagatactacgtgcagtacctgagcggcttcgacgccgtggtgctgaacgagctggtgcagaacctgagcgtgtgccccgaggacgagagcatcatcatgagcagcttcgtgaacaccatgaccagcctgagcgtgaagcaggtggaggacggcgaggtgttcgacttcagaggcatgagactggactggttcagactgcaggcctacaccagcgtgagcaaggccagcctgggcctggccgaccacagagagctgggcaagatgatgaacaccatcatcttccacaccaagatggtggacagcctggtggagatgctggtggagaccagcgacctgagcatcttctgcttctacagcagagccttcgagaagatgttccagcagtgcctggagctgcccagccagagcagatacagcatcgccttccccctgctgtgcacccacttcatgagctgcacccacgagctgtgccccgaggagagacaccacatcggcgacagaagcctgagcctgtgcaacatgttcctggacgagatggccaagcaggccagaaacctgatcaccgacatctgcaccgagcagtgcaccctgagcgaccagctgctgcccaagcactgcgccaagaccatcagccaggccgtgaacaagaagagcaagaagcagaccggcaagaagggcgagcccgagagagagaagcccggcgtggagagcatgagaaagaacagactggtggtgaccaacctggacaagctgcacaccgccctgagcgagctgtgcttcagcatcaactacgtgcccaacatggtggtgtgggagcacaccttcacccccagagagtacctgaccagccacctggagatcagattcaccaagagcatcgtgggcatgaccatgtacaaccaggccacccaggagatcgccaagcccagcgagctgctgaccagcgtgagagcctacatgaccgtgctgcagagcatcgagaactacgtgcagatcgacatcaccagagtgttcaacaacgtgctgctgcagcagacccagcacctggacagccacggcgagcccaccatcaccagcctgtacaccaactggtacctggagaccctgctgagacaggtgagcaacggccacatcgcctacttccccgccatgaaggccttcgtgaacctgcccaccgagaacgagctgaccttcaacgccgaggagtacagcgacatcagcgagatgagaagcctgagcgagctgctgggcccctacggcatgaagttcctgagcgagagcctgatgtggcacatcagcagccaggtggccgagctgaagaagctggtggtggagaacgtggacgtgctgacccagatgagaaccagcttcgacaagcccgaccagatggccgccctgttcaagagactgagcagcgtggacagcgtgctgaagagaatgaccatcatcggcgtgatcctgagcttcagaagcctggcccaggaggccctgagagacgtgctgagctaccacatccccttcctggtgagcagcatcgaggacttcaaggaccacatccccagagagaccgacatgaaggtggccatgaacgtgtacgagctgagcagcgccgccggcctgccctgcgagatcgaccccgccctggtggtggccctgagcagccagaagagcgagaacatcagccccgaggaggagtacaagatcgcctgcctgctgatggtgttcgtggccgtgagcctgcccaccctggccagcaacgtgatgagccagtacagccccgccatcgagggccactgcaacaacatccactgcctggccaaggccatcaaccagatcgccgccgccctgttcaccatccacaagggcagcatcgaggacagactgaaggagttcctggccctggccagcagcagcctgctgaagatcggccaggagaccgacaagaccaccaccagaaacagagagagcgtgtacctgctgctggacatgatcgtgcaggagagccccttcctgaccatggacctgctggagagctgcttcccctacgtgctgctgagaaacgcctaccacgccgtgtacaagcagagcgtgaccagcagcgcctag

SEQ ID NO: 263796 - protein, 499 aa, Artificial Sequence
  derived and/or modified sequence
MDEFHPFIEALLPHVRAFAYTWFNLQARKRKYFKKHEKRMSKDEERAVKDELLGEKPEVKQKWASRLLAKLRKDIRPECREDFVLSITGKKAPGCVLSNPDQKGKMRRIDCLRQADKVWRLDLVMVILFKGIPLESTDGERLVKAAQCGHPVLCVQPHHIGVAVKELDLYLAYFVRERDAEQSGSPRTGMGSDQEDSKPITLDTTDFQESFVTSGVFSVTELIQVSRTPVVTGTGPNFSLGELQGHLAYDLNPASTGLRRTLPSTSSSGSKRHKSGSMEEDVDTSPGGDYYTSPSSPTSSSRNWTEDMEGGISSPVKKTEMDKSPFNSPSPQDSPRLSSFTQHHRPVIAVHSGIARSPHPSSALHFPTTSILPQTASTYFPHTAIRYPPHLNPQDPLKDLVSLACDPASQQPGPLNGSGQLKMPSHCLSAQMLAPPPPGLPRLALPPATKPATTSEGGATSPTSPSYSPPDTSPANRSFVGLGPRDPAGIYQAQSWYLG

SEQ ID NO: 263797 - DNA, 1500 bp, Artificial Sequence
  derived and/or modified sequence
atggacgaatttcaccccttcattgaagcactcctaccgcacgtaagggcctttgcctatacttggtttaacttgcaggcaagaaaacgaaaatatttcaaaaaacatgagaaaaggatgtctaaggacgaggagagagccgtgaaggatgagctccttggcgaaaaacccgaggtcaaacagaagtgggctagtagattgctagcaaagctgcgtaaggacatccgccccgagtgtcgtgaggattttgtattgtcgattactggcaagaaagctcccggatgcgttctttctaaccctgatcagaaaggtaagatgcgccgcattgattgcctccgccaggcggacaaagtgtggcgcctggacctagtgatggtgatcctcttcaaggggatccccctggagagcaccgacggagagagattggttaaagcggcccagtgcgggcatcctgtcctctgcgtgcagccccaccatataggtgtcgcagtcaaggaactggacttataccttgcctactttgttagggagcgagatgctgagcaaagcgggtctcccaggactggcatgggttcggaccaggaagacagcaaaccgattacactcgatacaacagacttccaggaaagctttgtgacctccggggtcttctccgtgacagaactaatccaagtctctcggacgccggtggtcaccggaaccggaccaaacttttcattgggcgagctccagggtcacttggcttatgaccttaatcctgcctccacaggacttcgcaggactttgccgtccacatcttcctcaggtagcaagagacacaagtcggggagcatggaggaagatgtggacaccagcccggggggggattactatacctctccttcttcgcccactagtagctcacgcaactggaccgaggacatggagggcggcattagcagtcctgttaagaagacagagatggacaagtctcccttcaattcgccctccccccaggacagtcctcggctgagctccttcacccagcatcaccgtccagtgattgccgtccactcgggcattgctagatctccccatccttcctctgctttgcacttcccaactacctccattctgcctcagacggcgagcacctactttccccacacagcgattcgctatccaccacacctgaacccccaggatcccctgaaagaccttgtgtcccttgcttgtgatcccgcctcccagcagccaggtcccctgaatgggtcaggccagctcaaaatgccgagtcattgcctatctgcccagatgctggcacctccgcctcccgggctcccaaggctggctcttcctcctgccacaaagcctgccaccacaagcgaaggcggagctacatccccaaccagcccctcctactctccgcccgacactagcccagctaatcgatccttcgttggactcggcccccgggacccagcaggtatttaccaggcacaatcctggtatctagggtag

SEQ ID NO: 263798 - DNA, 1500 bp, Artificial Sequence
  derived and/or modified sequence
atggatgagtttcatccattcatagaggcgttgctgccacacgtaagagccttcgcttatacctggtttaacctgcaggcccggaagcggaagtactttaagaaacacgagaagagaatgagcaaagacgaagagagggcagtgaaggacgagctgctgggcgagaaaccagaggtgaagcagaagtgggcatcccgcctgttggctaagctgcgtaaagatatccgcccggaatgtcgagaagactttgttctctctatcacaggaaagaaagctcccggctgcgtactttccaatccagatcagaaaggaaagatgcgtcgaatagattgcctgcgtcaggcagacaaagtgtggagattagatttggtcatggtcattttattcaagggaattccactcgagtcaaccgacggggagcgcttggtcaaggctgcccagtgtggccaccccgtgctctgcgtgcaacctcaccacatcggtgtcgcagtaaaggagctcgacctgtacttggcttactttgttcgcgagcgtgatgcggaacagtcggggtctccaaggaccggaatgggttctgatcaagaggattccaaacctattaccctagatactacagatttccaggagagcttcgtgacaagcggcgtgttcagcgtgactgaactgatccaggtaagcaggaccccagtggttaccggaacaggccctaatttctctttaggtgaattacaggggcacctggcttacgatctaaatccagcctccacgggccttcgccggacactgccaagcacttcatctagcggaagtaaacgacataaatccggcagtatggaggaggacgtggatacaagccccggaggcgattactacaccagcccgtcctcacccacctcttcttccagaaactggacagaagacatggaggggggcatcagttccccggtaaaaaagaccgaaatggataagtctcccttcaattcacctagcccacaggacagtccccgactgtcgtcctttactcagcaccaccggcccgtgattgccgtccactcaggaattgcccgctctccccatcctagctccgcgctgcattttcccaccacctccatacttcctcagaccgctagcacctacttcccacacaccgcgatcagatacccgccacatcttaatccacaggatcctcttaaggatctggtgagcctcgcctgtgacccagcttcccaacagcctggccccctgaatgggtccggccagctgaaaatgccaagccactgtctaagcgctcaaatgctagcacccccacctccaggactgcccagactggccctgcctcctgcgactaagcctgcgacaacatccgagggcggggctacttctcccacctccccatcctactccccacccgacacaagtcctgccaacagatccttcgtgggcctgggaccccgtgatccggctgggatataccaagctcagagttggtatctaggatag

SEQ ID NO: 263799 - DNA, 1500 bp, Artificial Sequence
  derived and/or modified sequence
atggatgagttccaccccttcatcgaggccctgctgccccacgtgcgggcctttgcctacacctggttcaacctgcaggccaggaagaggaagtacttcaagaagcatgagaagaggatgagcaaggatgaggagagagctgtgaaggatgagctgctgggggagaagccagaggtgaagcagaagtgggccagccggctgctggccaagctgaggaaggacatccggcctgagtgcagagaagattttgtgctgagcatcaccgggaagaaggcccctggctgtgtgctgagcaacccagaccagaagggcaagatgagaagaattgactgcctgcggcaggccgacaaggtgtggaggctggacctggtgatggtgatcctcttcaagggcatccccctggagagcacagatggagagcggctggtgaaggccgcccagtgtggccaccctgtgctgtgtgtgcagccccaccacatcggcgtggccgtgaaggagctggacctgtacctggcctactttgtgcgggagagagatgctgagcagagcggcagccccaggacaggcatgggcagtgaccaggaggacagcaagcccatcaccctggacaccacagacttccaggagagctttgtgaccagcggggtcttctctgtgacagagctgatccaggtgtccaggacccctgtggtgacaggcaccggccccaacttcagcctgggggagctgcagggccacctggcctatgacctgaacccagccagcacaggcctgcggaggaccctgcccagcaccagcagcagcggcagcaagaggcacaagagcggctccatggaggaggatgtggacaccagccctggaggagactactacaccagccccagcagccccaccagcagcagcaggaactggacagaggacatggagggcggcatcagcagccctgtgaagaagacagagatggacaagagccccttcaacagccccagcccccaggacagcccccggctgagcagcttcacccagcaccacaggcctgtgattgctgtgcacagcggcatcgcccggagcccccaccccagcagcgccctgcacttccccaccaccagcatcctgccccagacagccagcacctacttcccccacacagccatccgctacccaccccacctgaacccccaggaccccctgaaggacctggtgtccctggcctgtgaccctgccagccagcagcccggccccctgaatggcagcggccagctgaagatgcccagccactgcctgagcgcccagatgctggcccctcctcctcctggcctgccccggctggccctgcccccagccaccaagccagccaccaccagcgagggcggggccaccagccccaccagccccagctacagccccccagacaccagccctgccaacagaagctttgtgggcctgggcccccgggaccctgctggcatctaccaggcccagagctggtacctgggctag

SEQ ID NO: 263800 - DNA, 1500 bp, Artificial Sequence
  derived and/or modified sequence
atggacgagttccaccccttcatcgaggccctgctgccccacgtgcgagctttcgcatacacttggtttaacctgcaggcccgcaaacggaaatactttaaaaagcacgagaaacggatgtctaaagacgaagagcgggccgtgaaagacgagttactgggggagaaaccagaggttaaacagaaatgggcatcaagattgttggccaagctgcgaaaggacattagaccagagtgtcgggaagacttcgttctgtcgatcacaggcaagaaagcaccaggctgtgttcttagcaatccagatcaaaagggcaaaatgagaagaatcgattgtttgaggcaggcggataaggtgtggcggctggatcttgtgatggtcatcctgtttaagggaataccgctggagtcaaccgacggggaacgcttagtgaaagcagcacagtgcggacacccagtgctgtgtgtccagcctcaccatatcggagtggcagtgaaggagttggacctgtatttggcctactttgttagggaacgagacgcggagcagagcggttccccaaggacgggtatgggctcggatcaagaagatagtaaaccaatcaccctggatacaacggacttccaagaatccttcgtgacatcgggagtattcagcgtgacagagttaattcaagtgtctcggacgcccgtggtgacaggcaccggcccgaatttttccctgggggagcttcagggacatctggcatatgatcttaaccccgcctccacaggcttacgcaggactctgccttccacatcctcttcaggctccaaaaggcataaatctggatctatggaggaagatgtggacacctctccggggggggattattacacctccccctcgagccccacctcgtcgagccgcaattggaccgaggacatggagggaggcatttcctctcccgtaaagaagactgaaatggataaatctccctttaactcgccctcgccacaggattccccacggctatctagttttacccagcatcacaggccggtgattgccgtgcactcagggatcgctcgcagccctcatccttccagtgctctgcattttcctacgacctctattttgccccagacagcaagtacttactttccgcacacagcaatccgctacccgccccatctcaacccccaggatccattgaaggacctcgtctcactggcctgtgaccccgcttcgcagcagcctgggccactgaatggctctgggcagctgaagatgccaagccactgcctgagcgcccagatgctcgctcctccgccccccggtctgccccgacttgccctgccccccgccaccaagcctgccacaactagcgagggaggagccaccagccctacatcccctagctatagcccccctgatacctcccccgcaaatagaagttttgtcggactcggccctagggacccagcaggcatttaccaggctcagtcttggtatttgggttag

SEQ ID NO: 263801 - DNA, 1500 bp, Artificial Sequence
  derived and/or modified sequence
atggacgagttccaccccttcatcgaggccctgctgccccacgtgagagcatttgcctatacctggttcaacctccaggcgcgcaagcggaagtatttcaaaaaacacgagaagcgcatgagcaaagacgaagagagggccgtcaaggatgaactcctgggtgagaagcccgaggttaagcagaaatgggccagtaggcttctcgccaaattgcggaaggacatcaggcctgagtgcagagaagacttcgttctttccattactggcaagaaagcacctgggtgcgttctgtccaacccggatcagaagggaaagatgcggaggattgactgccttaggcaggcagataaggtgtggaggctggatcttgtcatggtgattctgttcaaggggataccgctggagtcaacagacggagaacgcttggtcaaagcggcacagtgcggacatccagtactatgtgtgcaaccccaccacataggggtggccgtaaaagagctggacctatacttagcatattttgttcgggaaagggacgccgagcagtcaggctcaccaaggaccggaatgggatcagatcaagaagactctaaaccaattactctcgacacaactgatttccaggaaagctttgtaacctcaggtgtcttctccgtgactgagctgatacaagtcagcagaacgccagtcgtgaccgggacaggccccaacttctccctgggcgagcttcaaggccatctagcgtacgacctgaaccctgctagcaccggcttgcggcgtactctcccatccacatcaagtagcggtagtaagcgccacaaatcaggctcgatggaagaagacgtcgacaccagtcccggcggagactattatacctcccccagcagccccacatcgagttctcgcaactggaccgaagacatggagggagggataagcagcccagtgaagaagacagaaatggataagagccctttcaacagtccatccccacaggacagtcccagattaagcagctttacccagcaccaccgacccgtgatcgctgttcacagcggaatcgccaggagccctcacccctcaagcgccttgcactttcccacaaccagcattctgccccagacagcatccacgtacttccctcatacagctatccggtatcctccacatctgaaccctcaggatcccctgaaagatcttgtatctttggcttgtgatcctgcctcacaacaaccaggtcccctcaatggctccggccaactcaagatgcctagtcactgcctgagcgctcagatgctagcaccgccccccccggggctaccccgcctggccctgcctcccgctactaagcccgcaactacatcagagggcggggccacatccccaacttcaccatcctacagtccgccggatacttcccctgctaataggtctttcgtcgggcttggccctagggacccagctggcatttatcaggctcagagttggtacctgggctag

SEQ ID NO: 263802 - DNA, 2401 bp, Artificial Sequence
  derived and/or modified sequence
ccccccctcgccggggaccgagcgcgctcgctccggcgccggcctcgcctcctcgcagcagcgccatggatgagttccacccgttcatcgaggccctgctgcctcacgtccgcgccttcgcctacacctggttcaacctgcaggcgcggaagcgcaagtacttcaagaagcacgagaagcggatgtcgaaggacgaggagcgtgcggtcaaggacgagctgctgggcgagaagcccgaggtcaagcagaagtgggcgtcgcggctgctggccaagctgcgcaaggacatccggcccgagtgccgcgaggacttcgtgctgagcatcaccggcaagaaggcgccgggctgcgtgctctccaaccccgaccagaagggcaagatgcggcgcatcgactgtctccggcaggcggacaaggtgtggcggctggacctggtcatggtcatcctgttcaagggcatcccgctggagagcaccgacggcgagcgcctggtcaaggctgcgcagtgcggtcacccggtcctgtgcgtgcagccgcaccacattggcgtggccgtcaaggagctggacctctacctggcctacttcgtgcgtgagcgagatgcagagcaaagcggcagtccccggacagggatgggctctgaccaggaggacagcaagcccatcacgctggacacgaccgacttccaggagagctttgtcacctccggcgtgttcagcgtcactgagctcatccaagtgtcccggacacccgtggtgactggaacaggacccaacttctccctgggggagctgcaggggcacctggcatacgacctgaacccagccagcactggcctcagaagaacgctgcccagcacctcctccagtgggagcaagcggcacaaatcgggctcgatggaggaagacgtggacacgagccctggcggcgattactacacttcgcccagctcgcccacgagtagcagccgcaactggacggaggacatggaaggaggcatctcgtccccggtgaagaagacagagatggacaagtcaccattcaacagcccgtccccccaggactctccccgcctctccagcttcacccagcaccaccggcccgtcatcgccgtgcacagcgggatcgcccggagcccacacccgtcctccgctctgcatttccctacgacgtccatcctaccccagacggcctccacctacttcccccacacggccatccgctacccacctcatctcaacccccaggacccgctcaaagatcttgtctcgctggcctgcgacccagccagccagcaacctggaccgttaaatggaagtggtcagctcaaaatgcccagccactgcctttctgctcagatgctggcacctccgcccccggggctgccacggctggcgctcccccctgccaccaaacccgccaccacctccgagggaggagccacgtcgccgacctcgccttcctactctccgcccgacacgtcccctgcaaaccgttcctttgtgggattaggaccaagggatcctgcgggcatttatcaggcacagtcctggtatctgggatagcaaaggtcttcttccctcgccccttctccatcgtcccaggaatcccagggggcagcacagccggcccccggcccacgttttcggtggaaaattagagtgaacaagaacacccctgccgactcccagcccggccaaaaagacaaaacacatagacgcacacactcaggaggaaaagaaaaaacaaaggcagaagaagaagaagaagaaataaaaacccacccaagcaagaagacaaaaggtaaagacgcaacgtttccaactctcgggacgccaaggccgcaggactggagggccaggccccgccacccccacgggagacccgggacagggcgtcttcctaagttattcatctcctctccgcctgctgctcgggaaggacagacgccggccgcccgcccgcgccccggaggccctggctctgtccggagaccaggtgagcacagcctggagcctgtgcccagggccgacaggcgcgacacccagcaaggccacctctccccgggcccccgcgcctctgccggacacggaccggcccctcagcccccaccgaggacgcagccactggggggaaagggagacacagcggaccccggccgggcagcggagaccgcagaggcgggcagggtggggcaggcgagtggtgtcgcgggggtgcgtggcgcttgcgagccctggccaggggaggaagtgaggcccaggcacctgctgcccctcgagggggccctgcctgccgcggggcctccccacaagcccctcccaaagcgccggccgactcgctgtctcgctggggactctttcagccctcgcgcccgcccgtttgggaggagaagtctcta

SEQ ID NO: 263803 - DNA, 8068 bp, Artificial Sequence
  derived and/or modified sequence
gctcgctccctcccccgcgcgccctccctcgccgcctcctcccgccgcctgcggcccccccctcgccggggaccgagcgcgctcgctccggcgccggcctcgcctcctcgcagcagcgccatggatgagttccacccgttcatcgaggccctgctgcctcacgtccgcgccttcgcctacacctggttcaacctgcaggcgcggaagcgcaagtacttcaagaagcacgagaagcggatgtcgaaggacgaggagcgtgcggtcaaggacgagctgctgggcgagaagcccgaggtcaagcagaagtgggcgtcgcggctgctggccaagctgcgcaaggacatccggcccgagtgccgcgaggacttcgtgctgagcatcaccggcaagaaggcgccgggctgcgtgctctccaaccccgaccagaagggcaagatgcggcgcatcgactgtctccggcaggcggacaaggtgtggcggctggacctggtcatggtcatcctgttcaagggcatcccgctggagagcaccgacggcgagcgcctggtcaaggctgcgcagtgcggtcacccggtcctgtgcgtgcagccgcaccacattggcgtggccgtcaaggagctggacctctacctggcctacttcgtgcgtgagcgagatgcagagcaaagcggcagtccccggacagggatgggctctgaccaggaggacagcaagcccatcacgctggacacgaccgacttccaggagagctttgtcacctccggcgtgttcagcgtcactgagctcatccaagtgtcccggacacccgtggtgactggaacaggacccaacttctccctgggggagctgcaggggcacctggcatacgacctgaacccagccagcactggcctcagaagaacgctgcccagcacctcctccagtgggagcaagcggcacaaatcgggctcgatggaggaagacgtggacacgagccctggcggcgattactacacttcgcccagctcgcccacgagtagcagccgcaactggacggaggacatggaaggaggcatctcgtccccggtgaagaagacagagatggacaagtcaccattcaacagcccgtccccccaggactctccccgcctctccagcttcacccagcaccaccggcccgtcatcgccgtgcacagcgggatcgcccggagcccacacccgtcctccgctctgcatttccctacgacgtccatcctaccccagacggcctccacctacttcccccacacggccatccgctacccacctcatctcaacccccaggacccgctcaaagatcttgtctcgctggcctgcgacccagccagccagcaacctggaccgttaaatggaagtggtcagctcaaaatgcccagccactgcctttctgctcagatgctggcacctccgcccccggggctgccacggctggcgctcccccctgccaccaaacccgccaccacctccgagggaggagccacgtcgccgacctcgccttcctactctccgcccgacacgtcccctgcaaaccgttcctttgtgggattaggaccaagggatcctgcgggcatttatcaggcacagtcctggtatctgggatagcaaaggtcttcttccctcgccccttctccatcgtcccaggaatcccagggggcagcacagccggcccccggcccacgttttcggtggaaaattagagtgaacaagaacacccctgccgactcccagcccggccaaaaagacaaaacacatagacgcacacactcaggaggaaaagaaaaaacaaaggcagaagaagaagaagaagaaataaaaacccacccaagcaagaagacaaaaggtaaagacgcaacgtttccaactctcgggacgccaaggccgcaggactggagggccaggccccgccacccccacgggagacccgggacagggcgtcttcctaagttattcatctcctctccgcctgctgctcgggaaggacagacgccggccgcccgcccgcgccccggaggccctggctctgtccggagaccaggtgagcacagcctggagcctgtgcccagggccgacaggcgcgacacccagcaaggccacctctccccgggcccccgcgcctctgccggacacggaccggcccctcagcccccaccgaggacgcagccactggggggaaagggagacacagcggaccccggccgggcagcggagaccgcagaggcgggcagggtggggcaggcgagtggtgtcgcgggggtgcgtggcgcttgcgagccctggccaggggaggaagtgaggcccaggcacctgctgcccctcgagggggccctgcctgccgcggggcctccccacaagcccctcccaaagcgccggccgactcgctgtctcgctggggactctttcagccctcgcgcccgcccgtttgggaggagaagtctctatgcaattggccccggcccctccaccccccacccccggcataggaggcccccccacctcgcccggctcacacccccaaagggagggacccacattgcacacactgtaagaaatgcactttccgaggaaggggatgggggagcccggacacccagagctccccgagttgggggtgcccgtctggagcgcccccgtcagcccctggcggtgggaggtgagagcgagtggtttaagtgcctgattaccaccacccgcccccccctttgtccagctgggacacggaatggccgcgggcctcctccccctcccctccagcctctccaccagcccctccagtcaaccctcatcgccgtgcccccccagagctagagagatggggcccctgcgtggcccgaggggcagagctgggcgtcacttcgcaagcgtcctgccctgccggggcgcgggggtgggctctggggaagccggtgcgccccccacgcctccgctgccagtgccttacattctggagcgacccccctccctggtgcctcccagcgaagggggaccgccgtttgcactttcatcgcctaccccgacgcggggcccagctgcgggacgtgcatcacggctgggcccccagaggagagaggaggccgacgccagcggtccccgctcggaacggggagggttttcggggggttcggcgtcgcaccttggggccccccgcagccgtgtagggggcctcccatctgctaagcgtttttccgttgagccgctccaaaaacactaagctggggacgccaggtgcccccccaccccggctccctggccctatccacacctccacccccaccccaggatcgccatctttaggggaggcctgggagggggtgttaggtgttttagggccaccgagctcaaacacaaggacccctccccggcccacccagcccagccccaactgacctccatgcctagggaaaaactccccccaccactgccccctcccccgacccaggccaaagccagggcaggtctccgggtctcacctgctcctagcctcacccccctgcccccgaaaaccagactctcctcccaaactagcctcaggagcttggcgaacccgctcgctcctaaagagaaagacccaggaccctcccccatcacccccaagagaggttcgccatcctctggcctcgagcccttggtccctccgtccgtctgtcctcggggcccgctcccccggtggcccttggggatcaaagcgtgggccgctctccgggagggcgggcgggggagggggtggtcgggttgtgccattggggtgtccggaagcttctcagccagggtgggggtcgtggagtgggggagggaggccagccgggctccagaggggtcagggcgcgacgagaaccaactctttacctaactttgcatggtgcttagtcaaggactcctgcgacctggctcccgaggtcagctggcggcgctgacacacatgcatggcagactatccctggctctatctccctgttcctcgccccctccaccccccacttcctctttaaaaaaaaaaaaaaaaaaaaaaagatacaagaaaaacctttaaaaaaattccatgtttcctaatttgcacgaaattttctaccacaagatgtgccttgccttccgagaataagtattacctttaaacaatatcagcgcacacacatagctgcatgttctgctcgtgtagtttaaaaaaaaaaagacaaaacagtgacatgaaataaaaaataaaaattgaaaagggatgtatttctatttgtaaaaaaaataaaataaaaaataagaaagtgagaatctaaaaaaaaaaaaaaaaaaaaaaaaggaagaaaaaccacgctaaaaatcaagccactgaaaacaattgcccccaggtctacccagcccctggctgtccttggtcctgtctcccctcctgctgtattcaggggtgccccctggtgctcagcctctaccacccccaaccctgctcttgggtacccagaggggtcatttctgaatcccttgcccagaggacagacctccggggcccatcttggccctgggaaagggctctcctctctgattggtccctaggccacgggccggcccccagacaccattcaccgacccactgcaggctgtcctccaaccatggggtggccactccacccgcagccagactccccgctccccacttttcatgcaggctggcatacccctggctcagggtcaaatgctgttccacacccacctcagaggcaccccctctcccctgccccgtgcatccccacccttcttgccaaaggacctcttttcccctatccagagaccaccccaggtggcattctctcccaccttctcctttgtcccccatcccctgtctctgtcttccagctgtgaatatgaagggtatcctgtatgaaacaaaaacaaaacctgatatatgcaatatctgtctgtctgtctgtacccatgggcctggctcagccattggaggcccagccgagggtccggcagggcacagggacagccaggtggcaccgagtcacaggctgtggtccggtggctgagcatgctgttgtcttgtccttgattttattttcttttgttctttttttttttcttttctttttgtttttaactccagcttcctttgctttttacttgaccaaagctaagacaatagccagatggttagtggggcagccaggcagggaggacccagggctgggattctccaaccttaggccattcctgcagccctcaccacctccagcccctccaagcatctcgtgtagggacccacgcagatggtcccattcattcactattgcccccaaccccgggattttgggtggtctccacagccaccatcatacactcatcccgtgttttcttccaaaaagtcacctcagcagcctccccaggcgatacagagggagagcccagaccaccacagctggccacgacattgcccttaagtaatatgcattggccagagagcccgggctggctgtgcacagcattcatgtagctgatttctagctttttttttttttctgccccactcctgagcaaatctgtcttgccaaggaactaggagcaaccggaggcaaagggagtgggtggccccatcactattgggaccatcgcgtccctgcacagcccacacccgggggcccagagtcctgggctggacgccacccttctcaccccgagcttgcctccttggctcacttggcaccttggctgagtacagcaggcaaaagcccataccaggcagcatgttgtggatggtttagttctccccgcctccctgtttcttggaaaagctacagggtccctgtagggcaaaattcccaggcgccttgctgcagacagagtaagacaaaaacaccaggaagcaggattccgtgcccatctctgcagtttgggttcacaaaagggggtgccgtcatccctgggtggaggagggagtgttggttttttgtttttgtttttttaacatgtatgaaactgacatcttctcaaatcttgttccacccccctctggaagcccccatcacccacccctgctatggacaccacacctatgccaggcccccccccccaccccagtctcattctggggtctgcccatgctgtgggaaagaatagggaggcctcccaaatatatgcaaattgtccccattccgtgggggcacctgacaatgacccgggtggagatggggcatggaggagtaggaagacccagccctatttgactggggagaggaggatctggagtccttcatgcccaggtctggaacccaggttctgaccccagggccccaccctgggctggacaatcagatcccaaaggaatgccaaaggggactcggttgggagagccgcttaggggccagacctgggtccccctgcaggtccccaggcagcagacaattccaccttccctgccccaggaccttgagagacagcagcattccaggcacagacagacttggctgcaccccactgtcccttgcaagacaggttctggagccaggagcaactgtccagccctccagaagagacagcaagcagcccccctacccactctggcctccccaatggtactttgacctccagtgtagggctatactatacatatatatatatatatatatatatatatataattttggaatttgtttctcataatacagaatatatagtggctaccttgtatcttggtctggattctctctctgagaccccggattttactttctctttggagggcgctgggacatacatctctcaatccagcttcctccgcatcctcccatcttgccccatttctgccacgtcagacacttcctgagagtctcaccttcaaaatgacaccgctgcccatccattgctcaatggtacagagtgtggggtcagtccaccacccttgacctcccggcagggcaaggtgaggaggcggacccaaagcagtaccagcaggacttgttgccagtgataccaaaacagacttttcccaagcagtgcctcacatgtctgctggtgtggctttgggattctcctgccccacccccccgtccatggcagccccctccccaaggctttgctcacacctgagacaggaaggaggaaggggatccaataggaatatgggccccggaggggaagtcatgcacccccaagccaccaccccccagccttccacgcacatctcctggctggaagagagccctccaaaaaggggacacaggctgccccggcccctcaactgcatccacaccccatcctctcatcttgggtcccagccaggcccccccaaaaccaaagccccctcaagtcctggggtcccagcctgtgcccccagcttcctgcccacccagccctgagcattctcacacagagaaagaacaagcaagggctccagggggacaggatggggcagggcatacagtggggggtgggggggcagctgggaggagggagggacaaaacaaaacattttcctttgggttttttttttctttcttttttctcccctttactctttgggtggtgttgcttttcctttccttttccctttgagatttttttgttgttgtttcctttttgtattttactgatatcaccaggatagtttactctccttctagctttctgcttaccgcacactggataacacacacatacacacccacaaaaatgctcatgaacccaatccggagaaggttccagcaggtcccccaccctcccctcctcctcctacttctcctcttgacagcgaggacaggagggggacaaggggacacctgggcagacccgccggctctccccccaccccaccccgcccctcacatcatactccaatcataaccttgtatattatgcagtcattttggttttcgcggacgcgcctacctaagtaccatttacagaaagtgactctggctgtcattattttgtttatttgttccctatgcaaaaaaaaaatgaaaatgaaaaaagggggattccataaaagattcaataaaagacaaacaaaaaaaaaagaaaaaagaaaaaaatgtataaaaattaaacaagctatgcttcgactctt

SEQ ID NO: 263804 - DNA, 1500 bp, Artificial Sequence
  derived and/or modified sequence
atggatgaatttcatcccttcattgaggcactgttgccccatgtgcgcgcttttgcatatacctggtttaatctccaggctagaaaaaggaagtacttcaaaaagcatgagaaacgcatgtcgaaggacgaggagagggccgtaaaggacgagttattgggcgaaaaacccgaggtgaagcagaagtgggcctcgcggctcctggccaagctccgcaaggacatccgcccagaatgtcgagaggactttgtgctttctatcacagggaaaaaggccccagggtgcgtactgtctaaccctgaccagaagggcaaaatgaggagaatcgactgtttaagacaggctgataaagtctggcgcctagacctcgttatggttatcctgttcaagggcatacccctcgagagcacagacggcgaacgtctcgttaaggcagcgcaatgtgggcaccctgttttgtgcgtgcaaccccatcacattggcgtggctgtgaaggaattagacctctacctggcctatttcgtgcgggagcgggacgctgaacaaagcggttctcctaggacaggcatgggatccgaccaagaggactcaaagccgatcactctggacactaccgattttcaggagtcgtttgtcacctccggggtgttctccgtgacagagctcattcaggtgtctagaacacctgtagtgaccggtacgggacctaactttagcctcggcgagctgcaaggccacctggcctacgacctgaatcctgcttctactggcctgcgtcgtaccctgccttctacctctagcagtggctcgaagagacacaaatctggatctatggaagaggacgtagacacctccccaggcggagattattatacaagtccttccagtcccacctcttcctccagaaattggactgaggacatggaaggcggtatatcaagtccagtgaagaagactgagatggacaagagccctttcaactcgcccagtccacaggattccccgaggcttagctctttcacccaacatcaccgacccgtcattgctgttcacagcggaatcgctagaagcccacatccgtcgagcgcgctacacttccctactacatcgattctgccccaaaccgcaagtacttatttccctcacactgctatcaggtatcctccccatttaaatcctcaggaccccctgaaagatctggttagcttagcctgtgaccctgccagtcagcaacccggacctctgaatgggagcggacagctgaagatgccctcccattgcctctcagctcagatgctggccccacccccaccgggtctacctcggctcgctttaccacccgcaacaaaacctgcaacgacatcagaaggaggcgctacttctccgacctcgccgtcgtatagcccacctgacacctccccggctaacagaagctttgttgggctggggcctcgcgaccctgccggaatttatcaggcccagtcttggtatctaggctag

SEQ ID NO: 263805 - DNA, 1500 bp, Artificial Sequence
  derived and/or modified sequence
atggacgagtttcacccctttattgaagcactgttaccccatgtgcgtgcatttgcctacacttggttcaacctccaggctcggaaaaggaaatattttaaaaagcatgagaaacgcatgagcaaagatgaggaacgggctgtcaaagacgagttactgggggaaaagcccgaggtcaagcagaaatgggctagtcgattactcgctaagttgaggaaagatatccggccagagtgcagagaagactttgtgctatcaattactggcaagaaagccccaggctgcgtcctgtccaaccccgaccagaaaggtaaaatgcggcgtattgactgcctccgtcaggcggacaaggtctggcggctggaccttgttatggtcattttatttaaaggcattcccttggagagcactgacggagaacgcctggtcaaggctgcccaatgcggccaccccgttctctgtgtgcaaccacaccatattggggtagcagtgaaggagttggacctttatctggcttacttcgtgagagaacgagacgccgagcagtcagggtcccctagaaccggcatgggatccgatcaggaggactccaaacctatcacccttgatacaactgattttcaggaaagcttcgtgaccagtggcgtgtttagtgttactgagcttatccaggtaagtcggacccccgtagtgaccgggacaggcccaaacttctccctgggtgagctgcagggtcatctcgcttacgatctgaacccggcttccactggattaagacgaacgttaccttcaacgtcctcatcggggagcaagcgccataaatctggcagcatggaggaggatgtggatacaagccccggaggagattactacacgtctccatcttctccaacctcaagtagccggaactggacagaagatatggaggggggaatctcttcccctgtgaaaaaaaccgagatggataagtcccccttcaattcaccatctccacaggatagcccacgccttagtagctttactcagcaccataggcccgttatcgccgtgcatagtggcatagcccgaagtccacacccttccagcgcgcttcacttccctacaacgagtattctgccgcaaactgcgtccacctattttccacataccgctatcaggtatcctccccatttgaaccctcaggatcctctgaaagacctcgttagcctagcgtgtgaccctgcatctcaacaacccggaccgctaaacgggtctggtcagctcaagatgccctcccattgcttgagtgcgcaaatgctggcaccaccgccaccaggactgcccagattggccctgcctcctgccaccaaacctgcgaccacttcagaaggtggcgcaacttctcccacaagtccaagctacagtccgcctgatacctctccggcaaaccgcagctttgttggtctgggacctcgggatccagctgggatttatcaagcacagtcttggtacctaggttag

SEQ ID NO: 263806 - DNA, 1500 bp, Artificial Sequence
  derived and/or modified sequence
atggacgagttccaccccttcatcgaggccctgctgccccacgtgagagccttcgcctacacctggttcaacctgcaggccagaaagagaaagtacttcaagaagcacgagaagagaatgagcaaggacgaggagagagccgtgaaggacgagctgctgggcgagaagcccgaggtgaagcagaagtgggccagcagactgctggccaagctgagaaaggacatcagacccgagtgcagagaggacttcgtgctgagcatcaccggcaagaaggcccccggctgcgtgctgagcaaccccgaccagaagggcaagatgagaagaatcgactgcctgagacaggccgacaaggtgtggagactggacctggtgatggtgatcctgttcaagggcatccccctggagagcaccgacggcgagagactggtgaaggccgcccagtgcggccaccccgtgctgtgcgtgcagccccaccacatcggcgtggccgtgaaggagctggacctgtacctggcctacttcgtgagagagagagacgccgagcagagcggcagccccagaaccggcatgggcagcgaccaggaggacagcaagcccatcaccctggacaccaccgacttccaggagagcttcgtgaccagcggcgtgttcagcgtgaccgagctgatccaggtgagcagaacccccgtggtgaccggcaccggccccaacttcagcctgggcgagctgcagggccacctggcctacgacctgaaccccgccagcaccggcctgagaagaaccctgcccagcaccagcagcagcggcagcaagagacacaagagcggcagcatggaggaggacgtggacaccagccccggcggcgactactacaccagccccagcagccccaccagcagcagcagaaactggaccgaggacatggagggcggcatcagcagccccgtgaagaagaccgagatggacaagagccccttcaacagccccagcccccaggacagccccagactgagcagcttcacccagcaccacagacccgtgatcgccgtgcacagcggcatcgccagaagcccccaccccagcagcgccctgcacttccccaccaccagcatcctgccccagaccgccagcacctacttcccccacaccgccatcagataccccccccacctgaacccccaggaccccctgaaggacctggtgagcctggcctgcgaccccgccagccagcagcccggccccctgaacggcagcggccagctgaagatgcccagccactgcctgagcgcccagatgctggccccccccccccccggcctgcccagactggccctgccccccgccaccaagcccgccaccaccagcgagggcggcgccaccagccccaccagccccagctacagcccccccgacaccagccccgccaacagaagcttcgtgggcctgggccccagagaccccgccggcatctaccaggcccagagctggtacctgggctag

SEQ ID NO: 263807 - protein, 420 aa, Artificial Sequence
  derived and/or modified sequence
MLKAVILIGGPQKGTRFRPLSFEVPKPLFPVAGVPMIQHHIEACAQVPGMQEILLIGFYQPDEPLTQFLEAAQQEFNLPVRYLQEFAPLGTGGGLYHFRDQILAGSPEAFFVLNADVCSDFPLSAMLEAHRRQRHPFLLLGTTANRTQSLNYGCIVENPQTHEVLHYVEKPSTFISDIINCGIYLFSPEALKPLRDVFQRNQQDGQLEDSPGLWPGAGTIRLEQDVFSALAGQGQIYVHLTDGIWSQIKSAGSALYASRLYLSRYQDTHPERLAKHTPGGPWIRGNVYIHPTAKVAPSAVLGPNVSIGKGVTVGEGVRLRESIVLHGATLQEHTCVLHSIVGWGSTVGRWARVEGTPSDPNPNDPRARMDSESLFKDGKLLPAITILGCRVRIPAEVLILNSIVLPHKELSRSFTNQIIL

SEQ ID NO: 263808 - protein, 136 aa, Artificial Sequence
  derived and/or modified sequence
DPLSWLSGPWGQVPAGICPPRHRGWYHFRDQILAGSPEAFFVLNADVCSDFPLSAMLEAHRRQRHPFLLLGTTANRTQSLNYGCIVENPQTHEVLHYVEKPSTFISDIINCGIYLFSPEALKPLRDVFQRNQQDGQ

SEQ ID NO: 263809 - protein, 164 aa, Artificial Sequence
  derived and/or modified sequence
MLKAVILIGGPQKGTRFRPLSFEVPKPLFPVAGVPMIQHHIEACAQVPGMQEILLIGFYQPDEPLTQFLEAAQQEFNLPVRYLQEFAPLGTGGGLYHFRDQILAGSPEAFFVLNADVCSDFPLSAMLEAHRRQRHPFLLLGTTANRTQSLNYGCIVENPQTHEV

SEQ ID NO: 263810 - DNA, 1524 bp, Artificial Sequence
  derived and/or modified sequence
gagctggagtgaagggagctagtggtaaagggagctggtggaggggtggcggcaggggtagcagtcaccattatgctcaaagcggtgatcctgattggaggccctcaaaagggaactcgcttcagacctttgtcttttgaggtgcccaaaccattgtttcctgtggcaggggtccctatgatccaacaccatattgaagcctgtgcccaggtccctggaatgcaggagattctgctcattggcttctaccaacctgatgagcccctcacccagttcctagaagccgcccagcaggagtttaaccttccagtcaggtacctgcaggaatttgcccccctaggcacagggggtggtctttaccattttcgagaccagatcctggctgggagccccgaggcattcttcgtgctcaatgctgatgtctgctccgacttccccttgagtgctatgttggaagcccaccgacgccagcgtcaccctttcttactccttggcactacggctaacaggacgcaatccctcaactacggctgcatcgttgagaatccacagacacacgaggtattgcactatgtggagaaacccagcacatttatcagtgacatcatcaactgcggcatctacctcttttctcctgaagccttgaagcctcttcgggatgtcttccagcgtaatcagcaggatgggcaattggaggactcaccaggcttgtggccaggggcaggtaccatccgcctagagcaggatgtgttttcagccctggcagggcagggccagatatacgtgcatctcactgatggtatctggagtcagatcaagtccgcaggttcagccctctacgcctcccgcctctacctgagccgataccaggacactcacccagaacggctggccaagcacaccccagggggcccatggatccgagggaatgtgtacatccacccgaccgccaaggtggccccctcggctgtgctgggccccaacgtctccatcgggaagggggtgaccgtgggtgagggtgtgcggctccgggagagcatcgtcctccatggagccactttgcaggagcacacgtgtgttctgcatagcatcgtgggctgggggagcaccgtgggacgctgggcccgcgtggagggtacccccagtgaccctaaccccaacgatccccgagcccgcatggacagtgagagcctcttcaaggacgggaagctgctgcctgctatcaccatcctgggctgccgagtccggatccctgccgaggtgctcatcctgaactcgattgttctgccacacaaggagctgagccgaagcttcaccaaccagatcatcctctgagtagggctgccagaaggcccccagctcctacccactccccttgaggctgctgcctgcttggccagcctctgtccagaaaggaccagagaaagccaggctggatcgtcacatgccggggagcaatgtggatggcctggggactcctgggttttctccctcccgactccctaataaaccccgtgaaccttg

SEQ ID NO: 263811 - DNA, 1822 bp, Artificial Sequence
  derived and/or modified sequence
agtagcgggcggcagagctggagtgaagggagctagtggtaaagggagctggtggaggggtggcggcaggggtaaggggcaggggacaccctctagacggagagcgggctccgaggtcctggctggccctcggtgcgcccgcccctgtgttggtcccacaatccctggcaatgagaggccagggtttattggacagagtcagttgtggggttcagagggtcagcaatcaatcaatcctccgaatccagagatttagacccagtcgtccgtattaggactggaggggggtcaataggttcagtgtttgagatgccaagggaacctgtcttttgatttggggttcaacatacagaggtagcagtcaccattatgctcaaagcggtgatcctgattggaggccctcaaaagggaactcgcttcagacctttgtcttttgaggtgcccaaaccattgtttcctgtggcaggggtccctatgatccaacaccatattgaagcctgtgcccaggtccctggaatgcaggagattctgctcattggcttctaccaacctgatgagcccctcacccagttcctagaagccgcccagcaggagtttaaccttccagtcaggtacctgcaggaatttgcccccctaggcacagggggtggtctttaccattttcgagaccagatcctggctgggagccccgaggcattcttcgtgctcaatgctgatgtctgctccgacttccccttgagtgctatgttggaagcccaccgacgccagcgtcaccctttcttactccttggcactacggctaacaggacgcaatccctcaactacggctgcatcgttgagaatccacagacacacgaggtattgcactatgtggagaaacccagcacatttatcagtgacatcatcaactgcggcatctacctcttttctcctgaagccttgaagcctcttcgggatgtcttccagcgtaatcagcaggatgggcaattggaggactcaccaggcttgtggccaggggcaggtaccatccgcctagagcaggatgtgttttcagccctggcagggcagggccagatatacgtgcatctcactgatggtatctggagtcagatcaagtccgcaggttcagccctctacgcctcccgcctctacctgagccgataccaggacactcacccagaacggctggccaagcacaccccagggggcccatggatccgagggaatgtgtacatccacccgaccgccaaggtggccccctcggctgtgctgggccccaacgtctccatcgggaagggggtgaccgtgggtgagggtgtgcggctccgggagagcatcgtcctccatggagccactttgcaggagcacacgtgtgttctgcatagcatcgtgggctgggggagcaccgtgggacgctgggcccgcgtggagggtacccccagtgaccctaaccccaacgatccccgagcccgcatggacagtgagagcctcttcaaggacgggaagctgctgcctgctatcaccatcctgggctgccgagtccggatccctgccgaggtgctcatcctgaactcgattgttctgccacacaaggagctgagccgaagcttcaccaaccagatcatcctctgagtagggctgccagaaggcccccagctcctacccactccccttgaggctgctgcctgcttggccagcctctgtccagaaaggaccagagaaagccaggctggatcgtcacatgccggggagcaatgtggatggcctggggactcctgggttttctccctcccgactccctaataaaccccgtgaaccttgg

SEQ ID NO: 263812 - DNA, 1263 bp, Artificial Sequence
  derived and/or modified sequence
atgctgaaggccgtcattcttattggtggaccccagaagggaacccgcttcagacctctgagcttcgaggttcctaagcctttgtttccggtcgctggggtaccaatgatacaacaccacatcgaggcatgtgcccaagtccctggtatgcaggagatacttctcatcggcttttatcaaccggacgaacctctcacacagtttctcgaggcagcccagcaagagttcaacctgccagtgcgatatctgcaggaattcgcacctctcggcaccggaggaggactctatcatttcagggatcaaatccttgcaggctcccccgaagcgttcttcgtgctgaacgcagacgtatgctctgatttcccactgtcagccatgctagaggcacaccgccggcagcgtcacccctttctgctcctggggaccaccgccaaccggacccagagcctgaattacggatgtattgtggagaatccacagactcatgaagtgctccactatgtcgaaaagccctctaccttcataagcgatatcatcaactgtggcatctacctcttttcacctgaggccctcaagcccttgagagacgtgttccagcggaaccagcaggacggtcagttggaagattcacccgggctgtggcccggggctgggactattcgactcgagcaggatgtgtttagtgccctggcaggtcagggccaaatttacgtgcacctcactgatggaatctggtcacagattaagtccgccggatcggctctatatgcttcaaggctttatctgagccgatatcaggacactcacccagagaggctggccaaacatacccctgggggaccctggattaggggcaatgtttatatccatccaacggcaaaggttgcaccaagcgcggttctcggtcccaatgtctccatcgggaagggcgtgacagtgggagagggcgttcgcctcagagagagtatcgtgctccacggagcaacactgcaggaacacacctgtgtgctccattccatcgtggggtggggctccaccgtcgggcggtgggcacgggtggagggcaccccttctgaccccaacccgaatgacccgagagcccgcatggattccgagagcttgttcaaagacggcaaattgctgcctgccataacaatactaggatgtagagtcagaattccagccgaagtgctcatcttgaacagcatcgtgctgcctcacaaggagttgtccaggtcttttaccaatcagatcattctgtag

SEQ ID NO: 263813 - DNA, 1263 bp, Artificial Sequence
  derived and/or modified sequence
atgctcaaggccgtcatcttgattggaggaccccagaagggcacacggttccggcccctgtctttcgaggtgcccaagccactcttcccagtggccggcgtgcccatgatccaacaccatatcgaggcctgtgcacaggttcccgggatgcaggagatcctgttgattggcttctaccagcccgatgaacctctaacccagtttctggaagccgcccagcaggaattcaacctgccagtgagatacttacaggagtttgcccctttaggaaccgggggtggtctataccactttcgagatcagatactcgcaggctcaccggaggcattcttcgtgctcaatgcagacgtatgttcagattttcccctgtctgcgatgctggaggcccaccggcggcagcggcatccatttctcctcctcgggacaacggcaaaccggacgcaatcactcaactacggctgcattgtggaaaacccccagacgcacgaggttctgcactacgtcgaaaaaccatccacattcatcagcgatataattaactgcggcatttatcttttctccccggaggcgttgaagcctctgcgtgacgtgtttcagcggaaccaacaagacgggcagctggaagactcacctggactatggcctggggccgggactatccgtctagaacaggacgttttttcagccttagcaggtcagggccaaatctatgtgcacctaaccgatggaatctggtctcagattaagagcgcaggatccgctctgtacgcctctcgactatatttatccagataccaggatacccaccctgagagactcgctaagcatacacccggaggaccatggattcgagggaacgtgtacatccaccctactgcaaaggtggcccccagtgccgtgctcggcccaaatgtgtccataggaaaaggagttaccgttggcgaaggagtgcggcttcgggagtcaatcgtcctacatggcgccaccctgcaggagcatacctgcgtcctccactctattgtcggctggggctccaccgtgggccgctgggccagggtggagggcaccccttccgatcccaatccgaatgacccccgcgcacggatggattcggagagcctctttaaagatgggaagctattacccgccataacgatcctgggctgtagggtcaggatcccagcggaggttttgattctgaactccattgtgctgccacataaagagctgtcgcggtcttttaccaaccagatcattctgtag

SEQ ID NO: 263814 - DNA, 1263 bp, Artificial Sequence
  derived and/or modified sequence
atgttgaaggccgtgatactcattggcggtccccagaagggcaccagatttcgccctctgagtttcgaggtccccaagccactgttccctgttgctggcgtgcccatgattcagcatcatatagaggcttgcgcccaggtccctggcatgcaagagatactactcataggtttttatcagccagatgagccgcttacacagttcctggaagccgcacagcaggaattcaatttaccggtcaggtacttgcaagagtttgcacctcttgggacaggtggtgggctctatcactttagagaccaaattcttgccggctcccctgaggcatttttcgtgttgaatgccgacgtgtgcagcgattttccactgtctgcgatgttggaggcccatcgccggcaacgccacccgtttcttctcctgggaactactgcaaaccgaacccagtctctgaactatggctgtatcgttgagaacccgcagacgcacgaggtgctccactacgtcgagaagcccagcaccttcatctccgacataattaattgcggcatttaccttttctctccagaggccctgaagcccctcagggacgtcttccagcggaatcaacaggacggacaactcgaggactcacccggcctgtggcctggcgccggcacgatcaggttagaacaagacgtgttcagcgccctcgccggacagggccagatttacgtgcacttgactgacgggatctggtcccaaatcaagtccgctggatccgccctctacgcatcaagattatacttgtcgcgctatcaggatacacacccagagagactagctaaacatacaccgggtgggccatggattagaggtaacgtgtacatccacccgacagccaaagtcgctccttctgcagtactgggtccaaacgtctccattgggaagggcgttactgtaggagaaggagtgcgactgcgcgagagcattgttttgcacggcgcaaccttacaggaacacacatgcgttctgcacagtatagtggggtggggtagcaccgtgggacgttgggcacgagtcgaaggaaccccttcagatccgaaccccaatgatccaagagctagaatggattccgagagtcttttcaaggacgggaagctgctgcctgccatcactatcctcggctgtagggttagaatccctgccgaggtgctgattcttaattctatcgtgctacctcacaaagagctctctcgttcatttaccaaccagattatactctag

SEQ ID NO: 263815 - DNA, 1263 bp, Artificial Sequence
  derived and/or modified sequence
atgctcaaggccgtcatcttgattgggggacctcagaagggcacacgcttcaggccactcagtttcgaagtgcctaaacccctgttcccagttgcgggggtgccgatgattcaacatcacattgaggcctgtgcccaggtgccaggaatgcaagaaattctcctgattggcttttaccaacctgatgagcctttaacgcagtttcttgaggccgcccagcaagagtttaatcttccagttagatatttacaagagttcgctcccctcggcactggaggagggctctatcactttagagaccagatactggcaggaagtccagaggcattctttgtgctgaacgccgatgtgtgctctgacttcccattgtccgctatgttggaggcacaccgccggcagcgtcatcctttcctgctgttgggtactacggcaaaccgaacccaaagtcttaattatggatgcatcgttgagaacccacagacacacgaggtcctgcattacgtggaaaaaccctccactttcataagcgacattatcaactgcggaatttacctatttagtcccgaggccctgaagccactacgcgacgtttttcagcgcaatcagcaagacggtcaattggaagattcacccgggctgtggccaggtgctggcaccatccgactcgagcaggacgtattcagtgccttggcaggccagggacaaatctacgttcacctcacggatggtatttggtcacaaattaaatccgcgggtagcgctctatatgcttcacgcctgtacctgtctcggtaccaggatactcaccctgagagattggccaaacacacacccggcgggccatggattagagggaacgtttacatccatcctaccgccaaagtggcgccaagcgctgtcctcggaccaaacgtctccataggtaaaggtgtgaccgtgggggaaggggtgaggttacgagagagcattgtcctgcacggggctacactgcaggagcatacctgtgttctacattctatcgtcggttgggggtcaacggtggggaggtgggcgagagttgagggcaccccctccgatcctaaccctaacgatccaagggcacgtatggacagcgagagcctcttcaaggacggaaaattgctgccagcaattaccattttgggttgccgcgtcagaattcctgctgaggtgctgatcctgaacagcattgtactgccccataaggaactctctcgtagtttcaccaaccagatcatactgtag

SEQ ID NO: 263816 - DNA, 1501 bp, Artificial Sequence
  derived and/or modified sequence
cgggcggcagagctggagtgaagggagctagtggtagcagtcaccattatgctcaaagcggtgatcctgattggaggccctcaaaagggaactcgcttcagacctttgtcttttgaggtgcccaaaccattgtttcctgtggcaggggtccctatgatccaacaccatattgaagcctgtgcccaggtccctggaatgcaggagattctgctcattggcttctaccaacctgatgagcccctcacccagttcctagaagccgcccagcaggagtttaaccttccagtcaggtacctgcaggaatttgcccccctaggcacagggggtggtctttaccattttcgagaccagatcctggctgggagccccgaggcattcttcgtgctcaatgctgatgtctgctccgacttccccttgagtgctatgttggaagcccaccgacgccagcgtcaccctttcttactccttggcactacggctaacaggacgcaatccctcaactacggctgcatcgttgagaatccacagacacacgaggtattgcactatgtggagaaacccagcacatttatcagtgacatcatcaactgcggcatctacctcttttctcctgaagccttgaagcctcttcgggatgtcttccagcgtaatcagcaggatgggcaattggaggactcaccaggcttgtggccaggggcaggtaccatccgcctagagcaggatgtgttttcagccctggcagggcagggccagatatacgtgcatctcactgatggtatctggagtcagatcaagtccgcaggttcagccctctacgcctcccgcctctacctgagccgataccaggacactcacccagaacggctggccaagcacaccccagggggcccatggatccgagggaatgtgtacatccacccgaccgccaaggtggccccctcggctgtgctgggccccaacgtctccatcgggaagggggtgaccgtgggtgagggtgtgcggctccgggagagcatcgtcctccatggagccactttgcaggagcacacgtgtgttctgcatagcatcgtgggctgggggagcaccgtgggacgctgggcccgcgtggagggtacccccagtgaccctaaccccaacgatccccgagcccgcatggacagtgagagcctcttcaaggacgggaagctgctgcctgctatcaccatcctgggctgccgagtccggatccctgccgaggtgctcatcctgaactcgattgttctgccacacaaggagctgagccgaagcttcaccaaccagatcatcctctgagtagggctgccagaaggcccccagctcctacccactccccttgaggctgctgcctgcttggccagcctctgtccagaaaggaccagagaaagccaggctggatcgtcacatgccggggagcaatgtggatggcctggggactcctgggttttctccctcccgactccctaataaaccccgtgaaccttgg

SEQ ID NO: 263817 - DNA, 1242 bp, Artificial Sequence
  derived and/or modified sequence
gatccactgagctggctctcgggtccctggggacaggtacctgcaggaatttgcccccctaggcacagggggtggtaccattttcgagaccagatcctggctgggagccccgaggcattcttcgtgctcaatgctgatgtctgctccgacttccccttgagtgctatgttggaagcccaccgacgccagcgtcaccctttcttactccttggcactacggctaacaggacgcaatccctcaactacggctgcatcgttgagaatccacagacacacgaggtattgcactatgtggagaaacccagcacatttatcagtgacatcatcaactgcggcatctacctcttttctcctgaagccttgaagcctcttcgggatgtcttccagcgtaatcagcaggatgggcaattggaggactcaccaggcttgtggccaggggcaggtaccatccgcctagagcaggatgtgttttcagccctggcagggcagggccagatatacgtgcatctcactgatggtatctggagtcagatcaagtccgcaggttcagccctctacgcctcccgcctctacctgagccgataccaggacactcacccagaacggctggccaagcacaccccagggggcccatggatccgagggaatgtgtacatccacccgaccgccaaggtggccccctcggctgtgctgggccccaacgtctccatcgggaagggggtgaccgtgggtgagggtgtgcggctccgggagagcatcgtcctccatggagccactttgcaggagcacacgtgtgttctgcatagcatcgtgggctgggggagcaccgtgggacgctgggcccgcgtggagggtacccccagtgaccctaaccccaacgatccccgagcccgcatggacagtgagagcctcttcaaggacgggaagctgctgcctgctatcaccatcctgggctgccgagtccggatccctgccgaggtgctcatcctgaactcgattgttctgccacacaaggagctgagccgaagcttcaccaaccagatcatcctctgagtagggctgccagaaggcccccagctcctacccactccccttgaggctgctgcctgcttggccagcctctgtccagaaaggaccagagaaagccaggctggatcgtcacatgccggggagcaatgtggatggcctggggactcctgggttttctccctcccgactccctaataaaccccgtgaaccttg

SEQ ID NO: 263818 - DNA, 1263 bp, Artificial Sequence
  derived and/or modified sequence
atgctgaaggccgtcatcctgattggaggcccccagaagggcacccgcttccggcccctgagctttgaggtgcccaagcccctcttccctgtggccggcgtgcccatgatccagcaccacatcgaggcctgtgcccaggtgcccggcatgcaggagatcctgctgattggcttctaccagccagatgagcccctgacccagttcctggaggccgcccagcaggagttcaacctgcctgtgcgctacctgcaggagtttgcccccctgggcactggaggcggcctgtaccacttccgggaccagatcctggccggcagccctgaggccttctttgtgctgaatgctgatgtgtgcagcgacttccccctgagcgccatgctggaggcccaccggcggcagaggcaccccttcctgctgctgggcaccacagccaacagaacccagagcctgaactacggctgcatcgtggagaacccccagacccatgaggtgctgcactacgtggagaagcccagcaccttcatcagtgacatcatcaactgtggcatctacctgttcagccctgaggccctgaagcccctgagagatgtgttccagaggaaccagcaggacggccagctggaggacagccctggcctgtggccaggagctggcaccatccggctggagcaggatgtgttcagcgccctggccggccagggccagatctacgtgcacctgacagatggcatctggagccagatcaagtctgctggcagcgccctgtatgccagccggctgtacctgagccgctaccaggacacccaccctgagcggctggccaagcacacccctgggggcccctggatcagaggaaatgtgtacatccaccccacagccaaggtggcccccagcgctgtgctgggccccaacgtgtccattggaaaaggagtgacagtgggggagggcgtgcggctgcgggagagcatcgtgctgcacggggccaccctgcaggagcacacctgtgtgctgcacagcatcgtgggctggggcagcacagtgggccgctgggcccgggtggagggcacccccagcgaccccaaccccaatgacccccgggccaggatggattctgagagcctcttcaaggatggcaagctgctgcctgccatcaccatcctgggctgccgggtgcgcatcccagctgaggtgctgatcctgaacagcatcgtgctgccccacaaggagctgagccgctccttcaccaaccagatcatcctgtag

SEQ ID NO: 263819 - DNA, 1263 bp, Artificial Sequence
  derived and/or modified sequence
atgctgaaggccgtgatcctgatcggcggcccccagaagggcaccaggtttcgtcccctttcttttgaagtgcctaagccactgtttccagtggccggcgtgcccatgattcagcatcatattgaagcatgtgcacaagttccagggatgcaagaaatcctcctcatcggcttctaccagcccgacgagcctttgacgcagtttctcgaagccgctcagcaggaattcaacttaccagtcagataccttcaggagttcgctcctctgggtaccgggggcggactttaccatttccgcgaccagatccttgcaggatcacctgaggccttttttgtcctaaatgctgacgtttgttctgactttcccctctcggcaatgctggaagcgcatcgcaggcagcgacacccctttctgcttctcggtaccactgcaaacagaacgcaaagtttgaactacggatgcattgtggagaacccccagacgcatgaggtgctgcattatgtcgagaaaccgagcacattcatctccgatatcattaactgtggaatttatctcttttccccagaagctctgaaacccctaagagatgtctttcagcggaatcagcaggacggccagttggaagatagtcccggtctttggcctggggccggaacaattcgacttgagcaagatgtattttctgcactcgctggtcagggacagatctatgtgcatctgacagatggcatctggtctcagattaaatctgccggatctgccttgtacgcatcccgcctctacctgtcacggtatcaggatacgcaccccgaaaggcttgccaagcacaccccaggaggcccctggattagaggaaatgtctacatacacccaacggcgaaggtagcccccagcgctgttctgggccctaacgtgtcaatcggtaaaggcgtgacagtgggtgagggagtgagactccgggaatccatcgtactacatggcgcgacgcttcaggagcatacgtgcgtgttgcacagcatcgtcggttggggctccaccgttggccgctgggcacgggtggaagggaccccttcagacccgaaccccaatgacccccgcgcccgtatggactctgaaagcctgttcaaagatggaaaactactgcctgctataacaatcctgggatgtagagtgaggatccccgcagaagttctgattttgaactcaatcgtgctgccccacaaagaactgtcgagatccttcaccaaccaaatcattctatag

SEQ ID NO: 263820 - DNA, 1263 bp, Artificial Sequence
  derived and/or modified sequence
atgctgaaggccgtgatcctgatcggcggcccccagaagggcaccagatttcggcccttatccttcgaggttcctaagcccctgtttccagtcgccggcgtccccatgatccagcaccatatcgaagcatgtgcccaagtgcctggtatgcaggagattctattgataggattttaccagcctgatgaaccactcactcagtttcttgaagccgcacagcaggaatttaacctgcctgtccggtacctacaggagttcgcacctcttgggactggggggggcctgtaccactttagagaccaaatattggctggctcccccgaggccttctttgtactaaacgccgacgtgtgcagcgattttccactgtcagccatgctggaagcacacagaaggcagcggcatcccttcctgctgctgggaactaccgcaaatcggacccagtcgttgaactacggatgcattgttgaaaacccgcagactcacgaggtgctgcattacgtggagaagcctagcacgtttatttctgatatcatcaactgcggcatttacctcttttcccccgaggccctgaaaccattgcgcgatgttttccagaggaaccagcaagatggacagctggaagatagccccggcctctggcccggcgcaggtacaattcggttggagcaggatgtgtttagcgccttggccgggcaaggacagatttatgtccatttgaccgacggaatttggtctcaaatcaagtctgccggctctgctctttacgcttctaggctttatctgtcacgctatcaggacacacaccccgaacgattagcaaagcacacaccgggcggtccatggatcaggggcaatgtttatatccatcctacagcaaaagtggcaccctccgccgttttggggccaaatgtttctatcggcaagggcgtaactgttggcgagggggtcagattgcgagaatcgattgttttgcacggagcaacacttcaggagcacacctgcgtccttcactccatcgtgggatggggtagcactgtcgggcgttgggcacgtgtggagggcacaccctccgatcccaatcctaacgacccgcgtgctcggatggattccgagtccttatttaaggacggaaagctccttcccgctatcaccatcctgggatgtcgtgtccggattccagcagaggtgctgatactgaacagtatcgtacttcctcacaaagagttatcccgctcattcactaaccagattatcctgtag

SEQ ID NO: 263821 - DNA, 1263 bp, Artificial Sequence
  derived and/or modified sequence
atgctgaaggccgtgatcctgatcggcggcccccagaagggcaccaggttccgtcccctgtccttcgaagtgcccaaaccgctgttcccagtggccggagttcccatgattcagcatcacatcgaagcttgcgcgcaagtcccaggaatgcaagaaattctgttgatagggttctatcagccagacgaacccttaacccagtttcttgaagccgcccagcaagaatttaatctgccggtccgctacctacaagaattcgccccactaggaaccgggggtggactgtatcactttcgtgaccagattctggccggaagtcccgaggccttctttgttcttaatgccgatgtgtgtagcgattttcccttgagcgccatgctggaggctcacagacggcagaggcacccctttctgctgctcggcactactgctaaccgaacccagtcgctcaattatggctgcatcgtggagaacccccaaactcacgaggtgttgcactacgtggaaaaaccatctacattcatttccgacatcatcaactgtgggatctacctgttcagtcccgaggcattaaaacccttgagagacgtgttccaacgtaatcagcaggacgggcagttggaggatagtcctgggctgtggccgggggctgggaccattagactcgaacaagacgtgttctctgctctcgccgggcaggggcagatatacgtgcatctaacagacggtatttggtcccagattaagtccgccgggagcgcactctacgcctcccgtttatatttgagcagatatcaggacacccacccagaacgcttagctaagcacacccctggcgggccttggattagaggcaacgtgtatatccaccctaccgccaaagtcgccccgtcggccgtattgggccctaacgtgtccattgggaagggcgtgaccgttggcgagggcgtgcggttgagagagtcaatcgttttgcacggtgctacactgcaggagcacacctgtgtgttgcactcgatcgtgggatggggctctaccgtcggccggtgggcacgtgtggaggggacaccatctgaccctaatcccaatgaccccagggctaggatggattctgagagcttattcaaggatggcaagcttcttcctgctataacaatcctgggttgtcgcgtccggatccccgcggaggtgctgattctgaattctatcgttctacctcacaaggagctgagcaggagctttaccaaccaaattatcctgtag

SEQ ID NO: 263822 - DNA, 1263 bp, Artificial Sequence
  derived and/or modified sequence
atgctgaaggccgtgatcctgatcggcggcccccagaagggcaccaggttcagaccgttgagttttgaagttcccaaaccattatttccggtcgcaggcgtgccaatgatccagcaccacatcgaggcctgtgctcaggtcccaggtatgcaggagatactcctgattggcttttatcaacctgacgagccacttactcagttcctcgaagctgctcagcaggagttcaatttgcccgtacggtacttgcaggagtttgcccctctcggtactggggggggtctgtatcatttcagggaccagattctggccggctcccccgaggcattttttgtcctcaacgcagatgtgtgctcagattttccactgagcgccatgctcgaggcacatcggcgacagcgccatccgttcctcctgttgggaactacggccaacagaacccagagcttgaactacgggtgtattgtggagaacccacagactcacgaggttctacactatgtggagaaacctagtacattcatcagtgatatcatcaattgcggcatctacctctttagccccgaagccttaaaacctttgcgagacgtgtttcagcggaaccagcaggatggccagctggaggacagtccaggattgtggccgggggctgggacaattaggctggaacaggacgtgttctctgctctggccggccaggggcaaatctacgtccatctgacagacggcatttggtcgcagattaaatccgccggatcagccctttatgccagtcgactatacctgagtaggtaccaagacacccatcccgaacgcctggccaagcacacacctggcggaccatggattcgaggcaacgtgtacattcaccctaccgccaaagtggctccctctgccgtacttggcccaaacgtgtcaatagggaaaggagtgacagtcggggagggcgtgcggcttagagagtctatcgtcctccacggggccacactccaggaacatacgtgtgtgctgcacagcatcgttggatggggttcaaccgtaggaaggtgggcccgggtggagggcacaccgagtgatcccaaccctaacgatccccgggctcggatggacagcgaatctctatttaaggatggcaaacttctgcctgcgatcacgatattgggctgccgcgtgaggatacccgctgaggtactcatactgaactccatcgtgttaccgcacaaagagctttccaggtcattcactaatcagattattctgtag

SEQ ID NO: 263823 - DNA, 1263 bp, Artificial Sequence
  derived and/or modified sequence
atgcttaaggcagttatcttaatcgggggtccccagaagggtacacgtttccgtcccttatcttttgaagtcccaaagccactcttcccggttgccggagtgccaatgattcaacatcacatcgaagcctgcgcccaagtcccaggtatgcaggagatcctcctaattggattttaccaacctgatgagcccctaactcagtttctggaggctgcccaacaagagttcaacctcccggtccggtacctgcaggagttcgcacctcttggcactgggggaggtctatatcactttcgcgatcagattcttgctggaagccccgaagccttcttcgttctgaacgccgatgtatgctccgactttcctttgagtgcaatgctcgaggcacacagaagacagaggcaccctttccttctgctcggcaccacagccaaccgaactcagagtctcaattatgggtgcatagtcgagaatccgcagacccacgaagtgcttcactatgtggagaaaccttccacatttatctctgatataatcaattgtgggatctatctcttcagccctgaggcactgaaacccttgagggatgtgttccagcgaaatcagcaggacggccagcttgaagatagcccaggtctgtggcctggggcaggaactatcagattggaacaggacgtgttctctgccttagcaggtcaagggcaaatttatgtgcatcttactgacggtatatggagccaaatcaagagcgctggatctgcactgtatgcgtctcgtctgtatctgtctcgatatcaagacactcaccctgaacgactggccaagcatactcccggaggcccttggattcgcggaaatgtgtacatacaccccaccgctaaggtggccccttcagccgtgcttgggccaaacgtgtcaatcggcaagggcgtcacggtgggggagggcgtgcggctgcgagagtcaatcgtgcttcacggcgcaacgctgcaggagcatacgtgcgtcctccactccattgtcggctggggatccaccgtgggccgatgggctagggtcgaaggcactccctcggaccccaaccctaacgatccaagggccaggatggattctgagtccttgttcaaagatggaaaattgcttccagccatcaccattttggggtgcagagtgcggatccccgctgaggtacttatactgaactccattgtgcttccgcataaggagctgtcaaggtccttcacgaaccagattattctctag

SEQ ID NO: 263824 - DNA, 1263 bp, Artificial Sequence
  derived and/or modified sequence
atgttaaaagccgtgattttaatcggcggaccccaaaagggaactaggttccggccactatcgtttgaagttcccaagccactgtttccagttgctggtgtgcctatgattcagcatcacatcgaagcatgcgcccaggtacccggaatgcaggagattcttttaatcggattttatcagcccgacgaacctctgacccagttcctcgaggcggcacagcaggagttcaacctgcccgtccgttatctgcaagagtttgctcctctcggcaccgggggaggcctgtatcattttagggatcagattctcgctgggtcccccgaagcattctttgttctgaacgctgatgtctgcagtgactttcctctttcagccatgctcgaggcgcaccgtcggcagagacatcctttccttctcctcgggaccacagcgaaccgaacacagagtctcaactatggctgcattgtggaaaatccacagacccacgaggtgcttcactacgtggaaaagccgtccacatttatatcagatattattaattgcggaatctatctgttcagcccagaagcactgaaaccgctgagggacgtcttccagcggaaccagcaggatggccagctggaagattcgccgggattgtggccaggggcaggtactattagactcgaacaagacgtgttcagcgccctggcaggtcagggtcagatatacgtgcacctcactgatggcatatggtcgcagatcaagtccgcaggaagcgcactgtatgcgtctaggctttatctgtcccgctatcaggacacacaccccgagagactggctaaacataccccaggtggaccctggatacggggtaacgtgtatatccaccctacggccaaggtcgcccctagcgcggtccttggtccaaacgtatccataggaaaaggggtgactgttggcgagggggttagactcagggaatccatcgtgctgcacggggcaaccctgcaggaacacacatgcgtgctccatagcatagtgggctggggttccaccgtgggcagatgggctagggtggaggggaccccctccgaccccaatcccaatgacccgcgagccaggatggactcagaatctctgttcaaggatggtaaactcttaccagccatcacgattctgggatgtcgggtccgtatccccgcagaggttctgattttgaattctatcgttttaccacacaaggagctgagcaggtcctttacaaatcagatcatcctttag

SEQ ID NO: 263825 - DNA, 1263 bp, Artificial Sequence
  derived and/or modified sequence
atgctaaaggctgtgatcttaatcgggggaccacagaaaggcaccaggttccggcctctctctttcgaggtacccaaacctttattccctgtggccggtgtgcccatgatccagcatcacatcgaagcctgcgcccaggtgccgggtatgcaggagattctccttatcggtttctaccagccagacgagcccctgactcaattccttgaggctgctcagcaggagttcaatctgccagtccgctacctccaggagttcgccccacttggcacaggaggaggcctgtaccattttcgggaccagatactggctggctctcccgaagctttctttgtgttaaacgccgacgtatgttccgattttcccctcagcgccatgctggaagcccaccgcagacaaagacaccctttcctgcttctgggcacaaccgcaaatcgcacacagtcattgaattatggatgtatcgtggaaaatccacagacccacgaagttctgcactacgtagagaagccctcaacttttataagtgatatcatcaattgcggcatctacttgttcagccccgaggccctcaagccgctgagggacgtatttcagaggaaccaacaggacggtcagctcgaggattctcctggcctgtggcccggtgctgggacaatcaggcttgaacaggatgttttttctgcactggccggacagggacagatctacgtccacctgactgatggtatatggtcacaaatcaagtcagctggatctgcactctacgcaagtcgcctctacctgtcaaggtatcaggatactcatccagaacgccttgcaaaacacacacccggagggccttggattcgaggtaacgtatacatccatcctaccgccaaagtggccccatcagccgtactggggccaaatgtcagcattggtaagggcgtgacggtgggagaaggcgtgagactgcgggagtccatcgtcctgcacggcgctacgctgcaagaacacacctgtgtgctccactccatcgtcggatggggatctacggtggggagatgggcccgagtggaaggtacacccagcgacccaaacccaaacgatcccagagcgagaatggacagcgaaagcttgtttaaagacggaaagctgcttccagcaattactatcctcggctgtcgtgtccgaattcctgccgaggtcctgattctcaactccatcgtgctgccccacaaggagctctcacggtcgtttacaaatcagatcattctctag

SEQ ID NO: 263826 - DNA, 1263 bp, Artificial Sequence
  derived and/or modified sequence
atgctcaaggccgtaatcttgatcgggggaccccagaaaggtacccgctttaggccccttagctttgaagtcccaaaacccttattccctgtggctggggtaccgatgatccaacaccacatcgaggcctgtgcccaggtgcctggcatgcaagaaatcctgttgattgggttctatcaacctgatgagccgttaacgcagttcttggaggccgctcagcaggaatttaacctgcccgtcaggtatctgcaggagtttgcccctcttggcactggcggtggtctatatcacttccgtgatcagattttggcgggttctcctgaggctttctttgtcctcaatgccgacgtctgctctgatttcccgcttagcgctatgctggaggcacatcggcgtcaacggcatcctttcctgctgttgggaaccacagctaacagaacgcagtccttgaattatggatgcatcgtggaaaaccctcagacccatgaagttctgcattacgtggaaaagccaagtacttttatctcggacattattaattgcggcatttatctcttttctcccgaggccttgaaacccttgcgcgacgtattccagcgaaaccagcaggacggtcagcttgaagactccccgggactctggccaggagcagggacgatcaggttggagcaagatgtgttcagtgcactcgctgggcagggccagatctacgtgcatctgaccgatggaatctggagtcaaatcaaatctgctgggtctgccttgtacgcctctagactgtatttaagccgctaccaggatacccatccggagcggttggcaaaacacacccctggaggaccatggattagaggcaacgtgtacatccatcccacagcaaaggtggctccaagcgcggttctggggcctaatgtaagcatcggcaagggggtgaccgtcggtgagggggtcagactgagggagtctatcgtcctgcacggagctaccctccaggaacacacttgcgttctgcacagtattgtcggttggggaagtacagtggggaggtgggcccgtgtggagggcaccccgagcgacccaaatccgaatgacccacgcgctaggatggactccgagtcgttgttcaaggatgggaagctgttgcctgccattacgatcctggggtgtagggtcagaatcccagctgaggtcctgatcttaaacagcatcgtcctgccacataaggagctgagccgctcattcacaaatcagataattctgtag

SEQ ID NO: 263827 - DNA, 1544 bp, Artificial Sequence
  derived and/or modified sequence
cttgcgagaagacacgtgcgcggaaggagcttgcagtagcgggcggcagagctggagtgaagggagctagtgtttaggtagcagtcaccattatgctcaaagcggtgatcctgattggaggccctcaaaagggaactcgcttcagacctttgtcttttgaggtgcccaaaccattgtttcctgtggcaggggtccctatgatccaacaccatattgaagcctgtgcccaggtccctggaatgcaggagattctgctcattggcttctaccaacctgatgagcccctcacccagttcctagaagccgcccagcaggagtttaaccttccagtcaggtacctgcaggaatttgcccccctaggcacagggggtggtctttaccattttcgagaccagatcctggctgggagccccgaggcattcttcgtgctcaatgctgatgtctgctccgacttccccttgagtgctatgttggaagcccaccgacgccagcgtcaccctttcttactccttggcactacggctaacaggacgcaatccctcaactacggctgcatcgttgagaatccacagacacacgaggtattgcactatgtggagaaacccagcacatttatcagtgacatcatcaactgcggcatctacctcttttctcctgaagccttgaagcctcttcgggatgtcttccagcgtaatcagcaggatgggcaattggaggactcaccaggcttgtggccaggggcaggtaccatccgcctagagcaggatgtgttttcagccctggcagggcagggccagatatacgtgcatctcactgatggtatctggagtcagatcaagtccgcaggttcagccctctacgcctcccgcctctacctgagccgataccaggacactcacccagaacggctggccaagcacaccccagggggcccatggatccgagggaatgtgtacatccacccgaccgccaaggtggccccctcggctgtgctgggccccaacgtctccatcgggaagggggtgaccgtgggtgagggtgtgcggctccgggagagcatcgtcctccatggagccactttgcaggagcacacgtgtgttctgcatagcatcgtgggctgggggagcaccgtgggacgctgggcccgcgtggagggtacccccagtgaccctaaccccaacgatccccgagcccgcatggacagtgagagcctcttcaaggacgggaagctgctgcctgctatcaccatcctgggctgccgagtccggatccctgccgaggtgctcatcctgaactcgattgttctgccacacaaggagctgagccgaagcttcaccaaccagatcatcctctgagtagggctgccagaaggcccccagctcctacccactccccttgaggctgctgcctgcttggccagcctctgtccagaaaggaccagagaaagccaggctggatcgtcacatgccggggagcaatgtggatggcctggggactcctgggttttctccctcccgactccctaataaaccccgtgaaccttg

SEQ ID NO: 263828 - DNA, 1263 bp, Artificial Sequence
  derived and/or modified sequence
atgctgaaggccgtgatcctgatcggcggcccccagaagggcaccagattcagacccctgagcttcgaggtgcccaagcccctgttccccgtggccggcgtgcccatgatccagcaccacatcgaggcctgcgcccaggtgcccggcatgcaggagatcctgctgatcggcttctaccagcccgacgagcccctgacccagttcctggaggccgcccagcaggagttcaacctgcccgtgagatacctgcaggagttcgcccccctgggcaccggcggcggcctgtaccacttcagagaccagatcctggccggcagccccgaggccttcttcgtgctgaacgccgacgtgtgcagcgacttccccctgagcgccatgctggaggcccacagaagacagagacaccccttcctgctgctgggcaccaccgccaacagaacccagagcctgaactacggctgcatcgtggagaacccccagacccacgaggtgctgcactacgtggagaagcccagcaccttcatcagcgacatcatcaactgcggcatctacctgttcagccccgaggccctgaagcccctgagagacgtgttccagagaaaccagcaggacggccagctggaggacagccccggcctgtggcccggcgccggcaccatcagactggagcaggacgtgttcagcgccctggccggccagggccagatctacgtgcacctgaccgacggcatctggagccagatcaagagcgccggcagcgccctgtacgccagcagactgtacctgagcagataccaggacacccaccccgagagactggccaagcacacccccggcggcccctggatcagaggcaacgtgtacatccaccccaccgccaaggtggcccccagcgccgtgctgggccccaacgtgagcatcggcaagggcgtgaccgtgggcgagggcgtgagactgagagagagcatcgtgctgcacggcgccaccctgcaggagcacacctgcgtgctgcacagcatcgtgggctggggcagcaccgtgggcagatgggccagagtggagggcacccccagcgaccccaaccccaacgaccccagagccagaatggacagcgagagcctgttcaaggacggcaagctgctgcccgccatcaccatcctgggctgcagagtgagaatccccgccgaggtgctgatcctgaacagcatcgtgctgccccacaaggagctgagcagaagcttcaccaaccagatcatcctgtag

SEQ ID NO: 263829 - protein, 186 aa, Artificial Sequence
  derived and/or modified sequence
MAAWGKKHAGKDPVRDECEERNRFTETREEDVTDEHGEREPFAETDEHTGANTKKPEDTAEDLTAKRKRMKMDKTCSKTKNKSKHALRKKQLKRQKRDYIHSLKLLNVLEEYITDEQKEEEEEEGEEEELIRIFQEQQKKWQQYRSVRRERLKEMKLLRDQFVKALEDFEDLCDRVFSDEDSELDN

SEQ ID NO: 263830 - protein, 226 aa, Artificial Sequence
  derived and/or modified sequence
MPGFLSFLSVSLRSPGSGIASSFPGQPATDPVGRRAAKAQLEAQFMAAWGKKHAGKDPVRDECEERNRFTETREEDVTDEHGEREPFAETDEHTGANTKKPEDTAVGANNFKNYPVHIGVSSEQHILLDCSLSRQKRDYIHSLKLLNVLEEYITDEQKEEEEEEGEEEELIRIFQEQQKKWQQYRSVRRERLKEMKLLRDQFVKALEDFEDLCDRVFSDEDSELDN

SEQ ID NO: 263831 - DNA, 1340 bp, Artificial Sequence
  derived and/or modified sequence
aggaagtcctgcctgcagctctcacgagaactgaggacccgttttctttacttttctttttttttgtttttttgttttgttttttttgggacggagtctggctcttgctgcctaggctgcagtgcagtggtgtgatctgggctcactgcaacctccgcctcctgggttcaagcaattctcctgcctcagcttcctgagaggacccgttttctaagaggtcctagtggtgccgctgcctgcaggttctttgagggcgccacatcaggggtccctcaggttcggggatcgcctctagcttcccaggacaaccagccacggatcctgtgggcaggagggctgccaaggcccagttggaggctcaatttatggcggcctgggggaagaagcatgcaggaaaggatccagtccgtgatgaatgtgaggaaagaaaccgttttacagaaacaagggaggaagatgtaactgatgagcatggggaaagagaaccttttgctgaaacagatgaacacacgggggctaataccaagaagccagaagatactgcagaggatcttactgcaaaaagaaaaaggatgaaaatggataaaacttgcagcaaaacaaagaacaaaagtaaacatgctttgagaaaaaagcaacttaaaaggcagaaacgtgattatatacattctctgaagttgctaaatgtccttgaagaatacatcacagacgagcagaaagaggaagaagaagaagagggagaagaggaagaactaattagaatatttcaagaacaacagaagaagtggcaacaatatagaagtgttaggagagagaggctgaaagagatgaagctgctacgtgaccaattcgtaaaggctcttgaggactttgaagacctttgtgacagagttttttccgatgaagacagtgaacttgataactagacatgtttttaaataaaatcatgtcagaactcttttggaaaagttggcacttacccagttgtctcttcaacctctgttattctgatgactgaagaaagaacttgaacctatgttatatgatacaagcacaacttgagctacagtaaactacatgacagtgttttgataattgttgtataaatcggtatagctcctctgtcactcgtctgttaaatgccagacctcgtttctatgatctgttgaatgaatcctagacacttctgtgagaaagcagggattgcatagttatgtacacggtcaattaaattttaacattaaagataatttagatttcgatttggcctctgtggatttgtatcagttccaaaaatgtagaaagcacaggcatagaaaagtacatttttctctaataaa

SEQ ID NO: 263832 - DNA, 1064 bp, Artificial Sequence
  derived and/or modified sequence
gttcggggatcgcctctagcttcccaggacaaccagccacggatcctgtgggcaggagggctgccaaggcccagttggaggctcaatttatggcggcctgggggaagaagcatgcaggaaaggatccagtccgtgatgaatgtgaggaaagaaaccgttttacagaaacaagggaggaagatgtaactgatgagcatggggaaagagaaccttttgctgaaacagatgaacacacgggggctaataccaagaagccagaagatactgcagaggatcttactgcaaaaagaaaaaggatgaaaatggataaaacttgcagcaaaacaaagaacaaaagtaaacatgctttgagaaaaaagcaacttaaaaggcagaaacgtgattatatacattctctgaagttgctaaatgtccttgaagaatacatcacagacgagcagaaagaggaagaagaagaagagggagaagaggaagaactaattagaatatttcaagaacaacagaagaagtggcaacaatatagaagtgttaggagagagaggctgaaagagatgaagctgctacgtgaccaattcgtaaaggctcttgaggactttgaagacctttgtgacagagttttttccgatgaagacagtgaacttgataactagacatgtttttaaataaaatcatgtcagaactcttttggaaaagttggcacttacccagttgtctcttcaacctctgttattctgatgactgaagaaagaacttgaacctatgttatatgatacaagcacaacttgagctacagtaaactacatgacagtgttttgataattgttgtataaatcggtatagctcctctgtcactcgtctgttaaatgccagacctcgtttctatgatctgttgaatgaatcctagacacttctgtgagaaagcagggattgcatagttatgtacacggtcaattaaattttaacattaaagataatttagatttcgatttggcctctgtggatttgtatcagttccaaaaatgtagaaagcacaggcatagaaaagtacatttttctctaataaa

SEQ ID NO: 263833 - DNA, 561 bp, Artificial Sequence
  derived and/or modified sequence
atggccgcctgggggaaaaagcatgccgggaaagatcccgtgagagacgagtgcgaagaaaggaacagattcaccgagactcgtgaggaagatgtaaccgatgagcacggtgaaagggagccatttgccgaaacagatgaacataccggcgcgaacacaaaaaagcccgaagacaccgctgaggacctgacagccaagcggaaacgcatgaagatggacaaaacatgcagcaagacaaaaaacaaaagcaagcacgccctgagaaagaaacagctgaagcggcagaagcgtgattacatccattcgttaaaacttctgaatgtgctcgaagaatacatcacagacgaacagaaggaagaggaggaagaggagggcgaagaagaggagttaattcgcatctttcaggaacagcaaaaaaaatggcagcaatatcggtccgtccgacgggagcgcctgaaagaaatgaaactgctccgggatcagttcgtgaaagctctggaggatttcgaggacctgtgcgaccgtgttttttcagatgaggactctgagctggacaactag

SEQ ID NO: 263834 - DNA, 561 bp, Artificial Sequence
  derived and/or modified sequence
atggccgcctggggtaaaaaacacgcaggtaaggaccctgtcagagacgaatgcgaggagcgtaacaggtttaccgagacaagagaggaggacgtaacagatgagcacggtgaacgtgagcctttcgctgaaaccgacgagcataccggggccaatacaaaaaagcccgaagacactgccgaggacctgactgcgaaaaggaagcggatgaagatggataagacttgttctaagacaaagaataagagcaaacacgccttaaggaaaaagcagttgaaacggcagaaaagagattatatccattccttgaagctcctgaatgtgctggaggagtatatcaccgacgaacaaaaagaagaggaggaagaggagggggaggaggaagaacttattcgaatatttcaggaacaacagaagaagtggcagcagtaccgctctgttcgacgcgaaaggctcaaagagatgaaactcctcagggatcagttcgtgaaggccttagaggattttgaggacctctgtgatcgcgtctttagtgacgaggattcagaactggacaattag

SEQ ID NO: 263835 - DNA, 561 bp, Artificial Sequence
  derived and/or modified sequence
atggccgcctggggcaagaagcatgctgggaaggaccctgtgagagatgaatgtgaggagaggaaccgcttcacagagacccgggaggaggatgtgacagatgagcacggggagcgggagccctttgctgagacagatgagcacactggagccaacaccaagaagccagaggacacagctgaggacctgacagccaagaggaagaggatgaagatggacaagacctgcagcaagaccaagaacaagagcaagcacgccctgaggaagaagcagctgaagaggcagaagagggactacatccacagcctgaagctgctgaatgtgctggaggagtacatcacagatgagcagaaggaggaggaggaggaggagggggaggaggaggagctgatccgcatcttccaggagcagcagaagaagtggcagcagtacagatctgtgcggcgggagcggctgaaggagatgaagctgctgcgggaccagtttgtgaaggccctggaggactttgaggacctgtgtgacagagtcttcagtgatgaggacagcgagctggacaactag

SEQ ID NO: 263836 - DNA, 561 bp, Artificial Sequence
  derived and/or modified sequence
atggccgcctggggcaagaagcacgccggcaaggaccccgtgcgggatgagtgtgaagagcggaacagattcaccgagaccagggaagaagacgtgaccgatgaacatggtgagcgcgaacctttcgctgaaaccgatgagcatactggcgccaacactaagaaacccgaggatacagcagaggacctcacagccaaaagaaagcgcatgaaaatggacaagacttgcagtaagactaaaaacaaatccaagcacgctctcagaaaaaagcaactgaagaggcagaagagagattatatccactccctgaaattgctgaatgtgcttgaagaatacattaccgacgagcagaaggaggaagaggaagaggaaggagaagaagaagaactgataagaatcttccaagaacagcagaagaagtggcagcagtatcgctcagtgaggcgcgaaagactgaaggagatgaaactcctcagagaccaatttgtcaaggccctggaagatttcgaagacctatgcgatagggtgttttccgatgaagattctgaattggataactag

SEQ ID NO: 263837 - DNA, 561 bp, Artificial Sequence
  derived and/or modified sequence
atggccgcctggggcaagaagcacgccggcaaggaccccgtgcgggatgagtgtgaagaaaggaacagatttaccgagacacgcgaggaagacgtgactgacgagcacggcgagcgggagcccttcgccgaaaccgatgagcacacgggcgcgaataccaagaaaccagaggacacagcagaagacctgactgccaagcgcaagcgcatgaaaatggacaaaacctgctccaaaactaagaacaaaagcaagcacgccctgcggaagaaacagctcaaacggcagaagcgtgattacatacactctttgaagctcttgaatgttttagaagagtatattaccgatgagcaaaaggaagaggaagaggaggagggggaggaagaggaactgattcgtatttttcaggaacaacagaaaaaatggcagcagtataggagcgtgagacgggaacggctaaaggaaatgaaactcctccgtgaccagtttgtgaaggctcttgaggattttgaggatctgtgcgatcgagtcttctcagacgaggactcagaacttgacaattag

SEQ ID NO: 263838 - DNA, 561 bp, Artificial Sequence
  derived and/or modified sequence
atggcagcttggggcaagaaacacgctgggaaggaccctgtaagggatgagtgcgaggaacggaacagattcacggagacccgcgaagaagatgtaaccgatgagcacggcgaacgggaaccctttgcagaaactgacgagcatacaggtgctaatactaagaagcctgaagacacagctgaggacctcaccgcaaagcggaagcggatgaagatggacaagacttgctcaaagactaagaacaagagtaagcacgctctgcgcaagaagcaactgaagcggcaaaaacgggactatatacatagcctgaagctcctaaacgtgctagaggagtacatcaccgacgagcagaaagaggaggaagaggaggaaggggaggaagaggaactgattagaatttttcaggaacagcagaagaaatggcagcagtaccgatcagtacgacgtgagaggctgaaggaaatgaaattattgcgggatcaatttgtaaaggcgctggaggattttgaagacctctgtgaccgggtgttttctgatgaggacagcgaactggacaactag

SEQ ID NO: 263839 - DNA, 561 bp, Artificial Sequence
  derived and/or modified sequence
atggccgcatggggcaagaagcacgccggaaaagatccagtcagagacgagtgcgaggagcgcaatagatttaccgaaacaagggaggaggacgtcacggatgagcacggcgagcgggaacccttcgccgaaacagatgaacacaccggagccaacactaagaaaccagaagacacggctgaggacttgaccgccaaacgaaagcggatgaaaatggacaaaacctgttctaagacaaagaacaagtcgaagcatgccttgagaaaaaagcagctgaagaggcaaaagcgcgattatatacatagcctgaaactgcttaacgtcctggaggagtacattacagacgaacaaaaagaagaagaggaggaggagggggaagaagaagagctgatcagaatcttccaggagcagcaaaaaaagtggcagcagtatcgctccgttcgaagggaacggctgaaagagatgaaattactgcgggatcagttcgttaaagctttagaagattttgaagatctgtgcgaccgggtttttagcgacgaagacagtgagctggataactag

SEQ ID NO: 263840 - DNA, 561 bp, Artificial Sequence
  derived and/or modified sequence
atggccgcctggggcaagaagcacgccggcaaggaccccgtgagagacgagtgcgaggagagaaacagattcaccgagaccagagaggaggacgtgaccgacgagcacggcgagagagagcccttcgccgagaccgacgagcacaccggcgccaacaccaagaagcccgaggacaccgccgaggacctgaccgccaagagaaagagaatgaagatggacaagacctgcagcaagaccaagaacaagagcaagcacgccctgagaaagaagcagctgaagagacagaagagagactacatccacagcctgaagctgctgaacgtgctggaggagtacatcaccgacgagcagaaggaggaggaggaggaggagggcgaggaggaggagctgatcagaatcttccaggagcagcagaagaagtggcagcagtacagaagcgtgagaagagagagactgaaggagatgaagctgctgagagaccagttcgtgaaggccctggaggacttcgaggacctgtgcgacagagtgttcagcgacgaggacagcgagctggacaactag

SEQ ID NO: 263841 - protein, 500 aa, Artificial Sequence
  derived and/or modified sequence
MQTKGGQTWARRALLLGILWATAHLPLSGTSLPQRLPRATGNSTQCVISPSSEFPEGFFTRQERRDGGIIIYFLIIVYMFMAISIVCDEYFLPSLEIISESLGLSQDVAGTTFMAAGSSAPELVTAFLGVFITKGDIGISTILGSAIYNLLGICAACGLLSNTVSTLSCWPLFRDCAAYTISAAAVLGIIYDNQVYWYEGALLLLIYGLYVLVLCFDIKINQYIIKKCSPCCACLAKAMERSEQQPLMGWEDEGQPFIRRQSRTDSGIFYEDSGYSQLSISLHGLSQVSEDPPSVFNMPEADLKRIFWVLSLPIITLLFLTTPDCRKKFWKNYFVITFFMSAIWISAFTYILVWMVTITGETLEIPDTVMGLTLLAAGTSIPDTIASVLVARKGKGDMAMSNIVGSNVFDMLCLGIPWFIKTAFINGSAPAEVNSRGLTYITISLNISIIFLFLAVHFNGWKLDRKLGIVCLLSYLGLATLSVLYELGIIGNNKIRGCGG

SEQ ID NO: 263842 - protein, 440 aa, Artificial Sequence
  derived and/or modified sequence
MQTKGGQTWARRALLLGILWATAHLPLSGTSLPQRLPRATALGLSQDVAGTTFMAAGSSAPELVTAFLGVFITKGDIGISTILGSAIYNLLGICAACGLLSNTVSTLSCWPLFRDCAAYTISAAAVLGIIYDNQVYWYEGALLLLIYGLYVLVLCFDIKINQYIIKKCSPCCACLAKAMERSEQQPLMGWEDEGQPFIRRQSRTDSGIFYEDSGYSQLSISLHGLSQVSEDPPSVFNMPEADLKRIFWVLSLPIITLLFLTTPDCRKKFWKNYFVITFFMSAIWISAFTYILVWMVTITGETLEIPDTVMGLTLLAAGTSIPDTIASVLVARKGKGDMAMSNIVGSNVFDMLCLGIPWFIKTAFINGSAPAEVNSRGLTYITISLNISIIFLFLAVHFNGWKLDRKLGIVCLLSYLGLATLSVLYELGIIGNNKIRGCGG

SEQ ID NO: 263843 - DNA, 1503 bp, Artificial Sequence
  derived and/or modified sequence
atgcagaccaagggcggccagacctgggccagaagagccctgctgctgggcatcctgtgggccaccgcccacctgcccctgagcggcaccagcctgccccagagactgcccagagccaccggcaacagcacccagtgcgtgatcagccccagcagcgagttccccgagggcttcttcaccagacaggagagaagagacggcggcatcatcatctacttcctgatcatcgtgtacatgttcatggccatcagcatcgtgtgcgacgagtacttcctgcccagcctggagatcatcagcgagagcctgggcctgagccaggacgtggccggcaccaccttcatggccgccggcagcagcgcccccgagctggtgaccgccttcctgggcgtgttcatcaccaagggcgacatcggcatcagcaccatcctgggcagcgccatctacaacctgctgggcatctgcgccgcctgcggcctgctgagcaacaccgtgagcaccctgagctgctggcccctgttcagagactgcgccgcctacaccatcagcgccgccgccgtgctgggcatcatctacgacaaccaggtgtactggtacgagggcgccctgctgctgctgatctacggcctgtacgtgctggtgctgtgcttcgacatcaagatcaaccagtacatcatcaagaagtgcagcccctgctgcgcctgcctggccaaggccatggagagaagcgagcagcagcccctgatgggctgggaggacgagggccagcccttcatcagaagacagagcagaaccgacagcggcatcttctacgaggacagcggctacagccagctgagcatcagcctgcacggcctgagccaggtgagcgaggacccccccagcgtgttcaacatgcccgaggccgacctgaagagaatcttctgggtgctgagcctgcccatcatcaccctgctgttcctgaccacccccgactgcagaaagaagttctggaagaactacttcgtgatcaccttcttcatgagcgccatctggatcagcgccttcacctacatcctggtgtggatggtgaccatcaccggcgagaccctggagatccccgacaccgtgatgggcctgaccctgctggccgccggcaccagcatccccgacaccatcgccagcgtgctggtggccagaaagggcaagggcgacatggccatgagcaacatcgtgggcagcaacgtgttcgacatgctgtgcctgggcatcccctggttcatcaagaccgccttcatcaacggcagcgcccccgccgaggtgaacagcagaggcctgacctacatcaccatcagcctgaacatcagcatcatcttcctgttcctggccgtgcacttcaacggctggaagctggacagaaagctgggcatcgtgtgcctgctgagctacctgggcctggccaccctgagcgtgctgtacgagctgggcatcatcggcaacaacaagatcagaggctgcggcggctag

SEQ ID NO: 263844 - DNA, 1323 bp, Artificial Sequence
  derived and/or modified sequence
atgcagaccaagggcggccagacctgggccagaagagccctgctgctgggcatcctgtgggccaccgcccacctgcccctgagcggcaccagcctgccccagagactgcccagagccaccgccctgggcctgagccaggacgtggccggcaccaccttcatggccgccggcagcagcgcccccgagctggtgaccgccttcctgggcgtgttcatcaccaagggcgacatcggcatcagcaccatcctgggcagcgccatctacaacctgctgggcatctgcgccgcctgcggcctgctgagcaacaccgtgagcaccctgagctgctggcccctgttcagagactgcgccgcctacaccatcagcgccgccgccgtgctgggcatcatctacgacaaccaggtgtactggtacgagggcgccctgctgctgctgatctacggcctgtacgtgctggtgctgtgcttcgacatcaagatcaaccagtacatcatcaagaagtgcagcccctgctgcgcctgcctggccaaggccatggagagaagcgagcagcagcccctgatgggctgggaggacgagggccagcccttcatcagaagacagagcagaaccgacagcggcatcttctacgaggacagcggctacagccagctgagcatcagcctgcacggcctgagccaggtgagcgaggacccccccagcgtgttcaacatgcccgaggccgacctgaagagaatcttctgggtgctgagcctgcccatcatcaccctgctgttcctgaccacccccgactgcagaaagaagttctggaagaactacttcgtgatcaccttcttcatgagcgccatctggatcagcgccttcacctacatcctggtgtggatggtgaccatcaccggcgagaccctggagatccccgacaccgtgatgggcctgaccctgctggccgccggcaccagcatccccgacaccatcgccagcgtgctggtggccagaaagggcaagggcgacatggccatgagcaacatcgtgggcagcaacgtgttcgacatgctgtgcctgggcatcccctggttcatcaagaccgccttcatcaacggcagcgcccccgccgaggtgaacagcagaggcctgacctacatcaccatcagcctgaacatcagcatcatcttcctgttcctggccgtgcacttcaacggctggaagctggacagaaagctgggcatcgtgtgcctgctgagctacctgggcctggccaccctgagcgtgctgtacgagctgggcatcatcggcaacaacaagatcagaggctgcggcggctag

SEQ ID NO: 263845 - DNA, 1503 bp, Artificial Sequence
  derived and/or modified sequence
atgcagaccaagggaggccagacctgggcaagaagagccctgctgctcggaattctgtgggccactgcccacctccccctgtccggaacgtccctgccacaacggctaccccgggcaacagggaatagtactcaatgcgtcatcagcccttcaagcgaatttccggaggggtttttcacccggcaagagcggcgagatggtggtattatcatttattttctcatcattgtgtatatgttcatggcgatttcgattgtctgcgatgaatactttctgccatctctggagatcatcagtgaaagcctgggcctttctcaagacgtcgctgggaccactttcatggcagcaggatcttctgccccagaactcgtaacagctttcttaggcgtgttcattaccaaaggtgatataggcatctccacgattctgggctccgccatttataacttactgggaatatgcgccgcttgtgggctgctgtcgaataccgtctcaaccttgagttgttggccactctttagggactgtgctgcctatacgattagtgctgcggctgtgctggggatcatctacgacaatcaggtatactggtatgaaggtgccctacttctgttgatctacggcttatatgtccttgtgctctgcttcgatatcaagattaatcaatacattattaagaagtgcagcccctgttgcgcctgtctggcaaaggcaatggaacggtctgaacagcagcctctcatgggctgggaagatgaggggcagcccttcatacgtcgccagtcacggacggattctggaatcttttatgaagacagcgggtatagtcagcttagcatttcccttcacgggctgtcccaggtttcggaagacccaccatcagtgttcaacatgccggaggccgatctgaaaaggattttttgggttctgtctcttccgatcatcaccctgttattcctcaccactcccgactgccgcaaaaaattttggaagaactattttgtgattactttcttcatgtccgccatctggatctccgcctttacgtacatactggtttggatggttaccatcaccggtgagactctggagataccagatactgtgatgggactgaccttgctcgccgctggaacctctatcccggatacaatagcttccgtgctcgtggctcggaaggggaagggcgatatggccatgtcaaacattgtcggttctaacgtattcgatatgttgtgcctgggaattccttggttcatcaagaccgcttttattaacggttcagcacctgctgaagttaattcccgtggcctcacttatattactatttctctcaacataagcataatctttctcttcttagcagtgcactttaacgggtggaagcttgacagaaagctgggcatcgtttgcctgctgtcctatctgggcctggcaacactttcagtgctctacgaattgggtatcattgggaacaacaagatacgcggatgcggaggatag

SEQ ID NO: 263846 - DNA, 1323 bp, Artificial Sequence
  derived and/or modified sequence
atgcagacaaagggtggccagacgtgggctcgaagggccttgctgctgggcattttgtgggccaccgcacatctgccactgtccgggacaagtctcccacagcgtctgccccgtgctaccgcgctaggactctctcaggatgtggcaggtaccacattcatggcagcaggctcgagtgcccccgagctggtcaccgcattcttgggcgtctttataaccaagggcgacattggcattagcactatactcggctcggcaatttataatctcttaggcatctgtgccgcatgtggcctcttgtctaatacggtttcaaccctgagttgttggcccctgtttcgggactgtgctgcctacactatatcagctgcggcggtgctggggatcatctacgacaaccaggtttactggtatgagggtgccctgcttctactgatctacggcctgtatgtgttggtgctgtgctttgatattaagataaatcagtatatcatcaagaagtgtagtccttgttgtgcttgtttagctaaagccatggagagatctgaacagcagcccctgatgggatgggaagatgaggggcagccctttattcgtcgccagtcgagaactgattccggtattttttacgaggactcagggtacagtcagctgtcaattagccttcacgggctcagccaggtgtcagaagatccaccaagtgtcttcaatatgcctgaggctgacctcaagagaattttctgggtgctgagtttaccgattatcactctgctgtttctgactacccccgactgccgcaaaaaattctggaaaaattacttcgtcatcacattcttcatgtccgccatctggatatctgcctttacctacatcttagtctggatggtgactatcacaggagagacccttgagatccctgatacagtcatggggcttactctgcttgcggccgggacatcaattcccgacaccatagcatctgtgctggttgcgagaaaaggaaaaggcgacatggcgatgtccaacatagtgggctccaacgtatttgatatgctgtgcctggggataccctggtttatcaagacagctttcatcaatggatctgccccagcagaagtcaactccaggggcctgacctacatcaccatctcattgaatatctccattatctttctctttctggccgtgcactttaacggctggaagctcgatcgcaaacttgggatcgtttgcctgttgtcatatttaggtcttgccacgctgagcgtgctctatgagctaggaattatcggcaacaataaaattcgcggatgtggcgggtag

SEQ ID NO: 263847 - DNA, 1503 bp, Artificial Sequence
  derived and/or modified sequence
atgcagaccaagggcggccagacctgggcccggcgggccctgctgctgggcatcctgtgggccacagcccacctgcccctgagcggcaccagcctgccccagaggctgccccgggccaccggcaacagcacccagtgtgtgatcagccccagcagcgagttccctgagggcttcttcacccggcaggagaggagagatggcggcatcatcatctacttcctgatcatcgtgtacatgttcatggccatcagcatcgtgtgtgatgagtacttcctgcccagcctggagatcatcagcgagagcctgggcctgagccaggatgtggccggcaccaccttcatggccgccggcagcagcgcccctgagctggtgacagccttcctgggcgtcttcatcaccaagggggacatcggcatcagcaccatcctgggcagcgccatctacaacctgctgggcatctgtgccgcctgtggcctgctgagcaacacagtgtccaccctgagctgctggcccctcttccgggactgtgccgcctacaccatctctgctgctgctgtgctgggcatcatctatgacaaccaggtgtactggtatgagggcgccctgctgctgctgatctacggcctgtatgtgctggtgctgtgctttgacatcaagatcaaccagtacatcatcaagaagtgcagcccctgctgtgcctgcctggccaaggccatggagaggtctgagcagcagcccctgatgggctgggaggatgagggccagcccttcatccggcggcagagcaggacagacagcggcatcttctatgaagattctggctacagccagctgagcatcagcctgcacggcctgagccaggtgtctgaggacccccccagcgtcttcaacatgcctgaggccgacctgaagaggatcttctgggtgctgagcctgcccatcatcaccctgctcttcctgaccaccccagactgcaggaagaagttctggaagaactacttcgtcatcaccttcttcatgtctgccatctggatcagcgccttcacctacatcctggtgtggatggtgaccatcactggagagaccctggagatcccagacacagtgatgggcctgaccctgctggccgccggcaccagcatcccagacaccatcgcctctgtgctggtggccaggaaaggaaaaggagacatggccatgagcaacatcgtgggcagcaatgtgtttgacatgctgtgcctgggcatcccctggttcatcaagacagccttcatcaatggcagcgccccagctgaggtgaacagccggggcctgacctacatcaccatcagcctgaacatcagcatcatcttcctgttcctggccgtgcacttcaacggctggaagctggacaggaagctgggcatcgtgtgcctgctgagctacctgggcctggccaccctgtctgtgctgtatgagctgggcatcatcggcaacaacaagatccggggctgcggcggctag

SEQ ID NO: 263848 - DNA, 1323 bp, Artificial Sequence
  derived and/or modified sequence
atgcagaccaagggcggccagacctgggcccggcgggccctgctgctgggcatcctgtgggccacagcccacctgcccctgagcggcaccagcctgccccagaggctgccccgggccacagccctgggcctgagccaggatgtggccggcaccaccttcatggccgccggcagcagcgcccctgagctggtgacagccttcctgggcgtcttcatcaccaagggggacatcggcatcagcaccatcctgggcagcgccatctacaacctgctgggcatctgtgccgcctgtggcctgctgagcaacacagtgtccaccctgagctgctggcccctcttccgggactgtgccgcctacaccatctctgctgctgctgtgctgggcatcatctatgacaaccaggtgtactggtatgagggcgccctgctgctgctgatctacggcctgtatgtgctggtgctgtgctttgacatcaagatcaaccagtacatcatcaagaagtgcagcccctgctgtgcctgcctggccaaggccatggagaggtctgagcagcagcccctgatgggctgggaggatgagggccagcccttcatccggcggcagagcaggacagacagcggcatcttctatgaagattctggctacagccagctgagcatcagcctgcacggcctgagccaggtgtctgaggacccccccagcgtcttcaacatgcctgaggccgacctgaagaggatcttctgggtgctgagcctgcccatcatcaccctgctcttcctgaccaccccagactgcaggaagaagttctggaagaactacttcgtcatcaccttcttcatgtctgccatctggatcagcgccttcacctacatcctggtgtggatggtgaccatcactggagagaccctggagatcccagacacagtgatgggcctgaccctgctggccgccggcaccagcatcccagacaccatcgcctctgtgctggtggccaggaaaggaaaaggagacatggccatgagcaacatcgtgggcagcaatgtgtttgacatgctgtgcctgggcatcccctggttcatcaagacagccttcatcaatggcagcgccccagctgaggtgaacagccggggcctgacctacatcaccatcagcctgaacatcagcatcatcttcctgttcctggccgtgcacttcaacggctggaagctggacaggaagctgggcatcgtgtgcctgctgagctacctgggcctggccaccctgtctgtgctgtatgagctgggcatcatcggcaacaacaagatccggggctgcggcggctag

SEQ ID NO: 263849 - DNA, 1503 bp, Artificial Sequence
  derived and/or modified sequence
atgcagaccaagggcggccagacctgggcccggcgggccctgctgctgggaatcctgtgggctactgcccatcttcctctctccgggaccagtctcccgcagagactgccacgggccactggcaacagcacccagtgtgtcatttcgccttcctcagaatttccagaagggtttttcacaagacaagaacggcgagacggcggaattatcatttacttcttgattatcgtttacatgttcatggcgatttcgattgtgtgtgacgaatactttctgccctccctggagatcatcagcgagtcacttggtctttcgcaggacgtggctggtacgaccttcatggcagccgggtctagcgccccagagcttgtcacagcttttctcggagtgttcatcaccaagggagacattggaatctcaacaatcctgggttccgccatatacaaccttctcgggatctgcgcagcctgcgggctgttgagcaatacagtctctaccctgagctgctggcctttgttccgcgattgtgctgcctacactatcagcgccgccgcagttctggggatcatctacgacaatcaggtgtactggtatgaaggtgcattgttgctactcatttatgggctgtatgtgttagttctgtgcttcgacattaaaatcaatcagtacataataaagaagtgttccccatgctgcgcctgtctggcaaaagctatggagagatcagaacagcaaccactcatgggatgggaagacgagggccagccattcatccgccgccagagtagaacagactccgggatcttctatgaggattccggttactcccagctgagcatctctctgcacggactttcgcaagtcagcgaggatcccccctcagtgttcaacatgcctgaagccgatctcaaacgcatattttgggtgctctccctccctattattacgttgctctttctaaccacccccgactgtcgcaaaaaattttggaaaaactactttgtaatcacattcttcatgtctgccatatggatctccgctttcacatacattctggtgtggatggttactattacaggcgaaaccctggaaatcccggacaccgtgatgggcctgacactgctagccgccggcacatccatcccagacactatcgcgagcgtgctcgtggctaggaaaggaaagggagacatggcaatgagcaacatcgtgggctccaacgttttcgatatgctgtgtcttggtataccgtggtttattaagacagcatttataaacggttcagctccagccgaagttaactcccgcgggctcacctacataacaatctcactaaacatcagtatcattttccttttcttggcagttcattttaacggatggaagctggacaggaaactgggaatcgtgtgccttttgagttacttgggtcttgcaacactgtccgtcctttacgaactcggtataattgggaataataaaattcgtggctgcggcggttag

SEQ ID NO: 263850 - DNA, 1323 bp, Artificial Sequence
  derived and/or modified sequence
atgcagaccaagggcggccagacctgggcccggcgggccctgctgctaggcatactgtgggctacagctcaccttccactttctggaacttctctacctcagagattgccaagagctactgctctgggcctcagccaggacgtcgccggcaccacatttatggccgccggcagctctgcccctgagctggtgacagctttcttgggcgttttcattaccaagggcgacatcggaatctcaaccatcctgggtagtgcaatctacaacctgttaggaatttgcgctgcgtgtggtcttctgtctaacacagtgtctaccttgtcctgctggccactgttccgggactgcgccgcttacaccattagtgccgccgctgttctcggtataatctacgataaccaagtgtactggtacgaaggcgctttattactactgatctacggcctttacgtattggttctgtgctttgacatcaaaatcaaccagtatattatcaagaaatgttcgccctgttgcgcctgccttgcgaaggctatggagcggagcgagcaacagcctcttatggggtgggaggacgaggggcagcccttcattcgccgacagagccggacagactctggcattttttacgaagattctggttacagtcagcttagcatctcattgcacggcctgtctcaggtaagcgaagaccctcctagcgtgttcaatatgccggaggctgacctcaagcgtatcttctgggtactgagtttacccattatcactctcttgttcctaaccacccccgattgtcgcaagaagttctggaaaaattattttgttatcacgtttttcatgagcgcgatctggatcagcgcattcacttacattctggtgtggatggtcactatcactggtgagaccctcgaaatcccagataccgtgatgggcctgactctgctggccgcaggaacctccattcctgataccatagcctcggttctcgttgcacgaaaaggtaagggcgatatggccatgtctaacatagtcggatcaaatgtgttcgatatgctgtgcctgggaattccttggtttattaagactgcctttatcaacggcagcgcaccagctgaggtgaatagcaggggcctgacttatattacaattagcctcaatatttctataatctttttatttcttgcggtccacttcaatggttggaagttagacaggaaactgggaatagtctgcctcctgagctacttgggtctggcgacactcagcgttttgtacgaactcggtatcataggaaacaataagatccggggctgtgggggctag

SEQ ID NO: 263851 - DNA, 1503 bp, Artificial Sequence
  derived and/or modified sequence
atgcagaccaaggggggtcagacatgggccagacgggctctgctgctcggaattctttgggccacagcccaccttccactatccggtacaagtttgcctcaaaggcttcctcgggctaccgggaattcaacccagtgtgtcattagtcctagctcagaatttcccgagggatttttcactaggcaggaacgcagggatggtggaataattatctacttcctgatcatcgtgtacatgtttatggccataagtatcgtgtgtgatgagtacttcctgccctctctggaaattatctccgaatcactggggctgtcccaggacgtggcaggtaccacatttatggccgctgggtcatccgcacccgagcttgttacagcatttcttggcgtgtttattacgaaaggagatattggcattagcacgatcctaggctcggccatctacaacctcttggggatttgcgcagcctgtggattgctttcgaataccgtgagcaccttgtcctgctggccactgttccgagactgcgccgcatataccatttctgctgccgctgtcctcggaatcatatacgacaaccaggtctactggtacgagggggctctgctattacttatctacggattatatgtccttgtcctctgttttgacattaaaatcaaccagtatatcatcaaaaaatgttccccatgttgtgcatgcctggcaaaagccatggaaaggtcagaacagcagcccctgatgggatgggaagacgagggacaaccatttatccgcagacaatcccgaacggactccggtattttctacgaggattctggctattcacagctgtccatcagcctccacgggctgtctcaagtatctgaggacccaccttctgtgttcaatatgccggaagccgatttgaagagaatcttctgggtactgagtttgcccattatcacactattgttcttgacaacacccgactgtagaaagaagttttggaagaactatttcgtcatcactttcttcatgtcggccatttggatatcagccttcacatacatcttagtctggatggtgacgatcaccggagaaacactcgaaatccccgacaccgtgatgggccttactctgcttgcagccggaacaagtatacccgataccatcgccagcgtactcgtcgccagaaagggtaagggggatatggcaatgtctaacattgtggggtccaacgtgtttgatatgttatgtctggggataccttggtttattaaaaccgccttcatcaacggaagcgcgcctgccgaggttaactctcggggtttgacttacataactatctctctgaacatcagcatcatttttctgtttttggctgtgcactttaacgggtggaagctggatcgtaagttaggcatcgtatgtctgctgtcttatctagggctggcaacactctctgtgctctatgagctgggaatcattggaaacaacaagattagaggttgtggcggatag

SEQ ID NO: 263852 - DNA, 1323 bp, Artificial Sequence
  derived and/or modified sequence
atgcaaacgaagggcggacagacttgggcaaggcgagcactgctgttggggatcctgtgggccacagcacacctgcccctctccggcactagcctgccacagcgtctgccgagagccactgcactcgggctctcacaggacgttgcaggtacaaccttcatggcagcaggtagctccgctcctgagctagtcacagctttcctgggcgtcttcatcaccaagggtgatattgggatcagcaccatactcgggagcgcaatctataacctgctagggatctgcgcggcatgcggactgctctctaatacggtgtccactttgtcttgctggcctctgttccgtgattgtgcagcctatactatttccgccgctgcggtgctggggatcatatatgataaccaggtatactggtatgaaggagcactgctcttgcttatttatggcctctatgtgttggttttatgtttcgatattaagattaaccaatacatcattaagaagtgctcgccgtgctgtgcctgtctagccaaggcgatggagcggtctgaacagcaaccgctgatggggtgggaggatgagggacagccctttatccgtcgccagagccgtaccgacagtggcattttttacgaagacagtggctactcccagctgtctatttcgttgcacgggctgtctcaggtctctgaggatccaccttccgtgtttaatatgcccgaggctgacctaaagcgcattttctgggttctttccctaccaattatcaccctgctgttccttaccaccccggattgtagaaaaaaattttggaaaaactacttcgtaataaccttcttcatgtccgccatctggattagtgccttcacatacatcttggtgtggatggtgaccatcactggtgagactttggagattcctgatactgtgatgggccttaccctgctagcagccggaacttctattcctgacacaatagcttcagtactcgtagctcgaaagggcaagggagacatggccatgtccaatattgttggctctaatgtgtttgatatgctatgtttgggaataccctggtttatcaaaacagcattcattaatgggtcagctcccgctgaggtgaatagcaggggactgacatatattactatatccctaaatatctcaattatttttctctttctagccgtccattttaacggttggaagctggaccggaaactagggattgtttgccttttgagttaccttggcctcgccacattatccgttctatatgagctcgggatcatcggaaacaacaagataagaggatgcggaggatag

SEQ ID NO: 263853 - DNA, 1897 bp, Artificial Sequence
  derived and/or modified sequence
cctcacatgatccagtttaatcctcctcttctcccttcctgaagctgcacgctgcagtaagagcacagcagaaatgcagacaaaagggggccaaacatgggcgagaagggctctgttgctcggcatcctgtgggccactgcacatctgcctctctcagggacctccctgccccaacgtctcccaagggccacaggaaatagcacccaatgtgttatttctccatcatcggagtttcccgaagggtttttcacgagacaggagcgcagagatggaggcatcataatctatttcctaattatcgtttacatgttcatggccatatctattgtctgtgatgaatacttcctaccctccctggaaatcatcagtgaatcccttggattgtctcaggatgttgcaggcacaactttcatggcagcgggcagttcagctcctgaattagttactgctttcctaggtgtatttatcacaaagggagatattggcattagcaccatccttggatctgcaatttataatctccttggcatctgtgctgcctgtggtttgctatctaatacggtctcaacactatcatgttggcccctattcagagactgtgcagcgtacacaattagtgcagcagcagttcttggtataatatatgacaaccaagtttactggtatgaaggggctttactgcttttgatatatggattgtatgttttggtgctgtgttttgacattaaaattaaccaatatattataaagaaatgcagtccttgctgcgcctgtcttgccaaagctatggagagaagtgaacaacagccactgatgggctgggaagatgaaggtcaaccattcattcgtcggcaatcaagaactgatagtggaatattttatgaagattctggctactctcagctctctataagtttacatggccttagtcaggtttctgaagatccaccaagtgttttcaacatgcctgaagcagacttaaaaagaattttttgggtattatcccttcctattattacattactttttctaaccacaccagattgtagaaaaaagttttggaaaaactactttgtgataacctttttcatgtctgcaatatggatatccgcatttacatatatcctggtttggatggtcacaataactggggaaacactagaaattcccgatacagtaatgggccttactttattagcagcaggaacaagcataccagacacaattgcaagtgtgttggttgcaagaaaagggaaaggagatatggctatgtctaacatcgtgggatccaatgtgtttgatatgttgtgccttggtattccatggtttattaaaactgcatttataaatggatcagctcctgcagaagtaaacagcagaggactaacttacataaccatctctctcaacatttcaattatttttctttttttagcagttcacttcaatggctggaaactagacagaaagttgggaatagtctgcctattatcatacttggggcttgctacattatcagttctatatgaacttggaattattggaaataataaaataaggggctgtggaggttgatattattaatagtgttatgcagaaaatatgaatggcagggaggggcagagagaaaaatccatttcttcatttaaatcaaattttaaaaatcttgaaccttagaatctaaaacttacagtaatttaaaaccaaccaaaatcacatcctaatttttctgagccctttcttttcatgaaaaattacatattataaaacagaagtttggggggaaaaaatctatgttttaccatacaataagttgacaaaaactggagaaactagaacaaacaaatccaactatgtagtactgaaaacaacaagaaaatggcttatttcattaaa

SEQ ID NO: 263854 - DNA, 1388 bp, Artificial Sequence
  derived and/or modified sequence
tgcagtaagagcacagcagaaatgcagacaaaagggggccaaacatgggcgagaagggctctgttgctcggcatcctgtgggccactgcacatctgcctctctcagggacctccctgccccaacgtctcccaagggccacagcccttggattgtctcaggatgttgcaggcacaactttcatggcagcgggcagttcagctcctgaattagttactgctttcctaggtgtatttatcacaaagggagatattggcattagcaccatccttggatctgcaatttataatctccttggcatctgtgctgcctgtggtttgctatctaatacggtctcaacactatcatgttggcccctattcagagactgtgcagcgtacacaattagtgcagcagcagttcttggtataatatatgacaaccaagtttactggtatgaaggggctttactgcttttgatatatggattgtatgttttggtgctgtgttttgacattaaaattaaccaatatattataaagaaatgcagtccttgctgcgcctgtcttgccaaagctatggagagaagtgaacaacagccactgatgggctgggaagatgaaggtcaaccattcattcgtcggcaatcaagaactgatagtggaatattttatgaagattctggctactctcagctctctataagtttacatggccttagtcaggtttctgaagatccaccaagtgttttcaacatgcctgaagcagacttaaaaagaattttttgggtattatcccttcctattattacattactttttctaaccacaccagattgtagaaaaaagttttggaaaaactactttgtgataacctttttcatgtctgcaatatggatatccgcatttacatatatcctggtttggatggtcacaataactggggaaacactagaaattcccgatacagtaatgggccttactttattagcagcaggaacaagcataccagacacaattgcaagtgtgttggttgcaagaaaagggaaaggagatatggctatgtctaacatcgtgggatccaatgtgtttgatatgttgtgccttggtattccatggtttattaaaactgcatttataaatggatcagctcctgcagaagtaaacagcagaggactaacttacataaccatctctctcaacatttcaattatttttctttttttagcagttcacttcaatggctggaaactagacagaaagttgggaatagtctgcctattatcatacttggggcttgctacattatcagttctatatgaacttggaattattggaaataataaaataaggggctgtggaggttgatattattaatagtgttatgcagaaaatatgaatggcagggaggg

SEQ ID NO: 263855 - protein, 78 aa, Artificial Sequence
  derived and/or modified sequence
MGSGLPLVLLLTLLGSSHGTGPGMTLQLKLKESFLTNSSYESSFLELLEKLCLLLHLPSGTSVTLHHARSQHHVVCNT

SEQ ID NO: 263856 - protein, 78 aa, Artificial Sequence
  derived and/or modified sequence
MGSGLPLVLLLTLLGSSHGTGPGMTLQLKLKESFLTSSSYESSFLELLEKLCLLLHLPSGTSVTLHHARSQHHVVCNT

SEQ ID NO: 263857 - DNA, 237 bp, Artificial Sequence
  derived and/or modified sequence
atgggatcaggattaccactcgtgctgcttttgacactcctgggatcctcccatggcaccggcccaggtatgaccctccagttgaagctgaaggagtctttcctgacaaactcctcctatgagtccagctttctggagcttctggagaagctgtgcctcttgcttcatctgccatcggggacttcagtgacgctgcaccacgcgaggtctcagcaccacgtagtctgcaatacgtag

SEQ ID NO: 263858 - DNA, 237 bp, Artificial Sequence
  derived and/or modified sequence
atgggctctgggttgcccctcgtgttgctgctgactctgctcggatccagtcatgggaccggaccagggatgaccctccaactcaagttgaaagagagttttcttaccaactcaagctatgaatcctctttcttagaactgctcgagaaactgtgtctgctgttgcacctcccatccggaacttcagtgaccttgcaccacgccaggagccagcaccatgtggtctgtaacacctag

SEQ ID NO: 263859 - DNA, 237 bp, Artificial Sequence
  derived and/or modified sequence
atggggagcgggctgcccctggtgttactcctgacacttctgggtagctcccacggaacgggcccaggaatgaccctacagctgaagctgaaggagtcatttctgactaacagttcttacgagtcatccttcctggagcttctcgagaaactgtgcctcctgctccatcttccgtctggaaccagtgtcacactgcaccacgccaggagtcagcaccacgtcgtctgtaatacttag

SEQ ID NO: 263860 - DNA, 237 bp, Artificial Sequence
  derived and/or modified sequence
atgggttcgggcttaccccttgttctactcctcaccttgctcggttccagtcacggtacggggccaggcatgacccttcagctgaaactcaaagaatccttcttgacaaacagttcctacgagtcctccttcctcgaactgctggagaagctctgcttgctgctgcatttgccttcagggaccagcgtaacattgcatcacgcgaggtcacagcaccatgttgtttgcaacacatag

SEQ ID NO: 263861 - DNA, 237 bp, Artificial Sequence
  derived and/or modified sequence
atgggatctggactgcccctggtgcttcttttgaccctcttaggatctagtcatggaactggccctgggatgacactgcaactaaaattgaaagagtctttcctgactaacagttcttacgagtcatcattcttggagctcctggagaaactgtgtttactcctccatctgcctagcgggacatccgtgaccttacatcatgccaggtcacagcaccatgtcgtgtgtaatacctag

SEQ ID NO: 263862 - DNA, 237 bp, Artificial Sequence
  derived and/or modified sequence
atgggctctggcttgcctctagtgctcttattaactctactggggtcttctcacgggaccggcccaggtatgaccctccagctcaaattaaaagaatcttttctgactaacagctcatatgagtcctcttttctcgaattacttgagaagctctgtctgttactgcatctgccctccggcaccagcgtcaccttacaccatgcaagaagtcagcaccacgtcgtgtgtaacacttag

SEQ ID NO: 263863 - DNA, 237 bp, Artificial Sequence
  derived and/or modified sequence
atgggcagcggactgcccctcgtcctcctgttgaccctgcttgggagctctcacggcacaggtcccggtatgacactgcaacttaagctgaaggagtcctttttaaccaatagttcttacgaaagcagctttctcgagctacttgaaaaactgtgtctgttgttacatctaccctcaggaacatccgtaactctccaccacgccagaagccaacaccacgtggtctgcaatacatag

SEQ ID NO: 263864 - DNA, 237 bp, Artificial Sequence
  derived and/or modified sequence
atgggctccggcctgcccctggtacttttattgacgcttttaggttcttcacacggcactggccccggcatgacgttgcagctgaaattaaaggagagcttccttaccaactcttcctatgaaagttcatttcttgagcttctcgaaaagctgtgtctgctcctccatcttccatccggcacgtccgttacccttcaccatgcccgatcacagcatcacgtggtatgtaacacgtag

SEQ ID NO: 263865 - DNA, 237 bp, Artificial Sequence
  derived and/or modified sequence
atgggcagcggcctcccgctagtactcctgctgaccctcctaggtagcagtcatggcaccgggcctggcatgacactccagcttaaacttaaggaaagttttctgactaattcctcctatgaatctagcttccttgaactactggagaagctctgtctgctcctccaccttccatcaggtacgtccgtaacattacatcacgctcgaagccagcaccacgtggtttgtaatacttag

SEQ ID NO: 263866 - DNA, 237 bp, Artificial Sequence
  derived and/or modified sequence
atgggaagcggcctcccccttgtgcttttgcttaccttacttggtagcagtcatggcactggtccgggtatgaccttacagttaaaattaaaagagtccttcttgactaacagcagttacgaatcttcttttttggaactgcttgagaaactatgtctcctcctgcatctgccctctggtacatctgtaaccctacatcacgctagatcacaacaccacgtcgtgtgcaacacctag

SEQ ID NO: 263867 - DNA, 451 bp, Artificial Sequence
  derived and/or modified sequence
ggggtgtagaaacaggcctgttaaggagaggccaccgggacttcagtgtctcctccatcccaggagcgcagtggccactatggggtctgggctgccccttgtcctcctcttgaccctccttggcagctcacatggaacaggaccgggtatgactttgcaactgaagctgaaggagtcttttctgacaaattcctcctatgagtccagcttcctggaattgcttgaaaagctctgcctcctcctccatctcccttcagggaccagcgtcaccctccaccatgcaagatctcaacaccatgttgtctgcaacacatgacagccattgaagcctgtgtccttcttggcccaggcttttgggccggggatgcaggaggcaggccccgaccctgtctttcagcaggcccccaccctcctgagtggcaataaataaaattcggtatgctgaattcaa

SEQ ID NO: 263868 - DNA, 237 bp, Artificial Sequence
  derived and/or modified sequence
atgggcagcggcctgcccctggtgctgctgctgaccctgctgggcagcagccacggcaccggccccggcatgaccctgcagctgaagctgaaggagagcttcctgaccaacagcagctacgagagcagcttcctggagctgctggagaagctgtgcctgctgctgcacctgcccagcggcaccagcgtgaccctgcaccacgccagaagccagcaccacgtggtgtgcaacacctag

SEQ ID NO: 263869 - DNA, 237 bp, Artificial Sequence
  derived and/or modified sequence
atggggagtggactgccactggtcctgctcttaacactgctgggatcctcgcatgggacggggcctggtatgacactccagttaaagctgaaggagtcttttctgacaaactcgagttacgaaagcagcttcctggagctgttggagaagctctgtctcctgctgcatctaccctccggcacttcagtcaccctgcaccatgcccgcagccaacatcacgtggtatgcaatacgtag

SEQ ID NO: 263870 - DNA, 237 bp, Artificial Sequence
  derived and/or modified sequence
atgggatctgggctgcccttagtgttgctcctcactctgctcgggtcttcacacggcactggaccaggaatgacccttcagttgaaactgaaagaaagcttcctgacgaactcaagttatgagtcaagctttctggagctgctggaaaaactgtgccttctgctgcacctcccgagcggcacttctgtcaccctgcatcacgctaggagtcagcaccatgtagtatgcaacacctag

SEQ ID NO: 263871 - DNA, 237 bp, Artificial Sequence
  derived and/or modified sequence
atgggcagcgggcttcctctcgtgctccttttgacactgctggggagctctcacgggaccggccccggaatgaccctgcagctcaaactgaaggaatcttttctgactaactcctcatatgagtcctcttttttggagctcttggagaaactttgtctcctgttgcaccttccttctgggacttctgtaactctccaccatgctcggagccaacaccatgtagtgtgtaacacttag

SEQ ID NO: 263872 - DNA, 237 bp, Artificial Sequence
  derived and/or modified sequence
atggggtccggtttacctctggtattgctgctaactctcctggggtccagtcacggaaccgggccgggcatgacactccagcttaaactcaaagagagcttccttactaattctagctacgagtctagcttcctggagttgctggagaaactctgtctgcttctccatctcccctccggaacctccgtgacactccaccatgctcgctctcagcatcacgtcgtctgcaacacttag

SEQ ID NO: 263873 - DNA, 237 bp, Artificial Sequence
  derived and/or modified sequence
atgggcagcggacttccactcgtgttactcctcacactgctcggatctagccacggtaccggtccaggaatgacactgcagcttaagttaaaggaatcttttcttacgaacagctcctacgagagttcatttctggaacttttggaaaaattgtgtctcttgctccacttgccctctggcaccagtgtgaccttacatcacgccaggtctcaacaccacgtcgtatgtaacacctag

SEQ ID NO: 263874 - DNA, 451 bp, Artificial Sequence
  derived and/or modified sequence
ggggtgtagaaacaggcctgttaaggagaggccaccgggacttcagtgtctcctccatcccaggagcgcagtggccactatggggtctgggctgccccttgtcctcctcttgaccctccttggcagctcacatggaacagggccgggtatgactttgcaactgaagctgaaggagtcttttctgacaaattcctcctatgagtccagcttcctggaattgcttgaaaagctctgcctcctcctccatctcccttcagggaccagcgtcaccctccaccatgcaagatctcaacaccatgttgtctgcaacacatgacagccattgaagcctgtgtccttcttggcccgggcttttgggccggggatgcaggaggcaggccccgaccctgtctttcagcaggcccccaccctcctgagcggcaataaataaaattcggtatgctgaattcaa

SEQ ID NO: 263875 - DNA, 237 bp, Artificial Sequence
  derived and/or modified sequence
atgggcagcggcctgcccctggtgctgctgctgaccctgctgggcagcagccacggcaccggccctggcatgaccctgcagctgaagctgaaggagagcttcctgaccaacagcagctatgagagcagcttcctggagctgctggagaagctgtgcctgctgctgcacctgcccagcggcacctctgtgaccctgcaccacgcccggagccagcaccacgtggtgtgcaacacctag

SEQ ID NO: 263876 - DNA, 237 bp, Artificial Sequence
  derived and/or modified sequence
atgggcagcggcctgcccctggtgctgctgctgaccctgctgggcagctcccatgggacaggtcccggcatgaccctacagctgaaattgaaagagtctttcctcaccaattcttcctatgaaagcagtttcttagagctgctggagaagctgtgcctgcttctccatcttccatcaggcacgtccgtgactctacatcatgctaggagtcagcatcacgttgtgtgtaatacctag

SEQ ID NO: 263877 - DNA, 237 bp, Artificial Sequence
  derived and/or modified sequence
atgggcagcggcctgcccctggtgctgctgctgaccctgctgggcagttcacatgggaccggcccggggatgacactgcaactcaaactaaaagagtcatttctgacgaattcctcgtatgagagctcgtttctggagctcttagagaagctgtgcctgctgttgcaccttccaagcgggacctcggtgacactgcaccatgccaggagccaacaccacgtagtgtgtaatacatag

SEQ ID NO: 263878 - DNA, 451 bp, Artificial Sequence
  derived and/or modified sequence
ggggtgtagaaacaggcctgttaaggagaggccaccgggacttcagtgtctcctccatcccaggagcgcagtggccactatggggtctgggctgccccttgtcctcctcttgaccctccttggcagctcacatggaacagggccgggtatgactttgcaactgaagctgaaggagtcttttctgacaaattcctcctatgagtccagcttcctggaattgcttgaaaagctctgcctcctcctccatctcccttcagggaccagcgtcaccctccaccatgcaagatctcaacaccatgttgtctgcaacacatgacagccattgaagcctgtgtccttcttggcccgggcttttgggccggggatgcaggaggcaggccccgaccctgtctttcagcaggcccccaccctcctgagtggcaataaataaaattcggtatgctgaattcaa

SEQ ID NO: 263879 - DNA, 237 bp, Artificial Sequence
  derived and/or modified sequence
atgggcagcggcctgcccctggtgctgctgctgaccctgctgggcagttcacatggtactggacccggtatgactctacaacttaaactgaaagagagcttcctgaccaacagttcatatgaatctagctttctggagctgctggaaaaactttgtctgctcctgcatctaccctccggtacaagtgtgaccctgcatcatgcccgctctcagcaccatgttgtgtgtaacacatag

SEQ ID NO: 263880 - DNA, 237 bp, Artificial Sequence
  derived and/or modified sequence
atgggcagcggcctgcccctggtgctgctgctgaccctgctgggcagttcccatgggacaggccccggcatgacactgcagctgaaactgaaggagtcctttctgactaacagctcctacgaatcctcctttctggaactgctggaaaagctgtgcctgctcctgcaccttccttctggcacatccgtgactcttcatcacgcacgtagccaacaccacgtggtctgcaacacgtag

SEQ ID NO: 263881 - DNA, 237 bp, Artificial Sequence
  derived and/or modified sequence
atgggcagcggcctgcccctggtgctgctgctgaccctgctgggctctagccatgggacaggtccaggcatgaccttgcagctgaagctaaaagaatcattccttacgaactcgtcctacgagagctcttttcttgaactcctggaaaagctttgtctacttttgcatcttccatccggcacaagcgtgacactacatcacgcccggagtcaacaccacgtcgtctgcaatacatag

SEQ ID NO: 263882 - DNA, 237 bp, Artificial Sequence
  derived and/or modified sequence
atgggcagcggcctgcccctggtgctgctgctgaccctgctgggcagcagccacggcaccggccccggcatgaccctgcagctgaagctgaaggagagcttcctgaccagcagcagctacgagagcagcttcctggagctgctggagaagctgtgcctgctgctgcacctgcccagcggcaccagcgtgaccctgcaccacgccagaagccagcaccacgtggtgtgcaacacctag

SEQ ID NO: 263883 - DNA, 237 bp, Artificial Sequence
  derived and/or modified sequence
atgggcagcggcctgccactagtattgctgctgactctcctcggtagctcccacggcactggccctggaatgacactgcagctcaagctgaaggagtcgttcctgacaagcagcagctatgagtccagcttccttgaactccttgagaaactgtgtctattactgcatctcccatcgggcaccagcgttactctgcatcatgctaggtctcagcaccatgtggtgtgcaatacgtag

SEQ ID NO: 263884 - DNA, 237 bp, Artificial Sequence
  derived and/or modified sequence
atgggcagcggcctgcccctggtgctgctgctgaccctgctgggcagcagccacggcaccggccctggcatgaccctgcagctgaagctgaaggagagcttcctgaccagcagcagctatgagagcagcttcctggagctgctggagaagctgtgcctgctgctgcacctgcccagcggcacctctgtgaccctgcaccacgcccggagccagcaccacgtggtgtgcaacacctag

SEQ ID NO: 263885 - DNA, 237 bp, Artificial Sequence
  derived and/or modified sequence
atgggcagcggcctgcccctggtgctgctgctgaccctgctgggcagctcacacgggaccggccctggcatgaccttgcagctcaagttgaaggaaagttttctcacttcttcatcatacgagtctagttttttggagctgctggagaagttatgtctgcttctgcacctgcctagtggcactagcgtgaccctccaccacgctcgcagtcagcatcacgtcgtttgtaatacatag

SEQ ID NO: 263886 - DNA, 237 bp, Artificial Sequence
  derived and/or modified sequence
atggggtcggggctgcccctggtgctgctgctgaccctgcttgggtcgtctcatggaacaggcccaggaatgactttgcagctgaaactgaaggagagtttccttaccagctccagctacgaatctagttttcttgaattgctcgagaagctctgtctgcttttacacctccctagtggtacctccgtcacgctgcatcacgctcgaagccagcaccatgtggtctgtaacacttag

SEQ ID NO: 263887 - DNA, 451 bp, Artificial Sequence
  derived and/or modified sequence
ggggtgtagaaacaggcctgttaaggagaggccaccgggacttcagtgtctcctccatcccaggagcgcagtggccactatggggtctgggctgccccttgtcctcctcttgaccctccttggcagctcacatggaacagggccgggtatgactttgcaactgaagctgaaggagtcttttctgacaagttcctcctatgagtccagcttcctggaattgcttgaaaagctctgcctcctcctccatctcccttcagggaccagcgtcaccctccaccatgcaagatctcaacaccatgttgtctgcaacacatgacagccattgaagcctgtgtccttcttggcccgggcttttgggccggggatgcaggaggcaggccccgactctgtctttcagcaggcccccaccctcctgagtggcaataaataaaattcggtatgctgaattcaa

SEQ ID NO: 263888 - RNA, 237 nt, Artificial Sequence
  derived and/or modified sequence
augggcucuggcuugccucuagugcucuuauuaacucuacuggggucuucucacgggaccggcccagguaugacccuccagcucaaauuaaaagaaucuuuucugacuaacagcucauaugaguccucuuuucucgaauuacuugagaagcucugucuguuacugcaucugcccuccggcaccagcgucaccuuacaccaugcaagaagucagcaccacgucguguguaacacuuag

SEQ ID NO: 263889 - RNA, 237 nt, Artificial Sequence
  derived and/or modified sequence
augggcagcggacugccccucguccuccuguugacccugcuugggagcucucacggcacaggucccgguaugacacugcaacuuaagcugaaggaguccuuuuuaaccaauaguucuuacgaaagcagcuuucucgagcuacuugaaaaacugugucuguuguuacaucuacccucaggaacauccguaacucuccaccacgccagaagccaacaccacguggucugcaauacauag

SEQ ID NO: 263890 - RNA, 237 nt, Artificial Sequence
  derived and/or modified sequence
augggcuccggccugccccugguacuuuuauugacgcuuuuagguucuucacacggcacuggccccggcaugacguugcagcugaaauuaaaggagagcuuccuuaccaacucuuccuaugaaaguucauuucuugagcuucucgaaaagcugugucugcuccuccaucuuccauccggcacguccguuacccuucaccaugcccgaucacagcaucacgugguauguaacacguag

SEQ ID NO: 263891 - RNA, 237 nt, Artificial Sequence
  derived and/or modified sequence
augggcagcggccucccgcuaguacuccugcugacccuccuagguagcagucauggcaccgggccuggcaugacacuccagcuuaaacuuaaggaaaguuuucugacuaauuccuccuaugaaucuagcuuccuugaacuacuggagaagcucugucugcuccuccaccuuccaucagguacguccguaacauuacaucacgcucgaagccagcaccacgugguuuguaauacuuag

SEQ ID NO: 263892 - RNA, 237 nt, Artificial Sequence
  derived and/or modified sequence
augggaagcggccucccccuugugcuuuugcuuaccuuacuugguagcagucauggcacugguccggguaugaccuuacaguuaaaauuaaaagaguccuucuugacuaacagcaguuacgaaucuucuuuuuuggaacugcuugagaaacuaugucuccuccugcaucugcccucugguacaucuguaacccuacaucacgcuagaucacaacaccacgucgugugcaacaccuag

SEQ ID NO: 263893 - protein, 173 aa, Artificial Sequence
  derived and/or modified sequence
MHWKMLLLLLLYYNAEASMCHRWSRAVLFPAAHRPKRSSSLPLNPVLQTSLEEVELLYEFLLAELEISPDLQISIKDEELASLRKASDFRTVCNNVIPKSIPDIRRLSASLSSHPGILKKEDFERTVLTLAYTAYRTALSHGHQKDIWAQSLVSLFQALRHDLMRSSQPGVPP

SEQ ID NO: 263894 - DNA, 522 bp, Artificial Sequence
  derived and/or modified sequence
atgcactggaagatgttactcctgctcctcctttactacaacgccgaagcctccatgtgccaccgctggagccgagcggtgctttttcctgcggctcaccgtccaaaaagatcgagtagccttcctctgaacccggtgttgcaaacctcactggaagaggtcgaacttctctacgaattccttctggcagaacttgaaatctcgccagatctgcagatctccatcaaggacgaggagcttgccagcttacgaaaagctagtgacttcaggacagtgtgtaacaatgttattcccaagagtatcccagatatccgtcggctctcagcatcactgagttcacatcccggaattctgaagaaagaagatttcgaacggactgtcctgactttggcctatacagcctatcggaccgcgcttagccacggccatcagaaggatatatgggcccaatccctagtgtcactattccaagccctgcgacatgacttgatgcgctcatcgcagcccggtgtccccccttag

SEQ ID NO: 263895 - DNA, 522 bp, Artificial Sequence
  derived and/or modified sequence
atgcactggaagatgcttctgctgctgttgctgtattacaatgcagaggccagcatgtgtcataggtggagcagggctgtgctctttcccgctgcacacagacccaaaaggagtagttctcttcccctcaatccagtgctgcagaccagcctggaagaagtggagctcctctacgagttcctgctggcagagctggagatctcccctgatctgcagatatctatcaaggacgaggagttagctagcttacggaaagcgagcgactttaggaccgtttgcaataatgtaattccaaaaagcattccggacattcgcaggctgtctgcttcactttccagtcacccgggaatactcaagaaggaggacttcgagagaacagtcctgaccctggcttacactgcttaccgcactgccctgtcccatggccatcagaaggacatttgggcccaaagcctggttagcctgtttcaagcactcaggcacgatctgatgcgctcctcccagccaggggtacccccttag

SEQ ID NO: 263896 - DNA, 522 bp, Artificial Sequence
  derived and/or modified sequence
atgcattggaagatgctgctcctgctactcctctactacaacgcagaggcttcaatgtgccaccggtggagtcgtgcagtgctctttcctgccgcacaccgaccaaagcgtagctccagtctcccactcaatccggtacttcagacctctctggaggaagtggaattgttatacgaattcttactggccgagctggaaatctctccggacctccagatttcaatcaaggacgaggagctagcttccttacgcaaagcatccgatttccgaactgtttgtaataatgtaatccccaagagtatccccgacattaggaggttgtccgctagcctgagctctcatccaggaatactgaaaaaggaggattttgagcgtacagtgcttaccctcgcttacaccgcttacagaactgctctgtcacatggccaccagaaggacatttgggcccagagtttagtgagcctttttcaggcattgcggcatgatctgatgcgaagttctcagccaggcgtccctccctag

SEQ ID NO: 263897 - DNA, 1073 bp, Artificial Sequence
  derived and/or modified sequence
tttctgcacgtctgcaaaaggaagggagggaagcactccatcatctcactgggaagaacggcacgggcatacctgcagctactggggttccactgggcttgagggtcgatttttcaccttttgaaggacaagatgcattggaagatgttgctgcttctgctgttgtattacaatgctgaggcttctatgtgccacaggtggagcagggctgtgctcttccctgccgcccaccggccaaagaggtcctcatcactgccattgaacccagtcctgcagacctccctggaggaggtggagctgctctacgagttcctgctggccgaacttgagatcagccctgacctgcagatctccatcaaggacgaggagctggcctccttgcggaaggcctcagacttccgcaccgtctgcaacaacgtcatccccaagagcatcccagacatccgccggctcagcgccagcctctccagccaccctggcatcctcaagaaagaagactttgaaaggacagtgctgaccctggcctacacagcctaccgcacagccctgtcccacggccatcagaaggacatctgggcgcagtccctcgttagcctcttccaggccctgaggcacgacttgatgcgctcctcacagccgggagtacctccctgagagactggcccacaccaggacctcagagcagggaccagcacagtaatccagaaagtcttcattctctactccatttacagagaccagcaacaaaactcttaccgctgacacagagcagcagagatcaaacagtaaccccgatgctcttttctccttgtagtttcctggaagacacatctgattcatgccatcatgtgacctgggctggaagaaagggctggaatggtcattcaagacgcctccatgggcagaatggtttgcctatggcaggcagaattctgatatgcttcaacccagagcagtggccacacactcaagagtgagaacaggccgggcacagaggctcacgcctgtaatcccagcactttaggaggctgagacaggaggattatttgaggtcaggagttcaagaccagcct

SEQ ID NO: 263898 - DNA, 522 bp, Artificial Sequence
  derived and/or modified sequence
atgcactggaagatgctccttcttctgcttctgtactataacgccgaagctagcatgtgccatcgttggagcagagccgtactcttccctgcagcgcatagacctaagcgctcatcatccttgccactgaatcccgtgcttcagacttctcttgaggaggtggaactcctatatgaattcctcctggctgagctcgagatctcccctgatctgcaaattagtatcaaagacgaggaactcgcttcacttagaaaagcatccgattttcgcaccgtttgcaataacgtgatcccgaaatccattcccgatataagacgcctaagcgcatcactgtcttctcaccctgggattctgaagaaggaggactttgaacggaccgtgcttacacttgcctacacagcctatcggacagcactctctcacggtcaccaaaaggacatctgggcacagtctttagtatctctgtttcaggccctacgacacgacctgatgcgctcctcacagccaggtgtcccgccatag

SEQ ID NO: 263899 - DNA, 522 bp, Artificial Sequence
  derived and/or modified sequence
atgcactggaaaatgctcctgctgctgttgttgtactacaatgctgaagcatctatgtgtcacaggtggagccgcgccgttcttttccccgccgcacaccgacctaaacgttccagttccctccccctcaatccggtcctacagacgtcactcgaagaggtagagcttctttatgaattcctgcttgccgagcttgagatctctcctgacctgcaaattagcattaaggatgaggagctcgcctccctgcgaaaggcctcagattttagaaccgtttgtaacaatgtgattcctaaaagtatccccgatatccgcagactttccgctagtctgtcctcacacccaggtatacttaaaaaagaagactttgaaagaactgttttaacccttgcctataccgcttacagaactgctctttcccatgggcatcagaaggacatttgggctcagagcctggtcagcctgttccaagctcttagacacgacctcatgcggagtagtcaacctggcgtgccaccctag

SEQ ID NO: 263900 - DNA, 522 bp, Artificial Sequence
  derived and/or modified sequence
atgcattggaagatgctcctcctgctgctattgtattataacgctgaagcaagcatgtgtcaccgctggtctagggcggtcctgtttccagctgcccaccgaccaaagcgtagttcctccctccccctgaatcccgtcctccagacatctctcgaagaggtcgaactcctctacgagttccttctcgccgagctcgaaattagccctgacctgcagatcagcatcaaagatgaagaactcgcttctcttagaaaggctagcgacttccgcacagtgtgtaataatgtcattcctaagtcaattcccgacattcggagattgtccgcaagccttagttcccaccctggcatcctcaaaaaagaagattttgaacgaacggtgttgacactagcttacacagcctacagaacggctctatcacatggtcatcaaaaggatatatgggcgcagtctctggtatctttgttccaagctcttaggcatgatctcatgcgctcatcacagcccggtgtccctccttag

SEQ ID NO: 263901 - DNA, 1534 bp, Artificial Sequence
  derived and/or modified sequence
tgggcttgagggtcgatttttcaccttttgaaggacaagatgcattggaagatgttgctgcttctgctgttgtattacaatgctgaggcttctatgtgccacaggtggagcagggctgtgctcttccctgccgcccaccggccaaagaggtcctcatcactgccattgaacccagtcctgcagacctccctggaggaggtggagctgctctacgagttcctgctggccgaacttgagatcagccctgacctgcagatctccatcaaggacgaggagctggcctccttgcggaaggcctcagacttccgcaccgtctgcaacaacgtcatccccaagagcatcccagacatccgccggctcagcgccagcctctccagccaccctggcatcctcaagaaagaagactttgaaaggacagtgctgaccctggcctacacagcctaccgcacagccctgtcccacggccatcagaaggacatctgggcgcagtccctcgttagcctcttccaggccctgaggcacgacttgatgcgctcctcacagccgggagtacctccctgagagactggcccacaccaggacctcagagcagggaccagcacagtaatccagaaagtcttcattctctactccatttacagagaccagcaacaaaactcttaccgctgacacagagcagcagagatcaaacagtaaccccgatgctcttttctccttgtagtttcctggaagacacatctgattcatgccatcatgtgacctgggctggaagaaagggctggaatggtcattcaagacgcctccatgggcagaatggtttgcctatggcaggcagaattctgatatgcttcaacccagagcgtgagccaccgtgcctggcccaggatctaaaaactttctaagtttcctccatcgttggcatcctcacagctatctccaatgtcactcaagagacatcaacagacatttaactgctgcagacttcattgctctgtcacctcaccttgaatctaacaaatcaaagtatttctgcaggtccaatggtctaaaatcaaatgcttgttaaatgactttttacaacaccccttactttcctaatccatttcaatcttattttttttattgtggtaaaaaacacatcaggtaaaatgtaccatcttaaccatttttaagcatatggtacagcagtgttaactccatgcatgttgtgaaacagacccccggaactttctcatcttgtaattctgaagttctatacccaccgaacaactcctcttttccccttccccctgcctgccccagctcttggcaccattattctgctttctgtttttgagagtctgactacttaagatacctcatacaagcgggatctggcttacatttcttgagcattgtattctggaaaagtgtttccttcctctgaaaaatgggtagagttctgaaggagaactactggtcttattgtacacttgctgtacctatttttatttaacaaatattcatctatggtataataaagatgtcatgattg

SEQ ID NO: 263902 - DNA, 522 bp, Artificial Sequence
  derived and/or modified sequence
atgcactggaagatgttgctactactcctcctgtattacaacgctgaggcctctatgtgccaccgctggagtcgggcagtcctgtttcccgccgcacatcgaccgaaaagaagttccagcctcccgctaaatccagtactgcaaacttccctcgaggaagtcgaactactgtatgagtttttgttggccgagcttgaaatttcccccgacctacaaatcagcataaaagacgaagagcttgctagcttgagaaaagcatccgactttcgaaccgtatgcaacaatgtgatcccgaagagcatcccggatatacgtcgtttatccgcctctctcagctcgcatccaggtattctaaaaaaagaagatttcgagcgtaccgttctaactctggcctacactgcgtacagaacggcccttagccacggacaccagaaagacatctgggcccagtcattagtgtccttatttcaagcactcaggcatgatctgatgaggtcctcacagccaggcgtgcccccctag

SEQ ID NO: 263903 - DNA, 522 bp, Artificial Sequence
  derived and/or modified sequence
atgcactggaaaatgctcctgctgctgttgttgtactacaatgctgaagcatctatgtgtcacaggtggagccgcgccgttcttttccccgccgcacaccgacctaaacgttccagttccctccccctcaatccggtcctacagacgtcactcgaagaggtagagcttctttatgaattcctgcttgccgagcttgagatctctcctgacctgcaaattagcattaaggatgaggagctcgcctccctgcgaaaggcctcagattttagaaccgtttgtaacaatgtgattcctaaaagtatacctgacatccgaaggctttccgcgtcccttagttctcaccccggcattctgaaaaaagaggattttgagcgaacagttttgactctggcgtatacagcataccgcacagccctcagccacgggcatcaaaaggatatatgggcacaatccctggtcagtctctttcaggcccttcgccacgacttaatgcgttcctcgcaaccaggcgttccgccctag

SEQ ID NO: 263904 - DNA, 522 bp, Artificial Sequence
  derived and/or modified sequence
atgcactggaagatgctgctgctgctgctgctgtactacaacgccgaggccagcatgtgccacagatggagcagagccgtgctgttccccgccgcccacagacccaagagaagcagcagcctgcccctgaaccccgtgctgcagaccagcctggaggaggtggagctgctgtacgagttcctgctggccgagctggagatcagccccgacctgcagatcagcatcaaggacgaggagctggccagcctgagaaaggccagcgacttcagaaccgtgtgcaacaacgtgatccccaagagcatccccgacatcagaagactgagcgccagcctgagcagccaccccggcatcctgaagaaggaggacttcgagagaaccgtgctgaccctggcctacaccgcctacagaaccgccctgagccacggccaccagaaggacatctgggcccagagcctggtgagcctgttccaggccctgagacacgacctgatgagaagcagccagcccggcgtgcccccctag

SEQ ID NO: 263905 - DNA, 1800 bp, Artificial Sequence
  derived and/or modified sequence
gtgctcaaaaacagagtctctctgtggaaggccagttccccaatcccagagagcgtcaaatgaagagaggtaccgactcctgtcccacccaggacgcagccttcagcctccagccttctgaggcagagtaggcatttctgcacgtctgcaaaaggaagggagggaagcactccatcatctcactgggaagaacggcacgggcatacctgcagctactggggttccactgggcttgagggtcgatttttcaccttttgaaggacaagatgcattggaagatgttgctgcttctgctgttgtattacaatgctgaggcttctatgtgccacaggtggagcagggctgtgctcttccctgccgcccaccggccaaagaggtcctcatcactgccattgaacccagtcctgcagacctccctggaggaggtggagctgctctacgagttcctgctggccgaacttgagatcagccctgacctgcagatctccatcaaggacgaggagctggcctccttgcggaaggcctcagacttccgcaccgtctgcaacaacgtcatccccaagagcatcccagacatccgccggctcagcgccagcctctccagccaccctggcatcctcaagaaagaagactttgaaaggacagtgctgaccctggcctacacagcctaccgcacagccctgtcccacggccatcagaaggacatctgggcgcagtccctcgttagcctcttccaggccctgaggcacgacttgatgcgctcctcacagccgggagtacctccctgagagactggcccacaccaggacctcagagcagggaccagcacagtaatccagaaagtcttcattctctactccatttacagagaccagcaacaaaactcttaccgctgacacagagcagcagagatcaaacagtaaccccgatgctcttttctccttgtagtttcctggaagacacatctgattcatgccatcatgtgacctgggctggaagaaagggctggaatggtcattcaagacgcctccatgggcagaatggtttgcctatggcaggcagaattctgatatgcttcaacccagagcagtggccacacactcaagagtgagaacaggcgtgagccaccgtgcctggcccaggatctaaaaactttctaagtttcctccatcgttggcatcctcacagctatctccaatgtcactcaagagacatcaacagacatttaactgctgcagacttcattgctctgtcacctcaccttgaatctaacaaatcaaagtatttctgcaggtccaatggtctaaaatcaaatgcttgttaaatgactttttacaacaccccttactttcctaatccatttcaatcttattttttttattgtggtaaaaaacacatcaggtaaaatgtaccatcttaaccatttttaagcatatggtacagcagtgttaactccatgcatgttgtgaaacagacccccggaactttctcatcttgtaattctgaagttctatacccaccgaacaactcctcttttccccttccccctgcctgccccagctcttggcaccattattctgctttctgtttttgagagtctgactacttaagatacctcatacaagcgggatctggcttacatttcttgagcattgtattctggaaaagtgtttccttcctctgaaaaatgggtagagttctgaaggagaactactggtcttattgtacacttgctgtacctatttttatttaacaaatattcatctatggtataataaagatgtcatgattgagttgctc

SEQ ID NO: 263906 - DNA, 522 bp, Artificial Sequence
  derived and/or modified sequence
atgcattggaagatgctccttctgcttctcctgtactacaatgctgaagctagcatgtgccataggtggagccgtgcagtgctgtttccagccgcccacagacccaaaaggtccagctcccttcctctaaaccccgtactgcagacttccttggaagaagtcgagctactttacgagttcctgctggcggagctggaaattagccctgacctacagatttcaatcaaggacgaagagcttgctagccttcgtaaggcctccgatttcagaactgtctgcaataacgtgattccaaaaagcatcccagacatccgtcgactgagcgcttccctgtcctcgcacccaggcattctgaaaaaggaagactttgaaagaaccgttctgactctcgcctataccgcttacagaacagcactgtcgcatggccatcagaaggacatctgggcccagtcgctcgtctccctgttccaagccctgcgccacgatctaatgaggagctcacagccaggggtccccccatag

SEQ ID NO: 263907 - DNA, 522 bp, Artificial Sequence
  derived and/or modified sequence
atgcactggaagatgctgctgctgctgctgttgtactataatgctgaagcctctatgtgtcaccggtggtcgagggccgtgctgttccccgccgctcatagacccaaaagatccagctcgcttccactcaatcccgtactccagacttccctggaggaggtggagctcctgtacgaattcttactcgctgaactggaaatctcaccagacctgcagatttcaataaaagacgaagaactggcatccttgcgcaaggcaagcgactttaggactgtctgcaataacgtgattcctaaaagcattccggatatccgccgcttgtccgccagcctgagctcccatccagggatcctgaagaaagaggacttcgaaaggactgtcctgaccttagcgtatacagcttaccgaaccgctctgagtcatggacatcagaaggacatctgggcgcagtccctggtgagcctgttccaagctctccgccacgatctgatgcgctcaagccagcccggcgttccaccctag

SEQ ID NO: 263908 - DNA, 522 bp, Artificial Sequence
  derived and/or modified sequence
atgcattggaaaatgttgctgctcctgctcctgtattataacgctgaggccagcatgtgccataggtggagccgtgccgtgctgttcccagctgcccaccgccccaaacggtcatctagcttgcccctgaaccctgttctgcagacgagcctggaagaggtcgaactgctgtatgaatttctgcttgccgaactcgaaatatccccagacctgcagatatccattaaagatgaggaattagctagtctgcggaaggccagtgactttcggactgtttgtaacaacgtgatccccaagagcattccagacatacgacgcttaagcgcatcgctttcgtctcatccaggcattctcaagaaagaggactttgagcgcactgttttaacattggcatataccgcgtacagaaccgccttgtcacacgggcatcaaaaggatatatgggcgcagtcgctcgttagtctgttccaggctctgcgccacgacctgatgagatcctcacaaccgggcgtacccccctag

SEQ ID NO: 263909 - DNA, 522 bp, Artificial Sequence
  derived and/or modified sequence
atgcactggaagatgctgctgctgctgctgctgtactacaatgctgaggcctccatgtgccaccgctggagcagagctgtgctcttccctgctgcccaccggcccaagaggagcagcagcctgcccctgaaccctgtgctgcagaccagcctggaggaggtggagctgctgtatgagttcctgctggccgagctggagatcagcccagacctgcagatcagcatcaaggatgaggagctggccagcctgaggaaggccagtgacttcagaacagtgtgcaacaacgtcatccccaagagcatcccagacatccggcggctgagcgccagcctgagcagccaccctggcatcctgaagaaggaggactttgagaggacagtgctgaccctggcctacacagcctacagaacagccctgagccacggccaccagaaggacatctgggcccagagcctggtgtccctcttccaggccctgcggcatgacctgatgaggagcagccagcccggggtgcccccatag

SEQ ID NO: 263910 - DNA, 522 bp, Artificial Sequence
  derived and/or modified sequence
atgcactggaagatgctgctgctgctgctgctgtactacaacgccgaggcatctatgtgccacagatggagtagagctgtgctgtttcccgcagcgcaccgccctaagcgctctagtagtctgcccctgaatcctgtgcttcagacttcattggaggaagtcgaactgctgtacgagtttctgttagcagaactggagatctcacccgatctacagatatctattaaagatgaggaattggcttcgttgagaaaagcatctgattttcgtacggtctgcaataacgtgatccccaaatcaattcccgatataagacgcctttcagcatctctgtcctcccaccctgggattctgaaaaaagaggactttgaacggacagtgctcacacttgcttacactgcttaccgaactgccctgtcacacggacaccagaaggatatctgggctcagagccttgtgtccctgttccaagccctgagacacgatctcatgaggtcctcacaacccggtgtccctccttag

SEQ ID NO: 263911 - DNA, 522 bp, Artificial Sequence
  derived and/or modified sequence
atgcactggaagatgctgctgctgctgctgctgtactacaacgccgaggctagcatgtgtcaccgctggagcagggcagtgttgtttccggccgctcaccgacccaagagaagctcttctctgccactcaaccctgtgctacagacctccttggaagaggtcgaattgttgtatgaatttttgctagcagagctggagatttccccggatctccagatctcaatcaaagacgaagaactcgccagtctgcgtaaggcctctgatttcagaactgtctgcaacaacgtgattcctaagtcaatccctgacatccgtcggctgagcgccagcctgtcctcacatcccggtatactcaaaaaggaggacttcgagcgtaccgttctgacgctggcctataccgcgtaccgtaccgccctgagccacggccatcagaaggatatatgggcccagtcactggtcagcctgtttcaggccctccggcacgacctcatgcggagttctcagcccggagtgccaccgtag

SEQ ID NO: 263912 - DNA, 522 bp, Artificial Sequence
  derived and/or modified sequence
atgcactggaagatgctgctgctgctgctgctgtactacaacgccgaagcctctatgtgtcacagatggagtcgggccgtgctgtttcccgccgcccacaggccaaaaagatcctcatctttgcctctcaaccccgtcttgcagacctcacttgaggaagtggaactcctttacgagttcctgttggccgagcttgagatttctcccgacttacagatatccatcaaggacgaagaattggcctctcttcggaaagcctccgacttccgcactgtgtgtaataacgtgattcccaaatcgatcccagacatcagaaggctgtccgcatccctgagttctcatccaggaatactgaagaaggaagatttcgaacgtactgtcctgactttggcatatacagcttataggacggctctcagtcatggacaccagaaagacatctgggcacaatccttagtctccctctttcaagccttgcggcacgatctgatgcgaagcagtcagccgggcgtacccccttag

SEQ ID NO: 263913 - RNA, 522 nt, Artificial Sequence
  derived and/or modified sequence
augcacuggaagaugcuccuucuucugcuucuguacuauaacgccgaagcuagcaugugccaucguuggagcagagccguacucuucccugcagcgcauagaccuaagcgcucaucauccuugccacugaaucccgugcuucagacuucucuugaggagguggaacuccuauaugaauuccuccuggcugagcucgagaucuccccugaucugcaaauuaguaucaaagacgaggaacucgcuucacuuagaaaagcauccgauuuucgcaccguuugcaauaacgugaucccgaaauccauucccgauauaagacgccuaagcgcaucacugucuucucacccugggauucugaagaaggaggacuuugaacggaccgugcuuacacuugccuacacagccuaucggacagcacucucucacggucaccaaaaggacaucugggcacagucuuuaguaucucuguuucaggcccuacgacacgaccugaugcgcuccucacagccaggugucccgccauag

SEQ ID NO: 263914 - RNA, 522 nt, Artificial Sequence
  derived and/or modified sequence
augcacuggaaaaugcuccugcugcuguuguuguacuacaaugcugaagcaucuaugugucacagguggagccgcgccguucuuuuccccgccgcacaccgaccuaaacguuccaguucccucccccucaauccgguccuacagacgucacucgaagagguagagcuucuuuaugaauuccugcuugccgagcuugagaucucuccugaccugcaaauuagcauuaaggaugaggagcucgccucccugcgaaaggccucagauuuuagaaccguuuguaacaaugugauuccuaaaaguauccccgauauccgcagacuuuccgcuagucuguccucacacccagguauacuuaaaaaagaagacuuugaaagaacuguuuuaacccuugccuauaccgcuuacagaacugcucuuucccaugggcaucagaaggacauuugggcucagagccuggucagccuguuccaagcucuuagacacgaccucaugcggaguagucaaccuggcgugccacccuag

SEQ ID NO: 263915 - RNA, 522 nt, Artificial Sequence
  derived and/or modified sequence
augcauuggaagaugcuccuccugcugcuauuguauuauaacgcugaagcaagcaugugucaccgcuggucuagggcgguccuguuuccagcugcccaccgaccaaagcguaguuccucccucccccugaaucccguccuccagacaucucucgaagaggucgaacuccucuacgaguuccuucucgccgagcucgaaauuagcccugaccugcagaucagcaucaaagaugaagaacucgcuucucuuagaaaggcuagcgacuuccgcacaguguguaauaaugucauuccuaagucaauucccgacauucggagauuguccgcaagccuuaguucccacccuggcauccucaaaaaagaagauuuugaacgaacgguguugacacuagcuuacacagccuacagaacggcucuaucacauggucaucaaaaggauauaugggcgcagucucugguaucuuuguuccaagcucuuaggcaugaucucaugcgcucaucacagcccggugucccuccuuag

SEQ ID NO: 263916 - RNA, 522 nt, Artificial Sequence
  derived and/or modified sequence
augcacuggaagauguugcuacuacuccuccuguauuacaacgcugaggccucuaugugccaccgcuggagucgggcaguccuguuucccgccgcacaucgaccgaaaagaaguuccagccucccgcuaaauccaguacugcaaacuucccucgaggaagucgaacuacuguaugaguuuuuguuggccgagcuugaaauuucccccgaccuacaaaucagcauaaaagacgaagagcuugcuagcuugagaaaagcauccgacuuucgaaccguaugcaacaaugugaucccgaagagcaucccggauauacgucguuuauccgccucucucagcucgcauccagguauucuaaaaaaagaagauuucgagcguaccguucuaacucuggccuacacugcguacagaacggcccuuagccacggacaccagaaagacaucugggcccagucauuaguguccuuauuucaagcacucaggcaugaucugaugagguccucacagccaggcgugccccccuag

SEQ ID NO: 263917 - RNA, 522 nt, Artificial Sequence
  derived and/or modified sequence
augcacuggaaaaugcuccugcugcuguuguuguacuacaaugcugaagcaucuaugugucacagguggagccgcgccguucuuuuccccgccgcacaccgaccuaaacguuccaguucccucccccucaauccgguccuacagacgucacucgaagagguagagcuucuuuaugaauuccugcuugccgagcuugagaucucuccugaccugcaaauuagcauuaaggaugaggagcucgccucccugcgaaaggccucagauuuuagaaccguuuguaacaaugugauuccuaaaaguauaccugacauccgaaggcuuuccgcgucccuuaguucucaccccggcauucugaaaaaagaggauuuugagcgaacaguuuugacucuggcguauacagcauaccgcacagcccucagccacgggcaucaaaaggauauaugggcacaaucccuggucagucucuuucaggcccuucgccacgacuuaaugcguuccucgcaaccaggcguuccgcccuag

SEQ ID NO: 263918 - protein, 154 aa, Artificial Sequence
  derived and/or modified sequence
MARRAGGARMFGSLLLFALLAAGVAPLSWDLPEPRSRASKIRVHSRGNLWATGHFMGKKSLEPSSPSPLGTAPHTSLRDQRLQLSHDLLGILLLKKALGVSLSRPAPQIQEAAGTNTAEMTPIMGQTQQRGLDCAHPGKVLNGTLLMAPSGCKS

SEQ ID NO: 263919 - DNA, 465 bp, Artificial Sequence
  derived and/or modified sequence
atggctcggcgagcaggaggggctagaatgtttggcagcttgctgctgttcgctctgttggccgcgggagtggcccctctctcctgggacctaccagaaccccggtcgagggcgagcaaaatcagagtccactcccgcggtaacctctgggctaccgggcacttcatggggaaaaaaagccttgagccaagctcgccatctcctctgggaacggctcctcatacttccctaagagaccaacgactccagctaagtcacgacctccttggcattctgctccttaagaaggccttgggtgtttcactgtcacgtcccgctccacaaatccaggaagcagctgggacaaacactgcggagatgacccctatcatgggccagacccagcagcggggcttggactgtgcccaccccggaaaagtgctgaacgggaccctgcttatggctccttccggatgtaaatcctag

SEQ ID NO: 263920 - DNA, 465 bp, Artificial Sequence
  derived and/or modified sequence
atggccaggagagctggaggagccaggatgtttggcagcctgctgctgtttgccctgctggccgccggcgtggcccccctgtcctgggacctgcctgagcccaggagccgggccagcaagatccgggtgcacagccggggcaacctgtgggccaccggccacttcatgggcaagaagagcctggagcccagcagccccagccccctgggcacagccccccacaccagcctgcgggaccagaggctgcagctgagccatgacctgctgggcatcctgctgctgaagaaggccctgggcgtgtccctgagcaggcctgccccccagatccaggaggccgccggcaccaacacagctgagatgacccccatcatgggccagacccagcagaggggcctggactgtgcccaccctgggaaggtgctgaatggcaccctgctgatggcccccagcggctgcaagagctag

SEQ ID NO: 263921 - DNA, 465 bp, Artificial Sequence
  derived and/or modified sequence
atggcccggcgggccggcggcgcccggatgttcggcagcctgctgctgtttgctctccttgcggccggtgtggccccactgtcatgggatctgcccgaacctcgtagtcgtgccagtaagattcgcgtccacagccgcggaaacctctgggccacgggccactttatgggtaagaagagtctggaaccttcttcacctagccccctcggcactgcaccccatacgtcgctgcgggatcagcgattgcagctgtcgcatgacttgctggggatcctacttctgaagaaagccctcggcgtatccctgtctcggcctgccccccaaatccaggaggccgccggaacgaatactgccgaaatgactccgatcatgggccagacccagcaaaggggcctggattgtgcacacccaggaaaagttctcaacggcactctgctgatggcacctagcggatgcaagagctag

SEQ ID NO: 263922 - DNA, 1007 bp, Artificial Sequence
  derived and/or modified sequence
gggctgaagtgcctatttggccgaaagccgtggcagagtggcaaggcagggccaggggaagcggctccgccgccggggccgggcccctgtttggccggtgcccggtccttagcctgaaggtggcgggcttccgccagaagcccctggcggaagcggtgcccgcgtgcgggccagagtgtgggtgtgcaggtctctgggcggcccaaagggggtgcccctgcctggtaacctagcgggagggtggggacggcggggagggcggcgggcgcggggcacggctccgctgctcagggcaggctccgcccccaggggcgcggatttaaaaggatcgaaggcagccccggagcccagcggccgggaagcgcgcccgaacgaagccgcggcccgggcacagccatggcccggcgggcggggggcgctcggatgttcggcagcctcctgctcttcgccctgctcgctgccggcgtcgccccgctcagctgggatctcccggagccccgcagccgagccagcaagatccgagtgcactcgcgaggcaacctctgggccaccggtcacttcatgggcaagaagagtctggagccttccagcccatccccattggggacagctccccacacctccctgagggaccagcgactgcagctgagtcatgatctgctcggaatcctcctgctaaagaaggctctgggcgtgagcctcagccgccccgcaccccaaatccagtacaggaggctgctggtacaaatactgcagaaatgacaccaataatggggcagacacaacagcgtggcttagattgtgcccacccagggaaggtgctgaatgggaccctgttgatggccccatctggatgtaaatcctgagctcaaatctctgttactccattactgtgatttctggctgggtcaccagaaatatcgctgatgcagacacagattatgttcctgctgtatttcctgcttccctgttgaattggtgaataaaaccttgctctttacatacaa

SEQ ID NO: 263923 - DNA, 1017 bp, Artificial Sequence
  derived and/or modified sequence
gaagagaggctcagagggctgaagtgcctatttggccgaaagccgtggcagagtggcaaggcagggccaggggaagcggctccgccgccggggccgggcccctgtttggccggtgcccggtccttagcctgaaggtggcgggcttccgccagaagcccctggcggaagcggtgcccgcgtgcgggccagagtgtgggtgtgcaggtctctgggcggcccaaagggggtgcccctgcctggtaacctagcgggagggtggggacggcggggagggcggcgggcgcggggcacggctccgctgctcagggcaggctccgcccccaggggcgcggatttaaaaggatcgaaggcagccccggagcccagcggccgggaagcgcgcccgaacgaagccgcggcccgggcacagccatggcccggcgggcggggggcgctcggatgttcggcagcctcctgctcttcgccctgctcgctgccggcgtcgccccgctcagctgggatctcccggagccccgcagccgagccagcaagatccgagtgcactcgcgaggcaacctctgggccaccggtcacttcatgggcaagaagagtctggagccttccagcccatccccattggggacagctccccacacctccctgagggaccagcgactgcagctgagtcatgatctgctcggaatcctcctgctaaagaaggctctgggcgtgagcctcagccgccccgcaccccaaatccaggaggctgctggtacaaatactgcagaaatgacaccaataatggggcagacacaacagcgtggcttagattgtgcccacccagggaaggtgctgaatgggaccctgttgatggccccatctggatgtaaatcctgagctcaaatctctgttactccattactgtgatttctggctgggtcaccagaaatatcgctgatgcagacacagattatgttcctgctgtatttcctgcttccctgttgaattggtgaataaaaccttgctctttacatacaa

SEQ ID NO: 263924 - DNA, 465 bp, Artificial Sequence
  derived and/or modified sequence
atggctagaagagctggcggagctaggatgtttggcagtctattactgttcgctctcctagctgctggcgtagcccctctgagttgggatctgccggagccccgtagtcgggcatccaagatccgggtgcacagccgcggaaacctctgggcaaccggtcattttatgggcaaaaaatctctcgagcccagtagccccagtccacttgggaccgcaccccacacctctttgcgggaccagcgccttcagctatctcatgatctcctgggaatacttctactcaagaaggctttgggcgtgtctctgtctcgtcccgctccacagatccaggaggcggctgggaccaacaccgccgaaatgacaccgattatggggcaaacacagcagagaggactggactgtgcacaccccggtaaggtgctgaacggaacccttctcatggccccttccggatgtaagagctag

SEQ ID NO: 263925 - DNA, 465 bp, Artificial Sequence
  derived and/or modified sequence
atggccagaagagccggcggcgccagaatgttcggcagcctgctgctgttcgccctgctggccgccggcgtggcccccctgagctgggacctgcccgagcccagaagcagagccagcaagatcagagtgcacagcagaggcaacctgtgggccaccggccacttcatgggcaagaagagcctggagcccagcagccccagccccctgggcaccgccccccacaccagcctgagagaccagagactgcagctgagccacgacctgctgggcatcctgctgctgaagaaggccctgggcgtgagcctgagcagacccgccccccagatccaggaggccgccggcaccaacaccgccgagatgacccccatcatgggccagacccagcagagaggcctggactgcgcccaccccggcaaggtgctgaacggcaccctgctgatggcccccagcggctgcaagagctag

SEQ ID NO: 263926 - protein, 541 aa, Artificial Sequence
  derived and/or modified sequence
MSSNSDTGDLQESLKHGLTPIGAGLPDRHGSPIPARGRLVMLPKVETEALGLARSHGEQGQMPENMQVSQFKMVNYSYDEDLEELCPVCGDKVSGYHYGLLTCESCKGFFKRTVQNNKRYTCIENQNCQIDKTQRKRCPYCRFQKCLSVGMKLEAVRADRMRGGRNKFGPMYKRDRALKQQKKALIRANGLKLEAMSQVIQAMPSDLTISSAIQNIHSASKGLPLNHAALPPTDYDRSPFVTSPISMTMPPHGSLQGYQTYGHFPSRAIKSEYPDPYTSSPESIMGYSYMDSYQTSSPASIPHLILELLKCEPDEPQVQAKIMAYLQQEQANRSKHEKLSTFGLMCKMADQTLFSIVEWARSSIFFRELKVDDQMKLLQNCWSELLILDHIYRQVVHGKEGSIFLVTGQQVDYSIIASQAGATLNNLMSHAQELVAKLRSLQFDQREFVCLKFLVLFSLDVKNLENFQLVEGVQEQVNAALLDYTMCNYPQQTEKFGQLLLRLPEIRAISMQAEEYLYYKHLNGDVPYNNLLIEMLHAKRA

SEQ ID NO: 263927 - protein, 71 aa, Artificial Sequence
  derived and/or modified sequence
  misc_feature (1)..(1): Xaa can be any naturally occurring amino acid
XSLKHGLTPIDRGNCRSGCFSFAATLRQRSLLTSCAGLPDRHGSPIPARGRLVMLPKVETEALGLARSHGE

SEQ ID NO: 263928 - protein, 82 aa, Artificial Sequence
  derived and/or modified sequence
MSSNSDTGDLQESLKHGLTPIDRGNCRSGCFSFAATLRQRSLLTSCAGLPDRHGSPIPARGRLVMLPKVETEALGLARSHGE

SEQ ID NO: 263929 - DNA, 1626 bp, Artificial Sequence
  derived and/or modified sequence
atgagttctaactctgacacaggtgatctccaggaatccctgaaacacggccttacccctattggcgccggactccctgatcggcatggttcgccgatacctgcccgaggtcggttagtcatgctcccaaaagttgagaccgaagccttgggcttggcaaggtcccatggcgagcaaggacagatgccggagaacatgcaggttagccagtttaagatggtcaactatagctatgatgaggacttggaggagctctgccctgtgtgcggtgataaggtgtctggttaccactacgggctgctgacatgcgagtcatgcaaaggattctttaagaggacagtgcagaataataagcgatatacttgcatcgaaaatcagaattgccagatagacaagactcagcgaaagaggtgcccatattgtaggttccagaaatgcttgtcggtcggaatgaagttggaggctgtccgggccgatcgaatgaggggaggcagaaacaaatttggacccatgtacaagagagatcgcgcgttaaaacagcagaagaaggctctcattcgggcaaacggactgaaacttgaagccatgagccaagttatccaggccatgcctagcgacctgactatcagctctgccatccagaacatccatagtgcgagtaaaggattgccgcttaaccacgccgccttgccacccaccgattacgataggtctccgttcgttactagccccattagtatgaccatgcctccacacggtagccttcagggataccaaacttacggccactttcccagcagggctatcaagagcgagtacccagatccttacacatcatcacctgaaagtattatgggctactcctacatggattcttatcagacatctagccccgccagcattccgcatcttattctggaactcctgaagtgtgaaccggatgagccacaggtgcaggccaagatcatggcttacctgcagcaggagcaagccaatcggtcgaaacacgagaagcttagcactttcggtttgatgtgcaaaatggctgaccagacattgttcagtatcgtggagtgggccagaagttcaatcttctttagggagcttaaggtggatgaccagatgaagctgcttcagaattgctggtccgagctactgatactcgaccacatctaccgacaggtggtccatggcaaggaggggtcaatttttcttgtaaccgggcaacaggtggactattccatcattgcgtcacaggccggagccactctcaataacctgatgtcacatgctcaggagctcgtggctaaactacgttccctgcagttcgaccagagagagttcgtgtgcctcaagttcctcgtgttgttttcgttagacgtaaagaatctcgagaacttccaactggtggagggcgttcaggagcaggtgaacgccgctctgctggactataccatgtgcaattatccccagcagaccgagaagtttgggcaactgttgttgaggttgcccgagatcagggccatctcgatgcaggcggaagagtacctgtattacaaacaccttaacggagacgttccttacaataacctgttaatcgaaatgcttcacgctaagcgtgcgtag

SEQ ID NO: 263930 - DNA, 216 bp, Artificial Sequence
  derived and/or modified sequence
tgatctctgaaacacggtctcactcccattgatcgcggcaattgtagaagcggctgtttcagtttcgcagctaccctgaggcagcgcagtctgctgaccagctgtgctggcctgccagatcgccacggaagtcccattcccgcccgaggccgacttgtgatgttgcccaaagttgaaaccgaggctctaggcctggctagatcacatggcgagtag

SEQ ID NO: 263931 - DNA, 66 bp, Artificial Sequence
  derived and/or modified sequence
atgtcaagcaactccgatacaggggacctccaagagtccctcaagcacgggctcacgccaatctag

SEQ ID NO: 263932 - DNA, 249 bp, Artificial Sequence
  derived and/or modified sequence
atgagttcgaattctgatactggggaccttcaggaatctctgaaacacgggctgactcccatcgacaggggaaattgtcgcagtggctgcttttcatttgcggcaacactgcggcagcgatctctcttgacgtcctgtgcaggcctgcccgaccgacacggctcccctattccagctagaggcagactcgtgatgcttccaaaggtggagacagaggcactcgggcttgcacgctcacatggcgagtag

SEQ ID NO: 263933 - DNA, 1410 bp, Artificial Sequence
  derived and/or modified sequence
atggttaattatagttatgatgaggatctcgaggagctgtgccctgtgtgcggcgataaagtatctggttatcattatgggctactgacttgcgaaagttgtaagggattctttaaacgtacagtgcagaacaataagcgctacacctgcatagagaatcagaattgtcagattgacaaaacacagagaaagcgctgtccttattgccgtttccagaaatgtttaagcgtaggcatgaaactcgaggcagtgcgagcagatcgcatgcggggtggtcgaaataaatttggaccgatgtacaagcgggacagagccttgaaacagcagaagaaagctctgattagagccaacggacttaagcttgaagcaatgagtcaagtgattcaggcaatgccctcggatctcacgatttcgtcagctattcagaatatacattcagcttccaaagggttgcccttgaatcacgccgcgcttccccctaccgattacgacagatcaccttttgttacttcccccatctctatgactatgccacctcacggatcactccaaggctatcagacctacggccattttccgagtcgggccataaaatcagagtatcctgacccctacacaagctctccagaatccatcatgggctactcttatatggacagctaccagacttcatctcccgcctcgattcctcatttgatattggagctgctgaagtgcgaaccagacgaacctcaggtccaggcaaagatcatggcctacctgcagcaagaacaggccaaccggtcaaagcacgaaaaactctccacgtttggactgatgtgcaaaatggctgaccagaccttgttctccattgtggaatgggcccgaagctctatcttttttagagaacttaaagttgacgaccagatgaaactcctgcagaattgctggagcgaactcctgatcctggaccacatctatcgccaagtggtgcacggtaaggagggctctatctttcttgtgacaggccaacaggtggattactctatcatcgcctctcaagctggcgccacattgaataacctgatgagtcacgcacaggaactggtggccaaattacggagccttcagttcgatcaacgagaatttgtctgtctgaagtttcttgtattattttcccttgacgtaaaaaatctcgaaaacttccagctcgtggagggcgtccaagaacaggtaaacgcggcactccttgactacacaatgtgtaattacccacagcagaccgaaaaatttggacagctgctgctgagattgcctgagatcagggccatttccatgcaagccgaggaatacctgtactacaagcacctcaatggcgacgtcccttataacaacttgctgattgagatgctgcacgcaaagcgagcatag

SEQ ID NO: 263934 - DNA, 1626 bp, Artificial Sequence
  derived and/or modified sequence
atgagcagcaacagcgacacaggagacctgcaggagagcctgaagcacggcctgacccccatcggggccggcctgcctgacagacatggcagccccatcccagcccggggccgcctggtgatgctgcccaaggtggagacagaggccctgggcctggcccggagccacggggagcagggccagatgcctgagaacatgcaggtgtcccagttcaagatggtgaactacagctatgatgaggacctggaggagctgtgccctgtgtgtggggacaaggtgtctggctaccactacggcctgctgacctgtgagagctgcaagggcttcttcaagaggacagtgcagaacaacaagcgctacacctgcatcgagaaccagaactgccagattgacaagacccagaggaagcgctgcccctactgccgcttccagaagtgcctgtctgtgggcatgaagctggaggccgtgcgggctgacaggatgagaggaggaagaaacaagtttggccccatgtacaagagggaccgggccctgaagcagcagaagaaggccctgatccgggccaacggcctgaagctggaggccatgagccaggtgatccaggccatgcccagcgacctgaccatcagcagcgccatccagaacatccacagcgccagcaagggcctgcccctgaaccacgccgccctgcccccaacagattatgacaggagcccctttgtgaccagccccatctccatgaccatgccaccccacggcagcctgcagggctaccagacctacggccacttccccagccgggccatcaagtctgagtacccagacccctacaccagcagccctgagagcatcatgggctacagctacatggacagctaccagaccagcagccctgccagcatcccccacctgatcctggagctgctgaagtgtgagccagatgagccccaggtgcaggccaagatcatggcctacctgcagcaggagcaggccaacagaagcaagcatgagaagctgagcaccttcggcctgatgtgcaagatggctgaccagaccctcttcagcatcgtggagtgggcccggagcagcatcttcttccgggagctgaaggtggatgaccagatgaagctgctgcagaactgctggagcgagctgctgatcctggaccacatctaccggcaggtggtgcacggcaaggagggcagcatcttcctggtgacaggccagcaggtggactacagcatcatcgccagccaggccggggccaccctgaacaacctgatgagccacgcccaggagctggtggccaagctgcggagcctgcagtttgaccagcgggagtttgtgtgcctgaagttcctggtgctcttcagcctggatgtgaagaacctggagaacttccagctggtggagggcgtgcaggagcaggtgaatgctgccctgctggactacaccatgtgcaactacccccagcagacagagaagtttggccagctgctgctgcggctgcctgagatccgggccatctccatgcaggccgaggagtacctgtactacaagcacctgaatggagatgtgccctacaacaacctgctgattgagatgctgcacgccaagagggcctag

SEQ ID NO: 263935 - DNA, 216 bp, Artificial Sequence
  derived and/or modified sequence
tgaagcctgaagcacggcctgacccccatcgaccggggcaactgccgcagcggctgcttctcctttgctgccaccctgcggcagaggagcctgctgaccagctgtgccggcctgcctgacagacatggcagccccatcccagcccggggccgcctggtgatgctgcccaaggtggagacagaggccctgggcctggcccggagccatggagagtag

SEQ ID NO: 263936 - DNA, 66 bp, Artificial Sequence
  derived and/or modified sequence
atgagcagcaacagcgacacaggagacctgcaggagagcctgaagcacggcctgacccccatctag

SEQ ID NO: 263937 - DNA, 249 bp, Artificial Sequence
  derived and/or modified sequence
atgagcagcaacagcgacacaggagacctgcaggagagcctgaagcacggcctgacccccatcgaccggggcaactgccgcagcggctgcttctcctttgctgccaccctgcggcagaggagcctgctgaccagctgtgccggcctgcctgacagacatggcagccccatcccagcccggggccgcctggtgatgctgcccaaggtggagacagaggccctgggcctggcccggagccacggggagtag

SEQ ID NO: 263938 - DNA, 1410 bp, Artificial Sequence
  derived and/or modified sequence
atggtgaactacagctatgatgaggacctggaggagctgtgccctgtgtgtggggacaaggtgtctggctaccactacggcctgctgacctgtgagagctgcaagggcttcttcaagaggacagtgcagaacaacaagcgctacacctgcatcgagaaccagaactgccagattgacaagacccagaggaagcgctgcccctactgccgcttccagaagtgcctgtctgtgggcatgaagctggaggccgtgcgggctgacaggatgagaggaggaagaaacaagtttggccccatgtacaagagggaccgggccctgaagcagcagaagaaggccctgatccgggccaacggcctgaagctggaggccatgagccaggtgatccaggccatgcccagcgacctgaccatcagcagcgccatccagaacatccacagcgccagcaagggcctgcccctgaaccacgccgccctgcccccaacagattatgacaggagcccctttgtgaccagccccatctccatgaccatgccaccccacggcagcctgcagggctaccagacctacggccacttccccagccgggccatcaagtctgagtacccagacccctacaccagcagccctgagagcatcatgggctacagctacatggacagctaccagaccagcagccctgccagcatcccccacctgatcctggagctgctgaagtgtgagccagatgagccccaggtgcaggccaagatcatggcctacctgcagcaggagcaggccaacagaagcaagcatgagaagctgagcaccttcggcctgatgtgcaagatggctgaccagaccctcttcagcatcgtggagtgggcccggagcagcatcttcttccgggagctgaaggtggatgaccagatgaagctgctgcagaactgctggagcgagctgctgatcctggaccacatctaccggcaggtggtgcacggcaaggagggcagcatcttcctggtgacaggccagcaggtggactacagcatcatcgccagccaggccggggccaccctgaacaacctgatgagccacgcccaggagctggtggccaagctgcggagcctgcagtttgaccagcgggagtttgtgtgcctgaagttcctggtgctcttcagcctggatgtgaagaacctggagaacttccagctggtggagggcgtgcaggagcaggtgaatgctgccctgctggactacaccatgtgcaactacccccagcagacagagaagtttggccagctgctgctgcggctgcctgagatccgggccatctccatgcaggccgaggagtacctgtactacaagcacctgaatggagatgtgccctacaacaacctgctgattgagatgctgcacgccaagagggcctag

SEQ ID NO: 263939 - DNA, 1626 bp, Artificial Sequence
  derived and/or modified sequence
atgagcagcaacagcgacaccggcgacctgcaggagagcctgaagcacggccttactcctatcggtgcaggcctccctgatcggcacggatctcccatccccgctagaggcagattagttatgcttccgaaggtagagaccgaagctctagggttagctcggtcacacggagagcaagggcagatgcccgagaacatgcaggtgtcccaatttaagatggttaactacagttacgacgaggatttggaggagctgtgtcccgtgtgcggggacaaagtctctggataccactacggcctgttgacatgcgagtcctgtaaggggttttttaagcgtaccgtccagaataataagcgatatacgtgcatcgaaaatcagaattgtcaaatcgacaaaacccaacgcaagagatgtccttattgtagatttcagaaatgcctgtctgtgggaatgaagttggaggcagttagagcagatcgtatgcggggtgggaggaataaatttggacccatgtacaaaagagacagggcactgaagcagcaaaaaaaagcattgatacgagctaatggactcaagctggaagccatgtcgcaggtgatccaggccatgccctccgatctgacgatctcaagtgcaatccagaatatccattctgcatcaaaagggctacctctaaaccatgcggccctcccccctacagactatgataggtcaccgtttgtgacttccccgatctccatgacgatgccaccacacgggtctttgcaaggctaccagacttacggtcacttcccctcgcgcgcgattaagagtgagtacccagacccgtacacgagcagtccagagtcaattatggggtacagttacatggacagctaccagaccagctcgcccgccagtataccccatttaatcctcgaattgctcaagtgcgagcctgatgaaccacaggttcaggcgaaaattatggcctatctgcaacaagagcaagcgaatagaagcaagcacgagaagctgtccacctttggcttaatgtgtaagatggctgatcaaactctgttcagcattgtggaatgggccagatcatcaattttttttcgtgaactcaaggtggatgaccagatgaagttgctgcaaaactgctggtctgagctattgatcctggatcacatctacagacaagtagtacacggcaaggaaggatcgatattcctggtgacaggacagcaggtagactacagcataatcgccagccaagccggagccacactgaacaatctaatgagccacgctcaggaactcgtggctaaactgcggtctctccaattcgatcagagggaattcgtgtgtctgaagttcttggtgttgttttcccttgatgtcaaaaatctggaaaatttccagctggtggagggtgtgcaggagcaggtgaacgccgctctgttggactacactatgtgcaactaccctcagcagaccgagaaattcggccagctcctgctacgcttgccagagattcgtgctatatcaatgcaggctgaagagtacctgtattacaagcacctgaatggggacgtcccttataataacctacttatcgagatgttgcacgccaagcgggcctag

SEQ ID NO: 263940 - DNA, 216 bp, Artificial Sequence
  derived and/or modified sequence
tgaagcctgaagcacggcctgacccccatcgaccggggcaactgcaggtccgggtgcttcagttttgccgctacactgaggcaacggagcctgttaactagctgcgcaggcctccccgatagacatggtagccccatcccagccaggggaaggctggtaatgctgcctaaagtcgagaccgaagctttagggttggctcgctcacatggcgaatag

SEQ ID NO: 263941 - DNA, 66 bp, Artificial Sequence
  derived and/or modified sequence
atgagcagcaacagcgacaccggcgacctgcaggagagcctgaagcacggtctgacacctatctag

SEQ ID NO: 263942 - DNA, 249 bp, Artificial Sequence
  derived and/or modified sequence
atgagcagcaacagcgacaccggcgacctgcaggagagcctgaagcacggtcttactcccattgataggggaaattgccggagcggatgcttttcatttgctgccactctccgccagaggtcattactaactagctgcgccggcctcccagacagacatggctccccaattcctgcaagggggagactggtgatgctacctaaggtggaaactgaggcgttggggctcgcacgaagccatggcgagtag

SEQ ID NO: 263943 - DNA, 1410 bp, Artificial Sequence
  derived and/or modified sequence
atggtgaactacagctacgacgaggacctggaggagctgtgccccgtgtgcggagacaaggtgtctggctatcattatggtctgcttacctgcgagtcttgtaagggtttttttaagcggacagttcagaacaacaaacggtatacctgcattgagaaccagaattgtcagatcgataagacccagaggaagcgctgtccttattgtagattccagaaatgcctcagtgttggcatgaagctggaggccgttcgcgctgataggatgaggggaggccgcaataaatttgggccaatgtacaaaagagatagagccctcaagcaacagaaaaaggctctaatccgggcgaacggcctaaaactagaagccatgagccaagtgattcaagctatgcccagtgacttgacaatcagtagcgcgatccagaacatccattcagcctcaaaaggactgcccctgaatcacgctgctcttccaccaacagattatgacagaagtccttttgtgacctcacccataagtatgacaatgcccccccatgggagcttacagggttaccaaacttacggccacttcccctcacgtgcaatcaaaagtgaataccctgacccttacacgagcagtcccgagtcaataatgggttacagctacatggattcctaccagaccagctctccagcctcgatcccacaccttatcctcgaactgctgaaatgcgaaccagacgaaccacaggttcaggctaaaatcatggcataccttcagcaagaacaggctaatcggtcaaagcatgagaagctctctacctttggactgatgtgtaaaatggccgaccagacgttgttctccatagtggagtgggcgcgatccagcatcttcttcagggagctgaaggttgatgaccagatgaaactgcttcaaaactgttggagcgaactcctgatcctggatcatatatatcgccaggtggtgcatgggaaggagggctctattttcttggtgaccggtcagcaagtagattatagcatcattgctagccaggcaggggccactctgaataatctcatgagccacgcacaggaactcgtagctaaactgcgtagcttacagtttgaccagcgggagtttgtgtgtctcaagttcttggtgctgttctcccttgacgtgaagaatctggagaatttccagctcgttgagggagtccaggagcaggtaaatgctgccctgctggactatactatgtgtaactacccccaacaaacggaaaaattcggccagctcctcctgcggctgccagagatccgagctatctctatgcaggccgaggagtacctttattataaacatctaaatggcgatgtcccatataacaacctcctgatagaaatgctccacgccaagagagcttag

SEQ ID NO: 263944 - DNA, 5086 bp, Artificial Sequence
  derived and/or modified sequence
gaaactggatacatggtttacagcaggtcactaatgttggaaaaagtacagagtccagggaaagacttgcttgtaactttatgaattctggatttttttttttcctttgctttttcttaactttcactaagggttactgtagtctgatgtgtccttcccaaggccacgaaatttgacaagctgcacttttcttttgctcaatgatttctgctttaagccaaagaactgcctataatttcactaagaatgtcttctaattcagatactggggatttacaagagtctttaaagcacggacttacacctattggtgctgggcttccggaccgacacggatcccccatccccgcccgcggtcgccttgtcatgctgcccaaagtggagacggaagccctgggactggctcgatcgcatggggaacagggccagatgccggaaaacatgcaagtgtctcaatttaaaatggtgaattactcctatgatgaagatctggaagagctttgtcccgtgtgtggagataaagtgtctgggtaccattatgggctcctcacctgtgaaagctgcaagggattttttaagcgaacagtccaaaataataaaaggtacacatgtatagaaaaccagaactgccaaattgacaaaacacagagaaagcgttgtccttactgtcgttttcaaaaatgtctaagtgttggaatgaagctagaagctgtaagggccgaccgaatgcgtggaggaaggaataagtttgggccaatgtacaagagagacagggccctgaagcaacagaaaaaagccctcatccgagccaatggacttaagctagaagccatgtctcaggtgatccaagctatgccctctgacctgaccatttcctctgcaattcaaaacatccactctgcctccaaaggcctacctctgaaccatgctgccttgcctcctacagactatgacagaagtccctttgtaacatcccccattagcatgacaatgccccctcacggcagcctgcaaggttaccaaacatatggccactttcctagccgggccatcaagtctgagtacccagacccctataccagctcacccgagtccataatgggctattcatatatggatagttaccagacgagctctccagcaagcatcccacatctgatactggaacttttgaagtgtgagccagatgagcctcaagtccaggctaaaatcatggcctatttgcagcaagagcaggctaaccgaagcaagcacgaaaagctgagcacctttgggcttatgtgcaaaatggcagatcaaactctcttctccattgtcgagtgggccaggagtagtatcttcttcagagaacttaaggttgatgaccaaatgaagctgcttcagaactgctggagtgagctcttaatcctcgaccacatttaccgacaagtggtacatggaaaggaaggatccatcttcctggttactgggcaacaagtggactattccataatagcatcacaagccggagccaccctcaacaacctcatgagtcatgcacaggagttagtggcaaaacttcgttctctccagtttgatcaacgagagttcgtatgtctgaaattcttggtgctctttagtttagatgtcaaaaaccttgaaaacttccagctggtagaaggtgtccaggaacaagtcaatgccgccctgctggactacacaatgtgtaactacccgcagcagacagagaaatttggacagctacttcttcgactacccgaaatccgggccatcagtatgcaggctgaagaatacctctactacaagcacctgaacggggatgtgccctataataaccttctcattgaaatgttgcatgccaaaagagcataagttacaacccctaggagctctgctttcaaaacaaaaagagattgggggagtggggagggggaagaagaacaggaagaaaaaaagtactctgaactgctccaagtaacgctaattaaaaacttgctttaaagatattgaatttaaaaaggcataataatcaaatacttaatagcaaataaatgatgtatcagggtatttgtattgcaaactgtgaatcaaaggcttcacagccccagaggattccatataaaagacattgtaatggagtggattgaactcacagatggataccaacacggtcagaagaaaaacggacagaacggttcttgtatatttaaactgatctccactatgaagaaatttaggaactaatcttattaattaggcttatacagcgggggatttgagcttacaggattcctccatggtaaagctgaactgaaacaattctcaagaatgcatcagctgtacctacaatagcccctccctcttcctttgaaggccccagcacctctgccctgtggtcaccgaatctgtactaaggacctgtgttcagccacacccagtggtagctccaccaaatcatgaacagcctaattttgagtgtctgtgtcttagacctgcaaacagctaataggaaattctattaatatgttagcttgccattttaaatatgttctgagggttgttttgtctcgtgttcatgatgttaagaaaatgcaggcagtatccctcatcttatgtaagtgttaattaatattaagggaaatgactacaaactttcaaagcaaatgctccatagctaaagcaacttagaccttatttctgctactgttgctgaaatgtggctttggcattgttggatttcataaaaaatttctggcaggaagtcttgttagtatacatcagtctttttcatcatccaagtttgtagttcatttaaaaatacaacattaaacacattttgctaggatgtcaaatagtcacagttctaagtagttggaaacaaaattgacgcatgttaatctatgcaaagagaaaggaaaggatgaggtgatgtattgactcaaggttcattcttgctgcaattgaacatcctcaagagttgggatggaaatggtgatttttacatgtgtcctggaaagatattaaagtaattcaaatcttccccaaaggggaaaggaagagagtgatactgacctttttaagtcatagaccaaagtctgctgtagaacaaatatgggaggacaaagaatcgcaaattcttcaaatgactattatcagtattattaacatgcgatgccacaggtatgaaagtcttgccttatttcacaattttaaaaggtagctgtgcagatgtggatcaacatttgtttaaaataaagtattaatactttaaagtcaaataagatatagtgtttacattctttaggtcctgaggggcagggggatctgtgatataacaaaatagcaaaagcggtaatttccttaatgttatttttctgattggtaattatttttaacagtacttaattattctatgtcgtgagacactaaaatcaaaaacgggaatctcatttagactttaatttttttgagattatcggcggcacaatcactttgtagaaactgtaaaaaataaaagtatctcctagtcccttaattttttcataaatatttctggcttttgagtagtgtatttatattgtatatcatactttcaactgtagacaattatgatgctaatttattgtttcttggtttcacctttgtataagatatagccaagactgaagaaaccaaatatatgtgtttactgtagcatgtcttcaaattagtggaacttagttcagggacatagaagagtcttaatgaattaaaatcattcacttgattaaatgtctgtaaatcttcatcattcctactgtagtttatttaatatctattgtaaattatgtgacttgtagcttcctctggttttcaagtaaactcaacaaggtggagtcttacctggttttcctttccaagcattgtaaattgtataccaaagatattagttattacttctgtgtgtacaaagaggattattttattatgtttattaatcacctctaatactcatccacatgaagggtacacattaggtaagctgggcgttgactcatgcgcagtctcagtcacccgtgttatcttcgtggctcaaaggacaatgcaaaatcgccgatcagagctcatacccaaagcattacagagaacagcagcatcattgccctccccagctgaaaaacaagttggctagaagatacatggagaggaatggtgtggtcaacagttaatgaaacggttctatcatgcatgtgtaatgtggatggagacaattataagatttgactataactatttggagggtctttaacattgccaaaaaaacaaatatgttgatttttattttattttattttttattttaagaggcgggatcttgatctcacatgttgcccaggctggccttgaactcctgggctcaagcattcctcctgcctcagcctcccccatagctgggactaggggtgcatgccagcatacctggctacgttgactcttaaaatctatgttctcttattttaaagatacagtgctccccactgaaaattaaacctaaaaaatgtcacatattggtatgttgttaacctggtagattaaatcatgagaatgattagaaagacgggcaacacagcgggttacatccacactgctgatcacaccaacgacaggagctgataagcaagaaagcgtcacagccagcgtctgttcacccaaggttgacaagtgaagtttctctaatgttgattgttagccgatttgtaacctggcatttacttagcaactgccttatcaattacaggatttgccggtaaaagcagactcaaatataaaggtttttggcttaacttggtttattatagttgctctatgtttgtaaacagacaatctctaatgtctgattatttgtatcacagatctgcagctgccttggacttgaatccatgcaatgtttagagtgtgaagtcagttacttgttgatgttttcttactgtatcaatgaaatacatattgtcatgtcagttcttgccaggaacttctcaacaaaatggaattttttttttcagtatttcaataaatattgatatgcccagcctgataatttttaaaa

SEQ ID NO: 263945 - DNA, 213 bp, Artificial Sequence
  derived and/or modified sequence
gtctttaaagcacggacttacacctattgatcgaggaaattgccgctctggctgcttctccttcgccgccacgctcagacagaggtcgcttctgactagctgtgctgggcttccggaccgacacggatcccccatccccgcccgcggtcgccttgtcatgctgcccaaagtggagacggaagccctgggactggctcgatcgcatggggaaca

SEQ ID NO: 263946 - DNA, 1698 bp, Artificial Sequence
  derived and/or modified sequence
atgtcttctaattcagatactggggatttacaagagtctttaaagcacggacttacacctattgatcgaggaaattgccgctctggctgcttctccttcgccgccacgctcagacagaggtcgcttctgactagctgtgctgggcttccggaccgacacggatcccccatccccgcccgcggtcgccttgtcatgctgcccaaagtggagacggaagccctgggactggctcgatcgcatggggaacagggccagatgccggaaaacatgcaagtgtctcaatttaaaatggtgaattactcctatgatgaagatctggaagagctttgtcccgtgtgtggagataaagtgtctgggtaccattatgggctcctcacctgtgaaagctgcaagggattttttaagcgaacagtccaaaataataaaaggtacacatgtatagaaaaccagaactgccaaattgacaaaacacagagaaagcgttgtccttactgtcgttttcaaaaatgtctaagtgttggaatgaagctagaagctgtaagggccgaccgaatgcgtggaggaaggaataagtttgggccaatgtacaagagagacagggccctgaagcaacagaaaaaagccctcatccgagccaatggacttaagctagaagccatgtctcaggtgatccaagctatgccctctgacctgaccatttcctctgcaattcaaaacatccactctgcctccaaaggcctacctctgaaccatgctgccttgcctcctacagactatgacagaagtccctttgtaacatcccccattagcatgacaatgccccctcacggcagcctgcaaggttaccaaacatatggccactttcctagccgggccatcaagtctgagtacccagacccctataccagctcacccgagtccataatgggctattcatatatggatagttaccagacgagctctccagcaagcatcccacatctgatactggaacttttgaagtgtgagccagatgagcctcaagtccaggctaaaatcatggcctatttgcagcaagagcaggctaaccgaagcaagcacgaaaagctgagcacctttgggcttatgtgcaaaatggcagatcaaactctcttctccattgtcgagtgggccaggagtagtatcttcttcagagaacttaaggttgatgaccaaatgaagctgcttcagaactgctggagtgagctcttaatcctcgaccacatttaccgacaagtggtacatggaaaggaaggatccatcttcctggttactgggcaacaagtggactattccataatagcatcacaagccggagccaccctcaacaacctcatgagtcatgcacaggagttagtggcaaaacttcgttctctccagtttgatcaacgagagttcgtatgtctgaaattcttggtgctctttagtttagatgtcaaaaaccttgaaaacttccagctggtagaaggtgtccaggaacaagtcaatgccgccctgctggactacacaatgtgtaactacccgcagcagacagagaaatttggacagctacttcttcgactacccgaaatccgggccatcagtatgcaggctgaagaatacctctactacaagcacctgaacggggatgtgccctataataaccttctcattgaaatgttgcatgccaaaagagcataa

SEQ ID NO: 263947 - DNA, 1852 bp, Artificial Sequence
  derived and/or modified sequence
gtgtttgtgcgccgttgggtagcaggaggtagagcctaggcgagagcctggtgcgcccacgggtttcgccgaagagtgcccgggggagtgcgggcagggtcccggctgcgcagacctgcgggtgcccgcccacccgcgccccgcgctcccatacttgacctgtgtggatgtggagtctccgggaaataccggatcaggcacttcctggggtctcctggtcactgcccttcctgtgcatagtttgtcatctttttagctgcgaagacgccttcgtgggtctgcgtccggagcaaggcggttacccgatcccggcagtgagccgcgccgcgcgtcgtggcggcctgatttctgtttaactttaatagggcgatctcgagtgtctcaatttaaaatggtgaattactcctatgatgaagatctggaagagctttgtcccgtgtgtggagataaagtgtctgggtaccattatgggctcctcacctgtgaaagctgcaagggattttttaagcgaacagtccaaaataataaaaggtacacatgtatagaaaaccagaactgccaaattgacaaaacacagagaaagcgttgtccttactgtcgttttcaaaaatgtctaagtgttggaatgaagctagaagctgtaagggccgaccgaatgcgtggaggaaggaataagtttgggccaatgtacaagagagacagggccctgaagcaacagaaaaaagccctcatccgagccaatggacttaagctagaagccatgtctcaggtgatccaagctatgccctctgacctgaccatttcctctgcaattcaaaacatccactctgcctccaaaggcctacctctgaaccatgctgccttgcctcctacagactatgacagaagtccctttgtaacatcccccattagcatgacaatgccccctcacggcagcctgcaaggttaccaaacatatggccactttcctagccgggccatcaagtctgagtacccagacccctataccagctcacccgagtccataatgggctattcatatatggatagttaccagacgagctctccagcaagcatcccacatctgatactggaacttttgaagtgtgagccagatgagcctcaagtccaggctaaaatcatggcctatttgcagcaagagcaggctaaccgaagcaagcacgaaaagctgagcacctttgggcttatgtgcaaaatggcagatcaaactctcttctccattgtcgagtgggccaggagtagtatcttcttcagagaacttaaggttgatgaccaaatgaagctgcttcagaactgctggagtgagctcttaatcctcgaccacatttaccgacaagtggtacatggaaaggaaggatccatcttcctggttactgggcaacaagtggactattccataatagcatcacaagccggagccaccctcaacaacctcatgagtcatgcacaggagttagtggcaaaacttcgttctctccagtttgatcaacgagagttcgtatgtctgaaattcttggtgctctttagtttagatgtcaaaaaccttgaaaacttccagctggtagaaggtgtccaggaacaagtcaatgccgccctgctggactacacaatgtgtaactacccgcagcagacagagaaatttggacagctacttcttcgactacccgaaatccgggccatcagtatgcaggctgaagaatacctctactacaagcacctgaacggggatgtgccctataataaccttctcattgaaatgttgcatgccaaaagagcataagttacaacccctaggagctctgctttcaaaacaaaaagagattgggggagt

SEQ ID NO: 263948 - DNA, 1626 bp, Artificial Sequence
  derived and/or modified sequence
atgtccagcaacagcgacacaggcgacctgcaggagagtctaaagcatggcctgacacccatcggggcaggattgccagataggcatggatcacctataccagcacgcggacgccttgttatgctgccaaaagtggaaacagaagcgctgggactcgcgcgatctcatggagaacagggccagatgcctgagaatatgcaagtatcccagttcaaaatggttaattactcctacgacgaggacctggaagagctttgtcccgtgtgcggggacaaggtgagcggctatcactacggactcttaacttgtgaatcttgcaagggcttctttaagcgaacggtgcagaacaacaaaagatacacctgtatcgagaatcagaattgccaaattgacaagacccagagaaaaagatgcccatattgtcgctttcagaaatgcctctcagtggggatgaagctcgaggccgttcgagcggaccggatgagggggggacggaataaatttggccctatgtataagcgggatcgcgcactgaaacagcagaaaaaggcactgattagagccaatggactgaagctcgaggccatgtctcaggtgattcaggccatgccgtctgatctgacaataagttccgccatccagaacattcactcagcctccaaaggacttcccttgaaccacgctgccctgcctcctacagattatgatcggagcccgttcgtgacaagccccatttctatgacaatgccccctcatggttctctccaggggtatcagacctacggtcattttcctagcagagcgatcaagagcgaatatccagacccctacacatcgtcccccgaatccatcatggggtactcatacatggatagttaccagacgtcctcccctgcttcaattccccaccttatcctggaactgttgaaatgcgagccagacgagccgcaggtgcaggcgaaaataatggcttacctccagcaagagcaggccaatagatctaagcatgagaaacttagtacctttggattgatgtgtaaaatggccgatcagactctgttcagcattgtcgagtgggcacgcagttccattttttttagggagctgaaggtcgacgaccagatgaagctgctgcagaactgctggtcagagctgctcatcctggatcacatctaccgacaggtcgttcacgggaaagagggctctattttccttgtgacaggacaacaggtagattatagtatcattgctagtcaggctggcgctacgctcaacaacttgatgagccatgcccaggagctggtagccaagttgcgatctcttcaattcgatcagagggagttcgtgtgcttgaaattcctggtgctgtttagcttggacgtcaagaatcttgagaacttccagctcgtggaaggggtccaggaacaagtaaatgccgctctactggactacactatgtgcaattatccccagcagaccgagaagtttggccagttgctgctccgcctgccggagatccgggctatatcgatgcaggccgaagaatatctctattacaagcacttgaatggcgatgtaccctataataaccttctaatcgagatgctccacgccaaacgggcttag

SEQ ID NO: 263949 - DNA, 216 bp, Artificial Sequence
  derived and/or modified sequence
taatccctaaagcatgggctaaccccaatcgatcgtggtaattgtcggagcggatgcttctcctttgcagccactctgagacagcggtcactgctgacatcttgtgcgggactcccagaccggcatggaagccctatcccagccaggggtagattggtgatgctgcccaaagtggagaccgaggctctgggactcgcccgttcccatggagagtag

SEQ ID NO: 263950 - DNA, 66 bp, Artificial Sequence
  derived and/or modified sequence
atgtctagtaatagcgataccggcgacctacaagagtcactcaagcacgggttgactcccatttag

SEQ ID NO: 263951 - DNA, 249 bp, Artificial Sequence
  derived and/or modified sequence
atgtcttccaactccgatactggagacctgcaggaaagtcttaagcatgggttgacaccaattgataggggaaattgcaggtccgggtgcttcagcttcgcagccacactgagacagcggtccctccttacatcctgcgcaggcctaccggacaggcacggctcaccaatcccagcccgtggcagactcgtcatgcttccgaaggtggaaactgaggctctgggattagcacgcagccatggggagtag

SEQ ID NO: 263952 - DNA, 1410 bp, Artificial Sequence
  derived and/or modified sequence
atggtgaactattcatatgacgaggacctggaagagttgtgccctgtgtgcggagacaaagtgtccggctatcactacggcttgttgacatgtgaatcctgtaagggctttttcaaacggaccgtccaaaacaataaacggtacacgtgtattgagaaccagaattgtcaaatagataagacccaaaggaagcggtgtccttactgccgctttcaaaagtgtctctcggtggggatgaagcttgaagccgttcgtgcagaccgcatgagggggggaaggaataagttcgggccaatgtacaagcgggaccgcgctctcaaacagcagaaaaaggctctcatccgcgctaacggactgaaattggaagcaatgtcccaggtaattcaggccatgccaagcgatttgacaatttcaagcgcgattcagaacattcattccgcttccaagggtctccccctgaatcacgcggcactcccccctaccgactacgatagatccccctttgtgacaagtccaatctcaatgactatgccccctcatggaagcctgcagggttaccagacttatgggcacttcccaagtcgcgctattaaatcagagtatcctgacccttatactagctcacctgagagcataatgggatactcctacatggattcttatcagaccagcagcccagcgtccatcccacacctcatcctcgaactgttaaaatgcgagccagatgaaccgcaagtacaagcaaaaatcatggcctatctgcagcaggaacaggccaatcggagcaaacacgagaagcttagcacctttggcctcatgtgtaaaatggccgaccagaccctgttttctattgtcgagtgggcgcgaagttccatcttcttccgggagttaaaagtggatgatcaaatgaagctcctgcagaattgctggtccgagctcctgatcttggatcacatatatagacaagtggtccatgggaaggaaggttccatctttctcgtgactggccagcaggtcgactactccatcattgctagtcaggccggagcgacgctgaacaacctgatgtcgcacgcccaagaacttgtagcaaaactgcgatccctacagttcgaccagcgagagttcgtgtgcttgaagttcttagtgctgttttccctggatgtaaagaatctggagaactttcagctggtggagggagtgcaggaacaggttaatgcagcattattagactacaccatgtgcaactatcctcagcaaaccgaaaaatttgggcagcttttactcaggctccctgaaatccgcgcaatctcaatgcaagcagaggagtacctgtactacaagcatctgaacggggacgttccctacaacaacttactgatcgagatgctgcatgcgaagagggcttag

SEQ ID NO: 263953 - DNA, 1626 bp, Artificial Sequence
  derived and/or modified sequence
atgagcagcaacagcgacaccggcgacctgcaggagagcctgaagcacggcctgacccccatcggcgccggcctgcccgacagacacggcagccccatccccgccagaggcagactggtgatgctgcccaaggtggagaccgaggccctgggcctggccagaagccacggcgagcagggccagatgcccgagaacatgcaggtgagccagttcaagatggtgaactacagctacgacgaggacctggaggagctgtgccccgtgtgcggcgacaaggtgagcggctaccactacggcctgctgacctgcgagagctgcaagggcttcttcaagagaaccgtgcagaacaacaagagatacacctgcatcgagaaccagaactgccagatcgacaagacccagagaaagagatgcccctactgcagattccagaagtgcctgagcgtgggcatgaagctggaggccgtgagagccgacagaatgagaggcggcagaaacaagttcggccccatgtacaagagagacagagccctgaagcagcagaagaaggccctgatcagagccaacggcctgaagctggaggccatgagccaggtgatccaggccatgcccagcgacctgaccatcagcagcgccatccagaacatccacagcgccagcaagggcctgcccctgaaccacgccgccctgccccccaccgactacgacagaagccccttcgtgaccagccccatcagcatgaccatgcccccccacggcagcctgcagggctaccagacctacggccacttccccagcagagccatcaagagcgagtaccccgacccctacaccagcagccccgagagcatcatgggctacagctacatggacagctaccagaccagcagccccgccagcatcccccacctgatcctggagctgctgaagtgcgagcccgacgagccccaggtgcaggccaagatcatggcctacctgcagcaggagcaggccaacagaagcaagcacgagaagctgagcaccttcggcctgatgtgcaagatggccgaccagaccctgttcagcatcgtggagtgggccagaagcagcatcttcttcagagagctgaaggtggacgaccagatgaagctgctgcagaactgctggagcgagctgctgatcctggaccacatctacagacaggtggtgcacggcaaggagggcagcatcttcctggtgaccggccagcaggtggactacagcatcatcgccagccaggccggcgccaccctgaacaacctgatgagccacgcccaggagctggtggccaagctgagaagcctgcagttcgaccagagagagttcgtgtgcctgaagttcctggtgctgttcagcctggacgtgaagaacctggagaacttccagctggtggagggcgtgcaggagcaggtgaacgccgccctgctggactacaccatgtgcaactacccccagcagaccgagaagttcggccagctgctgctgagactgcccgagatcagagccatcagcatgcaggccgaggagtacctgtactacaagcacctgaacggcgacgtgccctacaacaacctgctgatcgagatgctgcacgccaagagagcctag

SEQ ID NO: 263954 - DNA, 216 bp, Artificial Sequence
  derived and/or modified sequence
tgaagcctgaagcacggcctgacccccatcgacagaggcaactgcagaagcggctgcttcagcttcgccgccaccctgagacagagaagcctgctgaccagctgcgccggcctgcccgacagacacggcagccccatccccgccagaggcagactggtgatgctgcccaaggtggagaccgaggccctgggcctggccagaagccacggcgagtag

SEQ ID NO: 263955 - DNA, 66 bp, Artificial Sequence
  derived and/or modified sequence
atgagcagcaacagcgacaccggcgacctgcaggagagcctgaagcacggcctgacccccatctag

SEQ ID NO: 263956 - DNA, 249 bp, Artificial Sequence
  derived and/or modified sequence
atgagcagcaacagcgacaccggcgacctgcaggagagcctgaagcacggcctgacccccatcgacagaggcaactgcagaagcggctgcttcagcttcgccgccaccctgagacagagaagcctgctgaccagctgcgccggcctgcccgacagacacggcagccccatccccgccagaggcagactggtgatgctgcccaaggtggagaccgaggccctgggcctggccagaagccacggcgagtag

SEQ ID NO: 263957 - DNA, 1410 bp, Artificial Sequence
  derived and/or modified sequence
atggtgaactacagctacgacgaggacctggaggagctgtgccccgtgtgcggcgacaaggtgagcggctaccactacggcctgctgacctgcgagagctgcaagggcttcttcaagagaaccgtgcagaacaacaagagatacacctgcatcgagaaccagaactgccagatcgacaagacccagagaaagagatgcccctactgcagattccagaagtgcctgagcgtgggcatgaagctggaggccgtgagagccgacagaatgagaggcggcagaaacaagttcggccccatgtacaagagagacagagccctgaagcagcagaagaaggccctgatcagagccaacggcctgaagctggaggccatgagccaggtgatccaggccatgcccagcgacctgaccatcagcagcgccatccagaacatccacagcgccagcaagggcctgcccctgaaccacgccgccctgccccccaccgactacgacagaagccccttcgtgaccagccccatcagcatgaccatgcccccccacggcagcctgcagggctaccagacctacggccacttccccagcagagccatcaagagcgagtaccccgacccctacaccagcagccccgagagcatcatgggctacagctacatggacagctaccagaccagcagccccgccagcatcccccacctgatcctggagctgctgaagtgcgagcccgacgagccccaggtgcaggccaagatcatggcctacctgcagcaggagcaggccaacagaagcaagcacgagaagctgagcaccttcggcctgatgtgcaagatggccgaccagaccctgttcagcatcgtggagtgggccagaagcagcatcttcttcagagagctgaaggtggacgaccagatgaagctgctgcagaactgctggagcgagctgctgatcctggaccacatctacagacaggtggtgcacggcaaggagggcagcatcttcctggtgaccggccagcaggtggactacagcatcatcgccagccaggccggcgccaccctgaacaacctgatgagccacgcccaggagctggtggccaagctgagaagcctgcagttcgaccagagagagttcgtgtgcctgaagttcctggtgctgttcagcctggacgtgaagaacctggagaacttccagctggtggagggcgtgcaggagcaggtgaacgccgccctgctggactacaccatgtgcaactacccccagcagaccgagaagttcggccagctgctgctgagactgcccgagatcagagccatcagcatgcaggccgaggagtacctgtactacaagcacctgaacggcgacgtgccctacaacaacctgctgatcgagatgctgcacgccaagagagcctag

SEQ ID NO: 263958 - DNA, 798 bp, Artificial Sequence
  derived and/or modified sequence
atgcccaacatggtgttcatcggcggcatcaactgcaagaagagaaaggacctgagccaggagttcgaggcctacatcaacgccagcggcgagcacggcatcgtggtgttcagcctgggcagcatggtgagcgagatccccgagaagaaggccatggccatcgccgacgccctgggcaagatcccccagaccgtgctgtggagatacaccggcaccagacccagcaacctggccaacaacaccatcctggtgaagtggctgccccagaacgacctgctgggccaccccatgaccagagccttcatcacccacgccggcagccacggcgtgtacgagagcatctgcaacggcgtgcccatggtgatgatgcccctgttcggcgaccagatggacaacgccaagagaatggagaccaagggcgccggcgtgaccctgaacgtgctggagatgaccagcgaggacctggagaacgccctgaaggccgtgatcaacgacaagagctacaaggagaacatcatgagactgagcagcctgcacaaggacagacccgtggagcccctggacctggccgtgttctgggtggagttcgtgatgagacacaagggcgccccccacctgagacccgccgcccacgacctgacctggtaccagtaccacagcctggacgtgatcggcttcctgctggccgtggtgctgaccgtggccttcatcaccttcaagtgctgcgcctacggctacagaaagtgcctgggcaagaagggcagagtgaagaaggcccacaagagcaagacccactag

SEQ ID NO: 263959 - DNA, 798 bp, Artificial Sequence
  derived and/or modified sequence
atgcccaacatggtcttcatcggtggtatcaattgcaagaaaaggaaggatctgtcacaagaattcgaggcgtacatcaacgcttccggagagcatgggatcgtggtgttcagcctgggatccatggttagcgaaattcccgaaaaaaaagcaatggccatcgcagacgcattaggaaaaataccccagacggtgttgtggaggtacactggtacaagacccagcaatctcgctaataataccatcctggttaagtggttaccacaaaacgaccttctagggcaccccatgactcgggccttcatcacacacgccggctcccatggcgtgtacgagtccatatgcaatggcgtacctatggtgatgatgcctctgttcggcgatcagatggataacgccaagagaatggaaaccaaaggggctggagtgacccttaatgtgctcgaaatgactagcgaggacctagaaaatgccctgaaagctgttattaatgacaagtcatacaaggaaaacattatgcgtctctcctcactgcacaaggacaggccggtggagcccctggatctggcggtattttgggtcgaattcgttatgaggcataagggcgccccgcacctccggcccgccgcccacgatctaacttggtaccaataccattccttggacgtcatcggcttcctgctcgctgtagtgctcactgtcgccttcatcaccttcaagtgctgtgcttacggctacaggaaatgcttggggaagaaaggtcgggtgaaaaaggcacataaaagtaagacgcactag

SEQ ID NO: 263960 - DNA, 798 bp, Artificial Sequence
  derived and/or modified sequence
atgcccaacatggtgttcatcggcggcatcaactgcaagaagaggaaggacctgagccaggagtttgaggcctacatcaatgccagcggggagcacggcatcgtggtgttcagcctgggctccatggtgtctgagatccctgagaagaaggccatggccatcgcagatgccctgggcaagatcccccagacagtgctgtggagatacacaggcacccggcccagcaacctggccaacaacaccatcctggtgaagtggctgccccagaatgacctgctgggccaccccatgacccgggccttcatcacccatgctggcagccacggcgtgtatgagagcatctgcaatggagtgcccatggtgatgatgcccctgtttggagaccagatggacaatgccaagaggatggagaccaagggagctggggtgaccctgaatgtgctggagatgaccagcgaggacctggagaatgccctgaaggctgtgatcaatgacaagagctacaaggagaacatcatgaggctgagcagcctgcacaaggacaggcctgtggagcccctggacctggccgtgttctgggtggagtttgtgatgaggcacaagggggccccccacctgcggcctgctgcccatgacctgacctggtaccagtaccacagcctggatgtgattggcttcctgctggccgtggtgctgactgtggccttcatcaccttcaagtgctgtgcctacggctacaggaagtgcctgggcaagaagggccgggtgaagaaggcccacaagagcaagacccactag

SEQ ID NO: 263961 - DNA, 798 bp, Artificial Sequence
  derived and/or modified sequence
atgcccaacatggtgttcatcggcggcatcaactgcaagaagcggaaggatctgtctcaggaatttgaggcttatatcaatgcatccggcgagcatggcatcgtagtgttttccttgggaagcatggttagcgaaatcccagagaagaaggccatggccatcgctgacgcactgggcaagatcccccagacagtgttatggcgttacacaggaacaagaccttcaaatctggccaataataccattctggtaaagtggttgccgcaaaacgacctgttaggacacccaatgactcgtgcctttataacgcacgcaggatcacatggagtttatgagtctatctgcaatggcgtgccaatggtaatgatgccgctcttcggcgatcaaatggataacgccaaacggatggaaacaaaaggtgcgggggtcacactcaacgttctagagatgaccagtgaagacctcgaaaacgcactgaaagccgtgatcaatgacaaatcctacaaagagaatatcatgcgactctcgtccctgcacaaagatcgccccgtcgagcctctagatctggccgtgttctgggtggaattcgtgatgaggcacaaaggggcgcctcacctgcggccagccgcgcatgatcttacttggtaccagtaccacagcctggacgtcattggatttttactggcagtggtgctgacagttgcattcattacatttaagtgctgtgcatatggatacaggaaatgtctgggcaagaagggcagggttaagaaggcccataaatctaagactcactag

SEQ ID NO: 263962 - DNA, 798 bp, Artificial Sequence
  derived and/or modified sequence
atgcccaatatggtattcatcgggggtataaactgtaaaaagcgtaaggatctctcccaggaattcgaggcatacattaacgcttctggcgaacatggtatcgtggttttctccctaggaagtatggttagtgaaatccctgagaaaaaggctatggccatagctgatgctctgggcaagatcccccagactgtgctgtggcgatatacaggcacccggccaagcaatctggcaaacaacaccatactcgttaagtggctgccacagaatgacctcctgggacacccaatgacaagagccttcatcacacacgcgggaagccatggggtctatgagagtatctgcaatggcgtgccgatggtgatgatgccgcttttcggcgaccaaatggacaacgctaagaggatggaaactaagggcgcaggtgtgacactcaacgtgttggagatgacaagtgaagacctcgaaaacgctctcaaagccgtaattaatgacaagtcatataaggagaacattatgcgactcagcagcctgcacaaggatcggccagtcgagcctctggatttggccgtattttgggtggagtttgtcatgagacacaagggcgcacctcacctgaggcccgctgcccacgatctgacttggtaccagtaccactctcttgatgttatcgggtttttgttggccgtcgttctgacggtggcttttatcacgttcaaatgttgtgcttacggatatagaaaatgtctgggaaagaaaggccgtgtcaagaaagcacataagtccaaaacgcactag

SEQ ID NO: 263963 - DNA, 1128 bp, Artificial Sequence
  derived and/or modified sequence
gggaccgccctcagcagtgtggttagcaggcagggccagtgtgaccctccctttctgggcctcagttgagaaacctgaagctcaggagaggagtcactcccctggcagatgggtggctgggccagaagcagataccaggctttctgactcctgctctaggattctcaccacgtactggctagacttatacttctcaaatcttaatttcctaaaggccggtcatgcccaacatggtcttcattggaggtatcaactgtaagaagaggaaagacttgtctcaggaatttgaagcctacattaatgcttctggagaacatggaattgtggttttctctttgggatcaatggtctcagaaattccagagaagaaagctatggcaattgctgatgctttgggcaaaatccctcagacagtcctgtggcggtacactggaacccgaccatcgaatcttgcgaacaacacgatacttgttaagtggctaccccaaaacgatctgcttggtcacccgatgacccgtgcctttatcacccatgctggttcccatggtgtttatgaaagcatatgcaatggcgttcccatggtgatgatgcccttgtttggtgatcagatggacaatgcaaagcgcatggagactaagggagctggagtgaccctgaatgttctggaaatgacttctgaagatttagaaaatgctctaaaagcagtcatcaatgacaaaagttacaaggagaacatcatgcgcctctccagccttcacaaggaccgcccggtggagccgctggacctggccgtgttctgggtggagtttgtgatgaggcacaagggcgcgccacacctgcgccccgcagcccacgacctcacctggtaccagtaccattccttggacgtgattggtttcctcttggccgtcgtgctgacagtggccttcatcacctttaaatgttgtgcttatggctaccggaaatgcttggggaaaaaagggcgagttaagaaagcccacaaatccaagacccattgagaagtgggtgggaaataaggtaaaattttgaaccattccctagtcatttccaaacttgaaaacagaatcagtgttaaattcattttattcttattaaggaaatactttg

SEQ ID NO: 263964 - protein, 1104 aa, Artificial Sequence
  derived and/or modified sequence
MKVTVCFGRTGIVVPCKEGQLRVGELTQQALQRYLKTREKGPGYWVKIHHLEYTDGGILDPDDVLADVVEDKDKLIAVFEEQEPLHKIESPSGNPADRQSPDAFETEVAAQLAAFKPIGGEIEVTPSALKLGTPLLVRRSSDPVPGPPADTQPSASHPGGQSLKLVVPDSTQNLEDREVLNGVQTELLTSPRTKDTLSDMTRTVEISGEGGPLGIHVVPFFSSLSGRILGLFIRGIEDNSRSKREGLFHENECIVKINNVDLVDKTFAQAQDVFRQAMKSPSVLLHVLPPQNREQYEKSVIGSLNIFGNNDGVLKTKVPPPVHGKSGLKTANLTGTDSPETDASASLQQNKSPRVPRLGGKPSSPSLSPLMGFGSNKNAKKIKIDLKKGPEGLGFTVVTRDSSIHGPGPIFVKNILPKGAAIKDGRLQSGDRILEVNGRDVTGRTQEELVAMLRSTKQGETASLVIARQEGHFLPRELKGEPDCCALSLETSEQLTFEIPLNDSGSAGLGVSLKGNKSRETGTDLGIFIKSIIHGGAAFKDGRLRMNDQLIAVNGESLLGKSNHEAMETLRRSMSMEGNIRGMIQLVILRRPERPMEDPAECGAFSKPCFENCQNAVTTSRRNDNSILHPLGTCSPQDKQKGLLLPNDGWAESEVPPSPTPHSALGLGLEDYSHSSGVDSAVYFPDQHINFRSVTPARQPESINLKASKSMDLVPDESKVHSLAGQKSESPSKDFGPTLGLKKSSSLESLQTAVAEVRKNDLPFHRPRPHMVRGRGCNESFRAAIDKSYDGPEEIEADGLSDKSSHSGQGALNCESAPQGNSELEDMENKARKVKKTKEKEKKKEKGKLKVKEKKRKEENEDPERKIKKKGFGAMLRFGKKKEDKGGKAEQKGTLKHGGLREEELEKMKEERESGRPTGGSTDRIQKLRKEYYQARREGFPLYEDDEGRARPSEYDLLWVPGRGPDGNAHNLRFEGMERQYASLPRGGPADPVDYLPAAPRGLYKERELPYYPGAHPMHPPKGSYPRPTELRVADLRYPQHYPPPPAPQHKGPFRQDVPPSPPQHQRMPAYQETGRPGPRGGSPDQYPYRTQDSRQKNPMTAAV

SEQ ID NO: 263965 - DNA, 3315 bp, Artificial Sequence
  derived and/or modified sequence
atgaaggtgaccgtgtgcttcggcagaaccggcatcgtggtgccctgcaaggagggccagctgagagtgggcgagctgacccagcaggccctgcagagatacctgaagaccagagagaagggccccggctactgggtgaagatccaccacctggagtacaccgacggcggcatcctggaccccgacgacgtgctggccgacgtggtggaggacaaggacaagctgatcgccgtgttcgaggagcaggagcccctgcacaagatcgagagccccagcggcaaccccgccgacagacagagccccgacgccttcgagaccgaggtggccgcccagctggccgccttcaagcccatcggcggcgagatcgaggtgacccccagcgccctgaagctgggcacccccctgctggtgagaagaagcagcgaccccgtgcccggcccccccgccgacacccagcccagcgccagccaccccggcggccagagcctgaagctggtggtgcccgacagcacccagaacctggaggacagagaggtgctgaacggcgtgcagaccgagctgctgaccagccccagaaccaaggacaccctgagcgacatgaccagaaccgtggagatcagcggcgagggcggccccctgggcatccacgtggtgcccttcttcagcagcctgagcggcagaatcctgggcctgttcatcagaggcatcgaggacaacagcagaagcaagagagagggcctgttccacgagaacgagtgcatcgtgaagatcaacaacgtggacctggtggacaagaccttcgcccaggcccaggacgtgttcagacaggccatgaagagccccagcgtgctgctgcacgtgctgcccccccagaacagagagcagtacgagaagagcgtgatcggcagcctgaacatcttcggcaacaacgacggcgtgctgaagaccaaggtgcccccccccgtgcacggcaagagcggcctgaagaccgccaacctgaccggcaccgacagccccgagaccgacgccagcgccagcctgcagcagaacaagagccccagagtgcccagactgggcggcaagcccagcagccccagcctgagccccctgatgggcttcggcagcaacaagaacgccaagaagatcaagatcgacctgaagaagggccccgagggcctgggcttcaccgtggtgaccagagacagcagcatccacggccccggccccatcttcgtgaagaacatcctgcccaagggcgccgccatcaaggacggcagactgcagagcggcgacagaatcctggaggtgaacggcagagacgtgaccggcagaacccaggaggagctggtggccatgctgagaagcaccaagcagggcgagaccgccagcctggtgatcgccagacaggagggccacttcctgcccagagagctgaagggcgagcccgactgctgcgccctgagcctggagaccagcgagcagctgaccttcgagatccccctgaacgacagcggcagcgccggcctgggcgtgagcctgaagggcaacaagagcagagagaccggcaccgacctgggcatcttcatcaagagcatcatccacggcggcgccgccttcaaggacggcagactgagaatgaacgaccagctgatcgccgtgaacggcgagagcctgctgggcaagagcaaccacgaggccatggagaccctgagaagaagcatgagcatggagggcaacatcagaggcatgatccagctggtgatcctgagaagacccgagagacccatggaggaccccgccgagtgcggcgccttcagcaagccctgcttcgagaactgccagaacgccgtgaccaccagcagaagaaacgacaacagcatcctgcaccccctgggcacctgcagcccccaggacaagcagaagggcctgctgctgcccaacgacggctgggccgagagcgaggtgccccccagccccaccccccacagcgccctgggcctgggcctggaggactacagccacagcagcggcgtggacagcgccgtgtacttccccgaccagcacatcaacttcagaagcgtgacccccgccagacagcccgagagcatcaacctgaaggccagcaagagcatggacctggtgcccgacgagagcaaggtgcacagcctggccggccagaagagcgagagccccagcaaggacttcggccccaccctgggcctgaagaagagcagcagcctggagagcctgcagaccgccgtggccgaggtgagaaagaacgacctgcccttccacagacccagaccccacatggtgagaggcagaggctgcaacgagagcttcagagccgccatcgacaagagctacgacggccccgaggagatcgaggccgacggcctgagcgacaagagcagccacagcggccagggcgccctgaactgcgagagcgccccccagggcaacagcgagctggaggacatggagaacaaggccagaaaggtgaagaagaccaaggagaaggagaagaagaaggagaagggcaagctgaaggtgaaggagaagaagagaaaggaggagaacgaggaccccgagagaaagatcaagaagaagggcttcggcgccatgctgagattcggcaagaagaaggaggacaagggcggcaaggccgagcagaagggcaccctgaagcacggcggcctgagagaggaggagctggagaagatgaaggaggagagagagagcggcagacccaccggcggcagcaccgacagaatccagaagctgagaaaggagtactaccaggccagaagagagggcttccccctgtacgaggacgacgagggcagagccagacccagcgagtacgacctgctgtgggtgcccggcagaggccccgacggcaacgcccacaacctgagattcgagggcatggagagacagtacgccagcctgcccagaggcggccccgccgaccccgtggactacctgcccgccgcccccagaggcctgtacaaggagagagagctgccctactaccccggcgcccaccccatgcacccccccaagggcagctaccccagacccaccgagctgagagtggccgacctgagatacccccagcactacccccccccccccgccccccagcacaagggccccttcagacaggacgtgccccccagccccccccagcaccagagaatgcccgcctaccaggagaccggcagacccggccccagaggcggcagccccgaccagtacccctacagaacccaggacagcagacagaagaaccccatgaccgccgccgtgtag

SEQ ID NO: 263966 - DNA, 3315 bp, Artificial Sequence
  derived and/or modified sequence
atgaaagtgaccgtgtgctttggacggacaggaatcgtggttccttgtaaggagggacagctcagagtgggggaacttacacaacaggctctacaacgttatctcaagacaagagagaaaggaccgggctattgggtcaagattcaccacttggagtacaccgacgggggtattctggaccctgatgacgtcttagcagacgtggttgaggataaagacaagcttatcgccgtctttgaggagcaggagccattacataagatcgaatccccctcaggaaaccctgctgatcgccagtcaccagacgcgttcgagacggaagtggccgcccagctggctgcttttaaaccaatcggcggcgaaatagaggtaacaccctcagccttgaagctgggaactcctctgttggtgcggcgttcttctgatccagtccccgggcccccagccgatacccaacccagcgccagtcacccaggcggccagtctctcaagttggtcgtgcccgattccacccagaacctggaggaccgcgaagttttaaacggagtccagacagagctgttgactagtcctagaacaaaagataccttgtctgacatgacccgaaccgtagagatttctggagagggcgggccacttgggatccacgtcgtccccttcttttctagcctgagcggaaggatactgggacttttcatcaggggaattgaagacaattctaggagcaagagagaagggctgtttcacgagaacgagtgcatcgttaaaatcaataacgtggatctcgttgataagacgttcgcccaggctcaggacgtctttagacaggccatgaaaagtcctagcgttctgttgcacgtgcttccaccacagaatcgcgagcagtacgaaaagtccgtcattggttctttgaacatttttgggaataatgacggggttctgaaaactaaggtgcctccaccggtccacgggaagtctggtttgaagaccgcgaacttaacagggaccgactcacccgaaactgatgccagcgcttcccttcagcaaaacaagtcacccagggtgccccggctcgggggaaagccatcttcaccatctcttagcccactcatgggcttcggctctaataagaatgccaagaagattaaaattgacctcaagaaaggacccgaggggctgggctttaccgttgttacccgcgattcatcaatacatggccctggtcctatttttgtcaaaaacatccttcctaagggagcagccattaaggatggaaggctccagagtggagaccgtattttggaggttaacggaagggacgtcactggtagaacccaagaggagcttgttgccatgttacgcagcacaaagcagggagagaccgcttctctggtgatagcccgccaagaaggtcacttcctccctcgagagcttaaaggagagccagactgctgcgccctttcactggaaacatcagagcaactgaccttcgaaataccactcaatgattccggctcggcaggtttgggtgtctcactgaaaggcaacaaaagccgggagacgggaacagatctcggcatctttattaaatctattatccacggcggtgccgctttcaaagacggcaggctccgcatgaacgaccagctgatcgcagtgaatggggagtctctgctgggtaaatctaaccacgaagcaatggagaccctcagaaggagtatgtcgatggagggcaacattagagggatgattcagttggtgatcttgagaagaccagaacgtcctatggaggatcctgctgaatgtggcgcattttcaaagccctgtttcgaaaattgccagaatgctgtgaccacgtcaagacgtaacgataattcaatcctgcacccactaggcacttgtagtccacaggacaaacaaaaggggttgttactccccaatgacggatgggccgagtcagaggtaccaccaagtcccacacctcactctgccctgggtttaggtctggaggattattcccatagttccggggttgatagcgcagtgtactttccagaccagcatatcaacttccgaagcgtgaccccagcccgtcagccggagtccattaatttgaaagcttcaaagtctatggatctggtgcccgacgaaagtaaggtgcattctctggcaggtcagaaatccgaatctccttcgaaggacttcgggcctaccttgggattaaagaagagtagtagtctggaaagtcttcagacagctgttgcggaagttagaaaaaatgacctgccatttcaccgtccaagaccccacatggtccgaggacgggggtgtaatgaatccttccgggctgctatagacaagagttacgacggtcccgaagaaatagaggccgatggtctctcagataaatcatcccacagcggccagggtgctttgaattgcgaatccgcccctcagggcaactccgaactcgaggacatggagaataaggcacgaaaagtgaagaagacaaaagagaaggagaagaaaaaggagaagggtaagctgaaagtgaaagaaaaaaaaaggaaggaagaaaacgaggacccagaacgcaagatcaagaagaagggctttggcgcgatgctgagattcggtaaaaaaaaagaggacaaaggcgggaaggcggagcagaagggcacactcaagcatggaggtctacgcgaggaggagctcgagaaaatgaaagaagagcgagagagtgggcggcccaccggcggcagcaccgaccggatccagaagctgcgcaaggagtactatcaggccaggcgggaggggttccccttatacgaggatgatgaagggcgcgcccggcctagcgagtacgacttactgtgggtgcctggaaggggccccgacggaaatgcccataaccttaggtttgaagggatggagcggcagtacgctagtctcccccgcggaggcccagctgaccctgtcgactatctacccgcagccccacgaggcctgtataaggaacgcgagctgccctattatccaggggcccaccccatgcaccctccgaagggcagttaccctagacctactgagctgagagtggccgatctccgatatccacaacactatcctccacccccggccccacagcataaaggcccattcaggcaagatgtgcctccaagccctccacagcaccagaggatgccagcttaccaggagacgggccgccccggacccaggggtgggagtcccgaccagtatccctataggacccaggacagccggcagaagaatcctatgaccgccgcagtgtag

SEQ ID NO: 263967 - DNA, 3315 bp, Artificial Sequence
  derived and/or modified sequence
atgaaggtgacagtgtgctttggaagaacaggcatcgtggtgccctgcaaggagggccagctgcgggtgggggagctgacccagcaggccctgcagcgctacctgaagacccgggagaagggccctggctactgggtgaagatccaccacctggagtacacagatggcggcatcctggaccctgatgatgtgctggctgatgtggtggaggacaaggacaagctgattgctgtgtttgaggagcaggagcccctgcacaagattgagagccccagcggcaacccagctgaccggcagagcccagatgcctttgaaacagaggtggccgcccagctggccgccttcaagcccatcggcggggagattgaggtgaccccatctgccctgaagctgggcacccccctgctggtgcggcgcagcagtgaccctgtgcccggccccccagctgacacccagcccagcgccagccaccctgggggccagagcctgaagctggtggtgcctgacagcacccagaacctggaggaccgggaggtgctgaatggagtgcagacagagctgctgaccagccccaggaccaaggacaccctgagtgacatgaccaggacagtggagatctctggagagggcggccccctgggcatccacgtggtgcccttcttcagcagcctgagcggccgcatcctgggcctcttcatccggggcatcgaggacaacagccgcagcaagcgggagggcctcttccatgaaaatgaatgcatcgtgaagatcaacaacgtggacctggtggacaagacctttgcccaggcccaggatgtgttccggcaggccatgaagagccccagcgtgctgctgcacgtgctgcccccccagaaccgggagcagtatgagaagtctgtgattggcagcctgaacatctttggaaataatgatggagtgctgaagaccaaggtgcccccacctgtgcacggcaagagcggcctgaagacagccaacctgaccggcacagacagccctgagacagatgccagcgccagcctgcagcagaacaagagcccccgggtgccccggctgggcggcaagcccagcagccccagcctgagccccctgatgggcttcggcagcaacaagaatgccaagaagatcaagattgacctgaagaagggccctgagggcctgggcttcaccgtggtgacccgggacagcagcatccacggccctggccccatctttgtgaagaacatcctgcccaagggggccgccatcaaggatggccgcctgcagagcggggaccgcatcctggaggtgaatggaagagatgtgacaggccgcacccaggaggagctggtggccatgctgcggagcaccaagcagggcgagacagccagcctggtgattgcccggcaggagggccacttcctgccccgggagctgaagggggagccagactgctgtgccctgagcctggagaccagcgagcagctgacctttgagatccccctgaatgacagcggcagcgctggcctgggcgtgtccctgaagggcaacaagagccgggagactggaacagacctgggcatcttcatcaagagcatcatccacggcggggccgccttcaaggatggccgcctgaggatgaatgaccagctgattgctgtgaatggagagagcctgctgggcaagagcaaccacgaggccatggagaccctgcggcgctccatgtccatggagggcaacatccggggcatgatccagctggtgatcctgcggcggcctgagcggcccatggaggaccctgcagaatgtggggccttcagcaagccctgctttgagaactgccagaatgctgtgaccaccagcagaagaaatgacaacagcatcctgcaccccctgggcacctgcagcccccaggacaagcagaagggcctgctgctgcccaatgatggctgggccgagagcgaggtgccccccagccccaccccccacagcgccctgggcctgggcctggaggactacagccacagcagcggcgtggacagcgctgtgtacttcccagaccagcacatcaacttccgctctgtgaccccagcccggcagcctgagagcatcaacctgaaggccagcaagtccatggacctggtgcctgatgagagcaaggtgcacagcctggccggccagaagtctgagagccccagcaaggactttggccccaccctgggcctgaagaagagcagcagcctggagagcctgcagacagctgtggccgaggtgaggaagaatgacctgcccttccaccggccccggccccacatggtgcggggccggggctgcaatgaaagcttccgggccgccatcgacaagagctatgatggccctgaggagattgaagcagatggcctgagtgacaagagcagccacagcggccagggcgccctgaactgtgagagcgccccccagggcaacagcgagctggaggacatggagaacaaggccaggaaggtgaagaagaccaaggagaaggagaagaagaaggagaagggcaagctgaaggtgaaggagaagaagaggaaggaggagaatgaagatcctgagaggaagatcaagaagaagggctttggagccatgctgcgctttgggaagaagaaggaggacaagggcggcaaggccgagcagaagggcaccctgaagcatggaggcctgcgggaggaggagctggagaagatgaaggaggagcgggagagcggccggcccaccggcggcagcacagaccgcatccagaagctgaggaaggagtactaccaggcccggcgggagggcttccccctgtatgaagatgatgagggccgggcccggcccagtgaatatgacctgctgtgggtgcccggccggggcccagatggaaatgcccacaacctgcgctttgagggcatggagcggcagtatgccagcctgccccggggcggccctgctgaccctgtggactacctgcctgctgccccccggggcctgtacaaggagcgggagctgccctactacccaggggcccaccccatgcacccccccaagggcagctacccccggcccacagagctgcgggtggccgacctgcgctacccccagcactacccacctcctccagccccccagcacaagggccccttccggcaggatgtgccccccagccccccccagcaccagaggatgcctgcctaccaggagaccggccggcccggcccccggggcggcagcccagaccagtacccctaccgcacccaggacagccggcagaagaaccccatgacagctgctgtgtag

SEQ ID NO: 263968 - DNA, 3315 bp, Artificial Sequence
  derived and/or modified sequence
atgaaggtgaccgtgtgcttcggccggaccggcatcgtggtgccctgcaaggagggccaattacgagtaggggagcttacacagcaagcactgcagaggtacctgaagacacgtgagaagggcccgggatactgggttaaaatacatcacctggagtataccgacggcggaattctcgatccagatgatgttctggctgacgtggtggaagacaaagataagctgattgcagtgtttgaggaacaggagccattgcacaagatcgagtcgccctctgggaatccagccgacaggcagagccctgacgctttcgagaccgaagtcgccgcccaactcgccgcctttaagccaatcgggggagagattgaagtgacaccctccgctctgaagctcgggacacccctgcttgtccgcagatcaagcgacccggtccccggcccgcctgccgacacacagcccagtgcctctcatccaggcggtcagtccctgaaactggttgttccggattcaacacagaatttagaggacagggaggtgctgaacggtgtccagacagagcttctgacatcccccaggacaaaagatacactgagcgatatgacaagaactgtcgaaatttccggtgagggcgggccactcgggatacatgtggtcccctttttctcttccctgagcgggaggatcctcggattatttattcggggaattgaagataattctcgatcaaaaagagaggggctgtttcatgaaaatgagtgcatagtgaaaatcaataatgtggacttggttgacaagaccttcgcccaagctcaagatgtttttcggcaggctatgaagtctcctagcgtgctactccacgtcctgccacctcagaaccgtgagcaatatgagaagagcgtaattggttccctgaacatatttggcaataacgatggcgttctgaaaacaaaagtcccccctccggtccacggcaagtctggcctcaaaacagcgaatctgactggaacagactctccagaaacggacgcatccgcatctctacagcagaacaagtcgccacgggttcctcggctcggaggcaagccctctagtccaagcctcagccccttgatggggttcggcagcaataaaaatgccaagaagatcaagatcgatctcaagaaaggccctgaaggattagggttcaccgtggtcacacgggactcgtctattcacggacccgggccaatcttcgtcaagaatatattgccaaaaggtgcagccataaaagatgggcgactacagagcggcgataggatcctggaggtaaacggcagggacgtgacaggccgtactcaggaggaactggttgcgatgctgaggtctacgaagcagggggagaccgctagcctggtgatagccaggcaggagggccacttcctccctcgcgagctaaagggagaacctgactgttgtgcattgtctcttgagacaagcgaacagcttaccttcgaaattccccttaatgattctggcagtgccggccttggcgtcagtttgaagggaaacaaaagcagggaaaccggtaccgatctcggtattttcataaagtcaatcatacatgggggagctgctttcaaggacggcaggcttaggatgaacgaccaactgattgccgtcaacggtgagtctctgcttgggaaatctaatcatgaggcgatggaaacccttcggcgctccatgagcatggaagggaacatcagagggatgatacagctggtcattctcagaaggccagaacgcccaatggaagatcctgctgagtgtggagcgttttctaagccatgcttcgagaattgtcagaatgccgttactacatcaagacgtaatgataattccattctgcatccactcgggacgtgttcacctcaagacaaacagaaaggacttttgctgccgaatgatggatgggcggagtctgaggtgccaccctcgcctactccgcatagcgcactgggccttggcttggaggattacagccacagcagtggcgtggactccgcagtctactttcctgaccagcatatcaacttccggtctgtgaccccagcgaggcagccggaatcgatcaatctgaaggccagcaagagcatggacttggtccccgatgaaagcaaagtgcacagcctggcagggcaaaaatccgagtctccctctaaagatttcggacccaccctgggcctcaagaaaagcagctctctagaatccctgcaaactgctgtggccgaggtgagaaaaaacgatctgccgttccaccgcccgagacctcacatggtgaggggtcgtgggtgtaacgaatccttccgcgcggctattgataagtcatacgacgggccagaagaaatcgaggccgacggcctgtctgacaaatcctcccactccgggcaaggggccctcaactgtgaaagcgctccacagggtaacagcgagctggaagacatggaaaacaaggcccggaaggttaagaaaacaaaggagaaggaaaagaagaaggagaagggcaaattaaaggtgaaggaaaaaaagcgaaaagaggagaacgaagaccctgagaggaaaatcaaaaagaagggtttcggagctatgctgcggttcggtaaaaagaaggaggacaagggcggaaaggcggaacaaaaaggaacccttaaacatggagggttgagagaagaagagttagagaaaatgaaggaagagagggagagtgggagacctacaggtggttccactgaccggattcagaaactcaggaaagagtactaccaggctcgacgggaaggctttccgctgtacgaggacgatgagggccgcgcacgtccgtctgagtacgatctgctgtgggttcccggaagaggaccagacggcaatgctcataacctcaggttcgaaggcatggaacggcagtatgcctcactgcctaggggaggacctgccgacccagtagactatctgccagccgctccgcgagggttatacaaggagagagagctgccatattatcccggagcccatcctatgcacccccccaaggggtcctatcctaggccgaccgagctacgcgtcgcagatttgagatacccacagcattaccctcccccccccgcccctcagcataaggggccatttagacaggatgtccctccaagccccccccagcaccagcggatgccagcttatcaagaaaccgggcgccctgggcccagaggagggtctcccgaccagtacccttaccgaacgcaggattctcggcagaagaatcccatgactgctgcagtgtag

SEQ ID NO: 263969 - DNA, 3315 bp, Artificial Sequence
  derived and/or modified sequence
atgaaagtgaccgtgtgcttcggcaggacgggcatcgtggtgccctgcaaggagggccagctgcgcgtcggcgagctcacccagcaggcgctgcagcggtacctgaagacccgggagaagggtcctggttactgggtgaagattcatcacttagaatatacagatggaggaatcctggatccagatgatgtcttggcagatgttgttgaagataaagacaagctgattgctgtgtttgaagaacaagaaccactccacaagattgagagccccagtggaaaccctgcagatcggcagagcccagatgcttttgagacagaagtggccgcccaactggccgcatttaagccaattggtggggagattgaagtaaccccttctgctctaaaactaggcactccactgctggtgaggagaagcagtgacccagtgccaggcccacctgctgatacccagccaagcgcttcacaccctggtggccagagtctgaaactggttgttccagattccacgcagaacttggaagacagagaagttttgaatggtgtacagacagaactactaacttcgccaagaactaaggacacattgagtgatatgacaagaacagtggagatttctggggaaggaggcccattgggaatacatgtagtgcccttcttttcatctctgagtggaaggattctaggactcttcatccgaggcattgaagacaacagcaggtccaagcgggagggactatttcacgaaaatgaatgtattgtaaaaatcaacaatgtggatctcgtagacaaaacctttgctcaggctcaagatgtcttccgccaggcaatgaaatctccaagtgtgctcctccacgtgcttcctccacaaaaccgtgaacagtatgaaaagtcagtcattggctctcttaacatttttggtaataatgatggcgttttgaaaaccaaagtgccgcctcctgtccatggaaaatcgggactaaagacagcaaatctcacaggaaccgatagtcctgaaacagatgcatcagcttccctgcaacaaaacaagagtccccgagtaccaaggctgggaggaaaaccatcctctccctcactctcgcctctcatgggatttggcagcaataaaaatgcaaagaaaattaagattgacctaaagaaaggccctgaaggacttggtttcactgtggttaccagagactcttccatacatggtcccggtcccatttttgtaaaaaacattttaccaaagggagcagcaataaaagatggccgcctacaatcaggggacagaattttggaggtaaatgggagagatgtcaccggacgaacccaggaagagcttgtggccatgctcaggagcaccaagcagggggagacagcatcgctggtcattgcccgccaagaaggacattttctgccccgagagttgaaaggagaacctgactgctgtgcactctctctggagacaagcgagcagctcacctttgagatccccctgaatgattcaggttctgctggcctcggggtgagcttaaaagggaacaaatccagagaaactggaacagacttggggatttttatcaaatccatcattcatggaggcgctgcttttaaggatggtcgtctgcgaatgaatgaccagctgattgcagttaatggggaatctcttttgggaaagtccaaccacgaagctatggaaacacttaggcggtcaatgtccatggagggaaacatccgagggatgatccagttggtgattctgaggaggccagagagaccaatggaggatcctgcagagtgtggggcattttccaagccatgctttgagaactgtcaaaatgctgtaaccacctctaggcgaaatgataatagtatcctgcatccacttggcacttgcagtccacaagacaaacagaaaggtctattgctgcccaatgacggatgggccgagagtgaagttccaccttctccaacaccacattctgctctgggattgggcctcgaagattacagccacagctctggggtggattcagcagtatattttccagatcagcacatcaacttcagatctgtgacaccggccaggcagcctgaatcaattaatttgaaagcctcgaagagcatggaccttgtgccagatgaaagcaaggttcactcattggctggacaaaaatcggaatctccaagcaaagattttggtccaactctgggtttgaaaaagtccagctccttggagagtctgcagactgcagtggccgaggtcaggaagaatgaccttccctttcacaggccccggccgcacatggttcgaggccgaggctgcaatgagagctttagagcagccattgacaaatcctacgatggacctgaagaaatagaagctgacggtctgtctgataagagctctcactctggccaaggagctctgaattgtgagtctgcccctcaggggaattcggagctagaggacatggaaaataaagccaggaaagtcaaaaaaacgaaagagaaggagaagaaaaaggaaaagggcaaattgaaagtcaaggagaaaaagcgcaaagaggagaatgaagatccagaaaggaaaataaagaagaagggcttcggcgccatgctgagatttggaaagaagaaagaggataagggtggaaaggctgagcagaaaggtactctgaaacatggtggcctgagagaagaagagctggagaaaatgaaagaagagcgtgaaagtggccgtcctacgggtggaagcactgaccgtatccagaagttgcggaaagagtattatcaggctcggagggaaggtttccctttatatgaagacgacgaaggaagagcaaggccatctgagtatgacctactctgggtgcctggaaggggtccagatgggaatgcacacaacctccgctttgaagggatggagaggcagtacgcatccttacccaggggaggacccgcagatcctgtagactatctgccagcagcacctcgggggctctacaaggaaagggagcttccctattatccaggggctcatcctatgcaccctcccaaagggagctatccccgccccacagagctcagggtggcagatctccggtatcctcagcactacccacccccgccagctccccagcacaaaggaccctttcgacaagacgttccgccttcccctccccagcaccaaagaatgccagcctatcaggaaacaggcagaccagggccccgtgggggcagcccagaccagtacccttaccgaacccaggattcccggcagaagaaccccatgactgcagccgtatag

SEQ ID NO: 263970 - DNA, 3315 bp, Artificial Sequence
  derived and/or modified sequence
atgaaagtgacagtgtgttttggcaggacaggcatcgtagtgccctgtaaggaaggccagctgagggtgggcgagttaacacagcaagcattgcaacgctacttgaagacacgcgaaaaaggacccggatattgggttaaaattcatcacttagaatataccgatggcggaattctggatcccgatgacgtgcttgccgatgtcgtggaagacaaagacaaattaattgccgtgttcgaggaacaggaaccactacacaagattgagtcccctagcgggaatcccgcagatcggcagagccccgatgcattcgagaccgaggtcgcggctcaacttgccgcttttaagcccattgggggtgagatagaagtgacacccagcgccctgaagttaggcaccccactcctcgtcagacgttcatccgatcccgttcctggaccgccagccgatacccagcccagcgcatctcatcctggcggtcagagcctgaaactcgttgtaccagactcgacgcaaaacctggaggacagggaggttctgaatggcgtccagactgagcttctcacatctcctagaacaaaggacaccttatccgacatgacacgaactgtggaaattagcggcgagggaggacccctgggtatccatgtggtgccgttcttcagcagcctgtccggtcggatactcggcctctttataaggggtattgaggacaacagtagaagcaaaagggaaggactgtttcacgagaatgagtgcatcgtcaaaattaataacgtggacctggttgacaagacctttgcccaagctcaagacgtcttccgacaggcaatgaagagtccatcagtgctactacacgtgttgccgcctcagaacagggagcagtatgaaaaaagtgttattggtagccttaacatcttcggcaacaatgacggtgtcctcaagaccaaggtacctcctcccgtgcatggtaaatccgggctgaaaacagccaatctgaccgggaccgactcccctgagactgacgccagcgcaagcctgcagcagaataagtcacctagagtgccaagacttggaggaaaaccaagctctcctagcctgtctccactaatggggttcggaagcaacaaaaatgccaaaaaaattaagatcgatctcaaaaaaggtccagaagggctgggtttcaccgtcgtgaccagggactcgagcatccatgggcctggacccatcttcgtgaagaacatcctgcctaaaggagctgcgattaaggatgggcgtctccagagtggcgatagaattctggaagtgaatggccgtgacgtgaccggacgcacccaggaagagctggtggcaatgctgaggtccacaaaacagggcgaaaccgccagtcttgtgatcgcacgacaggaagggcattttctgcctcgagagctcaaaggcgagcccgattgctgcgctctgtcactggagacttctgagcagctgaccttcgagatacctttaaatgacagcggaagtgctgggttaggggtatccctaaagggcaataagtctcgcgagaccgggacagatttggggattttcataaaatccataatccatgggggagctgcctttaaggacgggagactcagaatgaatgatcagctcatcgctgtgaatggggagtctctgcttgggaaaagcaatcatgaggccatggaaaccctccggaggtctatgagtatggaaggaaacattcgaggcatgattcagctcgtgatattacgaaggccagaaagaccgatggaggacccagcagaatgcggtgcctttagcaagccttgctttgagaactgccagaacgccgttaccacaagtcggagaaacgataacagcatcttgcatcccctgggaacatgctctccccaggataaacagaagggtctcctgctgcctaatgatggatgggccgaatccgaagtaccccctagccccaccccgcactccgcgttgggcctgggactggaagattactcgcattcctccggcgtcgactcagctgtgtactttcccgatcagcatataaatttccggtcagtcacccccgctaggcagccggagtcaataaacctcaaagccagcaagtccatggatctggttccagacgagtccaaggtgcatagtctagctggtcaaaagagtgaatccccaagcaaggatttcgggcctaccttgggcctgaagaaatcctcaagtctcgagtccctccagactgccgtggccgaagtaaggaaaaatgatctgcctttccatcggcctaggccccatatggtcagagggaggggctgtaacgagagcttccgggcagccatcgacaaatcctatgatggacccgaagaaattgaagccgacggcttgtctgacaaaagtagccattctggccaaggcgcactgaactgtgagtccgcaccccaaggcaattctgaactggaggatatggaaaataaggctaggaaggttaagaagactaaggaaaaagagaagaaaaaagagaaggggaagctgaaggtgaaggagaaaaaaagaaaagaagagaatgaggatccagagagaaagattaagaagaagggatttggggctatgttacggttcgggaaaaagaaagaggataagggcggaaaggcagaacagaagggaactctcaaacatgggggtctgagagaagaggagttagagaagatgaaggaggagcgagaatccggcaggccaaccggcggtagcaccgatcgaatccaaaagctgcgtaaagagtactaccaggccaggcgcgagggatttcccctgtatgaggacgacgagggcagagccagaccatccgagtacgatcttctctgggtaccagggaggggtcccgatggcaacgcccacaacctgcgcttcgagggtatggaacggcaatatgccagcctgcccagagggggtcctgcggatcccgtggactacttacccgcagccccacgcggactgtataaagagagggagctgccttactaccccggtgcccatcccatgcacccaccaaaagggtcctatcccaggcctaccgagctacgggttgccgacctgcgatatccccagcactacccccctccaccagcaccacaacataagggcccttttaggcaggatgtgcctccttcccctcctcagcatcaaaggatgccagcttaccaggaaactggacggcctggccctcgcggtggttctcccgaccagtatccataccgaacccaggacagtcgtcagaagaatccaatgaccgcggcagtttag

SEQ ID NO: 263971 - protein, 641 aa, Artificial Sequence
  derived and/or modified sequence
MTEKPEFQSQVYNYAKDNNIKQDSFKEENPMETSVSANTDQLGNEYFRQPPPRSPPLIHCSGEMLKFTEKSLAKSIAKESALNPSQPPSFLCKTAVPSKEIQNYGEIPEMSVSYEKEVTAEGVERPEIVSTWSSAGISWRSEACRENCEMPDWEQSAESLQPVQEDMALNEVLQKLKHTNRKQEVRIQELQCSNLYLEKRVKELQMKITKQQVFIDVINKLKENVEELIEDKYKIILEKNDTKKTLQNLEEVLANTQKHLQESRNDKEMLQLQFKKIKANYVCLQERYMTEMQQKNKSVSQYLEMDKTLSKKEEEVERLQQLKKELEKATASALDLLKREKEAQEQEFLSLQEEFQKLEKENLEERQKLKSRLEKLLTQVRNLQFMSENERTKNIKLQQQINEVKNENAKLKQQVARSEEQNYVPKFETAQLKDQLEEVLKSDITKDTKTTHSNLLPDCSPCEERLNPADIKRASQLASKMHSLLALMVGLLTCQDIINSDAEHFKESEKVSDIMLQKLKSLHLKKKTLDKEVIDCDSDEAKSIRDVPTLLGAKLDKYHSLNEELDFLVTSYEEIIECADQRLAISHSQIAHLEERNKHLEDLIRKPREKARKPRSKSLENHPKSMTMMPALFKENRNDLD

SEQ ID NO: 263972 - DNA, 1926 bp, Artificial Sequence
  derived and/or modified sequence
atgactgaaaagcctgaatttcagagtcaggtgtacaactacgcaaaagacaacaacatcaagcaggattctttcaaggaagagaacccaatggaaacttctgtgagcgcgaataccgaccagcttgggaacgaatactttagacagcctcctccgcgaagcccccctctcatccattgcagtggcgaaatgctcaagtttactgagaagagcctggctaaaagtatcgcgaaggagtcggcgctgaacccctctcagccgcccagttttctctgtaaaacagcagtacctagcaaggaaattcaaaactacggggagatacctgaaatgagcgtctcatatgagaaagaggtgaccgctgagggagtagagaggccagagatcgtgtccacctggagttccgctggtataagctggcggagcgaggcgtgccgggaaaattgcgagatgcccgactgggaacagtcagcagagtccttgcaacccgttcaagaggacatggctctcaacgaagtgttgcagaagctgaagcacaccaaccggaagcaagaagtcaggattcaagaattgcaatgcagcaacctatatttggagaaacgcgtcaaggaactccagatgaagatcactaagcagcaagtgtttattgacgtcattaacaaactaaaggagaacgttgaggagctgattgaggataagtacaagatcatccttgagaagaatgacactaagaagaccctgcagaacctggaggaggtcttggctaatacccagaaacatctgcaagagagtaggaatgacaaagagatgttgcagctgcagttcaaaaagatcaaggccaattatgtctgcctgcaggagcgttacatgaccgagatgcagcaaaagaacaagtccgtatcccagtatctcgagatggacaagactctgtccaagaaggaagaagaggtggagcgattgcagcagctgaaaaaagagctagaaaaagctaccgcctccgccctggatttattaaagagagagaaagaggcccaggagcaggagtttttaagccttcaggaggaattccaaaaactcgaaaaggaaaatttggaagagagacagaagctgaaatccagattggagaagcttctaacccaggtgagaaaccttcagttcatgtcagagaacgagagaacaaagaacattaaattgcaacagcagataaatgaagtgaagaacgagaacgccaagctgaagcaacaggtggccagaagcgaagaacaaaattacgtccctaagtttgaaactgcccagctcaaagatcagctggaagaggttctcaagagcgatattacgaaggacactaagacaacgcatagcaacttgctgcctgactgcagcccatgtgaagagcgcctgaacccggccgatatcaaacgggcttcacagctggcaagcaagatgcatagcttgttggccctgatggtcggcttactaacctgccaggatattattaacagcgacgcggaacactttaaagagagcgagaaagtgagcgacattatgctgcagaagctcaaatcactgcacctcaaaaaaaagaccctcgataaggaggtcatagactgcgatagtgacgaggctaagtctattcgggacgtcccgactcttctgggagcaaaactcgacaaatatcatagcctgaacgaagagctggactttctcgtgacatcctatgaggaaatcatcgaatgtgccgaccagaggttagctatcagccactcacaaattgcccatctcgaagaaaggaacaaacatcttgaggacctgatccggaaacctcgcgagaaagcccggaagccccggtcaaaatcactcgagaatcatcccaaaagcatgaccatgatgccagcactgttcaaggaaaatagaaacgatcttgattag

SEQ ID NO: 263973 - DNA, 1926 bp, Artificial Sequence
  derived and/or modified sequence
atgacagagaagccagagttccagagccaggtgtacaactatgccaaggacaacaacatcaagcaggacagcttcaaggaggagaaccccatggagacctctgtgtctgccaacacagaccagctgggcaatgagtacttccggcagcccccacccaggagccccccactcatccactgcagcggggagatgctgaagttcacagagaagagcctggccaagagcatcgccaaggagagcgccctgaaccccagccagcccccatccttcctgtgcaagacagctgtgcccagcaaggagatccagaactacggggagatccctgagatgtctgtgtcctatgagaaggaggtgacagctgagggcgtggagaggcctgagatcgtgtccacctggagcagcgctggcatctcctggaggtctgaggcctgccgggagaactgtgagatgccagactgggagcagagcgctgagagcctgcagcctgtgcaggaggacatggccctgaatgaggtgctgcagaagctgaagcacaccaacaggaagcaggaggtgcgcatccaggagctgcagtgcagcaacctgtacctggagaagagggtgaaggagctgcagatgaagatcaccaagcagcaggtgttcattgatgtgatcaacaagctgaaggaaaatgtggaggagctgattgaggacaagtacaagatcatcctggagaagaatgacaccaagaagaccctgcagaacctggaggaggtgctggccaacacccagaagcacctgcaggagagcagaaatgacaaggagatgctgcagctgcagttcaagaagatcaaggccaactacgtgtgcctgcaggagcgctacatgacagagatgcagcagaagaacaagtctgtgtcccagtacctggagatggacaagaccctgagcaagaaggaggaggaggtggagcggctgcagcagctgaagaaggagctggagaaggccacagccagcgccctggacctgctgaagcgggagaaggaggcccaggagcaggagttcctgagcctgcaggaggagttccagaagctggagaaggagaacctggaggagcggcagaagctgaagagccggctggagaagctgctgacccaggtgaggaacctgcagttcatgtctgaaaatgaaagaaccaagaacatcaagctgcagcagcagatcaatgaggtgaagaatgaaaatgccaagctgaagcagcaggtggcccggtctgaggagcagaactacgtgcccaagtttgaaacagcccagctgaaggaccagctggaggaggtgctgaagagtgacatcaccaaggacaccaagaccacccacagcaacctgctgcctgactgcagcccctgtgaggagcggctgaacccagctgacatcaagagggccagccagctggccagcaagatgcacagcctgctggccctgatggtgggcctgctgacctgccaggacatcatcaacagtgatgctgagcacttcaaggagagcgagaaggtgtctgacatcatgctgcagaagctgaagagcctgcacctgaagaagaagaccctggacaaggaggtgattgactgtgacagtgatgaggccaagagcatcagagatgtgcccaccctgctgggcgccaagctggacaagtaccacagcctgaatgaggagctggacttcctggtgaccagctatgaggagatcattgaatgtgccgaccagaggctggccatcagccacagccagatcgcccacctggaggagaggaacaagcacctggaggacctgatcaggaagccccgggagaaggccaggaagcccaggagcaagagcctggagaaccaccccaagtccatgaccatgatgcctgccctcttcaaggaaaatagaaatgacctggactag

SEQ ID NO: 263974 - DNA, 1926 bp, Artificial Sequence
  derived and/or modified sequence
atgaccgagaagcccgagttccagagccaggtgtacaactacgccaaggataacaatattaaacaggatagtttcaaagaggagaacccgatggaaactagtgtgtctgcaaatacagatcagctgggaaacgagtactttaggcaacccccgccaagatctcctccactgattcactgtagcggtgagatgcttaagtttaccgagaagagccttgctaaaagtattgcgaaggaaagtgccctgaatccatcacagccaccctcctttctttgtaaaacagccgtcccatccaaggaaatccagaattacggcgaaatccccgaaatgtccgtttcttacgaaaaggaggtgactgccgaaggggtggaaaggcccgaaatcgtctccacatggtcttccgccgggatcagctggcgtagcgaagcctgtcgggagaactgtgaaatgcccgattgggaacaatcagctgagtcactacagccagtccaagaggacatggcgttaaacgaggttctgcagaaattgaaacataccaacaggaagcaagaagttcggatccaagagctgcagtgcagcaatttgtacctggagaagagagttaaggagctgcagatgaaaattactaagcagcaggtcttcatagatgttataaacaagttaaaagaaaacgtggaagagttgatcgaagataagtacaagatcatactggagaaaaacgataccaaaaaaaccctgcagaacctggaagaggtgctcgcgaatactcagaagcatttgcaggaatcgagaaatgacaaggaaatgctccagttacagtttaagaagatcaaggccaattatgtgtgcctccaggaaaggtacatgaccgaaatgcaacaaaaaaataagagtgtttcccagtatctcgagatggataagacgctttcgaagaaagaggaggaggttgaaagactgcagcaactaaaaaaggagcttgaaaaggctaccgcttcagcacttgacctcctcaaacgcgaaaaggaggcccaggagcaggagtttctgtcactgcaggaagaattccagaagctcgagaaggaaaatttagaagagcgccagaaactgaaatctaggcttgagaaactcctgacccaggtacggaatctgcaattcatgtccgagaacgagaggacgaagaacattaagctgcagcagcaaatcaacgaagtgaaaaatgaaaacgctaagctgaagcaacaggtggcgagatccgaggagcagaattacgttccaaaattcgagacagcacagctgaaggaccaacttgaagaggtactcaaaagcgatatcacaaaagatactaaaactactcattccaacctgctgcctgactgcagcccctgtgaagagaggctcaaccctgcggacatcaaacgcgcctcccagctggcatccaaaatgcactcgctgctggcattgatggtgggtctgctgacatgccaggacattatcaatagcgacgcggagcatttcaaggaatctgaaaaggtgtcggacattatgctgcagaagctgaagtccttgcacctgaagaagaagacacttgataaggaagtcatcgactgtgactctgacgaagcgaagtcaatccgtgacgtgccaacactccttggggccaagttggacaaataccactcgctgaatgaggagctggattttctggtgacatcttacgaggaaatcatagaatgtgccgaccagaggctggccataagccatagccagatcgcccatttagaagagagaaacaagcacctggaagatttaatcaggaagccacgggaaaaagctcgcaaacctagatcaaaaagcctggaaaaccatccaaagtctatgaccatgatgccagctctgtttaaggaaaatagaaatgatctcgattag

SEQ ID NO: 263975 - DNA, 1926 bp, Artificial Sequence
  derived and/or modified sequence
atgacggaaaagcctgaattccaatcgcaagtgtataattacgccaaagataacaacataaaacaggattccttcaaggaggaaaaccccatggagacctccgtctctgcaaatactgaccaacttggaaacgaatacttccggcagccccctcctcgcagtccccctctgatccattgttcaggagaaatgctgaaattcacagaaaagagtttggccaaatcgattgccaaagagtctgccctcaaccccagccagcctccctctttcctgtgtaagacagcagttcccagcaaggaaatacaaaactacggggaaattcccgagatgtccgtgtcatatgagaaagaggtaacagccgaaggagtagaacgcccagaaatagtgtctacgtggtcgagcgccggaatttcatggcgtagcgaggcatgtagggagaattgcgaaatgcctgactgggaacagagcgctgaatcattacagccagtacaagaggatatggcactaaacgaagtcctccaaaaactcaaacacactaacagaaagcaagaggtcaggatccaggagttacagtgttcgaatttgtaccttgagaagcgagtgaaagaactgcagatgaagattacaaagcagcaagtcttcatagatgtgattaataaattgaaagagaatgtggaggagcttatcgaagacaagtacaagattattctggaaaaaaatgataccaaaaagactctccagaatctcgaggaggttctcgcaaatactcagaagcacttgcaggagtcaaggaacgataaagagatgctccagctgcagttcaagaagataaaggctaattacgtgtgtctgcaagaacggtatatgacagagatgcagcaaaagaacaaaagtgtttctcagtacctcgagatggataaaaccctgagtaagaaggaggaggaggtggaacgcctccagcaacttaaaaaggagctggaaaaggcaactgcttctgctctcgatctgctgaagcgcgaaaaggaagcgcaggagcaagaatttttgagtctgcaggaggaattccagaaactggagaaagaaaatttggaggaaagacagaagctaaaatcacggctggagaagctgctgactcaggtgcgcaacctgcagttcatgagcgagaacgagcgaaccaagaatatcaaactgcagcagcagatcaacgaggtgaagaatgagaacgctaagctgaaacagcaggtggctagaagtgaagaacaaaattacgtacctaaattcgaaactgcccagctcaaagaccagctggaagaagtgctcaaatccgatataacgaaggacacaaagaccactcactcaaacctgctccctgattgctccccatgcgaggaacgtctcaatcctgcagatattaagagggcatcccagctcgctagtaagatgcatagtctattggcacttatggtagggctactgacctgccaggacatcattaattctgatgccgaacatttcaaagaatccgagaaggtgtcggatatcatgttgcagaaactgaaaagtctgcatctgaaaaagaagacacttgacaaggaggttatcgattgcgattcagacgaggccaagtcaattagggacgtcccaacgctccttggtgcaaagctagataaataccatagcctcaacgaggagctggattttcttgtcaccagctacgaagagatcatcgagtgcgcagaccagagactcgccatttcccattctcagattgcgcacctagaagagcgaaataagcacttggaagatctcatccgaaagccccgagaaaaggctaggaaacctaggtctaagtcattggagaaccatcccaagtccatgacaatgatgcctgccttattcaaagagaatcgaaacgatctcgattag

SEQ ID NO: 263976 - DNA, 1926 bp, Artificial Sequence
  derived and/or modified sequence
atgaccgagaagcccgagttccagagccaggtgtacaactacgccaaggacaacaacatcaagcaggacagcttcaaggaggagaaccccatggagaccagcgtgagcgccaacaccgaccagctgggcaacgagtacttcagacagcccccccccagaagcccccccctgatccactgcagcggcgagatgctgaagttcaccgagaagagcctggccaagagcatcgccaaggagagcgccctgaaccccagccagccccccagcttcctgtgcaagaccgccgtgcccagcaaggagatccagaactacggcgagatccccgagatgagcgtgagctacgagaaggaggtgaccgccgagggcgtggagagacccgagatcgtgagcacctggagcagcgccggcatcagctggagaagcgaggcctgcagagagaactgcgagatgcccgactgggagcagagcgccgagagcctgcagcccgtgcaggaggacatggccctgaacgaggtgctgcagaagctgaagcacaccaacagaaagcaggaggtgagaatccaggagctgcagtgcagcaacctgtacctggagaagagagtgaaggagctgcagatgaagatcaccaagcagcaggtgttcatcgacgtgatcaacaagctgaaggagaacgtggaggagctgatcgaggacaagtacaagatcatcctggagaagaacgacaccaagaagaccctgcagaacctggaggaggtgctggccaacacccagaagcacctgcaggagagcagaaacgacaaggagatgctgcagctgcagttcaagaagatcaaggccaactacgtgtgcctgcaggagagatacatgaccgagatgcagcagaagaacaagagcgtgagccagtacctggagatggacaagaccctgagcaagaaggaggaggaggtggagagactgcagcagctgaagaaggagctggagaaggccaccgccagcgccctggacctgctgaagagagagaaggaggcccaggagcaggagttcctgagcctgcaggaggagttccagaagctggagaaggagaacctggaggagagacagaagctgaagagcagactggagaagctgctgacccaggtgagaaacctgcagttcatgagcgagaacgagagaaccaagaacatcaagctgcagcagcagatcaacgaggtgaagaacgagaacgccaagctgaagcagcaggtggccagaagcgaggagcagaactacgtgcccaagttcgagaccgcccagctgaaggaccagctggaggaggtgctgaagagcgacatcaccaaggacaccaagaccacccacagcaacctgctgcccgactgcagcccctgcgaggagagactgaaccccgccgacatcaagagagccagccagctggccagcaagatgcacagcctgctggccctgatggtgggcctgctgacctgccaggacatcatcaacagcgacgccgagcacttcaaggagagcgagaaggtgagcgacatcatgctgcagaagctgaagagcctgcacctgaagaagaagaccctggacaaggaggtgatcgactgcgacagcgacgaggccaagagcatcagagacgtgcccaccctgctgggcgccaagctggacaagtaccacagcctgaacgaggagctggacttcctggtgaccagctacgaggagatcatcgagtgcgccgaccagagactggccatcagccacagccagatcgcccacctggaggagagaaacaagcacctggaggacctgatcagaaagcccagagagaaggccagaaagcccagaagcaagagcctggagaaccaccccaagagcatgaccatgatgcccgccctgttcaaggagaacagaaacgacctggactag

SEQ ID NO: 263977 - protein, 262 aa, Artificial Sequence
  derived and/or modified sequence
MAAASAGATRLLLLLLMAVAAPSRARGSGCRAGTGARGAGAEGREGEACGTVGLLLEHSFEIDDSANFRKRGSLLWNQQDGTLSLSQRQLSEEERGRLRDVAALNGLYRVRIPRRPGALDGLEAGGYVSSFVPACSLVESHLSDQLTLHVDVAGNVVGVSVVTHPGGCRGHEVEDVDLELFNTSVQLQPPTTAPGPETAAFIERLEMEQAQKAKNPQEQKSFFAKYWMYIIPVVLFLMMSGAPDTGGQGGGGGGGGGGGSGR

SEQ ID NO: 263978 - protein, 269 aa, Artificial Sequence
  derived and/or modified sequence
MAAASAGATRLLLLLLMAVAAPSRARGSGCRAGTGARGAGAEGREGEACGTVGLLLEHSFEIDDSANFRKRGSLLWNQQDGTLSLSQRQLSEEERGRLRDVAALNGLYRVRIPRRPGALDGLEAGGYVSSFVPACSLVESHLSDQLTLHVDVAGNVVGVSVVTHPGGCRGHEVEDVDLELFNTSVQLQPPTTAPGPETAAFIERLEMEQAQKAKNPQEQKSFFAKYWMYIIPVVLFLMMSGAPDTGGQGGGGGGGGGGGSGRCCVPPSL

SEQ ID NO: 263979 - DNA, 789 bp, Artificial Sequence
  derived and/or modified sequence
atggcagccgcatccgctggagccactaggcttctgttactgcttctgatggccgtcgctgccccatccagagccagaggaagcggttgcagagcaggtacgggtgccagaggggctggcgcagagggcagagagggcgaggcttgcggaaccgtgggtctgcttctcgagcactcattcgagattgatgacagtgcgaacttcagaaagcggggatcgttgttgtggaatcagcaggacgggactctcagcctgagccagcggcaattgtctgaagaagaacgaggccgactgcgtgatgtggcagcactgaacgggctatatagagtgcgaatccccagaagaccaggagcccttgacggactcgaggctgggggttacgtgtccagcttcgttcctgcctgttcactagtggaatcacacctgtcagatcagttgacactgcacgtcgatgtggctggcaacgtcgttggagtgagcgtcgtcacccatcccggtggctgcagaggacatgaggttgaagacgttgacctggaactctttaatacctcggtccaattgcagccaccaacgacagcccctggcccagagacagcagcatttattgagagactggagatggaacaggctcagaaggcaaagaatccacaggagcagaaatcattctttgccaagtactggatgtatataatccccgtagtgctgtttttaatgatgagcggagcaccagacactggagggcaaggcggagggggaggcggaggtggcggtggtgggtccggcagatag

SEQ ID NO: 263980 - DNA, 810 bp, Artificial Sequence
  derived and/or modified sequence
atggccgcagcaagtgccggtgcaaccagactactgctcctattattaatggctgtggccgcaccctcacgagccagaggcagcggatgccgggcaggaacaggggctcggggagctggagccgagggccgagagggcgaggcatgtggcacagtcggactcctcctggaacatagcttcgaaatcgatgactcggctaacttcagaaagcgcggaagtttattgtggaaccagcaggatggcactctttccctatcccaacgccagctgtctgaagaagaaagaggaaggctccgagatgtggctgcactgaacggactgtatcgcgttcggatacctcgcaggcctggagctctggacggcctagaagccggagggtatgtgagctctttcgtaccggcatgctcactggtcgagagccatttgtccgatcagctcacccttcatgtcgatgtggccggtaacgttgtgggagtgagtgtcgtgacccatcccggtggctgtcgcggacacgaagtagaggatgtggaccttgaattgttcaacacatctgttcaattgcagcccccaacaactgcacccggaccagaaaccgcggcttttattgaacgcctggaaatggagcaggcccagaaagcaaagaatcctcaggaacagaaatctttctttgcgaagtattggatgtacatcattcccgtcgtgctcttccttatgatgtcaggggctcctgacaccggaggccaaggaggtgggggagggggaggtggagggggaggcagtggccgatgttgtgtccctccctccctctag

SEQ ID NO: 263981 - DNA, 789 bp, Artificial Sequence
  derived and/or modified sequence
atggcagcagcatcagcaggggctacccggctgctactactccttctaatggcggttgccgctccaagtagagctcgaggaagcggatgccgagccgggaccggggcccggggcgcaggagccgaaggtcgtgagggcgaggcttgtgggacagtcgggttgctcctggaacatagttttgagatcgacgatagcgctaatttcaggaaaagagggtccctactgtggaatcagcaggatggtacgctgtccctcagccaaagacagctgtctgaagaggaacggggcaggctccgggacgtagctgccttgaatgggctatacagagttaggattccaaggcgacccggtgcactggacggtctagaggccggaggttatgtgagcagcttcgtccctgcttgctcgctggtggagtcgcacctctcggaccagcttacccttcatgtagacgtagctgggaatgtagtgggcgttagcgtggttacccaccccgggggttgccgagggcatgaagttgaggatgttgaccttgaactgtttaatacatcagtacaattgcaaccacccacgacagctcccggccccgaaactgccgcgtttatagaaagattggaaatggaacaggcacagaaggccaagaacccacaagaacagaagagcttttttgccaaatattggatgtacatcatccctgttgttctttttctgatgatgagtggagcgccagatacaggcgggcaaggcggcggcggcggtggcggcgggggtggggggtcagggcggtag

SEQ ID NO: 263982 - DNA, 810 bp, Artificial Sequence
  derived and/or modified sequence
atggcagccgctagcgcaggtgctacccggctgttactgctgctcctgatggcggttgctgcgcctagtcgcgccaggggcagcggctgccgtgctgggacaggggcccgtggcgctggagccgaaggaagagagggagaggcatgtggcactgttggcctgttattggaacatagttttgagatagacgatagcgccaatttccggaagcgcggctccttattatggaaccaacaggacgggacattgagcctgtcacaacgtcaattgtctgaggaggagagagggaggcttagagacgtggctgcattgaacgggctgtacagggtgcggatacctaggcgcccaggggcgttggacggattggaggccgggggatatgtgtccagcttcgtacccgcctgctcactggtcgaatcccacttgtctgatcagctcaccctgcatgtagatgtggccggaaatgtcgtcggagtttcggtcgtcactcatcccgggggctgccggggccatgaggttgaagacgtcgacttggagctctttaacactagcgtgcagctgcaaccgcccacgaccgcgccaggccccgaaaccgcagcattcattgaacgtcttgagatggagcaagctcagaaggcaaagaacccccaagagcagaagtcattttttgccaaatactggatgtacatcatccctgtggttctctttttaatgatgtccggggcccccgatacaggaggccagggaggtggcggtggaggaggtggtgggggaggatccgggcggtgctgcgttccccctagtctgtag

SEQ ID NO: 263983 - DNA, 789 bp, Artificial Sequence
  derived and/or modified sequence
atggcagctgccagcgccggtgcaacaagacttctgctgctgttgctgatggccgtagcagcaccatctagagctcggggcagcggctgtcgcgctggaactggtgccaggggagccggggctgaggggagagaaggggaagcctgcgggacggtagggttgctgcttgagcacagttttgaaatcgatgactcagctaacttcaggaaacggggcagccttctgtggaaccaacaggacggcaccttaagcctgagccagcgacagctaagcgaagaggagaggggacgactgagggacgttgcagctcttaacggcctgtacagagttagaatccctagacgaccaggagctctcgatggcctagaagccggaggctacgtttcttccttcgtaccagcttgcagcctcgttgagagtcacctctccgaccagctcactcttcacgtagatgtcgccggtaacgtggtgggcgtctctgtagtcacccaccctggaggctgccggggccacgaggtggaagacgtggacttggaactttttaacacatctgtacagctgcagcctcccactacagcccctggaccggaaaccgcagcattcattgagcggctagaaatggaacaggcccagaaggcaaagaatccacaggagcagaagtccttttttgctaagtattggatgtacattataccggttgttctctttctgatgatgagtggagctcctgacacaggtggacaaggaggcggcggcgggggtggaggagggggcggaagtgggcggtag

SEQ ID NO: 263984 - DNA, 810 bp, Artificial Sequence
  derived and/or modified sequence
atggcagccgcttccgcaggggctaccaggttattactcctattgctgatggcagtagccgccccatccagggcaagaggatcaggctgccgtgcgggtactggtgcgcggggcgcgggtgccgaggggagggagggcgaagcctgtggaaccgtgggactcctacttgaacactcttttgaaatagatgactccgctaacttccggaagcgagggagcctgctttggaatcagcaagatggtaccctctctctctcacagaggcagctatcagaggaagaaagaggacgattgcgagatgtggctgcgctgaatggactgtatagagtgcggatcccgagaagacctggcgctctcgacggcctcgaagctggcggctatgtgagctctttcgtgccagcctgttccctcgtcgagtctcatctctctgaccaactgacattacatgtggacgtcgccgggaatgtggtaggagtctctgtggtgactcatccaggggggtgccgtggccatgaagtggaggatgtggatctcgagttgtttaatacaagcgttcagctgcaaccgccaaccactgcccctggtcccgaaactgcggcttttatagagaggttggaaatggagcaggcacagaaggctaaaaaccctcaagaacagaagagtttcttcgctaagtactggatgtacattattccagtcgtattattcctcatgatgagcggagcaccagatactggaggccaaggagggggtgggggcgggggaggagggggtggaagtggtagatgttgcgtgccgccatcactctag

SEQ ID NO: 263985 - DNA, 789 bp, Artificial Sequence
  derived and/or modified sequence
atggccgccgccagcgccggcgccaccagactgctgctgctgctgctgatggccgtggccgcccccagcagagccagaggcagcggctgcagagccggcaccggcgccagaggcgccggcgccgagggcagagagggcgaggcctgcggcaccgtgggcctgctgctggagcacagcttcgagatcgacgacagcgccaacttcagaaagagaggcagcctgctgtggaaccagcaggacggcaccctgagcctgagccagagacagctgagcgaggaggagagaggcagactgagagacgtggccgccctgaacggcctgtacagagtgagaatccccagaagacccggcgccctggacggcctggaggccggcggctacgtgagcagcttcgtgcccgcctgcagcctggtggagagccacctgagcgaccagctgaccctgcacgtggacgtggccggcaacgtggtgggcgtgagcgtggtgacccaccccggcggctgcagaggccacgaggtggaggacgtggacctggagctgttcaacaccagcgtgcagctgcagccccccaccaccgcccccggccccgagaccgccgccttcatcgagagactggagatggagcaggcccagaaggccaagaacccccaggagcagaagagcttcttcgccaagtactggatgtacatcatccccgtggtgctgttcctgatgatgagcggcgcccccgacaccggcggccagggcggcggcggcggcggcggcggcggcggcggcagcggcagatag

SEQ ID NO: 263986 - DNA, 810 bp, Artificial Sequence
  derived and/or modified sequence
atggccgccgccagcgccggcgccaccagactgctgctgctgctgctgatggccgtggccgcccccagcagagccagaggcagcggctgcagagccggcaccggcgccagaggcgccggcgccgagggcagagagggcgaggcctgcggcaccgtgggcctgctgctggagcacagcttcgagatcgacgacagcgccaacttcagaaagagaggcagcctgctgtggaaccagcaggacggcaccctgagcctgagccagagacagctgagcgaggaggagagaggcagactgagagacgtggccgccctgaacggcctgtacagagtgagaatccccagaagacccggcgccctggacggcctggaggccggcggctacgtgagcagcttcgtgcccgcctgcagcctggtggagagccacctgagcgaccagctgaccctgcacgtggacgtggccggcaacgtggtgggcgtgagcgtggtgacccaccccggcggctgcagaggccacgaggtggaggacgtggacctggagctgttcaacaccagcgtgcagctgcagccccccaccaccgcccccggccccgagaccgccgccttcatcgagagactggagatggagcaggcccagaaggccaagaacccccaggagcagaagagcttcttcgccaagtactggatgtacatcatccccgtggtgctgttcctgatgatgagcggcgcccccgacaccggcggccagggcggcggcggcggcggcggcggcggcggcggcagcggcagatgctgcgtgccccccagcctgtag

SEQ ID NO: 263987 - DNA, 1946 bp, Artificial Sequence
  derived and/or modified sequence
ttcctcccggcgtgctccgcggctcttggctcacagccgtcccttcgctggtgggaagaagccgagatggcggcagccagcgctggggcaacccggctgctcctgctcttgctgatggcggtagcagcgcccagtcgagcccggggcagcggctgccgggccgggactggtgcgcgaggggctggggcggaaggtcgagagggcgaggcctgtggcacggtggggctgctgctggagcactcatttgagatcgatgacagtgccaacttccggaagcggggctcactgctctggaaccagcaggatggtaccttgtccctgtcacagcggcagctcagcgaggaggagcggggccgactccgggatgtggcagccctgaatggcctgtaccgggtccggatcccaaggcgacccggggccctggatggcctggaagctggtggctatgtctcctcctttgtccctgcgtgctccctggtggagtcgcacctgtcggaccagctgaccctgcacgtggatgtggccggcaacgtggtgggcgtgtcggtggtgacgcaccccgggggctgccggggccatgaggtggaggacgtggacctggagctgttcaacacctcggtgcagctgcagccgcccaccacagccccaggccctgagacggcggccttcattgagcgcctggagatggaacaggcccagaaggccaagaacccccaggagcagaagtccttcttcgccaaatactggatgtacatcattcccgtcgtcctgttcctcatgatgtcaggagcgccagacaccgggggccagggtgggggtgggggtgggggtggtggtgggggtagtggccggtgagggcccaggctggtcagcgtcccgtcttgcacacccaggggcctccctttctgctggagtcccctgtgtcctcagccatcccaagaagggtttgctggtccctcctttccccccgtcccacgaggccacctgggccagccccttgtcctctgccttctgctggcagaggagcagctggactggggcctttggcacagcagccggtgtctcctgcgcccgcctcccccatggccccatgcagccccaggggcttcccccctgcccatggagtagagcccgagatcctggccactatgccagttctgacctcgcatccccctaccccgagcccatgcagtctgggaacatgccgccttctctccagcctctgtgcctttgttccaggtggtctcaccctcctgtccctggctgggctaggtggtcctgtccaggctcctgcagcgcccccctcactttgacactggactaggatgcagcctcccttctgtgtccccttgagggtaccctgggtcccctcatcaggggcagaggcatgaaagagtcggggctggatggccgggggcttctgggcccgacgcctagtgcagcccctggggtcgtggtttgacatttgtctgcctggtgcaaacaaggaatccttgcctttaaggtgacaggccctccacaggcttccagacttgaaggaaaaggtttaagaaagaaaacaaaaccaacagttagtggagtcaaagcccagacactgtaaatagaaccccctccaccaccccccgccgcccagcatcctacctggactgcggtgctacgagggcctgcgggcctttgctgtgtgccaccctccctgtaagtctatttaaaaacatcgacgatacattgaaatgtgtgaacgttttgaaaagctacagcttccagcagccaaaagcaactgttgttttggcaagacggtcctgatgtacaagcttgattgaaattcactgctcacttgatacgttattcagaaacccaaggaatggctgtccccatcctcatgtggctgtgtggagctcagctgtgttgtgtggcagtttattaaactgtcccccagatcgacacgc

SEQ ID NO: 263988 - DNA, 789 bp, Artificial Sequence
  derived and/or modified sequence
atggccgcagcatccgcaggagctacccgactgctgctgctgttgctgatggccgtcgcagcgccctcccgagcaagagggtctgggtgtcgtgctggaacaggagctcgcggcgctggcgctgaaggcagggaaggcgaggcgtgtgggaccgtaggcctgctgctggagcactctttcgagattgatgatagtgccaacttccgaaaacggggtagcctactttggaatcagcaggatggtactctctcgctttcacagcgacagctgtcggaggaggagaggggccgcctcagagacgtggcggctttaaatggtctgtatcgggtgcgtatccccagacgtccaggtgccctggatggcctcgaggcagggggctacgtttccagctttgtcccagcctgctccctcgtggaaagccatcttagtgatcagctgaccctccacgtggatgtcgccggtaatgtcgtgggggtgtcggttgtgacccaccccggtggatgtagggggcacgaagtggaggatgtagatctcgagctcttcaacacatccgttcagctgcaaccccctacgaccgcccctggtccagagaccgcagctttcattgaaaggctcgagatggaacaggcccagaaggcgaagaatccgcaggaacagaagtcattttttgcaaaatactggatgtacataattcctgttgtcctctttctgatgatgtctggggcgccagacactggaggacaaggcggaggaggggggggggggggaggcggcggatccgggcgctag

SEQ ID NO: 263989 - DNA, 810 bp, Artificial Sequence
  derived and/or modified sequence
atggccgctgctagcgctggcgcaactcgcctcctcttacttctcttgatggctgtggctgctccctcaagagcgcgtggttccggctgtagagccggaacaggcgctagaggagccggcgccgagggtcgagagggggaggcatgcggaactgttggcctgctcctggagcattcattcgagatcgatgactccgccaatttcagaaaacgcggtagcctgctgtggaaccaacaagacgggacactgagcctgtcccagcgtcagctgagcgaggaggaacgcggacgcctaagggacgtcgctgctctcaacggtctctatcgggtgaggatccccagacgccctggggccctggacggtctggaggcaggggggtatgtttcctccttcgtgcctgcatgctccctggtcgaatcccatctctctgatcagctgacgctgcacgtggacgttgcaggtaacgtcgtgggcgtgtccgtggttacccacccaggaggctgcagaggccacgaggtcgaagatgtcgacctggagctgttcaatacctccgttcaattgcagccccccactacggcacccggtcccgaaaccgccgccttcatcgaacggttagaaatggagcaagcccagaaggcaaagaatccccaagagcaaaaatccttcttcgcaaaatactggatgtatatcattcctgtggtgctattcctcatgatgagcggagctcccgacacaggcggtcagggtggcggcggtggcggcggcggaggagggggctctgggagatgctgcgttcctccttcactctag

SEQ ID NO: 263990 - DNA, 789 bp, Artificial Sequence
  derived and/or modified sequence
atggctgctgccagcgctggggccacccggctgctgctgctgctgctgatggctgtggccgcccccagccgggcccggggcagcggctgccgggccggcaccggggcccggggagctggagctgagggccgggagggggaggcctgtggcaccgtgggcctgctgctggagcacagctttgaaattgatgattctgccaacttcaggaagaggggcagcctgctgtggaaccagcaggacggcaccctgagcctgagccagaggcagctgtctgaggaggagcggggccgcctgagagatgtggccgccctgaatggcctgtacagagtgcgcatcccccggcggcctggggccctggatggcctggaggccggcggctacgtgagcagctttgtgcctgcctgcagcctggtggagagccacctgagtgaccagctgaccctgcacgtggatgtggccggaaatgtggtgggcgtgtctgtggtgacccaccctgggggctgccggggccacgaggtggaggatgtggacctggagctgttcaacacctctgtgcagctgcagccccccaccacagcccctggccctgagacagctgccttcatcgagcggctggagatggagcaggcccagaaggccaagaacccccaggagcagaagagcttctttgccaagtactggatgtacatcatccctgtggtgctcttcctgatgatgtctggggccccagacacaggaggccagggcggcggcggcggcggcggcggcggcggcggcagcggccgctag

SEQ ID NO: 263991 - DNA, 810 bp, Artificial Sequence
  derived and/or modified sequence
atggctgctgccagcgctggggccacccggctgctgctgctgctgctgatggctgtggccgcccccagccgggcccggggcagcggctgccgggccggcaccggggcccggggagctggagctgagggccgggagggggaggcctgtggcaccgtgggcctgctgctggagcacagctttgaaattgatgattctgccaacttcaggaagaggggcagcctgctgtggaaccagcaggacggcaccctgagcctgagccagaggcagctgtctgaggaggagcggggccgcctgagagatgtggccgccctgaatggcctgtacagagtgcgcatcccccggcggcctggggccctggatggcctggaggccggcggctacgtgagcagctttgtgcctgcctgcagcctggtggagagccacctgagtgaccagctgaccctgcacgtggatgtggccggaaatgtggtgggcgtgtctgtggtgacccaccctgggggctgccggggccacgaggtggaggatgtggacctggagctgttcaacacctctgtgcagctgcagccccccaccacagcccctggccctgagacagctgccttcatcgagcggctggagatggagcaggcccagaaggccaagaacccccaggagcagaagagcttctttgccaagtactggatgtacatcatccctgtggtgctcttcctgatgatgtctggggccccagacacaggaggccagggcggcggcggcggcggcggcggcggcggcggcagcggccgctgctgcgtgccccccagcctgtag

SEQ ID NO: 263992 - DNA, 825 bp, Artificial Sequence
  derived and/or modified sequence
tgggaagaagccgagatggcggcagccagcgctggggcaacccggctgctcctgctcttgctgatggcggtagcagcgcccagtcgagcccggggcagcggctgccgggccgggactggtgcgcgaggggctggggcggaaggtcgagagggcgaggcctgtggcacggtggggctgctgctggagcactcatttgagatcgatgacagtgccaacttccggaagcggggctcactgctctggaaccagcaggatggtaccttgtccctgtcacagcggcagctcagcgaggaggagcggggccgactccgggatgtggcagccctgaatggcctgtaccgggtccggatcccaaggcgacccggggccctggatggcctggaagctggtggctatgtctcctcctttgtccctgcgtgctccctggtggagtcgcacctgtcggaccagctgaccctgcacgtggatgtggccggcaacgtggtgggcgtgtcggtggtgacgcaccccgggggctgccggggccatgaggtggaggacgtggacctggagctgttcaacacctcggtgcagctgcagccgcccaccacagccccaggccctgagacggcggccttcattgagcgcctggagatggaacaggcccagaaggccaagaacccccaggagcagaagtccttcttcgccaaatactggatgtacatcattcccgtcgtcctgttcctcatgatgtcaggagcgccagacaccgggggccagggtgggggtgggggtgggggtggtggtgggggtagtggccgttgctgtgtgccaccctccctgtaa

SEQ ID NO: 263993 - DNA, 789 bp, Artificial Sequence
  derived and/or modified sequence
atggccgccgccagcgccggcgccacccggctgctgctgctgctgctgatggccgtggcagcaccatcacgggctcgagggtctggttgcagggccgggaccggagcccgcggtgctggagctgaagggagagagggtgaggcttgtggaactgtggggctcttattagaacactcttttgagattgacgatagtgccaacttccgcaagcgggggtctttgttgtggaaccagcaggatggcacactcagtctatctcagagacaactctccgaggaggaacgcggaagactgagggacgtcgccgccttgaacggcctgtatcgggttcggattccgcgacggcccggggccttagatggcttggaggcaggtgggtacgtgagtagctttgttcctgcatgttctttagtggaaagccaccttagtgatcagctgaccttgcacgtggatgtggctggcaacgtcgtgggtgtcagcgtagtgacacaccccggtggctgccgcgggcacgaggtcgaggatgtggacctcgagcttttcaatacaagtgttcagctccagcctcccacaaccgctcccggacctgagactgccgcatttattgagaggctggaaatggaacaggcccagaaagccaaaaatcctcaggaacaaaaaagctttttcgcgaaatactggatgtatattataccagtggtgctttttctcatgatgagcggggcccctgatactggtggacagggggggggaggggggggcggaggaggaggcggatccgggagatag

SEQ ID NO: 263994 - DNA, 810 bp, Artificial Sequence
  derived and/or modified sequence
atggccgccgccagcgccggcgccacccggctgctgctgctgctgcttatggccgtggccgcaccgtcccgcgccaggggcagcgggtgcagggccggaaccggcgctcgcggggccggggcagaggggcgagaaggtgaggcctgtgggacggtcggcttactgcttgagcacagcttcgaaatcgatgattctgccaactttcgtaagagaggttctttattatggaatcaacaggacgggactctctccctcagccagcgccaactgtccgaagaggaaagaggccgactcagggacgtagctgccttgaatggcctctaccgcgtacgaattccacggagacccggagcactggatgggctcgaggccggcgggtacgtatccagctttgtcccagcatgttcactggttgaatctcacctgagtgaccagctgaccctccatgtggatgtggcgggcaatgtcgttggcgtgtctgtggtaacgcatccaggagggtgtaggggccacgaagtggaggatgtggatctggaactttttaacacaagcgtccagctgcaacctcctacgaccgcacccggccccgagactgccgcttttatcgaacggctggagatggaacaggcccagaaggctaaaaacccccaggagcagaagtcttttttcgccaagtattggatgtacattattcccgtggtgctgttcctgatgatgtctggagccccagacactggcggccagggcggcggcggcgggggcggcggaggtggagggagtgggcggtgctgtgtgccaccaagcttgtag

SEQ ID NO: 263995 - RNA, 789 nt, Artificial Sequence
  derived and/or modified sequence
auggcagcagcaucagcaggggcuacccggcugcuacuacuccuucuaauggcgguugccgcuccaaguagagcucgaggaagcggaugccgagccgggaccggggcccggggcgcaggagccgaaggucgugagggcgaggcuugugggacagucggguugcuccuggaacauaguuuugagaucgacgauagcgcuaauuucaggaaaagagggucccuacuguggaaucagcaggaugguacgcugucccucagccaaagacagcugucugaagaggaacggggcaggcuccgggacguagcugccuugaaugggcuauacagaguuaggauuccaaggcgacccggugcacuggacggucuagaggccggagguuaugugagcagcuucgucccugcuugcucgcugguggagucgcaccucucggaccagcuuacccuucauguagacguagcugggaauguagugggcguuagcgugguuacccaccccggggguugccgagggcaugaaguugaggauguugaccuugaacuguuuaauacaucaguacaauugcaaccacccacgacagcucccggccccgaaacugccgcguuuauagaaagauuggaaauggaacaggcacagaaggccaagaacccacaagaacagaagagcuuuuuugccaaauauuggauguacaucaucccuguuguucuuuuucugaugaugaguggagcgccagauacaggcgggcaaggcggcggcggcgguggcggcggggguggggggucagggcgguag

SEQ ID NO: 263996 - RNA, 810 nt, Artificial Sequence
  derived and/or modified sequence
auggcagccgcuagcgcaggugcuacccggcuguuacugcugcuccugauggcgguugcugcgccuagucgcgccaggggcagcggcugccgugcugggacaggggcccguggcgcuggagccgaaggaagagagggagaggcauguggcacuguuggccuguuauuggaacauaguuuugagauagacgauagcgccaauuuccggaagcgcggcuccuuauuauggaaccaacaggacgggacauugagccugucacaacgucaauugucugaggaggagagagggaggcuuagagacguggcugcauugaacgggcuguacagggugcggauaccuaggcgcccaggggcguuggacggauuggaggccgggggauauguguccagcuucguacccgccugcucacuggucgaaucccacuugucugaucagcucacccugcauguagauguggccggaaaugucgucggaguuucggucgucacucaucccgggggcugccggggccaugagguugaagacgucgacuuggagcucuuuaacacuagcgugcagcugcaaccgcccacgaccgcgccaggccccgaaaccgcagcauucauugaacgucuugagauggagcaagcucagaaggcaaagaacccccaagagcagaagucauuuuuugccaaauacuggauguacaucaucccugugguucucuuuuuaaugauguccggggcccccgauacaggaggccagggagguggcgguggaggagguggugggggaggauccgggcggugcugcguucccccuagucuguag

SEQ ID NO: 263997 - RNA, 789 nt, Artificial Sequence
  derived and/or modified sequence
auggcagcugccagcgccggugcaacaagacuucugcugcuguugcugauggccguagcagcaccaucuagagcucggggcagcggcugucgcgcuggaacuggugccaggggagccggggcugaggggagagaaggggaagccugcgggacgguaggguugcugcuugagcacaguuuugaaaucgaugacucagcuaacuucaggaaacggggcagccuucuguggaaccaacaggacggcaccuuaagccugagccagcgacagcuaagcgaagaggagaggggacgacugagggacguugcagcucuuaacggccuguacagaguuagaaucccuagacgaccaggagcucucgauggccuagaagccggaggcuacguuucuuccuucguaccagcuugcagccucguugagagucaccucuccgaccagcucacucuucacguagaugucgccgguaacguggugggcgucucuguagucacccacccuggaggcugccggggccacgagguggaagacguggacuuggaacuuuuuaacacaucuguacagcugcagccucccacuacagccccuggaccggaaaccgcagcauucauugagcggcuagaaauggaacaggcccagaaggcaaagaauccacaggagcagaaguccuuuuuugcuaaguauuggauguacauuauaccgguuguucucuuucugaugaugaguggagcuccugacacagguggacaaggaggcggcggcggggguggaggagggggcggaagugggcgguag

SEQ ID NO: 263998 - RNA, 810 nt, Artificial Sequence
  derived and/or modified sequence
auggcagccgcuuccgcaggggcuaccagguuauuacuccuauugcugauggcaguagccgccccauccagggcaagaggaucaggcugccgugcggguacuggugcgcggggcgcgggugccgaggggagggagggcgaagccuguggaaccgugggacuccuacuugaacacucuuuugaaauagaugacuccgcuaacuuccggaagcgagggagccugcuuuggaaucagcaagaugguacccucucucucucacagaggcagcuaucagaggaagaaagaggacgauugcgagauguggcugcgcugaauggacuguauagagugcggaucccgagaagaccuggcgcucucgacggccucgaagcuggcggcuaugugagcucuuucgugccagccuguucccucgucgagucucaucucucugaccaacugacauuacauguggacgucgccgggaaugugguaggagucucuguggugacucauccaggggggugccguggccaugaaguggaggauguggaucucgaguuguuuaauacaagcguucagcugcaaccgccaaccacugccccuggucccgaaacugcggcuuuuauagagagguuggaaauggagcaggcacagaaggcuaaaaacccucaagaacagaagaguuucuucgcuaaguacuggauguacauuauuccagucguauuauuccucaugaugagcggagcaccagauacuggaggccaaggagggggugggggcgggggaggaggggguggaagugguagauguugcgugccgccaucacucuag

SEQ ID NO: 263999 - protein, 436 aa, Artificial Sequence
  derived and/or modified sequence
MSNKDRHIDSSCSSFIKTEPSSPASLTDSVNHHSPGGSSDASGSYSSTMNGHQNGLDSPPLYPSAPILGGSGPVRKLYDDCSSTIVEDPQTKCEYMLNSMPKRLCLVCGDIASGYHYGVASCEACKAFFKRTIQGNIEYSCPATNECEITKRRRKSCQACRFMKCLKVGMLKEGVRLDRVRGGRQKYKRRIDAENSPYLNPQLVQPAKKPYNKIVSHLLVAEPEKIYAMPDPTVPDSDIKALTTLCDLADRELVVIIGWAKHIPGFSTLSLADQMSLLQSAWMEILILGVVYRSLSFEDELVYADDYIMDEDQSKLAGLLDLNNAILQLVKKYKSMKLEKEEFVTLKAIALANSDSMHIEDVEAVQKLQDVLHEALQDYEAGQHMEDPRRAGKMLMTLPLLRQTSTKAVQHFYNIKLEGKVPMHKLFLEMLEAKVC

SEQ ID NO: 264000 - protein, 435 aa, Artificial Sequence
  derived and/or modified sequence
MSNKDRHIDSSCSSFIKTEPSSPASLTDSVNHHSPGGSSDASGSYSSTMNGHQNGLDSPPLYPSAPILGGSGPVRKLYDDCSSTIVEDPQTKCEYMLNSMPKRLCLVCGDIASGYHYGVASCEACKAFFKRTIQGNIEYSCPATNECEITKRRRKSCQACRFMKCLKVGMLKEGVRLDRVRGGRQKYKRRIDAENSPYLNPQLVQPAKKPYNKIVSHLLVAEPEKIYAMPDPTVPDSDIKALTTLCDLADRELVVIIGWAKHIPGFSTLSLADQMSLLQSAWMEILILGVVYRSLSFEDELVYADDYIMDEDQSKLAGLLDLNNAILQLVKKYKSMKLEKEEFVTLKAIALANSDSMHIEDVEAVQKLQDVLHEALQDYEAGQHMEDPRRAGKMLMTLPLLRQTSTKAVQHFYNIKLEGKVPMHKLFLEMLEAKV

SEQ ID NO: 264001 - protein, 354 aa, Artificial Sequence
  derived and/or modified sequence
MSNKDRHIDSSCSSFIKTEPSSPASLTDSVNHHSPGGSSDASGSYSSTMNGHQNGLDSPPLYPSAPILGGSGPVRKLYDDCSSTIVEDPQTKCEYMLNSMPKRLCLVCGDIASGYHYGVASCEACKAFFKRTIQGNIEYSCPATNECEITKRRRKSCQACRFMKCLKVGMLKEGVRLDRVRGGRQKYKRRIDAENSPYLNPQLVQPAKKPYNKIVSHLLVAEPEKIYAMPDPTVPDSDIKALTTLCDLADRELVVIIGWAKHIPGFSTLSLADQMSLLQSAWMEILILGVVYRSLSFEDELVYADDYIMDEDQSKLAGLLDLNNAILQLVKKYKSMKLEKEEFVTLKAIALANS

SEQ ID NO: 264002 - DNA, 1311 bp, Artificial Sequence
  derived and/or modified sequence
atgagcaacaaagaccgacacatcgacagttcatgctctagctttatcaagaccgagcctagttctcccgcatccctgaccgactcagtcaatcatcatagccctggaggctcttctgacgccagcgggtcctacagctccacaatgaacggacaccagaatggcttggactcacctccactgtaccccagcgccccaatcttaggaggctcaggtcccgtgcggaaattgtacgacgactgttccagcactatcgtggaggatcctcagactaaatgcgaatatatgctcaattccatgccaaagcggttatgtctcgtttgcggcgatatagccagcggttaccattatggcgtcgcctcctgcgaggcctgcaaagcatttttcaagaggaccattcaagggaatatcgaatattcatgcccagccacgaatgaatgcgagatcacgaagagaaggagaaagtcttgccaggcctgtcggttcatgaaatgtctcaaggtgggaatgcttaaggagggtgtgcgcctcgaccgggtcagaggcggtcgccaaaaatacaagaggcgaattgacgcagaaaacagtccctatctgaaccctcagctggtgcagcccgcgaaaaagccctacaacaaaattgtgtcccacctgctcgtcgcagagcccgagaaaatctacgcaatgcccgatcctactgtccccgactcagacatcaaggctctgaccacactatgtgatctggcagatagagagctggtggtcatcattggttgggccaagcacatccctggtttcagtacactaagtctcgctgaccaaatgtccttgcttcagtcagcatggatggaaatcctgatcttaggggtggtgtaccggtcactgtcattcgaggatgagctcgtttacgctgacgactatataatggacgaggaccagagtaagctcgctgggctgcttgatcttaacaatgctatcctccagctcgtgaagaagtataaatctatgaagctcgaaaaggaggagttcgtgactctgaaggccatcgctcttgctaactccgattcgatgcatatagaggacgttgaggcggtccagaagctccaggatgttctgcacgaggcgctgcaagattacgaggctggacaacacatggaggacccaagacgggccggcaagatgctgatgacccttcccctgctgcgacagaccagtactaaggccgttcagcatttttacaatataaagctggaggggaaggtgcccatgcacaaactctttttggaaatgctggaagcaaaggtctgctag

SEQ ID NO: 264003 - DNA, 1308 bp, Artificial Sequence
  derived and/or modified sequence
atgtcaaataaagaccggcacatagatagctcatgcagcagcttcataaagactgagccttcctcacccgccagccttaccgattctgtaaaccaccattctcccggcggctcgtcagatgcatctggcagttatagttctaccatgaacggacatcagaacggactagatagtccacctctgtacccctcggcaccaatcctgggaggcagtgggccagttagaaagctgtacgacgattgcagctctaccatcgtcgaagatccccagactaagtgcgaatacatgctgaactccatgcctaaacggctgtgtctggtttgtggcgacatagcatctgggtatcactatggggtggccagctgcgaagcatgtaaggcctttttcaagcgcacaattcaagggaatattgaatacagttgccctgcaaccaacgagtgcgaaattacaaagcgcagaagaaagagttgccaggcttgccgattcatgaaatgtttgaaagtggggatgcttaaagagggcgtgcgactcgatcgggttaggggaggtaggcagaaatataaaagacggatcgatgccgaaaactcaccctacctcaatccacagcttgtgcaacccgccaaaaaaccatacaacaagattgtttcccacctcctcgttgccgaaccagagaaaatttatgccatgccagatccaactgtccctgatagcgatatcaaggctctcacaaccctgtgtgatctggctgatagagagcttgtggtaattataggatgggctaagcacataccggggttctctaccctgtcattagctgatcagatgtctctgctacaatccgcctggatggaaatcttgatcttgggcgtcgtctaccggtccctcagcttcgaggacgagctggtctacgcagacgactatatcatggatgaggatcagagtaagcttgcaggcctgttggaccttaacaatgctattctacaactagtaaaaaagtataaaagcatgaaattggagaaggaagagtttgtgaccctgaaagctattgccctcgccaattcagactccatgcacatcgaagacgtggaagctgtgcagaaactgcaagatgtcctgcacgaggcgctgcaggattacgaggccggacaacacatggaggatccacgtagagctggtaaaatgttgatgactcttcccttgttgcgtcaaacctcaacgaaagctgtccagcatttctacaatatcaagctggaaggcaaagttccaatgcataagctgtttctggagatgctcgaggccaaggtgtag

SEQ ID NO: 264004 - DNA, 1308 bp, Artificial Sequence
  derived and/or modified sequence
atgtccaacaaggatcggcacattgacagcagctgctcttcctttatcaaaaccgaaccaagtagcccagcttccctgaccgactctgtgaaccaccattcacccggcggatctagtgacgcatctgggtcttactcttccactatgaatggacaccagaacggcctggacagcccccccctgtacccgagcgcacctatcctgggaggctccggccctgtgaggaagttgtacgatgactgttcgtctacaattgtggaagaccctcaaactaagtgtgaatatatgctcaactcgatgcccaaacggctgtgcctcgtgtgtggcgacattgcaagcgggtaccactatggcgttgcctcttgcgaagcctgtaaggcattctttaagcggacaattcaggggaacattgaatattcatgtcctgcaactaacgagtgcgagataacaaagcggcgtaggaagagttgccaggcctgccggttcatgaaatgtctgaaagtgggaatgcttaaggagggggtaaggctggatcgggttagaggtgggcgtcagaaatataagaggcgcatcgatgcggagaactccccttacctgaatccgcagttggtgcagccagcgaaaaagccctacaataagattgtgagccacctcttagtcgcagaacctgaaaaaatctacgcgatgcccgatcctaccgttccagactcagatataaaagctttgacgaccttatgcgatctcgccgatcgggagctggtggtgataataggttgggctaaacacatcccagggttcagcactctcagtctcgctgatcaaatgagcctattgcagtcagcctggatggaaatcctgatattgggcgtggtataccggagtctgtcgttcgaggatgagctcgtctatgctgacgattatatcatggatgaagaccagtccaaacttgctgggttgctcgatctgaacaatgccattctgcagcttgtgaagaagtacaagtctatgaagctggaaaaagaggaatttgtgaccctgaaagccattgccctcgctaacagtgattccatgcacatagaagacgttgaagcggttcaaaagctccaagacgttctacacgaagctttacaagactacgaggccggacagcacatggaggacccgcgtcgcgcgggaaagatgctcatgaccttacccttactgcggcagacctccacaaaggccgtccaacacttttacaacatcaagctggaaggcaaggtaccaatgcacaaactattcttggaaatgctggaggccaaggtttag

SEQ ID NO: 264005 - DNA, 1308 bp, Artificial Sequence
  derived and/or modified sequence
atgtcaaacaaggatagacacatcgactcgtcctgttccagctttattaagactgaaccatcctctcctgcatctcttacagacagtgtgaatcaccatagccctgggggaagttctgacgcctctggaagctattcctcaacaatgaatggtcatcagaatgggctcgactctccacccctgtatcctagcgctcccatcttaggcggaagcggtcctgtgcggaagctgtacgatgattgctcttctactatagtggaggatccgcaaactaagtgcgagtacatgctcaatagcatgccgaagcgactttgtctggtgtgtggcgatatagccagtggctaccattacggagtggccagttgtgaggcctgtaaggccttttttaagaggaccattcagggaaatatcgaatatagttgtcccgccactaatgagtgtgaaatcactaaaagaagaagaaagtcatgccaggcatgcaggtttatgaagtgcctgaaggtggggatgctgaaagagggcgttcgccttgacagggtacgcgggggcaggcagaaatacaaacggagaatcgacgctgagaacagtccttacttgaatccacagcttgtgcaaccagccaaaaagccctataacaagatcgtgtcacacttactggtcgctgagcctgagaagatctacgctatgcccgaccccacagtccctgattcagacatcaaagctctgacaaccctttgcgaccttgcggaccgcgaattagtggtgattattggctgggcgaagcatataccgggcttcagtaccctctctcttgctgaccagatgtctctgctgcaatcggcctggatggaaattctaatactgggggtggtctacagatcgctgtcctttgaggacgagctcgtctacgctgatgactatatcatggacgaggaccagagtaagttggcggggctactcgatctgaacaatgcaatccttcaactggttaaaaagtacaaatcaatgaagctggaaaaggaggagtttgtgactctaaaagccatcgctctggcaaattccgacagtatgcacattgaggacgtggaggcagtgcagaagctccaggacgtgctccacgaggctcttcaggactacgaggccggccaacatatggaggacccgagaagggcaggcaaaatgctgatgactctacccctgctgcgccagacctctacgaaggccgtgcaacatttctacaatattaagctggaaggtaaggtacctatgcataagctattcctggaaatgcttgaggccaaggtgtag

SEQ ID NO: 264006 - DNA, 1308 bp, Artificial Sequence
  derived and/or modified sequence
atgtccaacaaagaccggcacattgacagcagctgttctagtttcattaaaaccgagccctcgtctcccgctagtctgacagattccgtgaaccatcactccccagggggcagctccgatgcatctggctcttattctagcaccatgaacgggcaccaaaacggcctcgatagcccaccactatacccttccgcgcccatcttggggggctctggaccggtgcgcaagttgtatgacgactgcagctccacaatcgtggaggacccacagacaaagtgtgagtacatgttgaacagtatgcctaagcggctctgtctggtttgcggggacattgctagcggctatcattacggcgtggcttcctgcgaagcttgcaaggcctttttcaaacgaactattcagggtaatatcgagtattcgtgtccggccactaacgaatgtgaaattaccaagaggaggagaaagagttgtcaggcatgtcggttcatgaagtgtcttaaggtcggcatgctcaaggaaggagtccgactggatagggttcggggcgggcgtcagaaatataagagacggatagatgccgagaatagcccgtatttgaacccgcagctcgttcagcctgcaaagaagccctacaataagattgtttcacacttgctggtggcagagcctgagaaaatatatgccatgccagacccaacggtgccggattccgacatcaaagctctaacgacactctgcgatctcgctgatcgtgaactggttgtcattattggctgggcaaaacacattcctggattttctacgctgtctctcgctgaccagatgtctttgctgcagtcggcctggatggaaattctgatactgggagtcgtgtaccggagtctatccttcgaagacgagctcgtctacgcagacgactatataatggatgaggatcagtccaagttggccggacttctcgacttaaacaacgcgatcttgcagcttgtcaagaagtacaagtcaatgaaactggagaaagaggagttcgtgacactgaaggctatagccctcgctaactctgactcgatgcacatcgaggacgtagaggctgtgcagaagctgcaggacgtcctacatgaggcactgcaggactacgaggccggccagcacatggaggatcctaggcgggctggcaagatgctaatgactctgccattactacggcagacctctaccaaggccgtacagcatttctacaatatcaaactcgagggaaaggtgcctatgcacaaactttttttggaaatgctcgaggccaaggtgtag

SEQ ID NO: 264007 - DNA, 1308 bp, Artificial Sequence
  derived and/or modified sequence
atgagcaacaaagatagacatatcgacagcagctgctcctcatttatcaagacagaacctagttcaccagcatccttgaccgacagtgtgaaccaccacagtcccggtgggtctagtgacgcctccggctcctattcatcaaccatgaacggacaccagaacggcctggattccccccctttgtatcccagtgctcctatccttggaggaagtggacccgtgaggaaactctatgatgattgttcctctacaattgtagaggacccccaaacaaagtgtgaatacatgctcaactcgatgcctaagcggttgtgtctggtctgtggcgacatcgccagtggctatcactacggggtcgcaagctgtgaggcctgcaaggctttcttcaaaagaaccatccaggggaatattgagtatagctgccccgctactaacgaatgtgaaatcaccaaacgtagacggaagagctgccaggcgtgtcgtttcatgaagtgcctcaaagtcggtatgctcaaagaaggtgtgaggctggacagggtcagaggagggcgacagaagtataagaggcgtattgacgcagagaattccccttacctgaatccacaactggtccagcctgccaaaaaaccatacaacaaaattgtttcacacctgctcgttgcagaaccggagaaaatttatgcaatgccagatccgacagtgccagactcagatataaaagccctaacaacgctctgtgacctggccgaccgggaattggttgtaatcattggctgggccaagcatatcccagggtttagcaccttgtccctcgcagatcagatgagcctcctgcagtcagcgtggatggaaatcctgattctcggcgtggtgtaccggtcattaagctttgaggacgagctcgtgtatgcggatgattatataatggatgaagaccagtccaagctggctggactgctggacttaaacaatgcgatccttcaactggtcaagaagtacaaatctatgaagctggaaaaagaggaatttgtgactttgaaggccatcgccttagccaactctgattctatgcatatcgaagatgttgaagccgttcaaaagcttcaagatgtactgcacgaggcactgcaggattacgaggctggccaacacatggaggacccaagaagggctgggaagatgttgatgacccttccacttttgagacagacgtcaacaaaggcagtgcagcacttctacaacatcaaacttgaaggtaaagtccctatgcataaattgttcctggagatgctcgaagcaaaagtgtag

SEQ ID NO: 264008 - DNA, 1308 bp, Artificial Sequence
  derived and/or modified sequence
atgagcaataaagaccgacacatcgacagcagttgctcatcatttattaaaaccgagccgtcttcaccagcttcccttaccgattctgtaaatcaccactctccaggtgggagctcagacgcatctggcagctattcatctaccatgaatgggcaccagaacggtctcgactcaccgccgctgtacccgtccgctcctatcttaggcgggtctgggcccgtccgtaagctgtatgacgattgctccagcaccatcgtggaggacccccagaccaagtgtgaatatatgctcaactcaatgccgaaacgactgtgcctcgtttgcggggatatcgcctctggttaccattatggggtcgcctcttgtgaggcgtgcaaggccttctttaagcgaaccatacagggcaacatagagtattcctgtcccgccacgaatgagtgtgaaattaccaaaagacggcggaagtcctgccaggcctgtaggtttatgaagtgcttaaaggtaggcatgcttaaagaaggggtgaggctggatagggttcgtggcgggcggcaaaaatacaaacggaggatcgacgcagaaaattccccttatctcaacccccagctggtgcagccagcgaagaagccttataataaaatcgtctctcacctgttggttgccgagcccgagaagatctacgctatgcctgatcccactgtgccagactccgatatcaaagcactgacaactctttgtgaccttgcggatagggagcttgtggtaatcataggctgggccaagcacatccctggtttctccacgctgtctctggcggatcagatgtccctgcttcagtccgcctggatggaaatcctaattttaggagtggtatacaggagcctctcttttgaggacgagttagtgtacgccgatgactacataatggacgaggaccagagcaagctcgccgggctcctggatctaaacaatgctattttgcagctggtgaagaaatataaaagtatgaaactggaaaaagaggagtttgtgacactgaaagctattgctctcgccaacagtgattcaatgcacatcgaagacgtggaagctgtgcagaagcttcaggacgtgctgcacgaggctctacaggactatgaggcgggacagcacatggaagaccctcgaagagccgggaaaatgctcatgacactgccactcctgcggcagacctccacgaaagcagtgcaacatttttacaacattaagctggaaggcaaagtaccaatgcacaaattatttctggaaatgttggaggccaaggtgtag

SEQ ID NO: 264009 - DNA, 1065 bp, Artificial Sequence
  derived and/or modified sequence
atgagcaataaggacaggcatattgattcttcttgttcatccttcatcaagactgaaccttctagcccagcctccctgacagattctgtcaaccaccactcccccggtggctctagcgacgcaagcggttcctattcctcgactatgaatggacaccagaacggtctggattctcctccactgtacccctccgcaccaatcttgggtggcagtgggccagtgcggaaactgtacgacgactgttcatcaactattgtagaggatcctcaaactaaatgtgagtatatgctcaactcaatgcccaagagattgtgccttgtatgcggtgacattgccagtgggtaccactacggggtggctagctgcgaagcatgcaaagcattctttaaacgcaccattcaggggaatattgaatactcttgtcccgccaccaatgagtgcgagattacaaagcggcgaaggaagtcctgccaggcttgtagatttatgaaatgcctgaaggtggggatgctgaaggaaggcgtgcgactcgatcgcgtgcgaggcggcaggcagaaatataagcgacgaattgacgcagagaattcgccgtacttgaacccacaactggtccaaccagctaaaaaaccatataataaaattgtttcgcatctgctggtggccgaaccagaaaaaatttatgccatgcctgaccctaccgttccagattctgatataaaagctctgaccactctgtgcgacctcgccgatagggagttggtagttattatcggatgggctaagcacatccctggtttcagtacattgtccctcgctgaccaaatgagcctcttgcagagcgcttggatggagattctcattctgggcgtcgtctatcgtagcctatcatttgaagacgagctggtgtatgcagatgattatatcatggacgaggaccaatccaagctggctggcttgctggatcttaataacgccattctgcagctggtcaaaaaatacaagtccatgaaactcgagaaggaagagtttgtgaccctaaaagcaatcgcattggcaaactcttag

SEQ ID NO: 264010 - DNA, 1308 bp, Artificial Sequence
  derived and/or modified sequence
atgtcgaacaaggatcgtcacatcgatagttcgtgtagctccttcataaaaactgagccttcaagccctgcctcacttaccgactcagtcaaccatcactctcctgggggttcgagcgatgccagcggtagctacagttccacaatgaatgggcaccagaatgggctggactctcctcccttgtacccttctgccccaatcctgggcgggagcggacctgtgagaaagctgtatgacgactgttctagtactattgtcgaggacccccagacaaaatgtgaatatatgctcaattctatgcctaagagattgtgcctggtctgtggagatatagcgagtggttatcactacggggtcgcgagttgtgaggcctgtaaagctttttttaagcggacaatccagggaaatatcgagtattcatgccctgccaccaacgagtgcgagatcacgaagcggcggagaaaaagttgtcaggcgtgcaggtttatgaaatgcctgaaggtgggaatgttaaaggaaggtgtaaggttagatcgcgttcgtggcggccggcaaaagtacaagcggcgcattgacgctgagaactccccatacctgaacccgcagctggtccagccggcaaagaagccgtacaacaagatagtttcacatctgctcgtagcggaacctgaaaagatatacgccatgcccgacccaactgtgcctgactccgacataaaagctcttaccaccctttgtgatttagcagatcgtgagctggtcgtgatcatcgggtgggctaaacatattcctggatttagcacactctccctggcagatcagatgtcactgctccagagcgcatggatggagattctgattctgggtgtggtctacagaagcctgtcatttgaagatgaactcgtgtacgcggatgactacatcatggacgaggaccagtcgaagcttgccggtctactggacctgaacaacgctattttacaattggtgaagaaatacaaatccatgaaactggaaaaagaggagttcgttacgctgaaagcaatcgcgctggccaactccgactcaatgcacatcgaagatgtagaggcagtgcaaaaactgcaggacgtactgcacgaggcgttacaggattatgaagccgggcagcatatggaagatccaaggcgcgctggaaagatgctcatgaccctgcccctcctgaggcagacctccaccaaggctgttcagcatttttataatatcaagctcgaggggaaggtacccatgcacaaactcttcctggagatgctggaggcgaaagtgtag

SEQ ID NO: 264011 - DNA, 1308 bp, Artificial Sequence
  derived and/or modified sequence
atgagcaataaggacaggcacattgatagcagctgcagttctttcattaaaactgaacccagttcgcccgcatcgctgactgatagtgtgaaccatcatagtccggggggctctagcgatgccagcgggtcatactcctccacaatgaatgggcaccagaatgggctggactctccccctctgtacccaagcgctccaattttagggggatccggccctgtacgcaaactgtatgacgattgtagtagtacaatcgtggaagacccccagacgaagtgtgagtatatgcttaactcaatgcctaaacgcctctgtctggtctgcggtgacatcgcatcagggtaccattacggcgtcgcctcttgcgaggcttgcaaagctttctttaaacgcacgatccagggtaacatcgaatactcatgccctgctacaaacgagtgtgaaatcactaagcgtaggcgaaaatcttgccaggcgtgcagatttatgaaatgcctgaaggttggtatgctcaaagaaggagttcggcttgacagagttagggggggtagacagaaatacaagagacggatagatgctgagaattcaccttatctcaacccccagctcgttcagccagcgaagaaaccatacaacaaaattgtgtcccatctgctggtcgccgagcccgagaaaatctacgcaatgccggaccctaccgtccccgacagcgacatcaaggccctgaccacgctttgcgatctggcagaccgagaactcgtggtgatcatcgggtgggctaagcacatcccaggattcagcacgctatcactggccgatcagatgagcttattgcaatccgcctggatggagatccttatcctgggcgtcgtgtatcgaagcctcagttttgaagacgaactagtgtatgccgacgattacattatggatgaggaccagagtaaactcgccggactcctcgacttaaataacgccattttgcaactagtaaagaaatataaaagcatgaaacttgagaaggaggaattcgtcacacttaaagcaatcgctctggcgaatagtgattcaatgcacatcgaagacgtcgaggcggtgcaaaagttgcaggatgtgctccacgaagccctgcaggattacgaagccggtcaacacatggaagatcccaggcgcgctggaaaaatgctcatgacactgccattgttgaggcagacctctaccaaagcagtccaacacttctataacatcaagttggaaggtaaagtgcctatgcacaagctcttcctggagatgctggaggctaaggtgtag

SEQ ID NO: 264012 - DNA, 1308 bp, Artificial Sequence
  derived and/or modified sequence
atgtcaaataaggatcgacatattgacagcagttgttcatctttcataaaaactgagccaagtagtccagccagccttacagactcagtgaaccatcattcacccggcggcagttccgacgcaagcggatcctattctagtaccatgaatggacatcaaaacggattagacagcccaccactgtatccctctgccccgatccttggaggtagtgggcccgtgaggaaactctatgacgactgctctagcactatcgtagaagatcctcagactaagtgcgaatacatgctgaatagcatgccgaaacgcctctgcctggtgtgtggggatattgcctccggctaccactacggcgtcgcaagctgcgaggcctgcaaagcctttttcaaacgcactatccagggcaacatcgagtactcctgccccgctacgaacgagtgtgagattactaagagacggcgaaagtcctgccaggcttgccgattcatgaagtgtctaaaggttggcatgcttaaggagggagtgcgtctggacagggttagaggcggtaggcagaagtacaaaaggagaatagacgccgaaaatagtccatacctcaatccacagcttgtacagcccgctaagaagccctataacaagatcgtatctcacctgctcgttgcggaacccgaaaagatttacgcgatgcctgacccaaccgtaccagactcagatattaaggctttaaccacgctctgtgacctggctgaccgcgagctggtggtaattataggttgggcgaagcacatccccggcttctccactctgagcctcgccgaccagatgtctctcttacagtccgcttggatggagatattgatcctcggagtggtgtaccggagtctgagttttgaagacgagttagtttacgccgacgactacatcatggacgaggaccaatccaagctcgcaggactgctagacctgaacaatgcgatattgcaactcgtcaagaaatacaagagtatgaagctggagaaggaggagtttgtgactctgaaagccatcgcattagctaactcagattccatgcatattgaggacgtggaagccgttcagaagttgcaggatgtcctgcatgaggcactgcaggactacgaagcaggccagcacatggaagaccccaggcgagccggaaaaatgctgatgacccttccacttctgaggcagacctcgaccaaagcagttcagcacttctacaacatcaaactggaggggaaggtgccaatgcataagctgtttttagagatgctggaggccaaggtctag

SEQ ID NO: 264013 - DNA, 1311 bp, Artificial Sequence
  derived and/or modified sequence
atgagcaacaaggacagacacatcgacagcagctgcagcagcttcatcaagacagagcccagcagccctgccagcctgacagattctgtgaaccaccacagccctgggggcagcagtgatgccagcggcagctacagcagcaccatgaatggccaccagaatggcctggacagcccccccctgtaccccagcgcccccatcctgggcggcagcggccctgtgaggaagctgtatgatgactgcagcagcaccatcgtggaggacccccagaccaagtgtgagtacatgctgaacagcatgcccaagaggctgtgcctggtgtgtggggacatcgccagcggctaccactatggagtggccagctgtgaggcctgcaaggccttcttcaagaggaccatccagggcaacatcgagtacagctgcccagccaccaatgaatgtgagatcaccaagagaagaaggaagagctgccaggcctgccgcttcatgaagtgcctgaaggtgggcatgctgaaggagggcgtgcggctggacagagtgcggggcggccggcagaagtacaagagaagaattgatgctgagaacagcccctacctgaacccccagctggtgcagcctgccaagaagccctacaacaagatcgtgagccacctgctggtggccgagcctgagaagatctatgccatgccagaccccaccgtgcctgacagcgacatcaaggccctgaccaccctgtgtgacctggccgaccgggagctggtggtgatcatcggctgggccaagcacatccctggcttcagcaccctgagcctggccgaccagatgagcctgctgcagagcgcctggatggagatcctgatcctgggcgtggtgtaccgcagcctgagctttgaagatgagctggtgtatgcagatgactacatcatggatgaggaccagagcaagctggccggcctgctggacctgaacaatgccatcctgcagctggtgaagaagtacaagtccatgaagctggagaaggaggagtttgtgaccctgaaggccatcgccctggccaacagcgacagcatgcacattgaagatgtggaggccgtgcagaagctgcaggatgtgctgcacgaggccctgcaggactatgaagctggccagcacatggaggaccccaggagagctgggaagatgctgatgaccctgcccctgctgcggcagaccagcaccaaggctgtgcagcacttctacaacatcaagctggagggcaaggtgcccatgcacaagctgttcctggagatgctggaggccaaggtgtgctag

SEQ ID NO: 264014 - DNA, 1308 bp, Artificial Sequence
  derived and/or modified sequence
atgagcaacaaggacagacacatcgacagcagctgcagcagcttcatcaagacagagcccagcagccctgccagcctgacagattctgtgaaccaccacagccctgggggcagcagtgatgccagcggcagctacagcagcaccatgaatggccaccagaatggcctggacagcccccccctgtaccccagcgcccccatcctgggcggcagcggccctgtgaggaagctgtatgatgactgcagcagcaccatcgtggaggacccccagaccaagtgtgagtacatgctgaacagcatgcccaagaggctgtgcctggtgtgtggggacatcgccagcggctaccactatggagtggccagctgtgaggcctgcaaggccttcttcaagaggaccatccagggcaacatcgagtacagctgcccagccaccaatgaatgtgagatcaccaagagaagaaggaagagctgccaggcctgccgcttcatgaagtgcctgaaggtgggcatgctgaaggagggcgtgcggctggacagagtgcggggcggccggcagaagtacaagagaagaattgatgctgagaacagcccctacctgaacccccagctggtgcagcctgccaagaagccctacaacaagatcgtgagccacctgctggtggccgagcctgagaagatctatgccatgccagaccccaccgtgcctgacagcgacatcaaggccctgaccaccctgtgtgacctggccgaccgggagctggtggtgatcatcggctgggccaagcacatccctggcttcagcaccctgagcctggccgaccagatgagcctgctgcagagcgcctggatggagatcctgatcctgggcgtggtgtaccgcagcctgagctttgaagatgagctggtgtatgcagatgactacatcatggatgaggaccagagcaagctggccggcctgctggacctgaacaatgccatcctgcagctggtgaagaagtacaagtccatgaagctggagaaggaggagtttgtgaccctgaaggccatcgccctggccaacagcgacagcatgcacattgaagatgtggaggccgtgcagaagctgcaggatgtgctgcacgaggccctgcaggactatgaagctggccagcacatggaggaccccaggagagctgggaagatgctgatgaccctgcccctgctgcggcagaccagcaccaaggctgtgcagcacttctacaacatcaagctggagggcaaggtgcccatgcacaagctgttcctggagatgctggaggccaaggtgtag

SEQ ID NO: 264015 - DNA, 1065 bp, Artificial Sequence
  derived and/or modified sequence
atgagcaacaaggacagacacatcgacagcagctgcagcagcttcatcaagacagagcccagcagccctgccagcctgacagattctgtgaaccaccacagccctgggggcagcagtgatgccagcggcagctacagcagcaccatgaatggccaccagaatggcctggacagcccccccctgtaccccagcgcccccatcctgggcggcagcggccctgtgaggaagctgtatgatgactgcagcagcaccatcgtggaggacccccagaccaagtgtgagtacatgctgaacagcatgcccaagaggctgtgcctggtgtgtggggacatcgccagcggctaccactatggagtggccagctgtgaggcctgcaaggccttcttcaagaggaccatccagggcaacatcgagtacagctgcccagccaccaatgaatgtgagatcaccaagagaagaaggaagagctgccaggcctgccgcttcatgaagtgcctgaaggtgggcatgctgaaggagggcgtgcggctggacagagtgcggggcggccggcagaagtacaagagaagaattgatgctgagaacagcccctacctgaacccccagctggtgcagcctgccaagaagccctacaacaagatcgtgagccacctgctggtggccgagcctgagaagatctatgccatgccagaccccaccgtgcctgacagcgacatcaaggccctgaccaccctgtgtgacctggccgaccgggagctggtggtgatcatcggctgggccaagcacatccctggcttcagcaccctgagcctggccgaccagatgagcctgctgcagagcgcctggatggagatcctgatcctgggcgtggtgtaccgcagcctgagctttgaagatgagctggtgtatgcagatgactacatcatggatgaggaccagagcaagctggccggcctgctggacctgaacaatgccatcctgcagctggtgaagaagtacaagtccatgaagctggagaaggaggagtttgtgaccctgaaggccatcgccctggccaacagctag

SEQ ID NO: 264016 - DNA, 1311 bp, Artificial Sequence
  derived and/or modified sequence
atgagcaacaaggaccggcacatcgacagcagctgcagcagcttcataaagacggagcctagtagtcctgcttctctcacggactctgtcaaccatcactctcccggaggctcctccgacgcgtccggtagttactcttccaccatgaacggtcatcaaaatgggctcgattcccccccactttacccgagcgcccccatattgggaggctccggacccgtcagaaagctgtatgatgactgttccagtactatcgtcgaggacccacaaacaaagtgtgagtacatgctgaacagcatgccaaagcgcctctgccttgtgtgtggagacattgcctccggatatcactatggagtggcgtcttgtgaagcctgtaaagcgtttttcaagaggaccatccagggcaatatagaatatagctgtcctgccactaatgagtgtgaaattaccaaaagaagaagaaagtcatgccaggcctgtaggttcatgaagtgcctaaaagtgggtatgctcaaggagggagtgagactggatagagttaggggtgggaggcagaaatacaaaaggagaattgatgcagaaaacagcccttatctcaatccccagctggtacaaccagcaaagaagccctacaacaagatcgtgtctcacctccttgtcgctgaacccgaaaaaatctatgcaatgccagatccgacggttcccgactcagacatcaaagctctgacaactctgtgtgacttggccgacagggagctggttgtgattatcggatgggcaaagcacattcctggtttctccaccctgtcgttagctgaccagatgagcctcctccagtccgcatggatggaaatactgatcctgggggttgtctatcgcagtctcagtttcgaggacgaactcgtgtacgcggacgactacattatggacgaggaccaaagtaagctagcgggtctgctggatctgaataatgcaattttacaactcgttaaaaaatacaagagcatgaaattagaaaaggaggaattcgtcaccttgaaagcaattgccttagccaatagcgattccatgcacatcgaggatgtggaggccgttcagaaactgcaggatgtactccatgaagccctccaggactatgaagccggacagcacatggaggaccctaggagggccgggaaaatgttgatgaccctgcctctccttaggcagacatctacaaaggcagtgcagcacttctacaacatcaaattggagggcaaggtccctatgcataagctcttccttgaaatgttggaagcaaaggtgtgctag

SEQ ID NO: 264017 - DNA, 1308 bp, Artificial Sequence
  derived and/or modified sequence
atgagcaacaaggaccggcacatcgacagcagctgcagcagcttcatcaaaacagaaccaagctctccagcttctctgactgacagcgtcaaccatcactcccctggaggatccagtgatgcgagcggttcgtattcctctaccatgaatgggcatcagaatggtctggatagcccccccctataccccagtgcacctattctcgggggctccggacccgtacgcaaactgtacgatgactgtagttcgaccatcgtggaggatccgcagacaaagtgcgagtacatgctgaactccatgcccaagagattatgcctggtttgcggtgacattgcctcgggctatcattacggtgtcgcatcctgcgaggcctgcaaggccttcttcaagcggactatccaagggaacattgaatacagctgccccgccacaaacgagtgcgagataacaaaacgcagacggaaaagctgccaggcctgtcggtttatgaaatgtttgaaggtcggcatgctgaaggagggcgttcggctagatcgggtgcgtggcggacgccagaaatataagcggcgaattgatgcagaaaactccccatatctcaaccctcagctcgtgcagccagctaaaaaaccatacaataaaatagtctcgcatcttctggttgcagaacccgagaagatttatgcaatgccggatcctacagtacccgactccgatatcaaggcactgactaccctctgcgacctggctgatcgcgagctcgttgtgataatcggctgggctaaacatattccgggcttctccaccctctctctcgccgatcagatgagcctactgcagagcgcgtggatggagattctgatcttaggcgtcgtctataggagcctgagcttcgaagatgagctagtatatgccgatgactatattatggacgaggatcagtccaaactggcaggtctcctggacttgaataacgctatattgcagctggttaagaaatacaaatcgatgaagctggagaaagaagaattcgtcacccttaaggcaatcgcactggccaattcagactctatgcatatagaggacgttgaagctgtacagaaacttcaggatgttctgcatgaggcacttcaagactacgaggcagggcagcacatggaggacccacgacgagcgggtaagatgctgatgacgcttcctttactgaggcagacatcgacgaaggctgtacaacacttttacaacataaaactggagggcaaggtgcctatgcacaaactttttctggagatgctggaggccaaggtgtag

SEQ ID NO: 264018 - DNA, 1308 bp, Artificial Sequence
  derived and/or modified sequence
atgagcaacaaggaccggcacatcgacagcagctgcagcagcttcataaagacagagccctcctccccagcttctctgaccgatagcgtcaaccaccactcacctggggggtcctcagacgcctccggatcttattcttcaaccatgaatgggcatcagaacggcctggattctccaccactgtaccctagcgcaccaattctgggagggagtggaccagttagaaagctttacgacgattgcagttccaccattgtggaggatccccagactaaatgcgaatatatgttgaactccatgcctaagcgtctttgccttgtgtgcggcgatattgccagcggctatcattatggtgtagctagctgtgaagcatgcaaggctttcttcaaacgcacaatacagggaaatattgagtattcctgtcctgccacaaacgaatgtgagatcacaaagaggagaaggaagtcttgtcaggcttgccgcttcatgaaatgtctcaaagtggggatgttgaaggagggagttaggctggaccgggtgcgaggagggcggcaaaagtacaagcgtcggatcgacgcagagaactcaccctacctgaatccacagctggtgcagcccgcgaagaagccttacaataaaatcgtatcccatctcctggtggcagagccagaaaagatttacgcaatgcctgacccaactgtgcctgactccgatattaaggcgctcaccactctttgcgatctggctgatcgcgaactagtcgttattatcgggtgggccaagcatattcctggcttcagcacgctcagcctggccgaccagatgtccttgctccagagcgcctggatggagattttaattctaggtgtggtttaccgatccctctctttcgaggacgagcttgtgtatgcggatgactatattatggatgaggaccaaagtaaattggcaggcctgttagatctcaacaacgccattctgcagttggttaagaagtacaagagtatgaagctcgagaaggaagagttcgtgaccctcaaagctatcgccctggcgaattcagattctatgcacattgaagatgtcgaggccgtgcaaaagctccaggacgtgctgcatgaggcactgcaagactatgaagcgggacagcatatggaagaccccagacgtgcgggtaagatgctcatgacattgccactcctgcggcaaacatccactaaagccgtccagcacttttataacattaaattggaaggcaaggttcccatgcataagctcttccttgagatgctcgaagcaaaggtgtag

SEQ ID NO: 264019 - DNA, 1308 bp, Artificial Sequence
  derived and/or modified sequence
atgagcaacaaggaccggcacatcgacagcagctgcagcagcttcataaagactgagccatcttctccagcatctctgaccgattccgtgaatcatcatagtccagggggtagtagtgatgccagcggctcttatagtagtacaatgaacgggcatcagaatgggctggattccccaccactttatccttccgccccaatcctgggtggctcaggtccggtccgaaagctttacgacgattgctcctccacgatcgtggaagatcctcagaccaaatgcgaatacatgctcaattccatgcccaaaaggctctgcctcgtttgcggtgatatcgctagtggataccactacggcgtggcctcctgcgaggcttgtaaggcattctttaaacggaccatccaaggcaatattgaatactcatgcccagctacaaatgagtgcgagataaccaaaagacgacggaaaagttgccaggcttgtcggttcatgaagtgtctcaaagtgggaatgctaaaggagggtgttcgtctcgaccgggtccggggtgggcgccaaaagtacaaaaggcgaatagatgccgagaacagcccttatctgaatccgcagctggttcagccggctaaaaaaccgtataacaaaattgtgtcacatctgctcgtcgctgagcccgagaaaatctatgcgatgcctgacccaactgtgccagattccgacataaaggctttgacgacactatgtgatcttgcggatcgcgaactggtagttatcatcggatgggccaagcacatccctggattctctacactgagcctggcggaccagatgagcctgctgcagtccgcatggatggagatcctgatcctgggcgtagtctaccggtctctgtcttttgaagacgagctggtctatgccgatgattacatcatggacgaggaccagagcaaactggcaggcctgttagatctaaataacgccattctgcagctcgtcaagaagtataagtcaatgaaactggaaaaggaggagtttgtgacactgaaagccatcgctctggccaactcagatagcatgcatatcgaagatgtggaggccgttcagaaactgcaggatgtcctgcacgaggccttacaggattacgaggctggtcagcatatggaggacccgcggagagccggaaagatgctcatgaccctcccattgctcagacaaacctctacaaaagcggtgcagcacttctacaacattaagctcgagggcaaggtgcccatgcataagctgtttctagagatgctggaagccaaagtctag

SEQ ID NO: 264020 - DNA, 1308 bp, Artificial Sequence
  derived and/or modified sequence
atgagcaacaaggaccggcacatcgacagcagctgcagcagcttcattaaaaccgagcccagcagtccagccagcctgacggattccgtgaatcaccactccccgggaggaagttctgacgccagtgggagttactcatctaccatgaatggtcaccagaatggacttgacagcccccccctgtatccttccgcccctatcctgggcggctcagggcccgtgcgaaaactgtatgatgattgttctagtacgatagttgaggatccccagaccaagtgcgaatatatgctcaacagcatgcctaagaggctgtgtctagtttgtggcgatattgcaagcgggtaccactatggagtggcctcctgcgaggcctgcaaagcttttttcaaacggacgatacagggtaacatcgagtactcctgcccagcgactaatgaatgcgagattactaaacgccggagaaaaagctgtcaagcctgccgctttatgaagtgtctgaaagtcggcatgctgaaggagggcgtccgcctggaccgtgtccgcggggggcgacagaagtacaaaaggaggattgatgccgaaaattctccttacttgaacccccaactcgtccagcccgctaaaaaaccctacaacaaaatcgtctcccatctactggtcgcggagcctgagaaaatttatgcaatgcccgacccaacagtgcctgactctgacataaaggctctgaccaccctgtgcgatctagccgatagggagctagttgtgattatcggttgggcgaagcatatcccaggcttctccactctgtcactggcggatcaaatgagtttgctgcagtcagcctggatggagattcttatcctgggtgtcgtttacagatcgctgtcatttgaagatgaattagtgtacgcagatgactatataatggacgaggaccaatccaagttggctggtctgctggacctcaacaatgccattctgcaactggtcaaaaagtacaaaagcatgaagctcgagaaggaagaattcgtcacgctcaaggctatcgctctggccaatagcgatagtatgcacatcgaagatgtggaagctgtgcagaaactgcaggatgtcctgcacgaggccctgcaggactacgaggcaggccagcatatggaggacccaagacgggcggggaaaatgctgatgactctgccactcctgagacagacttccacaaaggctgttcaacacttctataacatcaagctggaagggaaagtccccatgcacaagcttttcctcgagatgctcgaggctaaggtttag

SEQ ID NO: 264021 - DNA, 1308 bp, Artificial Sequence
  derived and/or modified sequence
atgagcaacaaggaccggcacatcgacagcagctgcagcagcttcattaaaaccgagccatcttcaccagcatccctaaccgatagtgtcaaccatcattcacccgggggatctagcgacgccagtggtagctatagctcaactatgaacgggcatcaaaacggcttagatagcccccctctctacccatctgctcccatactcggcggcagcgggccagtcagaaaactgtacgacgattgcagctccacaatcgtagaggacccccagactaagtgtgaatatatgctgaactcaatgccgaaaaggctttgtctggtgtgcggtgatatcgctagtgggtaccactatggagtagccagctgcgaggcatgcaaggccttcttcaaacgcaccatccagggtaacatagagtattcctgccctgccaccaatgaatgtgagattactaagaggcggaggaaaagctgtcaagcatgtagatttatgaagtgtctgaaagttggcatgttgaaggagggagtccggcttgatcgagttcggggcgggcggcagaaatacaagcgcagaatcgacgccgaaaactccccctatcttaatccacagctggttcaaccagctaagaaaccatacaataagatcgtgtcccacctccttgtcgctgaaccagaaaagatctacgccatgccagacccaacagtgcctgactccgatattaaggccctgacgacactgtgcgacctcgctgaccgagagcttgttgtaattatcgggtgggcaaaacacattcccgggttctccaccctctcactggccgaccagatgtcactgctgcagagcgcttggatggagatattgatcctgggtgtcgtgtatagatccctgtccttcgaagatgagctggtgtacgccgatgattacattatggacgaagaccagtctaagctcgccggactgctcgacctgaataatgctattctccagctcgtcaaaaaatacaagtccatgaaactagagaaggaggaatttgtcaccttgaaagctatagccctggccaactcagatagcatgcacatcgaggacgtggaagccgtgcaaaagctgcaggacgtgctgcatgaggctttgcaggactacgaggctggccagcatatggaggatcctagacgggctggaaagatgctgatgaccctgcctctattaagacaaacaagtactaaggcagtacagcatttctacaatataaagctcgaaggcaaggtaccgatgcataagctgtttttagaaatgctggaggccaaggtctag

SEQ ID NO: 264022 - DNA, 1308 bp, Artificial Sequence
  derived and/or modified sequence
atgagcaacaaggaccggcacatcgacagcagctgcagcagcttcatcaagacggagcctagctcacctgccagcctcactgacagtgtgaaccatcattctcctggtggaagctcggatgcctccggatcatattcttcaacaatgaatggccaccaaaatggcctcgactccccgccgctctatccttcagcacctatattggggggcagcggacccgtccggaaactgtacgacgactgcagcagcacaattgtagaggatccccagacaaagtgcgagtacatgctgaactcaatgccaaagaggctgtgtttagtatgtggcgatattgcaagcggctaccattacggagttgcctcatgtgaagcttgcaaggctttttttaagcggaccatccagggcaacatagaatactcttgtcccgccactaatgagtgcgagattactaagcgccggagaaaatcttgccaggcctgcagatttatgaaatgtctgaaagtgggcatgttaaaggagggcgtgcgcctcgaccgagtccggggaggccgccagaagtataaaagacgcatcgatgccgagaactccccatatctgaacccacagctggtgcagcccgctaaaaaaccgtacaataagattgtttcccatcttctggtcgccgagccagagaaaatttacgcaatgcccgatcccaccgtgcctgacagcgatatcaaggcactgacaactttgtgtgatctcgcagaccgggaactcgtggtgataatcggttgggcaaaacatatccctgggttttcaactctttccttggctgatcaaatgagtctgctacagtcggcgtggatggaaattctcatcttaggagtggtctacagatcactgtccttcgaagacgaactggtgtacgcggacgactatattatggatgaggatcagagcaaattggctgggttgttagacctgaacaacgctatcctgcaactggtgaaaaaatataaaagcatgaaattggagaaggaggaatttgtgacactgaaagctattgccctcgccaattcggatagcatgcacattgaggatgttgaggcagttcagaagttacaggatgtgttgcatgaagcgcttcaagactacgaggctggtcaacacatggaggaccctcggcgagctggcaaaatgctcatgactctgcctctcctgcggcagactagcacaaaggccgtgcagcatttctataacatcaaactagaagggaaagtacccatgcacaagttgtttctggagatgctggaggcgaaggtctag

SEQ ID NO: 264023 - DNA, 1065 bp, Artificial Sequence
  derived and/or modified sequence
atgagcaacaaggaccggcacatcgacagcagctgcagcagcttcatcaagacagagccctctagtcccgcgtcccttacggatagcgttaatcaccattccccaggaggaagtagcgacgcctccggaagctatagctccaccatgaatgggcatcagaatggactagattcacccccactgtatccctccgcgccaatcctcggaggtagcggtccagtcagaaagctttacgatgactgttccagcacgattgtcgaggacccgcagaccaaatgcgagtacatgttgaactctatgccgaagcggctttgcctggtctgtggcgatattgcaagcgggtaccattacggagttgcatcttgcgaagcttgcaaggcattttttaagaggactattcaaggcaatatcgaatatagctgccctgccactaacgaatgtgagataaccaagcgccgccggaaaagttgtcaggcctgtcgctttatgaaatgtcttaaagtgggtatgcttaaggaaggcgtgcgtctggacagagtccgtggaggtcgccagaaatacaagaggagaatcgatgcggaaaattccccttacctgaatccacagctcgtacagcccgccaagaaaccctataacaagatcgtatctcacctgctagttgctgagcccgaaaagatttacgccatgcctgaccctacagtgcctgattctgacattaaagcgctgactacactgtgtgaccttgctgaccgcgagctcgtagtaataattgggtgggctaaacacatccccggtttttcaaccctatcccttgcggaccagatgagcctgctgcagtctgcttggatggaaattttaattctgggggttgtatacagatctctgagcttcgaggatgaactggtctatgctgacgattacatcatggacgaagaccagtccaagctcgccgggctgttggacctaaacaatgccatcctccaactcgtgaaaaaatacaagtctatgaagctggaaaaagaagaatttgtcactttaaaggcaatcgcattagctaatagctag

SEQ ID NO: 264024 - DNA, 1308 bp, Artificial Sequence
  derived and/or modified sequence
atgagcaacaaggaccggcacatcgacagcagctgcagcagcttcataaagaccgagccgagcagccctgcatcgctcactgatagtgtgaatcaccattcacccggggggtcttcagatgcttctggaagttatagctccaccatgaacggccatcagaacggattggactctccccccttataccctagcgctcccattctaggcggcagcggccctgttaggaagctttacgatgattgcagttccaccatcgtggaagacccccagaccaaatgtgagtatatgttgaacagtatgcccaaacgcctgtgcctggtatgtggcgacattgccagcgggtatcactacggggtggcctcatgcgaagcctgcaaggcattctttaaaagaacaatacagggcaacatagaatattcctgccccgccaccaacgagtgtgaaatcaccaagaggagacgaaaaagctgtcaggcttgtcgatttatgaagtgtctgaaggtcggcatgctgaaagaaggagtacgcttagaccgagtgagaggaggaagacagaagtacaagcgccggatagatgccgagaactctccttatctgaatccgcagctggtgcagccagccaaaaaaccatacaataaaattgtttctcatctgttagtggcagaaccagaaaagatctatgccatgccagacccgacagtgcctgactctgacataaaagcactcactaccctgtgtgatcttgccgatcgtgagctggtagtcatcatcgggtgggcaaagcacatccccggcttttcaaccttgagtctcgccgatcagatgagcctgttgcaatctgcttggatggaaattctaatcctcggcgtggtttatcgctccctcagctttgaggatgagttggtttacgctgatgattatataatggatgaagatcaatcaaagcttgccgggttactagatttaaataacgctattctgcagctggtcaagaaatataaatctatgaagcttgaaaaggaggaatttgtgacactcaaagccatagccctggccaacagtgattcgatgcacatcgaggacgttgaagctgtacagaaactccaggatgtgctccacgaggctttgcaggattacgaagctggccagcacatggaggatcccaggagggcggggaagatgcttatgacccttcctctactgagacagacaagcacgaaagcagtccaacacttctacaacataaagctcgaggggaaagtaccaatgcataagctttttttagagatgctggaagcaaaggtttag

SEQ ID NO: 264025 - DNA, 1308 bp, Artificial Sequence
  derived and/or modified sequence
atgagcaacaaggaccggcacatcgacagcagctgcagcagcttcatcaaaaccgaaccttcctcccctgctagtctcacggacagtgtgaatcaccactcaccaggtggctcaagtgatgctagcggctcttactcctcgactatgaatggacaccagaatgggctcgattcccccccactctatccctcagcccctatcctcggagggtcgggcccggttagaaaactctacgacgactgtagttcaaccattgtcgaagaccctcaaacaaaatgcgaatatatgctgaattccatgccaaagagactctgcctcgtctgtggggacatcgctagcgggtaccattacggagtcgcgtcttgcgaagcttgtaaggctttttttaaacggaccatacagggaaacatcgagtactcttgccccgctactaacgagtgtgaaatcaccaagcggagaaggaagagctgccaggcctgtaggtttatgaagtgcctaaaggtgggaatgttgaaggagggggtgcgactggaccgggtgcggggtgggaggcagaagtacaaacggaggattgacgctgagaattcaccttaccttaatccccaattggtacaaccggctaaaaagccatacaacaaaattgtatcccacctcctagtcgcggaacccgaaaaaatctatgccatgcccgatcctaccgtccctgatagcgatattaaagccctcaccaccctgtgcgaccttgctgacagggagctggtcgttattatcggatgggccaagcatatccccggtttctcaactctgagccttgccgaccaaatgagcttactgcagtccgcctggatggaaatactgatcctcggcgtcgtgtataggagtctaagcttcgaagacgaactggtttacgctgacgattacattatggatgaggatcagagcaagctggcaggcctattggaccttaataacgctatcctgcagctggtgaaaaaatacaagtcaatgaagcttgagaaagaggagtttgtgaccctaaaggcaatcgccttggctaactctgattctatgcacatcgaggatgtggaagcagttcaaaagctccaggacgtgctgcatgaagctctccaagactatgaagccggtcaacatatggaggatccccgccgggccggaaagatgttaatgaccctcccacttttaaggcagaccagtaccaaggctgtgcaacacttttataatatcaagctagagggcaaagtccctatgcataagctgttccttgagatgttggaagctaaggtttag

SEQ ID NO: 264026 - DNA, 1308 bp, Artificial Sequence
  derived and/or modified sequence
atgagcaacaaggaccggcacatcgacagcagctgcagcagcttcattaaaacagagcccagctctcctgcctccttgactgattctgtcaatcaccactcgccaggaggatcatcagacgcctccggcagttattctagcacaatgaacgggcaccagaatggactggatagtccaccgctgtatccctcagccccgatacttggggggagtggacctgtcaggaaattgtatgatgactgtagttccactatcgtggaagaccctcagaccaagtgcgagtacatgctgaatagcatgcccaagagattatgcctggtatgtggggacatagcgagtgggtatcactacggcgtggccagttgcgaagcctgcaaggcattctttaaacgaacaattcagggcaacatagagtactcctgccctgccacaaacgagtgcgaaattacgaagcggcggaggaagagttgccaggcttgtcgctttatgaagtgcttgaaggttgggatgctgaaagagggcgtacggctggatcgcgtcaggggtgggcgacagaagtacaaaaggaggattgacgcggagaacagcccttatctgaatccgcagctggtgcagcccgcaaagaagccttataataaaatcgtgtcccacttgctggtcgccgaacccgaaaagatctacgccatgcctgatcccactgttcctgatagtgacattaaggccctgacaacattatgtgatctggcagacagagagctcgtggtgatcatcggctgggctaagcacattccaggctttagtacgctgagcctcgcagatcaaatgtctctgctccagtctgcatggatggagatcttgattttgggagtggtgtacagatctttgtcttttgaagatgagctggtgtacgccgacgactacattatggatgaggatcagtccaagttggccgggctgctagacctgaacaacgccattttacagctggtgaagaagtacaagtctatgaagttagaaaaggaggagtttgtgacactcaaagccattgccctcgctaacagcgatagcatgcatatcgaagacgtagaagccgttcagaagctacaggatgtcttacatgaggctctccaggactacgaagccgggcagcacatggaagatccaaggcgcgctggaaaaatgctgatgactctccccctgctccgtcaaactagcaccaaagccgtccagcatttctacaatataaagctggaggggaaagtccccatgcacaagctgtttctggaaatgcttgaagccaaggtatag

SEQ ID NO: 264027 - DNA, 1311 bp, Artificial Sequence
  derived and/or modified sequence
atgtctaacaaagacagacatatcgactcctcttgcagtagcttcataaagaccgaaccttcctccccggcttccctgaccgacagcgtgaaccaccattcccccggagggagttccgatgcttctggatcctattcatccaccatgaatggccatcagaatggcctcgactctcctcccttgtatcccagcgcaccaatcctgggagggtcaggcccagtgagaaagctgtatgacgattgctcttccaccattgtggaggaccctcaaacaaagtgcgagtacatgctcaactcaatgcctaagcggctctgtctggtttgcggagacatagcatctggataccattatggagtcgcgtcctgcgaggcttgtaaggccttcttcaaaaggacaatccagggtaacattgagtacagttgcccagccaccaacgagtgtgagattaccaagcgtcggagaaagtcgtgccaagcttgcaggttcatgaaatgcttgaaagtaggcatgcttaaagaaggcgtgagattagatagagtgcgcggtggaagacagaaatacaaaagacggattgatgcggaaaactccccgtacttgaatcctcagctggtccagcccgctaagaagccctataataagatcgtatcacacctcctggttgctgaacctgaaaaaatctatgccatgccagatcctactgtcccagatagtgatataaaggcacttacgaccctgtgcgacttggccgaccgggaactagtggtgattatcggatgggccaaacacatccctgggttttctacactctcactggctgaccagatgagtctactgcagtctgcttggatggaaatcttgatcctaggcgtagtgtatcggagcctatcctttgaggacgaactggtttatgctgacgactacataatggacgaagaccagtccaaattagccggactcctggatcttaacaacgctatactccagttggtcaaaaagtacaaatcaatgaagttagagaaggaggagtttgtaaccctgaaagctatcgcacttgcaaatagtgactccatgcatatagaggacgtcgaggccgtccagaagctgcaggacgtgcttcacgaggctctgcaggactacgaagccggtcagcacatggaagatccaagaagggctggcaagatgctcatgaccttaccactgctgcgccagacgagcacgaaagcggttcaacacttctacaatattaagttagaaggaaaggtaccaatgcataaattatttttggaaatgcttgaggcgaaggtttgctag

SEQ ID NO: 264028 - DNA, 1308 bp, Artificial Sequence
  derived and/or modified sequence
atgtcaaataaagatagacatattgacagctcgtgcagttcgtttattaagactgaaccttccagccctgcttccctcaccgactctgttaaccatcacagccccggaggcagctccgacgccagcggcagctactcgtcaacgatgaacggtcaccaaaatggactcgattccccacccctgtatccgagcgcacctatcctggggggatcaggccctgtccggaaactgtacgacgattgcagcagcaccattgtcgaagatccacagacaaagtgcgaatatatgctcaactcaatgcccaagagactgtgtttggtttgtggggatattgccagcgggtatcattacggagtggctagttgtgaagcttgcaaagcctttttcaaacgcacaattcaggggaatatagaatactcatgtccagccactaacgagtgtgagattactaaacggagaagaaaatcttgccaagcctgcaggtttatgaaatgccttaaggtcgggatgctcaaggaaggcgtcaggctcgatagggtcaggggaggacgccagaaatataagcggaggattgatgcggagaatagtccataccttaacccacagctcgtgcagcctgcgaagaagccctataacaagattgtgtcccacctgcttgtggcagaacccgaaaagatctacgcaatgccagatcctaccgtgcccgacagcgacattaaggccctgaccactttatgtgacctcgccgaccgagaactggtcgttattatcggatgggcaaaacatattcctggcttttccacattatcgctggctgaccagatgtcactgctccagtctgcctggatggaaattcttattctcggcgtggtgtatcgcagtctcagttttgaggatgagctggtttacgctgatgactatattatggacgaggaccaatcaaagcttgcagggctactggacctcaacaatgctattctccagctcgtcaagaagtataagtccatgaaactagagaaggaggaatttgttaccctcaaggctatagccctggctaattccgactcaatgcacatcgaagatgtagaggccgttcaaaagctgcaggacgtcctgcacgaagcccttcaagattatgaggctggacagcacatggaagatccgcgtagggcaggaaagatgctgatgaccctgccattgttgcgacagacctcaaccaaagccgtgcagcacttttataatattaaattggaggggaaggtgcctatgcataaactctttctggaaatgctcgaagcaaaggtgtag

SEQ ID NO: 264029 - DNA, 1308 bp, Artificial Sequence
  derived and/or modified sequence
atgtcaaataaagataggcacatcgactcaagctgtagctcctttattaaaacggagccatctagccccgcaagcctcacagatagcgtaaaccaccactccccaggcggatcctctgacgccagcggaagctattcctctaccatgaacggtcaccagaatggattagatagcccccctttgtacccatcggcacctatattagggggatctgggccagtccgcaagttatacgacgactgctcatccacaattgtcgaagacccgcagaccaaatgtgagtatatgctgaacagcatgccaaagaggttatgtttagtgtgtggagacatagctagcggataccactacggcgttgcttcctgtgaagcatgtaaggcgttctttaagcgaacaatccaggggaatatcgagtatagttgccccgctactaatgaatgcgagataactaaacgaaggcgcaaatcttgccaggcctgtaggttcatgaagtgcctgaaggtgggcatgctgaaggagggagttcgcctggacagagtgaggggcggtagacagaagtataagcggcgaatagatgcagaaaactccccatacttaaatcctcagctcgtgcagccggctaagaaaccttacaataaaatcgtaagtcacctcctggtggcagaaccggagaagatctatgcgatgcccgaccctactgtgcctgattccgatattaaggcacttactaccctctgcgacctagccgacagagagctggtggtcattatcgggtgggccaagcacatcccgggtttctctaccttatcactggctgaccagatgtccctgctgcagtccgcatggatggagattctgatattaggcgttgtctacagatcactaagcttcgaagacgagcttgtatacgccgatgattatatcatggatgaagatcagtctaaactcgctgggctactagacctgaataacgctattcttcagctggttaaaaagtacaagagcatgaagctcgaaaaagaggagttcgtaaccctcaaggctatcgcccttgccaattccgactcaatgcacattgaggacgtggaggcggtgcagaaactgcaggacgttctacatgaagctctgcaagattacgaagcaggccagcatatggaggacccccgacgggcaggaaaaatgctgatgactctcccactcctgagacagacatccacaaaagcagtccagcacttctacaacatcaagctggagggcaaagttcctatgcataaactttttttggagatgctcgaggccaaggtgtag

SEQ ID NO: 264030 - DNA, 1308 bp, Artificial Sequence
  derived and/or modified sequence
atgtccaacaaagataggcatattgactctagttgctcctcattcatcaaaaccgaaccctcttcccccgctagtttgaccgatagcgttaaccaccacagtcccggaggcagttccgacgcctccggctcatactctagtaccatgaatggacatcagaacggactggactctccccctctgtatccatctgctcctattcttggcggaagcggccctgtgagaaaactttacgatgactgctctagcaccatcgtcgaggaccctcagaccaagtgcgagtacatgttaaattcaatgcctaaaaggctgtgcttggtgtgtggcgatatcgcgagcggataccactatggagtggcgtcgtgcgaggcctgtaaagccttcttcaagagaacaatccagggcaatatcgaatacagctgccccgctaccaacgagtgtgaaattactaagagacggaggaagagctgccaggcttgtagattcatgaagtgtctgaaagtcgggatgctcaaagagggggtgcgcctcgacagggttagaggcggaaggcagaaatataaacgacgaatcgatgccgagaactcaccctacctcaatccacagctggtacaaccggcaaagaaaccttacaacaaaattgtgtcccacttgctggtagccgaacctgaaaagatttacgccatgcccgaccccactgtcccggactcggatattaaggccctcaccacactgtgcgatctcgccgatagggaactcgtggttatcattggatgggccaaacatattcctggattcagtacattgtccctcgcagaccagatgtccctactccagagcgcatggatggagatcctgattcttggcgtcgtatatagatctttatcttttgaagacgaactggtctatgcggatgattacatcatggatgaggatcaatctaaactggccggacttctggacctgaataatgctattctgcaactggttaaaaaatacaaatccatgaagctggaaaaggaggaatttgtcacattgaaggctatagcactggccaatagcgatagtatgcacattgaagatgtggaagccgttcaaaaacttcaggacgttctccacgaggcccttcaggactacgaagccggtcagcatatggaagatcctaggcgagcgggaaagatgctgatgaccctacccctcctgcgccaaactagtaccaaagcggtgcagcacttttacaacatcaaacttgagggcaaagtacccatgcacaaacttttcctcgaaatgctggaagccaaggtgtag

SEQ ID NO: 264031 - DNA, 1308 bp, Artificial Sequence
  derived and/or modified sequence
atgtctaacaaagataggcatattgactcaagctgcagtagcttcatcaagaccgaaccgagctcccctgccagtcttaccgacagcgtaaatcaccactctcccggagggagttcggacgcttctgggtcttattcaagcaccatgaacggccaccagaatggattagactcacctcctctgtatcctagcgcacccatactgggcggtagcgggccagtccgcaaattatatgatgattgctcttctactattgtggaggacccccagaccaagtgcgagtatatgcttaacagcatgcccaagcggttatgcttggtatgtggagatattgcaagcggataccactacggggtggcctcctgtgaggcttgtaaggcattcttcaagaggacaatccagggcaacatcgagtattcatgccctgcaaccaacgagtgtgagatcacaaagaggcgaaggaaaagctgccaagcgtgcaggtttatgaagtgtctgaaagtgggaatgctcaaggaaggggtgcggctagacagagtacggggtgggcgacagaagtataagaggcgcatagacgccgagaattccccgtatctgaatccacagcttgtccagcccgctaaaaaaccatataataagatcgtatcacaccttttagtggcagagcccgagaaaatatatgccatgccagatcccacagtccctgactcagacatcaaagcgttgacgacactgtgcgatctcgccgaccgcgagttggtagtgatcattggctgggccaaacatatccctgggttttctacacttagtctcgcagatcagatgagcctgcttcaaagcgcttggatggagattttgatcctgggtgtggtataccgcagcctgtcttttgaagatgaactcgtgtacgctgacgattatatcatggatgaggaccaaagtaaactggcaggcctgttggacctgaacaacgctattctgcagctggtgaaaaagtataaatccatgaaactcgagaaggaagagtttgtgacactgaaggccatcgccctcgctaacagcgattccatgcatattgaggatgtggaggctgttcagaaacttcaggacgtgctgcacgaggcacttcaggactacgaagccggacagcacatggaggacccacgtcgcgctggcaagatgctgatgaccctacccctgctcaggcagactagcacgaaggctgtccagcatttctataacatcaagttggaaggaaaggtgcctatgcacaaattgttcctggagatgctagaggctaaggtgtag

SEQ ID NO: 264032 - DNA, 1308 bp, Artificial Sequence
  derived and/or modified sequence
atgagcaataaggatcggcacattgatagctcatgcagtagctttatcaagactgagccaagcagtcctgcaagcctgactgactctgtcaaccatcactctcccggaggctcctctgacgcttctggaagttattcctctacgatgaacggccaccagaatggccttgactcccctccgctttacccgagtgctccaatcctgggcggaagcggacccgtacgaaaactctatgacgattgttcctccaccattgtggaagacccacaaacgaagtgcgaatatatgttgaacagcatgcccaaacggctgtgtctagtctgcggcgacatcgcttctgggtatcattatggcgttgccagctgcgaggcctgtaaagcattcttcaagcggaccatccaaggcaacattgagtatagctgccctgcaacaaatgagtgtgagatcaccaagagacgcagaaagagctgccaggcttgtcggtttatgaagtgcttaaaggtaggcatgctgaaggaaggtgttcgccttgaccgcgtgcgcggaggtagacagaaatataagcgtcgcatcgacgctgaaaactccccatatctgaatccccaactagttcagcccgctaagaaaccttacaataaaattgtcagccaccttctggtggctgagcctgagaagatttatgctatgccagaccctaccgtgccagattctgacataaaggccctgaccaccctctgtgacctggccgaccgtgaattagttgtaatcattgggtgggctaagcatatccctggtttctctacactgtcactcgcagatcagatgagcctgctgcagagtgcgtggatggaaatcctgatcttgggggtcgtttacaggtccctgagtttcgaagacgagctagtgtacgccgatgattatatcatggacgaagatcaatctaagttagccggtctcctggacttgaataacgccatactccagctggttaagaaatacaagagcatgaagcttgaaaaagaggagtttgtgaccctgaaagccatcgccttagccaatagtgattcaatgcacattgaggatgtcgaggccgtgcagaaactgcaagatgtgctgcacgaagccctccaggactatgaggcaggccagcacatggaagatcccagacgggctggcaaaatgcttatgacactgccactgctgcggcagacctctacaaaagccgttcagcacttctataacatcaagctcgaaggaaaagttccaatgcataagttgtttttagagatgttggaggccaaagtgtag

SEQ ID NO: 264033 - DNA, 1308 bp, Artificial Sequence
  derived and/or modified sequence
atgtctaacaaagaccgacatattgactcctcctgttctagtttcatcaagactgagcctagcagtcccgctagcctgactgactctgtcaaccaccactctccgggaggatcatccgacgcttccggttcatactcctctaccatgaacggccatcagaacggcctggattcgcctcctctctatccaagtgcacccattcttgggggttcaggtcctgtgcggaaactttacgatgattgtagctctaccatcgtggaggacccccaaacaaagtgtgaatacatgctgaattctatgcccaagagactctgcctagtttgtggcgatattgcctctggctatcattatggggtggccagctgtgaggcctgtaaagccttctttaagcgcactattcaggggaatattgaatattcatgtcccgctaccaatgagtgtgaaatcacgaaacgcagaagaaagtcatgccaggcttgtagattcatgaagtgccttaaagtcggcatgctgaaggaaggggtacgactcgacagagtgcgcggaggccgacagaaatacaagcggcgtatcgacgccgaaaattcgccatatctgaacccccaacttgtgcagccagcaaagaagccttacaacaaaatcgtctcccatctgctggtcgccgaaccagagaaaatttatgcaatgccagaccctacagtacccgatagcgacatcaaggctctaacaacgctttgcgatttagcagatcgcgagctcgttgtcatcattggctgggccaagcacatccctgggttttctacattaagcctggcagatcaaatgtcccttctgcagtctgcttggatggaaatcctgatacttggggtggtgtatagaagcctcagcttcgaagacgagttagtctatgccgacgattatatcatggatgaagatcagtctaagcttgctgggttgctagacctcaacaacgcaatccttcagctggtcaagaaatacaagtctatgaagcttgaaaaggaggagtttgttaccttaaaggccatcgccctcgcgaactctgacagcatgcacattgaagatgtcgaagccgttcaaaagctgcaagacgtactacacgaagcgctacaagattatgaagccggacaacacatggaagacccaagacgagccggtaagatgctgatgacactgcctctgctccgacagacttcgacaaaggcagtgcagcacttctacaacatcaaactggaaggcaaagtccccatgcataagttatttctggagatgctggaggctaaggtatag

SEQ ID NO: 264034 - DNA, 1065 bp, Artificial Sequence
  derived and/or modified sequence
atgtccaacaaagatcgacatatcgactcgtcctgctcaagctttattaagacagaacctagctcccctgcttccctcacagactctgttaatcaccatagcccaggcggatcctcagatgcgtctggaagctactcctccactatgaacggacatcagaacggactcgacagtcctccactgtaccccagcgcaccaatcctgggcggttctgggcctgtgcggaagctgtacgacgattgttcgagtactatcgttgaggacccacaaactaaatgcgaatacatgcttaattccatgcccaaacgtctgtgtctggtgtgcggcgacatcgcctctgggtaccattatggcgtcgccagctgtgaagcgtgtaaggcttttttcaagcgtaccatccagggaaatatcgagtattcctgtcctgccaccaacgagtgcgagattactaagcgcagacgcaaatcgtgtcaggcatgccggtttatgaagtgcctgaaggttggaatgctcaaagaaggtgtccgtttagacagggtccgaggaggtaggcagaaatataagcgacggatcgacgccgagaacagcccgtacctgaacccgcagctggttcagccagccaaaaaaccctacaacaaaatcgtctcccatttacttgtcgctgagccagagaagatttatgcaatgcctgacccaacggtgcccgattcagacatcaaggccctgaccacgctctgcgacttggccgacagggaactggtggtgatcatcggctgggcaaagcacataccgggattctctacccttagtctggcagaccaaatgagcctactgcagagtgcctggatggagatcctgattttgggtgtggtctaccgatccctcagttttgaggacgagcttgtatatgctgatgattacattatggatgaagatcaatcgaagttagccggacttctggacctaaacaatgccatccttcagctcgtaaaaaaatacaagagcatgaagttggagaaagaggaatttgtcacactgaaggccatagccttggccaattcgtag

SEQ ID NO: 264035 - DNA, 1308 bp, Artificial Sequence
  derived and/or modified sequence
atgtcaaataaggataggcacatagacagcagttgctcctcgttcataaaaactgaaccatcaagtcccgcaagcttaaccgacagcgttaaccatcattcccctgggggatccagcgacgccagcggatcttattccagcacaatgaatgggcatcagaacggactggactcccctcccctgtacccttctgccccaatcctcggcggtagcggcccagtgcgcaaattatacgacgattgcagttctacgattgttgaggatccacaaactaagtgtgaatatatgctcaattcgatgcctaagcggttgtgccttgtgtgcggcgacatagcctccgggtatcactacggcgtcgcttcttgtgaggcctgtaaagcattttttaagaggacgatccagggcaacatcgagtactcgtgtccagccactaacgagtgcgagataactaaacggaggcgcaaatcgtgccaggcctgcagatttatgaaatgtttgaaggtggggatgctgaaggagggggtgcgcctggaccgggttcggggaggaaggcagaagtataagcgtagaattgatgcagagaattcaccttatctgaacccccaacttgtacaaccagcaaaaaagccatataataagatcgtcagtcacttactagtggcagaacccgagaagatctatgctatgccagacccgactgttccagactcggacattaaggccttaaccacactttgtgacctcgcggaccgagaacttgtcgtgataatcgggtgggccaaacacatacctggattctctaccttgtctttagccgatcagatgtcactccttcagtcagcctggatggagattcttattctaggggtggtttacagatcacttagtttcgaagatgaattagtgtacgcagatgactatatcatggacgaagaccagtctaagctggcgggactgctcgatcttaacaacgcaattctgcagttagttaaaaaatacaaaagcatgaaactagaaaaggaagaatttgtcactctaaaagccatagcgctggcgaacagtgattctatgcacatagaagacgtggaggccgtccaaaaactccaggatgttttgcatgaggcccttcaggattatgaggccggacaacatatggaagatcccaggcgcgcaggcaaaatgctgatgacactccccttgctgagacagacttcaacaaaggccgtccagcacttttataatatcaagttggaaggaaaagtacctatgcacaagcttttcctggaaatgcttgaagcaaaagtctag

SEQ ID NO: 264036 - DNA, 1308 bp, Artificial Sequence
  derived and/or modified sequence
atgagcaataaggatagacacatcgactcttcttgtagctcttttatcaaaacagaaccctcatctccagccagcctgaccgattctgtcaatcaccatagccccggaggaagctctgacgcatctggctcttattcaagcaccatgaacggacatcagaatggactagattccccacctctgtatcctagcgcacctatcttgggaggctccgggccagtgcgcaaactctatgatgattgttcttctacaattgtcgaagaccctcagactaaatgcgagtacatgctcaattctatgcctaagagactgtgtttggtatgtggggatatagcatcaggctaccactacggtgttgcctcttgcgaggcgtgcaaagcctttttcaaacggacgatccaggggaatatcgagtattcctgcccagctaccaatgaatgtgaaattactaaaagacgtagaaaaagctgtcaggcatgccggttcatgaaatgtctgaaagtcggcatgttaaaagaaggggtgagactcgacagggtccgtgggggacggcagaaatataagcggagaattgatgccgagaatagcccgtacctgaatcctcagttggtccagcctgcaaagaagccttataataagatcgttagtcatctgctggtggccgaacccgagaaaatctacgccatgcccgaccccacagtgcccgattccgacatcaaagctctgaccaccctctgtgatttggccgatcgagagctcgtggttataattggttgggccaagcacattcccggtttctcgacactgtcccttgccgatcaaatgagtctgctccaaagcgcctggatggagattctaatcctgggagtggtctaccgatcgctgagtttcgaagacgaactcgtgtatgccgacgattacatcatggacgaagaccagagcaagcttgccggtctcctcgatttaaacaatgccatcctgcaactcgttaagaaatacaagtcaatgaaactggagaaggaggagttcgtgaccctgaaggcgatagctctggcgaactccgacagcatgcacattgaagacgttgaggccgtgcaaaagctccaggacgtgttgcacgaggccctgcaggactacgaggctggtcagcatatggaggatccccgacgagctggaaaaatgttgatgaccctccccctcctcaggcagacctctaccaaagccgtgcaacacttctacaacataaagttggaaggaaaggtcccaatgcacaagctgtttctggaaatgctcgaagccaaggtctag

SEQ ID NO: 264037 - DNA, 1308 bp, Artificial Sequence
  derived and/or modified sequence
atgtccaacaaggataggcatatagatagctcatgtagctcctttataaaaacagagcccagttcaccagcttctctgaccgattccgtgaaccaccacagccccggaggatctagcgatgctagcgggtcctactcatccactatgaacggccatcagaacggcctggattccccgccactgtatccttccgctccaatactaggcggaagcggaccagttaggaagctgtatgacgactgttcatctaccatcgtcgaggaccctcaaacgaaatgcgagtatatgctaaacagtatgccgaaacgactctgtctggtctgtggcgatatcgcaagcggataccactacggggttgcctcctgtgaggcctgcaaggcttttttcaagagaaccatacagggaaatatagaatattcttgccccgcaaccaatgagtgtgagattacaaagcgccgaaggaaaagttgtcaggcttgcagatttatgaaatgtctgaaagtgggtatgctcaaggagggggttaggctagacagagtcagaggtggaagacagaagtataagcgccgaatagatgcggagaactctccgtacctcaatccccagttggtgcagccagcgaaaaagccgtacaataagattgtaagtcacctgttagtcgccgagcccgaaaagatctacgccatgcccgatcccactgtcccagattcagatattaaggctttgacaactctgtgcgatctagccgatcgggaactcgtggtcattattgggtgggccaagcatatacccggattttcaactctctcgcttgcagatcagatgagtctcctgcagtcggcttggatggaaatcttgattttgggcgtggtgtatagatctctttctttcgaagacgaactcgtatatgcagacgactacatcatggacgaagatcagtcaaaactggctggccttttggacctgaacaatgctatactgcagctggttaaaaaatataaatccatgaagctggaaaaagaggagtttgtaactcttaaggccattgcgctcgccaacagtgacagcatgcacatcgaggacgtggaggcggtgcagaaacttcaggatgtactccatgaagccctgcaggattacgaggcgggtcaacacatggaggatccacgcagagcaggcaagatgttaatgacgctgcctctcctcaggcagacatccaccaaagcagtgcaacacttctacaatataaagctcgaagggaaagtacccatgcataagctgtttttagaaatgttggaggcgaaggtctag

SEQ ID NO: 264038 - DNA, 1311 bp, Artificial Sequence
  derived and/or modified sequence
atgagcaacaaggacagacacatcgacagcagctgcagcagcttcatcaagaccgagcccagcagccccgccagcctgaccgacagcgtgaaccaccacagccccggcggcagcagcgacgccagcggcagctacagcagcaccatgaacggccaccagaacggcctggacagcccccccctgtaccccagcgcccccatcctgggcggcagcggccccgtgagaaagctgtacgacgactgcagcagcaccatcgtggaggacccccagaccaagtgcgagtacatgctgaacagcatgcccaagagactgtgcctggtgtgcggcgacatcgccagcggctaccactacggcgtggccagctgcgaggcctgcaaggccttcttcaagagaaccatccagggcaacatcgagtacagctgccccgccaccaacgagtgcgagatcaccaagagaagaagaaagagctgccaggcctgcagattcatgaagtgcctgaaggtgggcatgctgaaggagggcgtgagactggacagagtgagaggcggcagacagaagtacaagagaagaatcgacgccgagaacagcccctacctgaacccccagctggtgcagcccgccaagaagccctacaacaagatcgtgagccacctgctggtggccgagcccgagaagatctacgccatgcccgaccccaccgtgcccgacagcgacatcaaggccctgaccaccctgtgcgacctggccgacagagagctggtggtgatcatcggctgggccaagcacatccccggcttcagcaccctgagcctggccgaccagatgagcctgctgcagagcgcctggatggagatcctgatcctgggcgtggtgtacagaagcctgagcttcgaggacgagctggtgtacgccgacgactacatcatggacgaggaccagagcaagctggccggcctgctggacctgaacaacgccatcctgcagctggtgaagaagtacaagagcatgaagctggagaaggaggagttcgtgaccctgaaggccatcgccctggccaacagcgacagcatgcacatcgaggacgtggaggccgtgcagaagctgcaggacgtgctgcacgaggccctgcaggactacgaggccggccagcacatggaggaccccagaagagccggcaagatgctgatgaccctgcccctgctgagacagaccagcaccaaggccgtgcagcacttctacaacatcaagctggagggcaaggtgcccatgcacaagctgttcctggagatgctggaggccaaggtgtgctag

SEQ ID NO: 264039 - DNA, 1308 bp, Artificial Sequence
  derived and/or modified sequence
atgagcaacaaggacagacacatcgacagcagctgcagcagcttcatcaagaccgagcccagcagccccgccagcctgaccgacagcgtgaaccaccacagccccggcggcagcagcgacgccagcggcagctacagcagcaccatgaacggccaccagaacggcctggacagcccccccctgtaccccagcgcccccatcctgggcggcagcggccccgtgagaaagctgtacgacgactgcagcagcaccatcgtggaggacccccagaccaagtgcgagtacatgctgaacagcatgcccaagagactgtgcctggtgtgcggcgacatcgccagcggctaccactacggcgtggccagctgcgaggcctgcaaggccttcttcaagagaaccatccagggcaacatcgagtacagctgccccgccaccaacgagtgcgagatcaccaagagaagaagaaagagctgccaggcctgcagattcatgaagtgcctgaaggtgggcatgctgaaggagggcgtgagactggacagagtgagaggcggcagacagaagtacaagagaagaatcgacgccgagaacagcccctacctgaacccccagctggtgcagcccgccaagaagccctacaacaagatcgtgagccacctgctggtggccgagcccgagaagatctacgccatgcccgaccccaccgtgcccgacagcgacatcaaggccctgaccaccctgtgcgacctggccgacagagagctggtggtgatcatcggctgggccaagcacatccccggcttcagcaccctgagcctggccgaccagatgagcctgctgcagagcgcctggatggagatcctgatcctgggcgtggtgtacagaagcctgagcttcgaggacgagctggtgtacgccgacgactacatcatggacgaggaccagagcaagctggccggcctgctggacctgaacaacgccatcctgcagctggtgaagaagtacaagagcatgaagctggagaaggaggagttcgtgaccctgaaggccatcgccctggccaacagcgacagcatgcacatcgaggacgtggaggccgtgcagaagctgcaggacgtgctgcacgaggccctgcaggactacgaggccggccagcacatggaggaccccagaagagccggcaagatgctgatgaccctgcccctgctgagacagaccagcaccaaggccgtgcagcacttctacaacatcaagctggagggcaaggtgcccatgcacaagctgttcctggagatgctggaggccaaggtgtag

SEQ ID NO: 264040 - DNA, 1065 bp, Artificial Sequence
  derived and/or modified sequence
atgagcaacaaggacagacacatcgacagcagctgcagcagcttcatcaagaccgagcccagcagccccgccagcctgaccgacagcgtgaaccaccacagccccggcggcagcagcgacgccagcggcagctacagcagcaccatgaacggccaccagaacggcctggacagcccccccctgtaccccagcgcccccatcctgggcggcagcggccccgtgagaaagctgtacgacgactgcagcagcaccatcgtggaggacccccagaccaagtgcgagtacatgctgaacagcatgcccaagagactgtgcctggtgtgcggcgacatcgccagcggctaccactacggcgtggccagctgcgaggcctgcaaggccttcttcaagagaaccatccagggcaacatcgagtacagctgccccgccaccaacgagtgcgagatcaccaagagaagaagaaagagctgccaggcctgcagattcatgaagtgcctgaaggtgggcatgctgaaggagggcgtgagactggacagagtgagaggcggcagacagaagtacaagagaagaatcgacgccgagaacagcccctacctgaacccccagctggtgcagcccgccaagaagccctacaacaagatcgtgagccacctgctggtggccgagcccgagaagatctacgccatgcccgaccccaccgtgcccgacagcgacatcaaggccctgaccaccctgtgcgacctggccgacagagagctggtggtgatcatcggctgggccaagcacatccccggcttcagcaccctgagcctggccgaccagatgagcctgctgcagagcgcctggatggagatcctgatcctgggcgtggtgtacagaagcctgagcttcgaggacgagctggtgtacgccgacgactacatcatggacgaggaccagagcaagctggccggcctgctggacctgaacaacgccatcctgcagctggtgaagaagtacaagagcatgaagctggagaaggaggagttcgtgaccctgaaggccatcgccctggccaacagctag

SEQ ID NO: 264041 - protein, 340 aa, Artificial Sequence
  derived and/or modified sequence
MALRLLRRAARGAAAAALLRLKASLAADIPRLGYSSSSHHKYIPRRAVLYVPGNDEKKIKKIPSLNVDCAVLDCEDGVAANKKNEARLRIVKTLEDIDLGPTEKCVRVNSVSSGLAEEDLETLLQSRVLPSSLMLPKVESPEEIQWFADKFSFHLKGRKLEQPMNLIPFVETAMGLLNFKAVCEETLKVGPQVGLFLDAVVFGGEDFRASIGATSSKETLDILYARQKIVVIAKAFGLQAIDLVYIDFRDGAGLLRQSREGAAMGFTGKQVIHPNQIAVVQEQFSPSPEKIKWAEELIAAFKEHQQLGKGAFTFQGSMIDMPLLKQAQNTVTLATSIKEK

SEQ ID NO: 264042 - protein, 181 aa, Artificial Sequence
  derived and/or modified sequence
NEARLRIVKTLEDIDLGPTEKCVRVNSVSSGLAEEDLETLLQSRVLPSSLMLPKVESPEEIQWFADKFSFHLKGRKLEQPMNLIPFVETAMGLLNFKAVCEETLKVGPQVGLFLDAVVFGGEDFRASIGVKDISLSLFLCVCVYMCVYIFSLPLKDGHLHNNVYLPTMTMVFHDNGMDTTS

SEQ ID NO: 264043 - DNA, 1023 bp, Artificial Sequence
  derived and/or modified sequence
atggcactgcgcctgctccggagggctgcacgaggcgccgcggcagctgctcttcttagattgaaggcctccctggcagcagatatccctcggctgggctactcgagctctagccaccacaaatacattcctaggcgcgccgttctctatgttcctgggaatgatgaaaagaaaattaagaagatacccagtctgaatgtggactgtgccgtgctcgattgcgaagacggggtagccgcgaacaaaaagaacgaggctcgacttcgtattgtaaagacgttggaagatattgatctcgggccaacggaaaagtgtgtgagagtgaactcagtgtcatccggacttgctgaagaagatctggagacattgttacaatctcgggtcttgccctccagcttgatgctgccaaaagtggagtcccctgaagagattcagtggtttgccgataagttctcctttcacctgaagggaagaaaattggaacaacccatgaatctgatccccttcgtggagacggcaatgggcttgttgaatttcaaagcagtctgcgaggagacactcaaggttggaccccaagtgggactattcctggacgcagtcgttttcggaggggaagattttcgagctagtataggagccacatctagtaaagagacattggacatcttgtacgccagacagaaaatcgtggtgatcgccaaagctttcggcctgcaggccattgatttggtatacatcgacttccgcgacggtgccggactgttgagacagtcaagggagggcgcggctatgggattcacagggaaacaggtgattcaccctaaccagatcgccgtcgtgcaagaacagttctcaccatctcctgaaaagataaagtgggctgaggaactaatcgcggccttcaaagagcaccaacagttggggaaaggggcttttaccttccagggctcgatgatagacatgcctctgttgaagcaggcacagaacacagtgacccttgccacttctataaaagagaagtag

SEQ ID NO: 264044 - DNA, 1023 bp, Artificial Sequence
  derived and/or modified sequence
atggctcttaggctgctccgcagagctgctaggggggccgccgccgccgcactcttaagactgaaagcgagccttgctgccgatattcctcgcctcggatacagtagctcaagtcatcacaagtatataccaagacgagcagtcctgtatgtccctggcaatgacgaaaagaaaatcaaaaaaataccctccctgaatgtcgactgcgctgttcttgattgtgaggatggcgtggccgcaaacaagaagaacgaggcgagactgagaatcgtcaaaaccctggaggacatagaccttgggcctaccgaaaagtgcgttcgggttaattcagtttcatccggcctggccgaggaggatctcgagactctgcttcaatctcgcgtgctcccctccagcctgatgttgccaaaagtggagagcccagaggaaatccagtggttcgctgataagttctcatttcacttgaagggccgtaaactggagcagccaatgaatcttattccatttgtggagactgccatgggattactgaacttcaaggccgtgtgcgaggagacactgaaagtggggccgcaggttggtctttttctagacgcggtcgttttcggtggagaagattttagggcttcaattggagcaacgtcgagtaaggaaacccttgatatcctgtatgcaagacagaagattgtggtgattgcaaaagccttcggtctgcaggctatcgatctggtgtatatcgatttcagagatggcgctggattgttgaggcagtctagggaaggagctgccatgggctttacaggaaagcaggtcatacatcccaaccaaatcgccgttgtacaggagcagttcagtccttctccagagaagattaaatgggccgaagaactcatagctgccttcaaagagcatcagcagttgggcaagggagctttcaccttccaaggatctatgatcgacatgcctctcctgaagcaggcacagaataccgttacgctggccacctccataaaggaaaaatag

SEQ ID NO: 264045 - DNA, 546 bp, Artificial Sequence
  derived and/or modified sequence
aatgaggcacggcttaggattgttaagacccttgaggacattgatctcggtccaacagagaagtgcgtcagggtcaattcagtgagctcgggcctggcagaggaggatctggagaccttactgcagagtcgtgtgttaccttctagcctgatgctgcctaaggtcgaatccccagaggagatccagtggtttgcagataaattctcatttcatctgaaagggcgaaaactagaacagccgatgaacctcattccatttgtcgaaacagcaatgggtctgctgaatttcaaggccgtatgtgaagagactcttaaggtggggccccaggttggcttatttctcgatgccgtcgtgttcggcggcgaggatttccgggcttccatcggggtcaaggatatctctttgagcctttttctctgtgtgtgcgtctatatgtgcgtttatatcttttccctgcccctaaaggacggtcacctgcacaataacgtgtatctgccaaccatgacaatggttttccacgataatggcatggacacaacttcatag

SEQ ID NO: 264046 - DNA, 1023 bp, Artificial Sequence
  derived and/or modified sequence
atggccctgcggctgctgcggcgggccgcccggggagctgctgctgctgccctgctgcggctgaaggccagcctggccgctgacatcccccggctgggctacagcagcagcagccaccacaagtacatccccaggagagctgtgctgtatgtgcctggaaatgatgagaagaagatcaagaagatccccagcctgaatgtggactgtgctgtgctggactgtgaagatggagtggccgccaacaagaagaatgaggcccggctgcgcatcgtgaagaccctggaggacatcgacctgggccccacagagaagtgtgtgcgggtgaacagcgtgagcagcggcctggccgaggaggacctggagaccctgctgcagagccgggtgctgcccagcagcctgatgctgcccaaggtggagagccctgaggagatccagtggtttgctgacaagttctccttccacctgaagggcaggaagctggagcagcccatgaacctgatcccctttgtggagacagccatgggcctgctgaacttcaaggctgtgtgtgaggagaccctgaaggtgggcccccaggtgggcctcttcctggatgctgtggtgtttggaggagaggacttccgggccagcattggagccaccagcagcaaggagaccctggacatcctgtatgcccggcagaagatcgtggtgattgccaaggccttcggcctgcaggccatcgacctggtgtacatcgacttcagagatggagctggcctgctgcggcagagccgggagggcgccgccatgggcttcaccgggaagcaggtgatccaccccaaccagattgctgtggtgcaggagcagttcagccccagccctgagaagatcaagtgggccgaggagctgattgctgccttcaaggagcaccagcagctgggcaaaggagccttcaccttccagggctccatgattgacatgcccctgctgaagcaggcccagaacacagtgaccctggccaccagcatcaaggagaagtag

SEQ ID NO: 264047 - DNA, 546 bp, Artificial Sequence
  derived and/or modified sequence
aatgaggcccggctgagaattgtgaagaccctggaggacatcgacctgggccccacagagaagtgtgtgcgggtgaacagcgtgagcagcggcctggccgaggaggacctggagaccctgctgcagagccgggtgctgcccagcagcctgatgctgcccaaggtggagagccctgaggagatccagtggtttgctgacaagttctccttccacctgaagggcaggaagctggagcagcccatgaacctgatcccctttgtggagacagccatgggcctgctgaacttcaaggctgtgtgtgaggagaccctgaaggtgggcccccaggtgggcctcttcctggatgctgtggtgtttggaggagaggacttccgggccagcattggagtgaaggacatcagcctgagcctcttcctgtgtgtgtgtgtgtacatgtgtgtgtacatcttcagcctgcccctgaaggatggccacctgcacaacaacgtgtacctgcccaccatgaccatggtgttccatgacaatggcatggacaccaccagctag

SEQ ID NO: 264048 - DNA, 1023 bp, Artificial Sequence
  derived and/or modified sequence
atggccctgcggctgctgcggcgggccgcccggggcgccgccgccgccgccttactgcgcctgaaagcgtcccttgctgctgatattcctagattaggatacagctcctcttcccaccacaagtacatccctcgcagggccgtgctttacgtacccggaaacgacgagaaaaagatcaaaaagattccaagccttaacgtggattgcgcggtgctggactgcgaagacggagtcgctgccaataaaaagaatgaggctcgcttgaggatcgtcaagacgcttgaggacattgacctggggcctactgaaaagtgcgtcagggtgaactccgtgagctcaggactggccgaggaagacctagagacactgctgcagtcccgggtgttgccgtcaagccttatgctgccaaaagtggaaagtccagaggagatccaatggtttgctgacaaatttagctttcatttaaaaggtcgcaaactagagcagccaatgaacctcatcccattcgtcgaaacagccatggggctgctgaattttaaggccgtctgcgaagaaaccctgaaggtcggcccgcaggtaggtttgttcctggatgccgtggtctttggcggcgaggatttcagggccagcatcggggctacatcctcaaaggagacactggatattctctacgcgagacagaagattgtcgtcattgccaaggccttcgggttacaggctatagatctggtgtacatcgattttcgtgatggcgcaggcctgttaaggcagagccgggagggggcagctatgggatttacgggaaaacaggttatccatcccaatcagattgccgtagttcaggagcagttcagtccgagccctgaaaagatcaagtgggctgaggaactgattgccgcctttaaagagcatcagcagctgggtaaaggcgcctttactttccagggcagtatgatcgatatgcctctactgaagcaggctcaaaacacagttactctggcaacatctataaaagaaaagtag

SEQ ID NO: 264049 - DNA, 1023 bp, Artificial Sequence
  derived and/or modified sequence
atggccctgcggctgctgcggcgggccgcccggggcgccgccgccgccgccttattgaggttaaaggcctctcttgcagctgatatccctagactcggctacagcagcagcagccaccataaatacatcccccgacgggcagtcctgtacgtgcctgggaacgacgagaaaaaaattaaaaaaatcccctcactgaacgtggactgtgctgtgctcgattgtgaggacggagttgcggctaacaaaaaaaacgaagccaggctacgaattgtaaaaacacttgaggatatcgatctcggacccaccgaaaagtgtgtaagagtgaacagtgtctccagtggtctcgcagaggaggacctggaaactctccttcagtcgagagtgttgccctccagtcttatgttgccaaaagtagagagccccgaagagatacaatggttcgcagataaattttctttccacctgaaggggcgaaaactcgaacaaccgatgaacctcatccctttcgttgagactgccatgggactgctaaactttaaggcagtctgcgaggaaacactcaaagtcgggccccaagtaggcctgttcctcgacgcagtggtgttcggtggggaggactttagggcgtccatcggcgccactagtagcaaggaaacactcgatatcctttatgcaaggcaaaaaattgtggtcatcgccaaggccttcgggttgcaggccatcgacctggtgtatatcgatttccgcgacggagcaggactgctccgccagagccgtgaaggggccgcaatgggattcacgggcaagcaggtaatccacccaaatcagatagccgtcgtgcaagagcagttcagcccgtctccagagaagattaagtgggccgaggagttaatcgccgcgttcaaggaacatcagcagctgggtaaaggtgcatttaccttccagggaagcatgattgacatgcctctgctcaaacaagcacagaataccgttaccctggccacatccatcaaggagaaatag

SEQ ID NO: 264050 - DNA, 546 bp, Artificial Sequence
  derived and/or modified sequence
aacgaggcccggctgcggatcgtgaagaccctggaggacatcgacctgggcccaactgagaaatgtgtgcgcgtaaacagtgtctcatcagggctggctgaagaggacctcgagaccctgttgcagtctagagtcctgccatcaagtctgatgctgccaaaagtagagtccccggaagaaattcagtggtttgccgacaaattctcattccatttaaaaggccgtaagctggagcagcccatgaacctgatccccttcgtcgagaccgctatgggattgttaaacttcaaggcggtctgtgaagagaccctcaaggtagggccccaagtgggtttgtttctagatgccgtagtgtttggcggagaagattttcgtgcctccattggggtcaaagacatcagcctgagcctgttcctctgcgtgtgtgtatacatgtgtgtgtacattttcagcctccccctgaaagatgggcatctccacaataatgtgtatcttccaactatgaccatggtctttcatgataatggcatggatactacctcttag

SEQ ID NO: 264051 - DNA, 1023 bp, Artificial Sequence
  derived and/or modified sequence
atggccctcaggttgctgaggagagcagcgagaggagctgctgccgctgcattactcagacttaaggccagtctggccgcagatatccctcggctagggtatagttcaagctcacatcataagtatatccccaggcgcgctgtgctttatgtacctggaaacgatgagaagaagattaagaaaatccctagcctcaatgttgattgtgccgtattggattgcgaagatggagttgccgctaataagaagaacgaagcgcgacttagaatcgtgaaaaccctggaagatatcgacctgggtccaaccgaaaagtgcgtacgggtaaactcagtgtcatcggggcttgctgaggaagatttagagaccctgcttcaatcccgcgttctccccagcagtctcatgctgccaaaggtggagtcccccgaggaaatccagtggttcgctgacaaattttcctttcatttgaaaggtcgcaagcttgagcagccaatgaatttaattcccttcgttgaaactgccatgggactccttaatttcaaggctgtctgtgaggaaactctgaaggtgggcccacaggttggcctcttcctggatgctgtggtatttggaggagaagatttcagggccagcataggagcaacctcctctaaagagaccctggacatcctctacgctcgacagaagatcgtggtgatcgcaaaagcctttggactgcaagccatcgacctggtgtacatcgacttcagggacggggctggcctcctgcggcagagccgcgagggcgctgccatggggtttaccgggaagcaagttatccaccccaaccagattgctgtcgtgcaggaacagttctccccttccccagaaaagatcaagtgggcggaggagttaatcgccgctttcaaagagcatcagcagttgggaaagggcgctttcactttccagggcagtatgatcgacatgcccctgctgaaacaggctcagaacaccgtcaccctcgcgaccagcataaaagaaaagtag

SEQ ID NO: 264052 - DNA, 1023 bp, Artificial Sequence
  derived and/or modified sequence
atggccctaaggctcttgagacgggctgctagaggggctgcagctgccgcactactgcgcctcaaggcttctttagccgcagacattccgcgattaggttactcttcttctagtcaccataaatatatcccccgacgggcagtactttatgtacccggaaatgacgagaagaagataaaaaaaattcctagccttaatgtggattgcgctgttctggactgtgaggatggggttgcggcaaacaagaagaacgaagcccgactccgcatcgtgaagactctagaagatatcgatctgggaccaacagaaaagtgtgtgagggttaatagcgtgtcctccgggctggccgaagaggacctggagaccctgttacagtctcgggtgttacccagcagtctaatgcttcccaaagtagagtcccctgaggaaatccaatggtttgcggacaagttttcattccacctcaaaggcagaaagctggagcagcccatgaacctcattccctttgtcgaaactgctatgggcttactgaatttcaaggctgtatgtgaggagacactgaaggtagggccacaggtcggactcttcctggacgcagtcgtcttcgggggagaagacttccgcgcttccatcggggcaacatcctcaaaggaaacgttagatatcctgtacgcccgacagaagatagtggtgatcgccaaggcattcgggcttcaggcgatcgatctggtgtacattgactttagagatggggctggcctgttgagacagagtcgcgaaggagccgcaatggggttcacaggaaagcaagtaatccaccccaatcagattgccgttgttcaggagcaattttcgccatcacctgagaaaataaagtgggccgaagagttgatagccgctttcaaggaacaccagcagctcggcaagggcgcatttaccttccagggaagcatgattgacatgcccttactcaagcaggcccagaatacggtgaccttggcgacctcaatcaaggagaagtag

SEQ ID NO: 264053 - DNA, 546 bp, Artificial Sequence
  derived and/or modified sequence
aacgaggcgagactgcgcatcgtgaagaccctcgaggacatagatttaggtccgaccgaaaagtgcgtgagagtaaatagcgtgagtagtgggctggcggaggaagacctagagaccctcctgcagtcccgggtcctcccttcatccctgatgctgccaaaagtggagtcacccgaggagatccaatggttcgccgacaaattttcttttcatctgaaaggaagaaaactggagcagccaatgaatctaattcccttcgtcgagacagccatgggcctactgaatttcaaagccgtgtgtgaagaaacgttaaaggtcgggcctcaggtcggcctgtttctcgatgccgtggtgttcggtggggaagatttccgggcatccatcggggtgaaggatatcagtctcagcctgttcctgtgtgtttgcgtttatatgtgcgtatacatctttagtttaccattaaaggatggccatctacacaacaacgtgtatctccccactatgaccatggtgttccatgataacggaatggatacaacttcctag

SEQ ID NO: 264054 - DNA, 1169 bp, Artificial Sequence
  derived and/or modified sequence
atggcgctacgtctgctgcggagggcggcgcgcggagctgcggcggcggcgctgctgaggctgaaagcgtctctagcagctgatatccccagacttggatatagttcctcatcccatcacaagtacatcccccggagggcagtgctttatgtacctggaaatgatgaaaagaaaataaagaagattccatccctgaatgtagattgtgcagtgctcgactgtgaggatggagtggctgcaaacaaaaagaatgaagctcgactgagaattgtaaaaactcttgaagacattgatctgggccctactgaaaaatgtgtgagagtcaactcagtttccagtggtctggcggaagaagacctagagacccttttgcaatcccgggtccttccttccagcctgatgctaccaaaggtggaaagtcctgaagaaatccagtggtttgcagacaaattttcattccacttaaaaggccgaaaacttgaacaaccaatgaatttaatcccttttgtggaaactgcaatgggtttgctcaattttaaggcagtgtgtgaagaaaccctgaaggtcgggcctcaagtaggtctctttctagatgcagtcgtttttggaggagaagactttcgagccagcataggtgcaacaagtagtaaagaaaccctggatattctctacgcccggcaaaagattgttgtcatagcgaaagcctttggtctccaagccatagatctggtgtacattgactttcgagatggagctgggctgcttagacagtcacgagaaggagccgccatgggcttcactggtaagcaggtgattcaccctaaccaaattgccgtggtccaggagcagttttctccttcccctgaaaaaattaagtgggctgaagaactgattgctgcctttaaagaacatcaacaattaggaaagggggcctttactttccaagggagtatgatcgacatgccattactgaagcaggcccagaacactgttacgcttgccacctccatcaaggaaaaatgatctgttaaatgaagctgtcatcaggctaaagggtattgaagctgcagagggatcaacttgtgcttgccagaggacgccaatgaagtttgaaacaccaacaatcagagattttgtttctgttcctcattaaatcatgagcttttgtg

SEQ ID NO: 264055 - DNA, 2207 bp, Artificial Sequence
  derived and/or modified sequence
aaagggcggggcgcgcgcgtcgggaagatggcgctacgtctgctgcggagggcggcgcgcggagctgcggcggcggcgctgctgaggctgaaagcgtctctagcagctgatatccccagacttggatatagttcctcatcccatcacaagtacatcccccggagggcagtgctttatgtacctggaaatgatgaaaagaaaataaagaagattccatccctgaatgtagattgtgcagtgctcgactgtgaggatggagtggctgcaaacaaaaagaatgaagctcgactgagaattgtaaaaactcttgaagacattgatctgggccctactgaaaaatgtgtgagagtcaactcagtttccagtggtctggcggaagaagacctagagacccttttgcaatcccgggtccttccttccagcctgatgctaccaaaggtggaaagtcctgaagaaatccagtggtttgcagacaaattttcattccacttaaaaggccgaaaacttgaacaaccaatgaatttaatcccttttgtggaaactgcaatgggtttgctcaattttaaggcagtgtgtgaagaaaccctgaaggtcgggcctcaagtaggtctctttctagatgcagtcgtttttggaggagaagactttcgagccagcataggtgcaacaagtagtaaagaaaccctggatattctctacgcccggcaaaagattgttgtcatagcgaaagcctttggtctccaagccatagatctggtgtacattgactttcgagatggagctgggctgcttagacagtcacgagaaggagccgccatgggcttcactggtaagcaggtgattcaccctaaccaaattgccgtggtccaggagcagttttctccttcccctgaaaaaattaagtgggctgaagaactgattgctgcctttaaagaacatcaacaattaggaaagggggcctttactttccaagggagtatgatcgacatgccattactgaagcaggcccagaacactgttacgcttgccacctccatcaaggaaaaatgatctgttaaatgaagctgtcatcaggtgggctgaacatatacagtggggttcttaaagacaaaccacaatactcaaagcaacttgttaggatgccagattgggacctgactccatttacagttcatgttaatcacaattttgttgttgttgtctcactggccagttattcccctaaaaaaatgaacgcttttccctttggatccaagcttatgattttatcatttttagtgtattacgaatatgggcttatgatttcacagggaggtaagatcctggggaaagatgggctgtgaggcgaaggtaggtctttaatgaaatggatctttcccaaatagacatattccctccacccttctcatgttagtaaatgtttcctgcttgttcatttatacagctgacaccacaaataattttaagaaaagccaggcctttaaaacatagtagcaacattaaggggtcatctctatttcactagtaatctgataaaacaacagagatggcatcaaaaaagaatactaagtattatattggcttaaaaagacactttctgaaaataaactttcgaaactggttactattaacctccacccctaaaacgaaacatccatctccttgaaccgctagacgatgaacacgaaagctgtcatcctgggtgaatgctgtgagtcaaccattaccggcaattaaaaaataaatgtgcagaaacacaagaccatccattctccccctttattttcccgtttaactgtttgccattgaggctatttccccctggaaatgtatggctgggacaggactccctcagtcataaacttgtagcgtctcagaagacacaatgcacccgagctggtgcatgtggcccctgcgagatttgcatcacattagagatgcggctgcaggtcagatgggtggtgtggttaacgggcttagtaaagctgttttgaagaggttaacccagcttgtagtaagggtaaataaacataacaaccagccattgttccctattcagcatgtactcttatattgaaggctaaagggtattgaagctgcagagggatcaacttgtgcttgccagaggacgccaatgaagtttgaaacaccaacaatcagagattttgtttctgttcctcattaaatcatgagcttttgtgccgaga

SEQ ID NO: 264056 - DNA, 712 bp, Artificial Sequence
  derived and/or modified sequence
aatgaagctcgactgagaattgtaaaaactcttgaagacattgatctgggccctactgaaaaatgtgtgagagtcaactcagtttccagtggtctggcggaagaagacctagagacccttttgcaatcccgggtccttccttccagcctgatgctaccaaaggtggaaagtcctgaagaaatccagtggtttgcagacaaattttcattccacttaaaaggccgaaaacttgaacaaccaatgaatttaatcccttttgtggaaactgcaatgggtttgctcaattttaaggcagtgtgtgaagaaaccctgaaggtcgggcctcaagtaggtctctttctagatgcagtcgtttttggaggagaagactttcgagccagcataggtgtcaaagacatctctctctctctttttctgtgtgtgtgtgtgtatatgtgtgtatatattttttctttgcccctcaaggatggacatttacataacaatgtatatttgccaaccatgacaatggtttttcatgacaatggaatggacactacttcctgataatttagggctcctcatagctgccctgcttctagagcactgcattattacttctgttcatttataaaagacacgagcaatagaaagcctgttgcagccccaggcatgctcaggaatatatggcatctcctttgctcctaataaatatattatgtgaacagcctca

SEQ ID NO: 264057 - DNA, 1023 bp, Artificial Sequence
  derived and/or modified sequence
atggccctgagactgctgagaagagccgccagaggcgccgccgccgccgccctgctgagactgaaggccagcctggccgccgacatccccagactgggctacagcagcagcagccaccacaagtacatccccagaagagccgtgctgtacgtgcccggcaacgacgagaagaagatcaagaagatccccagcctgaacgtggactgcgccgtgctggactgcgaggacggcgtggccgccaacaagaagaacgaggccagactgagaatcgtgaagaccctggaggacatcgacctgggccccaccgagaagtgcgtgagagtgaacagcgtgagcagcggcctggccgaggaggacctggagaccctgctgcagagcagagtgctgcccagcagcctgatgctgcccaaggtggagagccccgaggagatccagtggttcgccgacaagttcagcttccacctgaagggcagaaagctggagcagcccatgaacctgatccccttcgtggagaccgccatgggcctgctgaacttcaaggccgtgtgcgaggagaccctgaaggtgggcccccaggtgggcctgttcctggacgccgtggtgttcggcggcgaggacttcagagccagcatcggcgccaccagcagcaaggagaccctggacatcctgtacgccagacagaagatcgtggtgatcgccaaggccttcggcctgcaggccatcgacctggtgtacatcgacttcagagacggcgccggcctgctgagacagagcagagagggcgccgccatgggcttcaccggcaagcaggtgatccaccccaaccagatcgccgtggtgcaggagcagttcagccccagccccgagaagatcaagtgggccgaggagctgatcgccgccttcaaggagcaccagcagctgggcaagggcgccttcaccttccagggcagcatgatcgacatgcccctgctgaagcaggcccagaacaccgtgaccctggccaccagcatcaaggagaagtag

SEQ ID NO: 264058 - DNA, 546 bp, Artificial Sequence
  derived and/or modified sequence
aacgaggccagactgagaatcgtgaagaccctggaggacatcgacctgggccccaccgagaagtgcgtgagagtgaacagcgtgagcagcggcctggccgaggaggacctggagaccctgctgcagagcagagtgctgcccagcagcctgatgctgcccaaggtggagagccccgaggagatccagtggttcgccgacaagttcagcttccacctgaagggcagaaagctggagcagcccatgaacctgatccccttcgtggagaccgccatgggcctgctgaacttcaaggccgtgtgcgaggagaccctgaaggtgggcccccaggtgggcctgttcctggacgccgtggtgttcggcggcgaggacttcagagccagcatcggcgtgaaggacatcagcctgagcctgttcctgtgcgtgtgcgtgtacatgtgcgtgtacatcttcagcctgcccctgaaggacggccacctgcacaacaacgtgtacctgcccaccatgaccatggtgttccacgacaacggcatggacaccaccagctag

SEQ ID NO: 264059 - protein, 247 aa, Artificial Sequence
  derived and/or modified sequence
MASLSRPSLPSCLCSFLLLLLLQVSSSYAGQFRVIGPRHPIRALVGDEVELPCRISPGKNATGMEVGWYRPPFSRVVHLYRNGKDQDGDQAPEYRGRTELLKDAIGEGKVTLRIRNVRFSDEGGFTCFFRDHSYQEEAAMELKVEDPFYWVSPGVLVLLAVLPVLLLQITVGLIFLCLQYRLRGKLRAEIENLHRTFDPHFLRVPCWKITLFVIVPVLGPLVALIICYNWLHRRLAGQFLEELRNPF

SEQ ID NO: 264060 - protein, 247 aa, Artificial Sequence
  derived and/or modified sequence
MASLSRPSLPSCLCSFLLLLLLQVSSSYAGQFRVIGPRHPIRALVGDEVELPCRISPGKNATGMEVGWYRPPFSRVVHLYRNGKDQDGDQAPEYRGRTELLKDAIGEGKVTLRIRNVRFSDEGGFTCFFRDHSYQEEAAMELKVEDPFYWVSPGVLVLLAVLPVLLLQITVGLVFLCLQYRLRGKLRAEIENLHRTFDPHFLRVPCWKITLFVIVPVLGPLVALIICYNWLHRRLAGQFLEELRNPF

SEQ ID NO: 264061 - protein, 247 aa, Artificial Sequence
  derived and/or modified sequence
MASLSRPSLPSCLCSFLLLLLLQVSSSYAGQFRVIGPRHPIRALVGDEVELPCRISPGKNATGMEVGWYRPPFSRVVHLYRNGKDQDGDQAPEYRGRTELLKDAIGEGKVTLRIRNVRFSDEGGFTCFFRDHSYQEEAAMELKVEDPFYWVSPGVLVLLAVLPVLLLQITLGLVFLCLQYRLRGKLRAEIENLHRTFDPHFLRVPCWKITLFVIVPVLGPLVALIICYNWLHRRLAGQFLEELRNPF

SEQ ID NO: 264062 - protein, 177 aa, Artificial Sequence [sequence omitted]

SEQ ID NO: 264063 - protein, 177 aa, Artificial Sequence
  derived and/or modified sequence
MSHISWEERYRNGKDQDGDQAPEYRGRTELLKDAIGEGKVTLRIRNVRFSDEGGFTCFFRDHSYQEEAAMELKVEDPFYWVSPGVLVLLAVLPVLLLQITLGLVFLCLQYRLRGKLRAEIENLHRTFDPHFLRVPCWKITLFVIVPVLGPLVALIICYNWLHRRLAGQFLEELRNPF

SEQ ID NO: 264064 - DNA, 759 bp, Artificial Sequence
  derived and/or modified sequence
atggctagtctgtctagacctagcctgcctagctgcctttgttctttccttttgttactcctgcttcaggtgagtagcagctacgctgggcagtttcgagttattggccctcgacacccaatccgggcactcgtgggtgatgaagtcgagctaccctgcagaattagtcccgggaagaacgctaccggaatggaggttgggtggtacagaccaccattctctcgggtggtgcacctgtacaggaatggcaaggaccaagacggagatcaggccccagagtacagaggccgtacagagttgctgaaggacgccattggcgaggggaaggtgactctccgaattcgaaacgtccgcttttccgatgaaggtgggttcacatgtttttttcgcgaccacagctatcaggaggaagctgcgatggagctgaaagtagaagacccattctattgggtatccccaggagttctcgttttgctcgccgtgttgcctgttctgctcctgcaaataacggtagggcttatctttctgtgcctccagtacaggctgaggggcaagttacgtgcggagatagagaacttgcatcggacctttgatccacactttctgcgcgtgccatgctggaagataaccctcttcgtaattgttcccgtgttgggcccactggtggctcttatcatctgttacaactggcttcacaggaggctggccggccaatttctggaggagctcttgtttcacttggaggccctgtccgggtag

SEQ ID NO: 264065 - DNA, 744 bp, Artificial Sequence
  derived and/or modified sequence
atggcttcgctgagtaggccaagcttgcctagctgcctgtgtagtttcctcttgctccttttacttcaagtaagtagctcctacgcagggcagttcagagtaatcgggccccgacatccaatcagggcattggtaggggacgaggtggagcttccatgccggatcagtcctggcaaaaatgcaaccggcatggaggtgggttggtacagaccccctttttcaagagttgttcacttgtaccgcaacggcaaggaccaggatggggaccaggcccccgagtaccgaggcaggaccgagctcctcaaagatgcaattggcgagggtaaagtcacattaaggattagaaatgttagatttagcgatgagggtggctttacatgcttcttccgggaccattcttaccaagaggaagccgcgatggagctgaaagtggaggaccccttctactgggtgtcaccgggggtgctggtgttgctggctgtgttgccagttctgctgctccagattacagtgggactcattttcctctgtctgcaatataggctacgggggaagctgcgggcagaaatagagaacctgcaccgaacatttgacccccacttccttcgagtgccttgctggaagattactttgtttgttattgtccctgtgctgggcccactggtggctctgattatctgttacaattggctacaccggaggctggccgggcagttccttgaggaactgcggaatcctttttag

SEQ ID NO: 264066 - DNA, 744 bp, Artificial Sequence
  derived and/or modified sequence
atggcatctctgagcagacccagccttcccagctgtctgtgctctttcttactgctgctcctcctccaggtaagtagttcttacgctgggcagtttcgggtgatcggcccccgacacccaatcagagccctcgtcggagacgaggtggaactgccctgccgaatatcgcctggtaagaacgctactggcatggaagtggggtggtataggcctccgttctcccgagtggtacacctgtatcgcaacgggaaagatcaggacggagatcaagcaccggagtaccgcgggcgaacggagctactgaaggacgccatcggggagggcaaggtgacactcaggataaggaatgtgagattctcagacgaaggaggattcacctgcttctttcgggaccacagttaccaagaggaggctgctatggagttgaaggtggaggacccattctactgggtatcccccggcgtcctcgtgcttctcgctgttctccctgttttgctgctgcagatcacagtgggactcgtttttctttgtctgcagtaccgattgagaggaaaactgagggccgaaattgagaatctgcaccgtacgttcgatccgcactttctgcgggtgccttgctggaaaattaccctttttgtaattgtgcccgttcttggccctctcgttgcattaattatctgttataactggctccataggaggctcgccggccagttcttagaggaactgagaaacccgttttag

SEQ ID NO: 264067 - DNA, 744 bp, Artificial Sequence
  derived and/or modified sequence
atggctagcctgagcagaccctcacttccctcctgtctgtgcagctttctgctgctgttgctcttgcaggtgagttcttcctacgcaggacagtttagagtcatcggcccacgccaccctattcgggctttggtgggggatgaggtagagttgccttgcagaatctctcccggaaagaacgctacaggtatggaagtggggtggtacaggccgccctttagccgcgtggtgcacctgtaccgcaatggtaaggaccaggacggggaccaagccccagaatatagggggcgcaccgaactgctcaaagatgcaatcggcgaagggaaggtgaccctgcgtattcgaaatgtgcggttctctgatgagggtgggtttacatgtttcttccgggatcatagttaccaggaggaggctgctatggaacttaaggtggaggatcctttttactgggtgagccctggggtactcgttttactcgcagtcctgcctgtccttctgctgcagattaccgtcggcctagtgttcctgtgcctgcaatacagacttagagggaagctcagggccgaaattgagaacttgcatcgcaccttcgatcctcacttcttacgggtgccatgttggaagatcacccttttcgttatcgtccccgtgttgggacctctggtggcgttgatcatttgttacaattggctgcacagaaggctagccgggcagttccttgaggaattacgcaacccattctag

SEQ ID NO: 264068 - DNA, 759 bp, Artificial Sequence
  derived and/or modified sequence
atggcaagcctttcccgcccatctctgcctagctgtctttgttcttttctgcttctcttactcctgcaggtaagctccagttacgctggacagttccgcgtcattggtccccggcatcctatccgggccttggttggggatgaggtcgaactcccatgtaggatatccccaggaaagaatgcaaccggcatggaagtaggatggtaccgaccaccattctcacgagtagttcatctctacaggaatggcaaggaccaggatggcgaccaggctcccgagtacagagggagaacagaattgttaaaggacgctatcggcgaaggaaaggtcaccctgagaattcggaatgttcgatttagtgacgaaggtggcttcacctgcttcttccgagatcacagctatcaggaggaagctgccatggagctgaaggtggaggacccgttttactgggtctcacccggtgtgctcgtgctgctggctgtgctgccagtgcttttgttacagataaccgttggactcgtcttcttgtgtctccagtatagactgcgcggtaagttacgggcagaaattgagaatcttcatagaacattcgacccccattttctcagagtgccgtgttggaaaattacactcttcgtgatcgtgcccgtgttgggcccactcgttgcgttgatcatttgctataattggttacatagaagactggctggacagtttttagaggaattgctttttcacctggaagcgttgtcaggttag

SEQ ID NO: 264069 - DNA, 744 bp, Artificial Sequence
  derived and/or modified sequence
atggcttccctaagtcgtccttccctcccttcttgtctgtgcagcttcctcctgcttttactgctccaggtgagtagctcgtatgctggacagttcagagtgataggcccacggcacccaatccgcgccttggttggagacgaagttgaacttccttgccggatcagtccaggcaaaaatgcaacaggcatggaagtgggttggtatcggcctccattctctagggtagttcatctttataggaacgggaaggatcaggatggagatcaggcccccgagtatcgagggcgaacagaattactgaaggacgccatcggcgagggaaaggtgaccttaaggatccgcaatgtgcgcttctcagacgaggggggcttcacctgcttcttccgcgatcattcgtatcaagaggaggctgcaatggaactaaaggtggaggatccattctactgggtgtccccaggggtcctcgtgctcttggctgttttgcctgtactgttgctgcagatcacagtgggactcgtgtttctctgtctccagtaccggctgagggggaaacttagagccgagattgagaatcttcataggacttttgacccccattttctgagggtcccatgttggaaaatcaccttgttcgttattgttccggtgctggggcctctcgtggccctcattatttgttacaattggttgcatcgacggctcgctggtcagtttcttgaggaactccggaatcctttctag

SEQ ID NO: 264070 - DNA, 759 bp, Artificial Sequence
  derived and/or modified sequence
atggcctccctcagtaggccgagccttccgtcctgcctgtgcagtttccttctgctgctgctgctgcaggtttctagttcctatgccgggcagttccgggtcattggaccacggcatccaatccgcgcactggtgggcgacgaggtggagcttccctgccggatctcccccggcaagaatgcaaccggcatggaggtgggctggtataggccaccattctctcgggttgtgcacctctacagaaatgggaaggaccaagacggcgatcaagctcccgaatataggggaaggacggagctgcttaaggatgcgattggtgaaggcaaggttaccctacggattcggaacgtccgcttctctgacgaaggaggcttcacatgctttttccgagaccacagctatcaggaggaagccgcaatggagctgaaagtcgaggatccgttctactgggtgtccccaggagtactggttcttctggcagttcttcccgttttgttgctgcaaatcacagtgggacttgtattcttgtgtctacagtatagacttagggggaaactccgagcggagatcgagaacctgcaccgtacattcgaccctcactttctcagggtgccatgctggaaaatcactttgttcgtaatcgtgcctgtattaggcccgttggtggcccttatcatatgctacaattggctccaccgccgcttggcaggtcagtttctagaggaattgctgtttcacttggaggctctcagcggctag

SEQ ID NO: 264071 - DNA, 759 bp, Artificial Sequence
  derived and/or modified sequence
atggcttcactgagtcggccctcgctgccctcctgcctgtgtagttttcttttgctcctgctcctgcaagtgagttcaagctacgccggtcagtttcgtgttatcggccccaggcatccaatcagagccctcgtgggagatgaagttgaactcccttgcaggatctcccctggtaagaacgcaacaggcatggaagtgggctggtatcggcccccattttcccgggttgtgcacctgtaccgtaatggaaaggatcaggatggagaccaggccccggaatacaggggtcgtacggagctgcttaaggacgcaataggcgagggcaaggtaacactgcggattaggaacgtgaggttcagcgatgagggagggttcacctgcttctttcgcgaccactcctaccaggaggaagctgccatggaacttaaggtggaagaccctttctactgggtgagcccaggtgtcctcgttctgctcgcagtgctgcctgtcctgctactgcaaattactgttggtttagtgttcctgtgccttcaatatagactccgcggcaaattgagagctgagattgagaaccttcacagaacttttgacccgcacttcctcagagtgccttgctggaaaatcacgctcttcgtgatcgttccggtcctcggtcccttggtggccctaatcatatgctacaactggctgcatcggcgactggctgggcagttcctcgaagaacttctttttcatctggaggcactgagcgggtag

SEQ ID NO: 264072 - DNA, 759 bp, Artificial Sequence
  derived and/or modified sequence
atggcgtccttatctcgcccttcactcccctcttgtctctgctcatttttgctgctgctgctcctccaggtgtcttcctcctacgccggacagttcagggtgattggccccaggcaccctatccgagccctcgtgggggatgaggtcgaacttccctgcaggatttccccaggtaaaaacgctacaggcatggaggtgggctggtatcggccaccattttctagagtagtccatctgtatcgcaatggtaaagaccaggacggcgaccaggccccagaatatcgtggtagaactgaactactgaaggacgcgatcggcgaaggtaaggtcactctccgtattagaaatgtgaggttctcagacgagggcggctttacgtgcttcttcagagaccactcctatcaggaggaggctgcaatggagttaaaggtagaggacccattttattgggtgtcaccaggtgtcttggttctactggcggtccttccggtgctgcttttgcagatcacggtcggtctcgtgtttctctgtctgcagtacagattgcgcggcaaattacgagctgagatcgaaaacctgcatagaacctttgacccccatttcctgcgtgtcccatgctggaagattacccttttcgtgatcgtgcccgttcttggaccactagtggccctcattatttgctacaactggctgcatcgtcggctggccggccagtttttggaggaactgctttttcacctcgaggctttgtcaggatag

SEQ ID NO: 264073 - DNA, 744 bp, Artificial Sequence
  derived and/or modified sequence
atggccagtctctcaaggccttcgctgccatcatgtctttgctcatttctcctgctgctgctgctgcaggtgtcaagcagctatgccggacagtttcgtgtgataggcccccggcatccgatcagagctctcgtcggggacgaggtcgagctgccatgtagaatctcaccaggcaaaaacgcgactggaatggaagttggctggtacagaccacctttctcacgcgtggttcacctatacagaaacggcaaagatcaggatggcgaccaggcacctgaatacagggggcgaaccgagctcttaaaagatgccatcggtgaagggaaagtgactctcaggattcgaaacgttcgatttagcgacgagggcggcttcacttgctttttcagagaccacagttaccaggaggaggctgccatggagcttaaggtcgaagatcccttttactgggtttccccaggagtgctggttctcctcgcagtgttgccagttctgttactccagatcaccgtgggactagtgttcctatgcttgcagtaccgcctgcgtgggaaattgagggctgaaattgagaacctacaccggacattcgaccctcattttctgcgtgttccctgttggaaaatcactttatttgtcattgttcccgtactggggcctttggtcgcactgattatctgctacaactggctccacaggcgcctggccggccagttcctggaagagctaagaaatcctttctag

SEQ ID NO: 264074 - DNA, 744 bp, Artificial Sequence
  derived and/or modified sequence
atggctagcctgtcaaggccaagtctgccatcatgcctgtgctcctttcttttgctgctgctgttgcaggtgagcagctcctacgccggccagtttagggtgatcggcccccgtcatcctattcgagcgctggttggcgacgaggtcgaactaccttgtagaatatccccaggcaagaacgcaactggcatggaggtcggctggtatagaccccccttttctcgggtagtgcacctctacaggaatggcaaggaccaggatggggatcaggcccccgagtacagggggcggacagagctcctgaaagacgccatcggagaagggaaggtcaccctccgcataaggaatgtgcggttctctgatgaaggcggttttacctgttttttcagggatcactcatatcaggaggaagcagcaatggaactcaaggtcgaagatccattctactgggtgagcccgggcgtactggtgttgctggctgtgttgcctgtgctactgctccagatcacggtaggattagtgttcttgtgcctgcaataccggttaagaggaaaactgagagccgagatcgagaacctccaccgcacttttgacccccatttcctcagggtgccgtgttggaagataaccttgttcgtaatcgtccccgtgctaggaccactcgttgctctgataatctgttacaattggctacatcgacggctggctggtcagttcctagaggaactgagaaaccccttttag

SEQ ID NO: 264075 - DNA, 759 bp, Artificial Sequence
  derived and/or modified sequence
atggcttccctgtcgaggcccagcctgcccagttgtttgtgcagcttccttctcttacttctgctacaggtgagcagcagttatgccggtcagtttagagtaatcggcccccggcaccccatccgggctctggtgggagatgaggtggagttaccctgtcgaatttctcctggcaaaaatgccaccgggatggaagtaggctggtacagaccaccctttagtcgggtggtacatctgtacagaaacggtaaggaccaagatggcgaccaggcacccgagtaccgcggccgcacggagttactgaaggatgctatcggcgaggggaaggtgacacttaggattagaaatgtgaggttctccgatgaagggggatttacatgcttcttccgagaccactcttaccaggaggaggctgctatggaattgaaggtggaagaccccttttactgggtgtcacccggtgtgctcgtgcttttagcagtactgcctgtgctgctccttcaaattacagtgggattggtgtttttatgcctgcaatacagactgagaggcaaactgagagcagagatcgaaaacctccaccgaactttcgatccccacttcttgcgagttccttgttggaagatcaccctttttgtgatagtccccgtcctcgggcccctcgtagccctgatcatatgctacaactggttgcaccgtagattggctgggcagttcctggaggagctcctgtttcatctggaagcactgtcagggtag

SEQ ID NO: 264076 - DNA, 759 bp, Artificial Sequence
  derived and/or modified sequence
atggcaagcctatccaggcctagtctgcccagctgcctctgcagcttccttctgttactcctgcttcaggtttcttcgagctatgccggacagtttagggtgatcggtcctaggcaccctatcagagctctggttggcgatgaagtagaactaccatgcaggatctcaccgggaaagaacgcaacaggtatggaagtggggtggtacaggccaccgttctccagagtggtacacctgtatcgaaacgggaaggaccaggacggggaccaggcccccgaataccgtggtcggactgaactcttaaaagacgcgatcggtgaaggaaaggtgacactgcgaataaggaacgtgaggttttccgacgaaggaggcttcacatgtttttttagagaccactcataccaggaagaggcagccatggagttaaaggttgaagatccattctactgggtctctcctggtgtgctggtgctgctcgcggttctgcccgttctgctcctccagatcacagtggggctggtgttcttatgccttcagtacagacttcggggcaaactgagagcagagattgaaaacctacaccgaacgttcgaccctcacttcctacgggttccctgttggaaaattaccttgtttgtaatcgttccagttctggggccccttgtggccctgatcatctgttacaactggctgcacaggcgccttgccggccagtttcttgaggaacttctcttccatctggaggccctgagtggctag

SEQ ID NO: 264077 - DNA, 744 bp, Artificial Sequence
  derived and/or modified sequence
atggccagcctctcccgcccatcgctcccttcttgcttgtgtagttttctcctgctgttattactccaggtgagctcaagttacgccgggcaattcagagtgattggaccccgacaccctatcagggcactcgtgggtgacgaggtcgaactaccttgcagaatttctcctgggaaaaacgcaacagggatggaagtcgggtggtatcgtcccccattctctcgagtggtccatctataccgcaatggaaaagaccaggatggcgatcaggcgcctgaataccgtgggaggacagaactactgaaggatgccatcggcgagggcaaagtcaccctcaggatccggaatgtgaggttcagcgatgaggggggctttacgtgtttcttccgcgaccattcctaccaggaggaagccgcgatggaactgaaggtggaggacccattttactgggtgagccctggggttctggtgctccttgcggtactgcctgttctcctcttgcaaattacagtgggcttagtgtttctgtgtttgcagtatcgcctccgtgggaagctgcgagcagaaatcgagaatttgcataggacatttgatccacacttcttgcgagtgccatgctggaagatcaccctattcgtcatcgtgcctgtgctcggcccactggtggcactgatcatatgttataactggctgcaccggaggctggccggtcagttcttggaggagctgcgcaatcccttttag

SEQ ID NO: 264078 - DNA, 759 bp, Artificial Sequence
  derived and/or modified sequence
atggcctctctgtccaggccatcgttgccatcatgcctctgctccttcctcctgctactgctcctgcaggtctcctcgagctatgctgggcagttccgggttataggacctaggcatcccatcagagctcttgtcggcgacgaagtcgagcttccatgcagaatttcgcccggaaaaaacgccaccgggatggaagtgggttggtatcgcccgcccttctctcgggtggtgcacctgtaccggaatgggaaagatcaggacggcgaccaggctcccgagtatcgtgggcggacggaactgctcaaggatgccataggcgaaggaaaggtaactctgagaatccgcaatgttaggttcagtgacgagggggggttcacttgctttttccgcgaccattcataccaggaggaagccgcaatggagttgaaagtagaggaccctttttattgggtgagcccgggagtgctggtgctgttagccgtgctccctgtgcttctgctccagatcactttgggactcgtattcctttgtctgcagtaccggctgcgtggaaaactgcgagcagagattgaaaacctccatagaactttcgatccgcatttccttcgtgtcccttgttggaaaattaccttattcgtgatcgttccggtacttggccctctggtagctttaatcatctgttataattggttgcatcgccgcctggccgggcagttcctggaagaactgttgttccacctggaagctctttcaggctag

SEQ ID NO: 264079 - DNA, 744 bp, Artificial Sequence
  derived and/or modified sequence
atggcaagcctgtcacgccctagcctcccttcgtgtctgtgctctttcctgcttctgctgctgttgcaggtcagctcgtcttatgccggccaattccgggttattggaccccgtcatccaatcagggccctcgtaggcgatgaggtggaactcccctgcagaatttcacctggcaaaaacgctaccgggatggaggtggggtggtataggccccctttctcaagggtcgttcacctctatagaaatggcaaggaccaggacggtgatcaggcaccagagtatagaggccggaccgagttactgaaggacgccattggcgagggaaaagttaccttgcggattcggaacgttcgcttctcagacgaggggggtttcacatgcttcttccgtgaccactcttatcaggaggaagctgctatggaactgaaggtcgaggatccgttttactgggtaagtccgggcgtgctggtgttgctggcggtcctgcccgtgctgctactgcagattacccttggtctggtgttcttatgtcttcagtaccgcctgcgtgggaagctacgcgctgagatcgagaacctgcatcgaacttttgaccctcattttctcagagtgccatgctggaagataacattattcgttatcgtacctgtgctgggcccattagtagccctgataatttgttataattggctccacagaagattagccggtcaattcctggaagagctgcgaaacccgttctag

SEQ ID NO: 264080 - DNA, 534 bp, Artificial Sequence
  derived and/or modified sequence
atgtctcatatctcctgggaagagaggtatagaaacggcaaagaccaggatggcgatcaagcaccggagtaccgtggacgaacagagctccttaaggacgccatcggcgagggtaaagtgacacttcggattcgcaacgttagattctccgacgaaggcggttttacctgtttttttcgcgaccactcttatcaggaagaggccgccatggagttaaaggtggaggacccattttattgggtgtcacctggagtcctggtacttctggccgtgttaccggtgttactcctgcagataacagtcggcctggtctttctctgcctccagtatagactaagaggtaagctccgtgctgagatagaaaatttacaccgcacattcgatccccacttcctgagggtaccttgctggaaaatcactctgtttgttattgtacccgttctcggcccgctggtggcattgattatctgttacaattggctgcaccggagactggccggccagtttttagaggaattacgtaaccctttttag

SEQ ID NO: 264081 - DNA, 534 bp, Artificial Sequence
  derived and/or modified sequence
atgagccatatttcttgggaagagaggtaccgaaatggtaaagatcaggatggtgaccaggcacctgagtacaggggacgaacagagctgcttaaggacgcaatcggcgaggggaaggtgaccttgaggataaggaacgtgcgattctcagatgaaggaggctttacatgtttctttcgcgaccactcataccaagaggaagccgccatggagctgaaagtcgaggacccgttttattgggtgtcacccggcgtgctcgtcctgcttgccgtgctgcctgtgcttcttctgcaaattacagtgggactagtcttcctgtgcctgcagtacagacttagggggaagctacgagctgagatcgaaaatttgcatcgcacctttgaccctcacttcttgcgcgtcccctgttggaagattaccctgttcgtgatcgtaccggtgttaggcccacttgtagccttaataatttgctacaattggttgcataggaggctcgcgggacagttcctcgaggaactaaggaacccattctag

SEQ ID NO: 264082 - DNA, 534 bp, Artificial Sequence
  derived and/or modified sequence
atgagtcacataagctgggaagaaagatataggaatggcaaggatcaggacggtgaccaggctcctgagtacaggggtaggacagaactgctaaaagacgccattggcgaaggaaaggtcaccttacgtatccgcaacgtgaggttcagtgatgaaggagggttcacctgtttcttcagagaccattcctatcaggaagaggctgccatggagttaaaagtggaggatccattttactgggtctctcccggagtgctcgtcctgctagcagtgcttcccgtgcttcttctgcagattaccgttggccttgtcttcttgtgcctgcagtacagactgcgtgggaaacttcgagctgaaatcgagaatctgcaccgaaccttcgacccacactttctgcgagtgccttgttggaagatcactttatttgtcatagtccccgtactgggacccctggtcgctctgatcatttgctataactggctgcacagaagattagctggacagttcctcgaggaactgaggaacccattttag

SEQ ID NO: 264083 - DNA, 534 bp, Artificial Sequence
  derived and/or modified sequence
atgtctcacattagttgggaagagaggtatcgcaacggcaaagaccaggacggcgatcaggcaccagagtacagggggcgcaccgagcttctgaaggatgccataggagagggcaaggtgacgctgagaattaggaacgtgcgcttttccgacgaaggtggcttcacttgcttctttcgggaccacagctatcaggaggaagccgccatggaacttaaggtggaggaccccttttactgggtatccccaggcgtgcttgtcctcctcgcggtgctgcccgtgctgcttttgcagattacagtcggcttagtgtttctttgccttcagtatagacttcggggaaagttgcgggcggagattgagaacttacatcggacttttgatccgcactttctaagggtgccgtgctggaagattaccctgttcgtgatcgtgccagtactcgggcccctggttgcactcataatctgctacaactggcttcacagacgtttagcgggccaattcctagaagagctgcgaaatcccttttag

SEQ ID NO: 264084 - DNA, 534 bp, Artificial Sequence
  derived and/or modified sequence
atgagtcatatctcttgggaagaacgttaccggaatggtaaggaccaggatggcgatcaggcaccagagtataggggtaggacggagcttttgaaagacgcgatcggagaaggcaaggtcactctcagaattcggaatgtgcggttcagtgacgaaggaggattcacctgctttttccgcgatcattcataccaggaggaagccgccatggagctgaaagtcgaagacccattctattgggtgtccccgggcgtgctggtgcttctggccgtcctacccgttctgctgcttcagatcacactcggattagtgttcctttgcttgcagtatcggctgcgaggcaaactcagggccgagattgaaaatctgcatcgaactttcgacccccactttctccgcgtgccatgttggaaaattactcttttcgtcattgtccccgtgctcggacccctggtcgccttgatcatatgttataattggctacataggaggctagctggccaattcctggaggagcttaggaatcctttctag

SEQ ID NO: 264085 - DNA, 534 bp, Artificial Sequence
  derived and/or modified sequence
atgtctcacatctcctgggaagagcggtatcgcaacggcaaagatcaagatggggaccaagcacccgaataccggggtcgcacagagctcctaaaagatgcaatcggtgaaggtaaagtgactctgcgcatccgcaatgtgcggttctcggatgagggtgggtttacctgcttcttccgcgaccactcatatcaagaggaagcagctatggagctgaaggtcgaagaccccttctactgggttagtcctggcgttttagtgctgcttgcagttttgcccgtgctgctgctgcaaataaccgtcggtctggttttcttatgtctccagtacagactgcggggcaaactcagagcggaaattgagaaccttcatcggaccttcgacccccattttctacgcgtcccttgttggaagattacattgtttgtaatcgttcccgttctggggccactggtggctcttataatctgttacaattggctacataggcgcctggccggtcagttcctggaagagctgcgaaacccattttag

SEQ ID NO: 264086 - DNA, 534 bp, Artificial Sequence
  derived and/or modified sequence
atgagccacatctcatgggaggagcgctatcgcaacggcaaggatcaggatggcgaccaggcccccgagtacaggggaagaactgaactgctgaaagatgcaattggagaaggcaaggtcaccctgcgcatccggaacgtgcggttcagcgacgaggggggtttcacatgcttctttcgcgaccactcataccaggaagaggccgcaatggagctgaaagtggaggaccccttctattgggtctcccccggggtcttggttcttcttgccgtcctccctgtgctgttgcttcagattactgtcgggctagtgtttttatgtctgcagtacagattgcggggcaaactgcgagctgagatagagaacctacataggacatttgacccccattttctgcgagtgccctgttggaagataacgctgtttgttatagttcccgtcctaggccccctcgtggcattgatcatctgctacaactggctccacaggcgattagccgggcagttcttggaggagctaagaaatccgttttag

SEQ ID NO: 264087 - DNA, 759 bp, Artificial Sequence
  derived and/or modified sequence
atggccagcctgagccggcccagcctgcccagctgcctgtgcagcttcctgctgctgctgctgctgcaggtgagcagcagctatgccggccagttccgggtgattggccccaggcaccccatccgggccctggtgggagatgaggtggagctgccctgccgcatcagccctgggaagaatgccaccggcatggaggtgggctggtacagaccacccttcagccgggtggtgcacctgtacagaaatggcaaggaccaggatggagaccaggcccctgagtaccggggccgcacagagctgctgaaggatgccatcggggagggcaaggtgaccctgcgcatcagaaatgtgcgcttcagtgatgaaggaggcttcacctgcttcttccgggaccacagctaccaggaggaggccgccatggagctgaaggtggaggaccccttctactgggtgtccccaggagtgctggtgctgctggccgtgctgcctgtgctgctgctgcagatcaccgtgggcctcatcttcctgtgcctgcagtaccgcctgcggggcaagctgcgggcagaaattgagaacctgcacaggacctttgacccccacttcctgcgggtgccctgctggaagatcaccctcttcgtcatcgtgcctgtgctgggccccctggtggccctgatcatctgctacaactggctgcaccggcggctggccggccagttcctggaggagctgctcttccacctggaggccctgtctggatag

SEQ ID NO: 264088 - DNA, 744 bp, Artificial Sequence
  derived and/or modified sequence
atggccagcctgagccggcccagcctgcccagctgcctgtgcagcttcctgctgctgctgctgctgcaggtgagcagcagctatgccggccagttccgggtgattggccccaggcaccccatccgggccctggtgggagatgaggtggagctgccctgccgcatcagccctgggaagaatgccaccggcatggaggtgggctggtacagaccacccttcagccgggtggtgcacctgtacagaaatggcaaggaccaggatggagaccaggcccctgagtaccggggccgcacagagctgctgaaggatgccatcggggagggcaaggtgaccctgcgcatcagaaatgtgcgcttcagtgatgaaggaggcttcacctgcttcttccgggaccacagctaccaggaggaggccgccatggagctgaaggtggaggaccccttctactgggtgtccccaggagtgctggtgctgctggccgtgctgcctgtgctgctgctgcagatcaccgtgggcctcatcttcctgtgcctgcagtaccgcctgcggggcaagctgcgggcagaaattgagaacctgcacaggacctttgacccccacttcctgcgggtgccctgctggaagatcaccctcttcgtcatcgtgcctgtgctgggccccctggtggccctgatcatctgctacaactggctgcaccggcggctggccggccagttcctggaggagctgaggaaccccttctag

SEQ ID NO: 264089 - DNA, 744 bp, Artificial Sequence
  derived and/or modified sequence
atggccagcctgagccggcccagcctgcccagctgcctgtgcagcttcctgctgctgctgctgctgcaggtgagcagcagctatgccggccagttccgggtgattggccccaggcaccccatccgggccctggtgggagatgaggtggagctgccctgccgcatcagccctgggaagaatgccaccggcatggaggtgggctggtacagaccacccttcagccgggtggtgcacctgtacagaaatggcaaggaccaggatggagaccaggcccctgagtaccggggccgcacagagctgctgaaggatgccatcggggagggcaaggtgaccctgcgcatcagaaatgtgcgcttcagtgatgaaggaggcttcacctgcttcttccgggaccacagctaccaggaggaggccgccatggagctgaaggtggaggaccccttctactgggtgtccccaggagtgctggtgctgctggccgtgctgcctgtgctgctgctgcagatcaccgtgggcctggtgttcctgtgcctgcagtaccgcctgcggggcaagctgcgggcagaaattgagaacctgcacaggacctttgacccccacttcctgcgggtgccctgctggaagatcaccctcttcgtcatcgtgcctgtgctgggccccctggtggccctgatcatctgctacaactggctgcaccggcggctggccggccagttcctggaggagctgaggaaccccttctag

SEQ ID NO: 264090 - DNA, 759 bp, Artificial Sequence
  derived and/or modified sequence
atggccagcctgagccggcccagcctgcccagctgcctgtgcagcttcctgctgctgctgctgctgcaggtgagcagcagctatgccggccagttccgggtgattggccccaggcaccccatccgggccctggtgggagatgaggtggagctgccctgccgcatcagccctgggaagaatgccaccggcatggaggtgggctggtacagaccacccttcagccgggtggtgcacctgtacagaaatggcaaggaccaggatggagaccaggcccctgagtaccggggccgcacagagctgctgaaggatgccatcggggagggcaaggtgaccctgcgcatcagaaatgtgcgcttcagtgatgaaggaggcttcacctgcttcttccgggaccacagctaccaggaggaggccgccatggagctgaaggtggaggaccccttctactgggtgtccccaggagtgctggtgctgctggccgtgctgcctgtgctgctgctgcagatcaccgtgggcctggtgttcctgtgcctgcagtaccgcctgcggggcaagctgcgggcagaaattgagaacctgcacaggacctttgacccccacttcctgcgggtgccctgctggaagatcaccctcttcgtcatcgtgcctgtgctgggccccctggtggccctgatcatctgctacaactggctgcaccggcggctggccggccagttcctggaggagctgctcttccacctggaggccctgtctggatag

SEQ ID NO: 264091 - DNA, 759 bp, Artificial Sequence
  derived and/or modified sequence
atggccagcctgagccggcccagcctgcccagctgcctgtgcagcttcctgctgctgctgctgctgcaggtgagcagcagctatgccggccagttccgggtgattggccccaggcaccccatccgggccctggtgggagatgaggtggagctgccctgccgcatcagccctgggaagaatgccaccggcatggaggtgggctggtacagaccacccttcagccgggtggtgcacctgtacagaaatggcaaggaccaggatggagaccaggcccctgagtaccggggccgcacagagctgctgaaggatgccatcggggagggcaaggtgaccctgcgcatcagaaatgtgcgcttcagtgatgaaggaggcttcacctgcttcttccgggaccacagctaccaggaggaggccgccatggagctgaaggtggaggaccccttctactgggtgtccccaggagtgctggtgctgctggccgtgctgcctgtgctgctgctgcagatcaccctgggcctggtgttcctgtgcctgcagtaccgcctgcggggcaagctgcgggcagaaattgagaacctgcacaggacctttgacccccacttcctgcgggtgccctgctggaagatcaccctcttcgtcatcgtgcctgtgctgggccccctggtggccctgatcatctgctacaactggctgcaccggcggctggccggccagttcctggaggagctgctcttccacctggaggccctgtctggatag

SEQ ID NO: 264092 - DNA, 744 bp, Artificial Sequence
  derived and/or modified sequence
atggccagcctgagccggcccagcctgcccagctgcctgtgcagcttcctgctgctgctgctgctgcaggtgagcagcagctatgccggccagttccgggtgattggccccaggcaccccatccgggccctggtgggagatgaggtggagctgccctgccgcatcagccctgggaagaatgccaccggcatggaggtgggctggtacagaccacccttcagccgggtggtgcacctgtacagaaatggcaaggaccaggatggagaccaggcccctgagtaccggggccgcacagagctgctgaaggatgccatcggggagggcaaggtgaccctgcgcatcagaaatgtgcgcttcagtgatgaaggaggcttcacctgcttcttccgggaccacagctaccaggaggaggccgccatggagctgaaggtggaggaccccttctactgggtgtccccaggagtgctggtgctgctggccgtgctgcctgtgctgctgctgcagatcaccctgggcctggtgttcctgtgcctgcagtaccgcctgcggggcaagctgcgggcagaaattgagaacctgcacaggacctttgacccccacttcctgcgggtgccctgctggaagatcaccctcttcgtcatcgtgcctgtgctgggccccctggtggccctgatcatctgctacaactggctgcaccggcggctggccggccagttcctggaggagctgaggaaccccttctag

SEQ ID NO: 264093 - DNA, 534 bp, Artificial Sequence
  derived and/or modified sequence
atgagccacatctcctgggaggagcgctacagaaatggcaaggaccaggatggagaccaggcccctgagtaccggggccgcacagagctgctgaaggatgccatcggggagggcaaggtgaccctgcgcatcagaaatgtgcgcttcagtgatgaaggaggcttcacctgcttcttccgggaccacagctaccaggaggaggccgccatggagctgaaggtggaggaccccttctactgggtgtccccaggagtgctggtgctgctggccgtgctgcctgtgctgctgctgcagatcaccgtgggcctggtgttcctgtgcctgcagtaccgcctgcggggcaagctgcgggcagaaattgagaacctgcacaggacctttgacccccacttcctgcgggtgccctgctggaagatcaccctcttcgtcatcgtgcctgtgctgggccccctggtggccctgatcatctgctacaactggctgcaccggcggctggccggccagttcctggaggagctgaggaaccccttctag

SEQ ID NO: 264094 - DNA, 534 bp, Artificial Sequence
  derived and/or modified sequence
atgagccacatctcctgggaggagcgctacagaaatggcaaggaccaggatggagaccaggcccctgagtaccggggccgcacagagctgctgaaggatgccatcggggagggcaaggtgaccctgcgcatcagaaatgtgcgcttcagtgatgaaggaggcttcacctgcttcttccgggaccacagctaccaggaggaggccgccatggagctgaaggtggaggaccccttctactgggtgtccccaggagtgctggtgctgctggccgtgctgcctgtgctgctgctgcagatcaccctgggcctggtgttcctgtgcctgcagtaccgcctgcggggcaagctgcgggcagaaattgagaacctgcacaggacctttgacccccacttcctgcgggtgccctgctggaagatcaccctcttcgtcatcgtgcctgtgctgggccccctggtggccctgatcatctgctacaactggctgcaccggcggctggccggccagttcctggaggagctgaggaaccccttctag

SEQ ID NO: 264095 - DNA, 1027 bp, Artificial Sequence
  derived and/or modified sequence
atggcaagcttatcaagaccctctctgcccagctgcctctgctccttcctcctcctcctcctcctccaagtgtcttccagctatgcagggcagttcagagtgataggaccaagacaccctatccgggctctggtcggggatgaagtggaattgccatgtcgcatatctcctgggaagaacgctacaggcatggaggtggggtggtaccgcccccccttctctagggtggttcatctctacagaaatggcaaggaccaagatggagaccaggcacctgaatatcggggccggacagagctgctgaaagatgctattggtgagggaaaggtgactctcaggatccggaatgtaaggttctcagatgaaggaggtttcacctgcttcttccgagatcattcttaccaagaggaggcagcaatggaattgaaagtagaagatcctttctactgggtgagccctggagtgctggttctcctcgcggtgctgcctgtgctcctcctgcagatcactgttggcctcatcttcctctgcctgcagtacagactgagaggaaaacttcgagcagagatagagaatctccaccggacttttgatccccactttctgagggtgccctgctggaagataaccctgtttgtaattgtgccggttcttggacccttggttgccttgatcatctgctacaactggctacatcgaagactagcagggcaattccttgaagagctactcttccacctggaagccctctctggctaaggacaggcaggtgcccctctctccatcagaggacacctgtactggagagcaacacaggatggtctctgccatgaactggaggccaggaatctcctcactgaaaattacagtatggtaactttgcaaatggtggttgtttcttccaagactccagccctgattgcgcaaaactgaaaggcatgtgaagggaaggaagaggaagagtgcaaaacattgaagagagagctgagtgagctgaagagtgaggatatgagtagccccaacccaa

SEQ ID NO: 264096 - DNA, 2296 bp, Artificial Sequence
  derived and/or modified sequence
gtcatcccctcagtctgtagcccttttgtgtgagtgcctggcaagggtgacgtggggctgtttctgcgggcacagctgcagcaattaccggagtggaggcagggcccaggcagcactgccctccaagatcttcccttgggcttttcagcagtaaggggacatgcaccccaagggcctccacttggcctgaccttgctgcgggggctctctgtccccaggaacagtagagatggcaagcttatcaagaccctctctgcccagctgcctctgctccttcctcctcctcctcctcctccaagtgtcttccagctatgcagggcagttcagagtgataggaccaagacaccctatccgggctctggtcggggatgaagtggaattgccatgtcgcatatctcctgggaagaacgctacaggcatggaggtggggtggtaccgcccccccttctctagggtggttcatctctacagaaatggcaaggaccaagatggagaccaggcacctgaatatcggggccggacagagctgctgaaagatgctattggtgagggaaaggtgactctcaggatccggaatgtaaggttctcagatgaaggaggtttcacctgcttcttccgagatcattcttaccaagaggaggcagcaatggaattgaaagtagaagtgtctcactctgtcacccaggattggttgcagtggcacgatcatggctcattgcagcctccacctcccaggctcaagtgatcctcctgactcagcctcttgaatagctgagaccacaggcttgtgtcaccatgcccagatcctttctactgggtgagccctggagtgctggttctcctcgcggtgctgcctgtgctcctcctgcagatcactgttggcctcatcttcctctgcctgcagtacagactgagaggaaaacttcgagcagagatagagaatctccaccggacttttgatccccactttctgagggtgccctgctggaagataaccctgtttgtaattgtgccggttcttggacccttggttgccttgatcatctgctacaactggctacatcgaagactagcagggcaattccttgaagagctacgaaatcccttctgagtgatgtcacatcttggcaggggtggaggagagcctggttgcccagggatttgtccttggggacatctcatccatcaagttgcacactcactggcatctttgctatggggacattccaatttgcactttcaggaacactctgaattccaagtagaattgatttcccttcttctgtcatctaccttttctcttcattttcccatttttattacccttctttccatttctctctccagtcttccacctggaagccctctctggctaaggacaggcaggtgcccctctctccatcagaggacacctgtactggagagcaacacaggatggtctctgccatgaactggaggccaggaatctcctcactgaaaattacagtatggtaactttgcaaatggtggttgtttcttccaagactccagccctgattgcgcaaaactgaaaggcatgtgaagggaaggaagaggaagagtgcaaaacattgaagagagagctgagtgagctgaagagtgaggatatgagtagccccaacccaaacctggagatggggagaaacctacagaatactagccagagctcctccttgtcttggcagcctactagggacctggggaagcaaaaacgaaagctgggcaacatgcctgctttagaatgttttccttctacttacacatcttccacaggtctcagaatctttccttcctctcatccttttctcctatcttcatatctatcagagtatccactgtttattcaacaactactacttgatggtcagacacaaacaaacaagctaggtgctaattaataaagatacgagttttggccgggtgcggtggctcacgcctgtaatcccagcactttgggaggccgaggcgggcgaatcacgaggtcaggagttcaagaccagcctggccaacatggtgaaaccccatctctactaaaaatacaaacaattaactgagcatagtggtgggcacctataataccagctactccggaggctgaggcaggagaatcgcttgaacccaggaggcagaggttgcagtgagctgagatcgtgccactgcactctagccggagtgacagagtaagactctgtctcaaaaataaataaataaataaataaataaataaataaataaataaataaaaaataataatacaagttttcataagcacacttct

SEQ ID NO: 264097 - DNA, 2160 bp, Artificial Sequence
  derived and/or modified sequence
gtcatcccctcagtctgtagcccttttgtgtgagtgcctggcaagggtgacgtggggctgtttctgcgggcacagctgcagcaattaccggagtggaggcagggcccaggcagcactgccctccaagatcttcccttgggcttttcagcagtaaggggacatgcaccccaagggcctccacttggcctgaccttgctgcgggggctctctgtccccaggaacagtagagatggcaagcttatcaagaccctctctgcccagctgcctctgctccttcctcctcctcctcctcctccaagtgtcttccagctatgcagggcagttcagagtgataggaccaagacaccctatccgggctctggtcggggatgaagtggaattgccatgtcgcatatctcctgggaagaacgctacaggcatggaggtggggtggtaccgcccccccttctctagggtggttcatctctacagaaatggcaaggaccaagatggagaccaggcacctgaatatcggggccggacagagctgctgaaagatgctattggtgagggaaaggtgactctcaggatccggaatgtaaggttctcagatgaaggaggtttcacctgcttcttccgagatcattcttaccaagaggaggcagcaatggaattgaaagtagaagatcctttctactgggtgagccctggagtgctggttctcctcgcggtgctgcctgtgctcctcctgcagatcactgttggcctcatcttcctctgcctgcagtacagactgagaggaaaacttcgagcagagatagagaatctccaccggacttttgatccccactttctgagggtgccctgctggaagataaccctgtttgtaattgtgccggttcttggacccttggttgccttgatcatctgctacaactggctacatcgaagactagcagggcaattccttgaagagctacgaaatcccttctgagtgatgtcacatcttggcaggggtggaggagagcctggttgcccagggatttgtccttggggacatctcatccatcaagttgcacactcactggcatctttgctatggggacattccaatttgcactttcaggaacactctgaattccaagtagaattgatttcccttcttctgtcatctaccttttctcttcattttcccatttttattacccttctttccatttctctctccagtcttccacctggaagccctctctggctaaggacaggcaggtgcccctctctccatcagaggacacctgtactggagagcaacacaggatggtctctgccatgaactggaggccaggaatctcctcactgaaaattacagtatggtaactttgcaaatggtggttgtttcttccaagactccagccctgattgcgcaaaactgaaaggcatgtgaagggaaggaagaggaagagtgcaaaacattgaagagagagctgagtgagctgaagagtgaggatatgagtagccccaacccaaacctggagatggggagaaacctacagaatactagccagagctcctccttgtcttggcagcctactagggacctggggaagcaaaaacgaaagctgggcaacatgcctgctttagaatgttttccttctacttacacatcttccacaggtctcagaatctttccttcctctcatccttttctcctatcttcatatctatcagagtatccactgtttattcaacaactactacttgatggtcagacacaaacaaacaagctaggtgctaattaataaagatacgagttttggccgggtgcggtggctcacgcctgtaatcccagcactttgggaggccgaggcgggcgaatcacgaggtcaggagttcaagaccagcctggccaacatggtgaaaccccatctctactaaaaatacaaacaattaactgagcatagtggtgggcacctataataccagctactccggaggctgaggcaggagaatcgcttgaacccaggaggcagaggttgcagtgagctgagatcgtgccactgcactctagccggagtgacagagtaagactctgtctcaaaaataaataaataaataaataaataaataaataaataaataaataaaaaataataatacaagttttcataagcacacttctaa

SEQ ID NO: 264098 - DNA, 2087 bp, Artificial Sequence
  derived and/or modified sequence
caattaccggagtggaggcagggcccaggcagcactgccctccaagatcttcccttgggcttttcagcagtaaggggacatgcaccccaagggcctccacttggcctgaccttgctgcgggggctctctgtccccaggaacagtagagatggcaagcttatcgagaccctctctgcccagctgcctctgctccttcctcctcctcctcctcctccaagtgtcttccagctatgcagggcagttcagagtgataggaccaagacaccctatccgggctctggtcggggatgaagtggaattgccatgtcgcatatctcctgggaagaacgctacaggcatggaggtggggtggtaccgcccccccttctctagggtggttcatctctacagaaatggcaaggaccaagatggagaccaggcacctgaatatcggggccggacagagctgctgaaagatgctattggtgagggaaaggtgactctcaggatccggaatgtaaggttctcagatgaaggaggtttcacctgcttcttccgagatcattcttaccaagaggaggcagcaatggaattgaaagtagaagatcctttctactgggtgagccctggagtgctggttctcctcgcggtgctgcctgtgctcctcctgcagatcactgttggcctcgtcttcctctgcctgcagtacagactgagaggaaaacttcgagcagagatagagaatctccaccggacttttgatccccactttctgagggtgccctgctggaagataaccctgtttgtaattgtgccggttcttggacccttggttgccttgatcatctgctacaactggctacatcgaagactagcagggcaattccttgaagagctacgaaatcccttctgagtgatgtcacatcttggcaggggtggaggagagcctggttgcccagggatttgtccttggggacatctcatccatcaagttgcacactcactggcatctttgctatggggacattccaatttgcactttcaggaacactctgaattccaagtagaattgatttcccttcttctgtcatctaccttttctcttcattttcccatttttattacccttctttccatttctctctccagtcttccacctggaagccctctctggctaaggacaggcaggtgcccctctctccatcagaggacacctgtactggagagcaacacaggatggtctctgccatgaactggaggccaggaatctcctcactgaaaattacagtatggtaactttgcaaatggtggttgtttcttccaagactccagccctgattgcgcaaaactgaaaggcatgtgaagggaaggaagaggaagagtgcaaaacattgaagagagagctgagtgagctgaagagtgaggatatgagtagccccaacccaaacctggagatggggagaaacctacagaatactagccagagctcctccttgtcttggcagcctactagggacctggggaagcaaaaacgaaagctgggcaacatgcctgctttagaatgttttccttctacttacacatcttccacaggtctcagaatctttccttcctctcatccttttctcctatcttcatatctatcagagtatccactgtttattcaacaactactacttgatggtcagacacaaacaaacaagctaggtgctaattaataaagatacgagttttggccgggtgcggtggctcacgcctgtaatcccagcactttgggaggccgaggcgggcgaatcacgaggtcaggagttcaagaccagcctggccaacatggtgaaaccccatctctactaaaaatacaaacaattaactgagcatagtggtgggcacctataataccagctactccggaggctgaggcaggagaatcgcttgaacccaggaggcagaggttgcagtgagctgagatcgcgccactgcactctagccggagtgacagagtaagactctgtctcaaaaataaataaataaataaataaataaataaataaataaataaataaataaataaaaaataataatacaagttttcataagcacacttctaa

SEQ ID NO: 264099 - DNA, 2146 bp, Artificial Sequence
  derived and/or modified sequence
agcccttttgtgtgagtgcctggcaagggtgacgtggggctgtttctgcgggcacagctgcagcaattaccggagtggaggcagggcccaggcagcactgccctccaagatcttcccttgggcttttcagcagtaaggggacatgcaccccaagggcctccacttggcctgaccttgctgcgggggctctctgtccccaggaacagtagagatggcaagcttatcgagaccctctctgcccagctgcctctgctccttcctcctcctcctcctcctccaagtgtcttccagctatgcagggcagttcagagtgataggaccaagacaccctatccgggctctggtcggggatgaagtggaattgccatgtcgcatatctcctgggaagaacgctacaggcatggaggtggggtggtaccgcccccccttctctagggtggttcatctctacagaaatggcaaggaccaagatggagaccaggcacctgaatatcggggccggacagagctgctgaaagatgctattggtgagggaaaggtgactctcaggatccggaatgtaaggttctcagatgaaggaggtttcacctgcttcttccgagatcattcttaccaagaggaggcagcaatggaattgaaagtagaagatcctttctactgggtgagccctggagtgctggttctcctcgcggtgctgcctgtgctcctcctgcagatcactgttggcctcgtcttcctctgcctgcagtacagactgagaggaaaacttcgagcagagatagagaatctccaccggacttttgatccccactttctgagggtgccctgctggaagataaccctgtttgtaattgtgccggttcttggacccttggttgccttgatcatctgctacaactggctacatcgaagactagcagggcaattccttgaagagctacgaaatcccttctgagtgatgtcacatcttggcaggggtggaggagagcctggttgcccagggatttgtccttggggacatctcatccatcaagttgcacactcactggcatctttgctatggggacattccaatttgcactttcaggaacactctgaattccaagtagaattgatttcccttcttctgtcatctaccttttctcttcattttcccatttttattacccttctttccatttctctctccagtcttccacctggaagccctctctggctaaggacaggcaggtgcccctctctccatcagaggacacctgtactggagagcaacacaggatggtctctgccatgaactggaggccaggaatctcctcactgaaaattacagtatggtaactttgcaaatggtggttgtttcttccaagactccagccctgattgcgcaaaactgaaaggcatgtgaagggaaggaagaggaagagtgcaaaacattgaagagagagctgagtgagctgaagagtgaggatatgagtagccccaacccaaacctggagatggggagaaacctacagaatactagccagagctcctccttgtcttggcagcctactagggacctggggaagcaaaaacgaaagctgggcaacatgcctgctttagaatgttttccttctacttacacatcttccacaggtctcagaatctttccttcctctcatccttttctcctatcttcatatctatcagagtatccactgtttattcaacaactactacttgatggtcagacacaaacaaacaagctaggtgctaattaataaagatatgagttttggccgggtgcggtggctcacgcctgtaatcccagcactttgggaggccgaggcgggcgaatcacgaggtcaggagttcgagaccagcctggccaacatggtgaaaccccatctctactaaaaatacaaacaattaactgagcatagtggtgggcacctataataccagctactccggaggctgaggcaggagaatcgcttgaacccaggaggcagaggttgcagtgagctgagatcgcgccactgcactctagccagagtgacagagtaagactctgtctcaaaaataaataaataaataaataaataaataaataaataaataaataaataaaaaataataatacaagttttcataagcacacttctaa

SEQ ID NO: 264100 - DNA, 1685 bp, Artificial Sequence
  derived and/or modified sequence
atggcaagcttatcgagaccctctctgcccagctgcctctgctccttcctcctcctcctcctcctccaagtgtcttccagctatgcagggcagttcagagtgataggaccaagacaccctatccgggctctggtcggggatgaagtggaattgccatgtcgcatatctcctgggaagaacgctacaggcatggaggtggggtggtaccgcccccccttctctagggtggttcatctctacagaaatggcaaggaccaagatggagaccaggcacctgaatatcggggccggacagagctgctgaaagatgctattggtgagggaaaggtgactctcaggatccggaatgtaaggttctcagatgaaggaggtttcacctgcttcttccgagatcattcttaccaagaggaggcagcaatggaattgaaagtagaagatcctttctactgggtgagccctggagtgctggttctcctcgcggtgctgcctgtgctcctcctgcagatcactgttggcctcgtcttcctctgcctgcagtacagactgagaggaaaacttcgagcagagatagagaatctccaccggacttttgatccccactttctgagggtgccctgctggaagataaccctgtttgtaattgtgccggttcttggacccttggttgccttgatcatctgctacaactggctacatcgaagactagcagggcaattccttgaagagctactcttccacctggaagccctctctggctaaggacaggcaggtgcccctctctccatcagaggacacctgtactggagagcaacacaggatggtctctgccatgaactggaggccaggaatctcctcactgaaaattacagtatggtaactttgcaaatggtggttgtttcttccaagactccagccctgattgcgcaaaactgaaaggcatgtgaagggaaggaagaggaagagtgcaaaacattgaagagagagctgagtgagctgaagagtgaggatatgagtagccccaacccaaacctggagatggggagaaacctacagaatactagccagagctcctccttgtcttggcagcctactagggacctggggaagcaaaaacgaaagctgggcaacatgcctgctttagaatgttttccttctacttacacatcttccacaggtctcagaatctttccttcctctcatccttttctcctatcttcatatctatcagagtatccactgtttattcaacaactactacttgatggtcagacacaaacaaacaagctaggtgctaattaataaagatatgagttttggccgggtgcggtggctcacgcctgtaatcccagcactttgggaggccgaggcgggcgaatcacgaggtcaggagttcgagaccagcctggccaacatggtgaaaccccatctctactaaaaatacaaacaattaactgagcatagtggtgggcacctataataccagctactccggaggctgaggcaggagaatcgcttgaacccaggaggcagaggttgcagtgagctgagatcgcgccactgcactctagccagagtgacagagtaagactctgtctcaaaaataaataaataaataaataaataaataaataaataaataaataaataaaaaataataatacaagttttcataagcacacttctaa

SEQ ID NO: 264101 - DNA, 2146 bp, Artificial Sequence
  derived and/or modified sequence
agcccttttgtgtgagtgcctggcaagggtgacgtggggctgtttctgcgggcacagctgcagcaattaccggagtggaggcagggcccaggcagcactgccctccaagatcttcccttgggcttttcagcagtaaggggacatgcaccccaagggcctccacttggcctgaccttgctgcgggggctctctgtccccaggaacagtagagatggcaagcttatcgagaccctctctgcccagctgcctctgctccttcctcctcctcctcctcctccaagtgtcttccagctatgcagggcagttcagagtgataggaccaagacaccctatccgggctctggtcggggatgaagtggaattgccatgtcgcatatctcctgggaagaacgctacaggcatggaggtggggtggtaccgcccccccttctctagggtggttcatctctacagaaatggcaaggaccaagatggagaccaggcacctgaatatcggggccggacagagctgctgaaagatgctattggtgagggaaaggtgactctcaggatccggaatgtaaggttctcagatgaaggaggtttcacctgcttcttccgagatcattcttaccaagaggaggcagcaatggaattgaaagtagaagatcctttctactgggtgagccctggagtgctggttctcctcgcggtgctgcctgtgctcctcctgcagatcactgttggcctcgtcttcctctgcctgcagtacagactgagaggaaaacttcgagcagagatagagaatctccaccggacttttgatccccactttctgagggtgccctgctggaagataaccctgtttgtaattgtgccggttcttggacccttggttgccttgatcatctgctacaactggctacatcgaagactagcagggcaattccttgaagagctacgaaatcccttctgagtgatgtcacatcttggcaggggtggaggagagcctggttgcccagggatttgtccttggggacatctcatccatcaagttgcacactcactggcatctttgctatggggacattccaatttgcactttcaggaacactctgaattccaagtagaattgatttcccttcttctgtcatctaccttttctcttcattttcccatttttattacccttctttccatttctctctccagtcttccacctggaagccctctctggctaaggacaggcaggtgcccctctctccatcagaggacacctgtactggagagcaacacaggatggtctctgccatgaactggaggccaggaatctcctcactgaaaattacagtatggtaactttgcaaatggtggttgtttcttccaagactccagccctgattgcgcaaaactgaaaggcatgtgaagggaaggaagaggaagagtgcaaaacattgaagagagagctgagtgagctgaagagtgaggatatgagtagccccaacccaaacctggagatggggagaaacctacagaatactagccagagctcctccttgtcttggcagcctactagggacctggggaagcaaaaacgaaagctgggcaacatgcctgctttagaatgttttccttctacttacacatcttccacaggtctcagaatctttccttcctctcatccttttctcctatcttcatatctatcagagtatccactgtttattcaacaactactacttgatggtcagacacaaacaaacaagctaggtgctaattaataaagatacgagttttggccgggtgcggtggctcacgcctgtaatcccagcactttgggaggccgaggcgggcgaatcacgaggtcaggagttcaagaccagcctggccaacatggtgaaaccccatctctactaaaaatacaaacaattaactgagcatagtggtgggcacctataataccagctactccggaggctgaggcaggagaatcgcttgaacccaggaggcagaggttgcagtgagctgagatcgcgccactgcactctagccggagtgacagagtaagactctgtctcaaaaataaataaataaataaataaataaataaataaataaataaataaataaaaaataataatacaagttttcataagcacacttctaa

SEQ ID NO: 264102 - DNA, 1685 bp, Artificial Sequence
  derived and/or modified sequence
atggcaagcttatcgagaccctctctgcccagctgcctctgctccttcctcctcctcctcctcctccaagtgtcttccagctatgcagggcagttcagagtgataggaccaagacaccctatccgggctctggtcggggatgaagtggaattgccatgtcgcatatctcctgggaagaacgctacaggcatggaggtggggtggtaccgcccccccttctctagggtggttcatctctacagaaatggcaaggaccaagatggagaccaggcacctgaatatcggggccggacagagctgctgaaagatgctattggtgagggaaaggtgactctcaggatccggaatgtaaggttctcagatgaaggaggtttcacctgcttcttccgagatcattcttaccaagaggaggcagcaatggaattgaaagtagaagatcctttctactgggtgagccctggagtgctggttctcctcgcggtgctgcctgtgctcctcctgcagatcactgttggcctcgtcttcctctgcctgcagtacagactgagaggaaaacttcgagcagagatagagaatctccaccggacttttgatccccactttctgagggtgccctgctggaagataaccctgtttgtaattgtgccggttcttggacccttggttgccttgatcatctgctacaactggctacatcgaagactagcagggcaattccttgaagagctactcttccacctggaagccctctctggctaaggacaggcaggtgcccctctctccatcagaggacacctgtactggagagcaacacaggatggtctctgccatgaactggaggccaggaatctcctcactgaaaattacagtatggtaactttgcaaatggtggttgtttcttccaagactccagccctgattgcgcaaaactgaaaggcatgtgaagggaaggaagaggaagagtgcaaaacattgaagagagagctgagtgagctgaagagtgaggatatgagtagccccaacccaaacctggagatggggagaaacctacagaatactagccagagctcctccttgtcttggcagcctactagggacctggggaagcaaaaacgaaagctgggcaacatgcctgctttagaatgttttccttctacttacacatcttccacaggtctcagaatctttccttcctctcatccttttctcctatcttcatatctatcagagtatccactgtttattcaacaactactacttgatggtcagacacaaacaaacaagctaggtgctaattaataaagatacgagttttggccgggtgcggtggctcacgcctgtaatcccagcactttgggaggccgaggcgggcgaatcacgaggtcaggagttcaagaccagcctggccaacatggtgaaaccccatctctactaaaaatacaaacaattaactgagcatagtggtgggcacctataataccagctactccggaggctgaggcaggagaatcgcttgaacccaggaggcagaggttgcagtgagctgagatcgcgccactgcactctagccggagtgacagagtaagactctgtctcaaaaataaataaataaataaataaataaataaataaataaataaataaataaaaaataataatacaagttttcataagcacacttctaa

SEQ ID NO: 264103 - DNA, 1681 bp, Artificial Sequence
  derived and/or modified sequence
atggcaagcttatcgagaccctctctgcccagctgcctctgctccttcctcctcctcctcctcctccaagtgtcttccagctatgcagggcagttcagagtgataggaccaagacaccctatccgggctctggtcggggatgaagtggaattgccatgtcgcatatctcctgggaagaacgctacaggcatggaggtggggtggtaccgcccccccttctctagggtggttcatctctacagaaatggcaaggaccaagatggagaccaggcacctgaatatcggggccggacagagctgctgaaagatgctattggtgagggaaaggtgactctcaggatccggaatgtaaggttctcagatgaaggaggtttcacctgcttcttccgagatcattcttaccaagaggaggcagcaatggaattgaaagtagaagatcctttctactgggtgagccctggagtgctggttctcctcgcggtgctgcctgtgctcctcctgcagatcactgttggcctcgtcttcctctgcctgcagtacagactgagaggaaaacttcgagcagagatagagaatctccaccggacttttgatccccactttctgagggtgccctgctggaagataaccctgtttgtaattgtgccggttcttggacccttggttgccttgatcatctgctacaactggctacatcgaagactagcagggcaattccttgaagagctactcttccacctggaagccctctctggctaaggacaggcaggtgcccctctctccatcagaggacacctgtactggagagcaacacaggatggtctctgccatgaactggaggccaggaatctcctcactgaaaattacagtatggtaactttgcaaatggtggttgtttcttccaagactccagccctgattgcgcaaaactgaaaggcatgtgaagggaaggaagaggaagagtgcaaaacattgaagagagagctgagtgagctgaagagtgaggatatgagtagccccaacccaaacctggagatggggagaaacctacagaatactagccagagctcctccttgtcttggcagcctactagggacctggggaagcaaaaacgaaagctgggcaacatgcctgctttagaatgttttccttctacttacacatcttccacaggtctcagaatctttccttcctctcatccttttctcctatcttcatatctatcagagtatccactgtttattcaacaactactacttgatggtcagacacaaacaaacaagctaggtgctaattaataaagatacgagttttggccgggtgcggtggctcacgcctgtaatcccagcactttgggaggccgaggcgggcgaatcacgaggtcaggagttcgagaccagcctggccaacatggtgaaaccccatctctactaaaaatacaaacaattaactgagcatagtggtgggcacctataataccagctactccggaggctgaggcaggagaatcgcttgaacccaggaggcagaggttgcagtgagctgagatcgcgccactgcactctagccagagtgacagagtaagactctgtctcaaaaataaataaataaataaataaataaataaataaataaataaataaaaaataataatacaagttttcataagcacacttctaa

SEQ ID NO: 264104 - DNA, 2142 bp, Artificial Sequence
  derived and/or modified sequence
agcccttttgtgtgagtgcctggcaagggtgacgtggggctgtttctgcgggcacagctgcagcaattaccggagtggaggcagggcccaggcagcactgccctccaagatcttcccttgggcttttcagcagtaaggggacatgcaccccaagggcctccacttggcctgaccttgctgcgggggctctctgtccccaggaacagtagagatggcaagcttatcgagaccctctctgcccagctgcctctgctccttcctcctcctcctcctcctccaagtgtcttccagctatgcagggcagttcagagtgataggaccaagacaccctatccgggctctggtcggggatgaagtggaattgccatgtcgcatatctcctgggaagaacgctacaggcatggaggtggggtggtaccgcccccccttctctagggtggttcatctctacagaaatggcaaggaccaagatggagaccaggcacctgaatatcggggccggacagagctgctgaaagatgctattggtgagggaaaggtgactctcaggatccggaatgtaaggttctcagatgaaggaggtttcacctgcttcttccgagatcattcttaccaagaggaggcagcaatggaattgaaagtagaagatcctttctactgggtgagccctggagtgctggttctcctcgcggtgctgcctgtgctcctcctgcagatcactgttggcctcgtcttcctctgcctgcagtacagactgagaggaaaacttcgagcagagatagagaatctccaccggacttttgatccccactttctgagggtgccctgctggaagataaccctgtttgtaattgtgccggttcttggacccttggttgccttgatcatctgctacaactggctacatcgaagactagcagggcaattccttgaagagctacgaaatcccttctgagtgatgtcacatcttggcaggggtggaggagagcctggttgcccagggatttgtccttggggacatctcatccatcaagttgcacactcactggcatctttgctatggggacattccaatttgcactttcaggaacactctgaattccaagtagaattgatttcccttcttctgtcatctaccttttctcttcattttcccatttttattacccttctttccatttctctctccagtcttccacctggaagccctctctggctaaggacaggcaggtgcccctctctccatcagaggacacctgtactggagagcaacacaggatggtctctgccatgaactggaggccaggaatctcctcactgaaaattacagtatggtaactttgcaaatggtggttgtttcttccaagactccagccctgattgcgcaaaactgaaaggcatgtgaagggaaggaagaggaagagtgcaaaacattgaagagagagctgagtgagctgaagagtgaggatatgagtagccccaacccaaacctggagatggggagaaacctacagaatactagccagagctcctccttgtcttggcagcctactagggacctggggaagcaaaaacgaaagctgggcaacatgcctgctttagaatgttttccttctacttacacatcttccacaggtctcagaatctttccttcctctcatccttttctcctatcttcatatctatcagagtatccactgtttattcaacaactactacttgatggtcagacacaaacaaacaagctaggtgctaattaataaagatacgagttttggccgggtgcggtggctcacgcctgtaatcccagcactttgggaggccgaggcgggcgaatcacgaggtcaggagttcgagaccagcctggccaacatggtgaaaccccatctctactaaaaatacaaacaattaactgagcatagtggtgggcacctataataccagctactccggaggctgaggcaggagaatcgcttgaacccaggaggcagaggttgcagtgagctgagatcgcgccactgcactctagccagagtgacagagtaagactctgtctcaaaaataaataaataaataaataaataaataaataaataaataaataaaaaataataatacaagttttcataagcacacttctaa

SEQ ID NO: 264105 - DNA, 1681 bp, Artificial Sequence
  derived and/or modified sequence
atggcaagcttatcgagaccctctctgcccagctgcctctgctccttcctcctcctcctcctcctccaagtgtcttccagctatgcagggcagttcagagtgataggaccaagacaccctatccgggctctggtcggggatgaagtggaattgccatgtcgcatatctcctgggaagaacgctacaggcatggaggtggggtggtaccgcccccccttctctagggtggttcatctctacagaaatggcaaggaccaagatggagaccaggcacctgaatatcggggccggacagagctgctgaaagatgctattggtgagggaaaggtgactctcaggatccggaatgtaaggttctcagatgaaggaggtttcacctgcttcttccgagatcattcttaccaagaggaggcagcaatggaattgaaagtagaagatcctttctactgggtgagccctggagtgctggttctcctcgcggtgctgcctgtgctcctcctgcagatcactgttggcctcgtcttcctctgcctgcagtacagactgagaggaaaacttcgagcagagatagagaatctccaccggacttttgatccccactttctgagggtgccctgctggaagataaccctgtttgtaattgtgccggttcttggacccttggttgccttgatcatctgctacaactggctacatcgaagactagcagggcaattccttgaagagctactcttccacctggaagccctctctggctaaggacaggcaggtgcccctctctccatcagaggacacctgtactggagagcaacacaggatggtctctgccatgaactggaggccaggaatctcctcactgaaaattacagtatggtaactttgcaaatggtggttgtttcttccaagactccagccctgattgcgcaaaactgaaaggcatgtgaagggaaggaagaggaagagtgcaaaacattgaagagagagctgagtgagctgaagagtgaggatatgagtagccccaacccaaacctggagatggggagaaacctacagaatactagccagagctcctccttgtcttggcagcctactagggacctggggaagcaaaaacgaaagctgggcaacatgcctgctttagaatgttttccttctacttacacatcttccacaggtctcagaatctttccttcctctcatccttttctcctatcttcatatctatcagagtatccactgtttattcaacaactactacttgatggtcagacacaaacaaacaagctaggtgctaattaataaagatacgagttttggccgggtgcggtggctcacgcctgtaatcccagcactttgggaggccgaggcgggcgaatcacgaggtcaggagttcaagaccagcctggccaacatggtgaaaccccatctctactaaaaatacaaacaattaactgagcatagtggtgggcacctataataccagctactccggaggctgaggcaggagaatcgcttgaacccaggaggcagaggttgcagtgagctgagatcgcgccactgcactctagccggagtgacagagtaagactctgtctcaaaaataaataaataaataaataaataaataaataaataaataaataaaaaataataatacaagttttcataagcacacttctaa

SEQ ID NO: 264106 - DNA, 1689 bp, Artificial Sequence
  derived and/or modified sequence
atggcaagcttatcgagaccctctctgcccagctgcctctgctccttcctcctcctcctcctcctccaagtgtcttccagctatgcagggcagttcagagtgataggaccaagacaccctatccgggctctggtcggggatgaagtggaattgccatgtcgcatatctcctgggaagaacgctacaggcatggaggtggggtggtaccgcccccccttctctagggtggttcatctctacagaaatggcaaggaccaagatggagaccaggcacctgaatatcggggccggacagagctgctgaaagatgctattggtgagggaaaggtgactctcaggatccggaatgtaaggttctcagatgaaggaggtttcacctgcttcttccgagatcattcttaccaagaggaggcagcaatggaattgaaagtagaagatcctttctactgggtgagccctggagtgctggttctcctcgcggtgctgcctgtgctcctcctgcagatcactgttggcctcgtcttcctctgcctgcagtacagactgagaggaaaacttcgagcagagatagagaatctccaccggacttttgatccccactttctgagggtgccctgctggaagataaccctgtttgtaattgtgccggttcttggacccttggttgccttgatcatctgctacaactggctacatcgaagactagcagggcaattccttgaagagctactcttccacctggaagccctctctggctaaggacaggcaggtgcccctctctccatcagaggacacctgtactggagagcaacacaggatggtctctgccatgaactggaggccaggaatctcctcactgaaaattacagtatggtaactttgcaaatggtggttgtttcttccaagactccagccctgattgcgcaaaactgaaaggcatgtgaagggaaggaagaggaagagtgcaaaacattgaagagagagctgagtgagctgaagagtgaggatatgagtagccccaacccaaacctggagatggggagaaacctacagaatactagccagagctcctccttgtcttggcagcctactagggacctggggaagcaaaaacgaaagctgggcaacatgcctgctttagaatgttttccttctacttacacatcttccacaggtctcagaatctttccttcctctcatccttttctcctatcttcatatctatcagagtatccactgtttattcaacaactactacttgatggtcagacacaaacaaacaagctaggtgctaattaataaagatacgagttttggccgggtgcggtggctcacgcctgtaatcccagcactttgggaggccgaggcgggcgaatcacgaggtcaggagttcaagaccagcctggccaacatggtgaaaccccatctctactaaaaatacaaacaattaactgagcatagtggtgggcacctataataccagctactccggaggctgaggcaggagaatcgcttgaacccaggaggcagaggttgcagtgagctgagatcgcgccactgcactctagccggagtgacagagtaagactctgtctcaaaaataaataaataaataaataaataaataaataaataaataaataaataaataaaaaataataatacaagttttcataagcacacttctaa

SEQ ID NO: 264107 - DNA, 2142 bp, Artificial Sequence
  derived and/or modified sequence
agcccttttgtgtgagtgcctggcaagggtgacgtggggctgtttctgcgggcacagctgcagcaattaccggagtggaggcagggcccaggcagcactgccctccaagatcttcccttgggcttttcagcagtaaggggacatgcaccccaagggcctccacttggcctgaccttgctgcgggggctctctgtccccaggaacagtagagatggcaagcttatcgagaccctctctgcccagctgcctctgctccttcctcctcctcctcctcctccaagtgtcttccagctatgcagggcagttcagagtgataggaccaagacaccctatccgggctctggtcggggatgaagtggaattgccatgtcgcatatctcctgggaagaacgctacaggcatggaggtggggtggtaccgcccccccttctctagggtggttcatctctacagaaatggcaaggaccaagatggagaccaggcacctgaatatcggggccggacagagctgctgaaagatgctattggtgagggaaaggtgactctcaggatccggaatgtaaggttctcagatgaaggaggtttcacctgcttcttccgagatcattcttaccaagaggaggcagcaatggaattgaaagtagaagatcctttctactgggtgagccctggagtgctggttctcctcgcggtgctgcctgtgctcctcctgcagatcactgttggcctcgtcttcctctgcctgcagtacagactgagaggaaaacttcgagcagagatagagaatctccaccggacttttgatccccactttctgagggtgccctgctggaagataaccctgtttgtaattgtgccggttcttggacccttggttgccttgatcatctgctacaactggctacatcgaagactagcagggcaattccttgaagagctacgaaatcccttctgagtgatgtcacatcttggcaggggtggaggagagcctggttgcccagggatttgtccttggggacatctcatccatcaagttgcacactcactggcatctttgctatggggacattccaatttgcactttcaggaacactctgaattccaagtagaattgatttcccttcttctgtcatctaccttttctcttcattttcccatttttattacccttctttccatttctctctccagtcttccacctggaagccctctctggctaaggacaggcaggtgcccctctctccatcagaggacacctgtactggagagcaacacaggatggtctctgccatgaactggaggccaggaatctcctcactgaaaattacagtatggtaactttgcaaatggtggttgtttcttccaagactccagccctgattgcgcaaaactgaaaggcatgtgaagggaaggaagaggaagagtgcaaaacattgaagagagagctgagtgagctgaagagtgaggatatgagtagccccaacccaaacctggagatggggagaaacctacagaatactagccagagctcctccttgtcttggcagcctactagggacctggggaagcaaaaacgaaagctgggcaacatgcctgctttagaatgttttccttctacttacacatcttccacaggtctcagaatctttccttcctctcatccttttctcctatcttcatatctatcagagtatccactgtttattcaacaactactacttgatggtcagacacaaacaaacaagctaggtgctaattaataaagatacgagttttggccgggtgcggtggctcacgcctgtaatcccagcactttgggaggccgaggcgggcgaatcacgaggtcaggagttcaagaccagcctggccaacatggtgaaaccccatctctactaaaaatacaaacaattaactgagcatagtggtgggcacctataataccagctactccggaggctgaggcaggagaatcgcttgaacccaggaggcagaggttgcagtgagctgagatcgcgccactgcactctagccggagtgacagagtaagactctgtctcaaaaataaataaataaataaataaataaataaataaataaataaataaaaaataataatacaagttttcataagcacacttctaa

SEQ ID NO: 264108 - DNA, 1677 bp, Artificial Sequence
  derived and/or modified sequence
atggcaagcttatcgagaccctctctgcccagctgcctctgctccttcctcctcctcctcctcctccaagtgtcttccagctatgcagggcagttcagagtgataggaccaagacaccctatccgggctctggtcggggatgaagtggaattgccatgtcgcatatctcctgggaagaacgctacaggcatggaggtggggtggtaccgcccccccttctctagggtggttcatctctacagaaatggcaaggaccaagatggagaccaggcacctgaatatcggggccggacagagctgctgaaagatgctattggtgagggaaaggtgactctcaggatccggaatgtaaggttctcagatgaaggaggtttcacctgcttcttccgagatcattcttaccaagaggaggcagcaatggaattgaaagtagaagatcctttctactgggtgagccctggagtgctggttctcctcgcggtgctgcctgtgctcctcctgcagatcactcttggcctcgtcttcctctgcctgcagtacagactgagaggaaaacttcgagcagagatagagaatctccaccggacttttgatccccactttctgagggtgccctgctggaagataaccctgtttgtaattgtgccggttcttggacccttggttgccttgatcatctgctacaactggctacatcgaagactagcagggcaattccttgaagagctactcttccacctggaagccctctctggctaaggacaggcaggtgcccctctctccatcagaggacacctgtactggagagcaacacaggatggtctctgccatgaactggaggccaggaatctcctcactgaaaattacagtatggtaactttgcaaatggtggttgtttcttccaagactccagccctgattgcgcaaaactgaaaggcatgtgaagggaaggaagaggaagagtgcaaaacattgaagagagagctgagtgagctgaagagtgaggatatgagtagccccaacccaaacctggagatggggagaaacctacagaatactagccagagctcctccttgtcttggcagcctactagggacctggggaagcaaaaacgaaagctgggcaacatgcctgctttagaatgttttccttctacttacacatcttccacaggtctcagaatctttccttcctctcatccttttctcctatcttcatatctatcagagtatccactgtttattcaacaactactacttgatggtcagacacaaacaaacaagctaggtgctaattaataaagatacgagttttggccgggtgcggtggctcacgcctgtaatcccagcactttgggaggccgaggcgggcgaatcacgaggtcaggagttcaagaccagcctggccaacatggtgaaaccccatctctactaaaaatacaaacaattaactgagcatagtggtgggcacctataataccagctactccggaggctgaggcaggagaatcgcttgaacccaggaggcagaggttgcagtgagctgagatcgcgccactgcactctagccggagtgacagagtaagactctgtctcaaaaataaataaataaataaataaataaataaataaataaataaaaaataataatacaagttttcataagcacacttctaa

SEQ ID NO: 264109 - DNA, 2138 bp, Artificial Sequence
  derived and/or modified sequence
agcccttttgtgtgagtgcctggcaagggtgacgtggggctgtttctgcgggcacagctgcagcaattaccggagtggaggcagggcccaggcagcactgccctccaagatcttcccttgggcttttcagcagtaaggggacatgcaccccaagggcctccacttggcctgaccttgctgcgggggctctctgtccccaggaacagtagagatggcaagcttatcgagaccctctctgcccagctgcctctgctccttcctcctcctcctcctcctccaagtgtcttccagctatgcagggcagttcagagtgataggaccaagacaccctatccgggctctggtcggggatgaagtggaattgccatgtcgcatatctcctgggaagaacgctacaggcatggaggtggggtggtaccgcccccccttctctagggtggttcatctctacagaaatggcaaggaccaagatggagaccaggcacctgaatatcggggccggacagagctgctgaaagatgctattggtgagggaaaggtgactctcaggatccggaatgtaaggttctcagatgaaggaggtttcacctgcttcttccgagatcattcttaccaagaggaggcagcaatggaattgaaagtagaagatcctttctactgggtgagccctggagtgctggttctcctcgcggtgctgcctgtgctcctcctgcagatcactcttggcctcgtcttcctctgcctgcagtacagactgagaggaaaacttcgagcagagatagagaatctccaccggacttttgatccccactttctgagggtgccctgctggaagataaccctgtttgtaattgtgccggttcttggacccttggttgccttgatcatctgctacaactggctacatcgaagactagcagggcaattccttgaagagctacgaaatcccttctgagtgatgtcacatcttggcaggggtggaggagagcctggttgcccagggatttgtccttggggacatctcatccatcaagttgcacactcactggcatctttgctatggggacattccaatttgcactttcaggaacactctgaattccaagtagaattgatttcccttcttctgtcatctaccttttctcttcattttcccatttttattacccttctttccatttctctctccagtcttccacctggaagccctctctggctaaggacaggcaggtgcccctctctccatcagaggacacctgtactggagagcaacacaggatggtctctgccatgaactggaggccaggaatctcctcactgaaaattacagtatggtaactttgcaaatggtggttgtttcttccaagactccagccctgattgcgcaaaactgaaaggcatgtgaagggaaggaagaggaagagtgcaaaacattgaagagagagctgagtgagctgaagagtgaggatatgagtagccccaacccaaacctggagatggggagaaacctacagaatactagccagagctcctccttgtcttggcagcctactagggacctggggaagcaaaaacgaaagctgggcaacatgcctgctttagaatgttttccttctacttacacatcttccacaggtctcagaatctttccttcctctcatccttttctcctatcttcatatctatcagagtatccactgtttattcaacaactactacttgatggtcagacacaaacaaacaagctaggtgctaattaataaagatacgagttttggccgggtgcggtggctcacgcctgtaatcccagcactttgggaggccgaggcgggcgaatcacgaggtcaggagttcaagaccagcctggccaacatggtgaaaccccatctctactaaaaatacaaacaattaactgagcatagtggtgggcacctataataccagctactccggaggctgaggcaggagaatcgcttgaacccaggaggcagaggttgcagtgagctgagatcgcgccactgcactctagccggagtgacagagtaagactctgtctcaaaaataaataaataaataaataaataaataaataaataaataaaaaataataatacaagttttcataagcacacttctaa

SEQ ID NO: 264110 - DNA, 2046 bp, Artificial Sequence
  derived and/or modified sequence
gtcatcccctcagtctgtagcccttttgtgtgagtgcctggcaagggtgacgtggggctgtttctgcgggcacagctgcagcaattaccggagtggaggcagggcccaggcagcactgccctccaagatcttcccttgggcttttcagcagtaaggggacatgcaccccaagggcctccacttggcctgaccttgctgcgggggctctctgtccccaggaacagtagagatggcaagcttatcaagaccctctctgcccagctgcctctgctccttcctcctcctcctcctcctccaagtgtcttccagctatgcagggcagttcagagtgataggaccaagacaccctatccgggctctggtcggggatgaagtggaattgccatgtcgcatatctcctgggaagaacgctacaggcatggaggtggggtggtaccgcccccccttctctagggtggttcatctctacagaaatggcaaggaccaagatggagaccaggcacctgaatatcggggccggacagagctgctgaaagatgctattggtgagggaaaggtgactctcaggatccggaatgtaaggttctcagatgaaggaggtttcacctgcttcttccgagatcattcttaccaagaggaggcagcaatggaattgaaagtagaagtgtctcactctgtcacccaggattggttgcagtggcacgatcatggctcattgcagcctccacctcccaggctcaagtgatcctcctgactcagcctcttgaatagctgagaccacaggcttgtgtcaccatgcccagatcctttctactgggtgagccctggagtgctggttctcctcgcggtgctgcctgtgctcctcctgcagatcactgttggcctcatcttcctctgcctgcagtacagactgagaggaaaacttcgagcagagatagagaatctccaccggacttttgatccccactttctgagggtgccctgctggaagataaccctgtttgtaattgtgccggttcttggacccttggttgccttgatcatctgctacaactggctacatcgaagactagcagggcaattccttgaagagctactcttccacctggaagccctctctggctaaggacaggcaggtgcccctctctccatcagaggacacctgtactggagagcaacacaggatggtctctgccatgaactggaggccaggaatctcctcactgaaaattacagtatggtaactttgcaaatggtggttgtttcttccaagactccagccctgattgcgcaaaactgaaaggcatgtgaagggaaggaagaggaagagtgcaaaacattgaagagagagctgagtgagctgaagagtgaggatatgagtagccccaacccaaacctggagatggggagaaacctacagaatactagccagagctcctccttgtcttggcagcctactagggacctggggaagcaaaaacgaaagctgggcaacatgcctgctttagaatgttttccttctacttacacatcttccacaggtctcagaatctttccttcctctcatccttttctcctatcttcatatctatcagagtatccactgtttattcaacaactactacttgatggtcagacacaaacaaacaagctaggtgctaattaataaagatacgagttttggccgggtgcggtggctcacgcctgtaatcccagcactttgggaggccgaggcgggcgaatcacgaggtcaggagttcaagaccagcctggccaacatggtgaaaccccatctctactaaaaatacaaacaattaactgagcatagtggtgggcacctataataccagctactccggaggctgaggcaggagaatcgcttgaacccaggaggcagaggttgcagtgagctgagatcgtgccactgcactctagccggagtgacagagtaagactctgtctcaaaaataaataaataaataaataaataaataaataaataaataaataaaaaataataatacaagttttcataagcacacttct

SEQ ID NO: 264111 - DNA, 1436 bp, Artificial Sequence
  derived and/or modified sequence
aagatcttcccttgggcttttcagcagtaaggggacatgcaccccaagggcctccacttggcctgaccttgctgcgggggctctctgtccccaggaacagtagagatggcaagcttatcgagaccctctctgcccagctgcctctgctccttcctcctcctcctcctcctccaagtgtcttccagctatgcagggcagttcagagtgataggaccaagacaccctatccgggctctggtcggggatgaagtggaattgccatgtcgcatatctcctgggaagaacgctacagaaatggcaaggaccaagatggagaccaggcacctgaatatcggggccggacagagctgctgaaagatgctattggtgagggaaaggtgactctcaggatccggaatgtaaggttctcagatgaaggaggtttcacctgcttcttccgagatcattcttaccaagaggaggcagcaatggaattgaaagtagaagatcctttctactgggtgagccctggagtgctggttctcctcgcggtgctgcctgtgctcctcctgcagatcactgttggcctcgtcttcctctgcctgcagtacagactgagaggaaaacttcgagcagagatagagaatctccaccggacttttgatccccactttctgagggtgccctgctggaagataaccctgtttgtaattgtgccggttcttggacccttggttgccttgatcatctgctacaactggctacatcgaagactagcagggcaattccttgaagagctacgaaatcccttctgagtgatgtcacatcttggcaggggtggaggagagcctggttgcccagggatttgtccttggggacatctcatccatcaagttgcacactcactggcatctttgctatggggacattccaatttgcactttcaggaacactctgaattccaagtagaattgatttcccttcttctgtcatctaccttttctcttcattttcccatttttattacccttctttccatttctctctccagtcttccacctggaagccctctctggctaaggacaggcaggtgcccctctctccatcagaggacacctgtactggagagcaacacaggatggtctctgccatgaactggaggccaggaatctcctcactgaaaattacagtatggtaactttgcaaatggtggttgtttcttccaagactccagccctgattgcgcaaaactgaaaggcatgtgaagggaaggaagaggaagagtgcaaaacattgaagagagagctgagtgagctgaagagtgaggatatgagtagccccaacccaaacctggagatggggagaaacctacagaatactagccagagctcctccttgtcttggcagcctactagggacctggggaagcaaaaacgaaagctgggcaacatgcctgc

SEQ ID NO: 264112 - DNA, 2296 bp, Artificial Sequence
  derived and/or modified sequence
gtcatcccctcagtctgtagcccttttgtgtgagtgcctggcaagggtgacgtggggctgtttctgcgggcacagctgcagcaattaccggagtggaggcagggcccaggcagcactgccctccaagatcttcccttgggcttttcagcagtaaggggacatgcaccccaagggcctccacttggcctgaccttgctgcgggggctctctgtccccaggaacagtagagatggcaagcttatcgagaccctctctgcccagctgcctctgctccttcctcctcctcctcctcctccaagtgtcttccagctatgcagggcagttcagagtgataggaccaagacaccctatccgggctctggtcggggatgaagtggaattgccatgtcgcatatctcctgggaagaacgctacaggcatggaggtggggtggtaccgcccccccttctctagggtggttcatctctacagaaatggcaaggaccaagatggagaccaggcacctgaatatcggggccggacagagctgctgaaagatgctattggtgagggaaaggtgactctcaggatccggaatgtaaggttctcagatgaaggaggtttcacctgcttcttccgagatcattcttaccaagaggaggcagcaatggaattgaaagtagaagtgtctcactctgtcacccaggattggttgcagtggcacgatcatggctcattgcagcctccacctcccaggctcaagtgatcctcctgactcagcctcttgaatagctgagaccacaggcttgtgtcaccatgcccagatcctttctactgggtgagccctggagtgctggttctcctcgcggtgctgcctgtgctcctcctgcagatcactgttggcctcgtcttcctctgcctgcagtacagactgagaggaaaacttcgagcagagatagagaatctccaccggacttttgatccccactttctgagggtgccctgctggaagataaccctgtttgtaattgtgccggttcttggacccttggttgccttgatcatctgctacaactggctacatcgaagactagcagggcaattccttgaagagctacgaaatcccttctgagtgatgtcacatcttggcaggggtggaggagagcctggttgcccagggatttgtccttggggacatctcatccatcaagttgcacactcactggcatctttgctatggggacattccaatttgcactttcaggaacactctgaattccaagtagaattgatttcccttcttctgtcatctaccttttctcttcattttcccatttttattacccttctttccatttctctctccagtcttccacctggaagccctctctggctaaggacaggcaggtgcccctctctccatcagaggacacctgtactggagagcaacacaggatggtctctgccatgaactggaggccaggaatctcctcactgaaaattacagtatggtaactttgcaaatggtggttgtttcttccaagactccagccctgattgcgcaaaactgaaaggcatgtgaagggaaggaagaggaagagtgcaaaacattgaagagagagctgagtgagctgaagagtgaggatatgagtagccccaacccaaacctggagatggggagaaacctacagaatactagccagagctcctccttgtcttggcagcctactagggacctggggaagcaaaaacgaaagctgggcaacatgcctgctttagaatgttttccttctacttacacatcttccacaggtctcagaatctttccttcctctcatccttttctcctatcttcatatctatcagagtatccactgtttattcaacaactactacttgatggtcagacacaaacaaacaagctaggtgctaattaataaagatacgagttttggccgggtgcggtggctcacgcctgtaatcccagcactttgggaggccgaggcgggcgaatcacgaggtcaggagttcgagaccagcctggccaacatggtgaaaccccatctctactaaaaatacaaacaattaactgagcatagtggtgggcacctataataccagctactccggaggctgaggcaggagaatcgcttgaacccaggaggcagaggttgcagtgagctgagatcgcgccactgcactctagccagagtgacagagtaagactctgtctcaaaaataaataaataaataaataaataaataaataaataaataaataaaaaataataatacaagttttcataagcacacttct

SEQ ID NO: 264113 - DNA, 2296 bp, Artificial Sequence
  derived and/or modified sequence
gtcatcccctcagtctgtagcccttttgtgtgagtgcctggcaagggtgacgtggggctgtttctgcgggcacagctgcagcaattaccggagtggaggcagggcccaggcagcactgccctccaagatcttcccttgggcttttcagcagtaaggggacatgcaccccaagggcctccacttggcctgaccttgctgcgggggctctctgtccccaggaacagtagagatggcaagcttatcgagaccctctctgcccagctgcctctgctccttcctcctcctcctcctcctccaagtgtcttccagctatgcagggcagttcagagtgataggaccaagacaccctatccgggctctggtcggggatgaagtggaattgccatgtcgcatatctcctgggaagaacgctacaggcatggaggtggggtggtaccgcccccccttctctagggtggttcatctctacagaaatggcaaggaccaagatggagaccaggcacctgaatatcggggccggacagagctgctgaaagatgctattggtgagggaaaggtgactctcaggatccggaatgtaaggttctcagatgaaggaggtttcacctgcttcttccgagatcattcttaccaagaggaggcagcaatggaattgaaagtagaagtgtctcactctgtcacccaggattggttgcagtggcacgatcatggctcattgcagcctccacctcccaggctcaagtgatcctcctgactcagcctcttgaatagctgagaccacaggcttgtgtcaccatgcccagatcctttctactgggtgagccctggagtgctggttctcctcgcggtgctgcctgtgctcctcctgcagatcactgttggcctcgtcttcctctgcctgcagtacagactgagaggaaaacttcgagcagagatagagaatctccaccggacttttgatccccactttctgagggtgccctgctggaagataaccctgtttgtaattgtgccggttcttggacccttggttgccttgatcatctgctacaactggctacatcgaagactagcagggcaattccttgaagagctacgaaatcccttctgagtgatgtcacatcttggcaggggtggaggagagcctggttgcccagggatttgtccttggggacatctcatccatcaagttgcacactcactggcatctttgctatggggacattccaatttgcactttcaggaacactctgaattccaagtagaattgatttcccttcttctgtcatctaccttttctcttcattttcccatttttattacccttctttccatttctctctccagtcttccacctggaagccctctctggctaaggacaggcaggtgcccctctctccatcagaggacacctgtactggagagcaacacaggatggtctctgccatgaactggaggccaggaatctcctcactgaaaattacagtatggtaactttgcaaatggtggttgtttcttccaagactccagccctgattgcgcaaaactgaaaggcatgtgaagggaaggaagaggaagagtgcaaaacattgaagagagagctgagtgagctgaagagtgaggatatgagtagccccaacccaaacctggagatggggagaaacctacagaatactagccagagctcctccttgtcttggcagcctactagggacctggggaagcaaaaacgaaagctgggcaacatgcctgctttagaatgttttccttctacttacacatcttccacaggtctcagaatctttccttcctctcatccttttctcctatcttcatatctatcagagtatccactgtttattcaacaactactacttgatggtcagacacaaacaaacaagctaggtgctaattaataaagatacgagttttggccgggtgcggtggctcacgcctgtaatcccagcactttgggaggccgaggcgggcgaatcacgaggtcaggagttcaagaccagcctggccaacatggtgaaaccccatctctactaaaaatacaaacaattaactgagcatagtggtgggcacctataataccagctactccggaggctgaggcaggagaatcgcttgaacccaggaggcagaggttgcagtgagctgagatcgcgccactgcactctagccggagtgacagagtaagactctgtctcaaaaataaataaataaataaataaataaataaataaataaataaataaaaaataataatacaagttttcataagcacacttct

SEQ ID NO: 264114 - DNA, 2300 bp, Artificial Sequence
  derived and/or modified sequence
gtcatcccctcagtctgtagcccttttgtgtgagtgcctggcaagggtgacgtggggctgtttctgcgggcacagctgcagcaattaccggagtggaggcagggcccaggcagcactgccctccaagatcttcccttgggcttttcagcagtaaggggacatgcaccccaagggcctccacttggcctgaccttgctgcgggggctctctgtccccaggaacagtagagatggcaagcttatcgagaccctctctgcccagctgcctctgctccttcctcctcctcctcctcctccaagtgtcttccagctatgcagggcagttcagagtgataggaccaagacaccctatccgggctctggtcggggatgaagtggaattgccatgtcgcatatctcctgggaagaacgctacaggcatggaggtggggtggtaccgcccccccttctctagggtggttcatctctacagaaatggcaaggaccaagatggagaccaggcacctgaatatcggggccggacagagctgctgaaagatgctattggtgagggaaaggtgactctcaggatccggaatgtaaggttctcagatgaaggaggtttcacctgcttcttccgagatcattcttaccaagaggaggcagcaatggaattgaaagtagaagtgtctcactctgtcacccaggattggttgcagtggcacgatcatggctcattgcagcctccacctcccaggctcaagtgatcctcctgactcagcctcttgaatagctgagaccacaggcttgtgtcaccatgcccagatcctttctactgggtgagccctggagtgctggttctcctcgcggtgctgcctgtgctcctcctgcagatcactgttggcctcgtcttcctctgcctgcagtacagactgagaggaaaacttcgagcagagatagagaatctccaccggacttttgatccccactttctgagggtgccctgctggaagataaccctgtttgtaattgtgccggttcttggacccttggttgccttgatcatctgctacaactggctacatcgaagactagcagggcaattccttgaagagctacgaaatcccttctgagtgatgtcacatcttggcaggggtggaggagagcctggttgcccagggatttgtccttggggacatctcatccatcaagttgcacactcactggcatctttgctatggggacattccaatttgcactttcaggaacactctgaattccaagtagaattgatttcccttcttctgtcatctaccttttctcttcattttcccatttttattacccttctttccatttctctctccagtcttccacctggaagccctctctggctaaggacaggcaggtgcccctctctccatcagaggacacctgtactggagagcaacacaggatggtctctgccatgaactggaggccaggaatctcctcactgaaaattacagtatggtaactttgcaaatggtggttgtttcttccaagactccagccctgattgcgcaaaactgaaaggcatgtgaagggaaggaagaggaagagtgcaaaacattgaagagagagctgagtgagctgaagagtgaggatatgagtagccccaacccaaacctggagatggggagaaacctacagaatactagccagagctcctccttgtcttggcagcctactagggacctggggaagcaaaaacgaaagctgggcaacatgcctgctttagaatgttttccttctacttacacatcttccacaggtctcagaatctttccttcctctcatccttttctcctatcttcatatctatcagagtatccactgtttattcaacaactactacttgatggtcagacacaaacaaacaagctaggtgctaattaataaagatatgagttttggccgggtgcggtggctcacgcctgtaatcccagcactttgggaggccgaggcgggcgaatcacgaggtcaggagttcgagaccagcctggccaacatggtgaaaccccatctctactaaaaatacaaacaattaactgagcatagtggtgggcacctataataccagctactccggaggctgaggcaggagaatcgcttgaacccaggaggcagaggttgcagtgagctgagatcgcgccactgcactctagccagagtgacagagtaagactctgtctcaaaaataaataaataaataaataaataaataaataaataaataaataaataaaaaataataatacaagttttcataagcacacttct

SEQ ID NO: 264115 - DNA, 2300 bp, Artificial Sequence
  derived and/or modified sequence
gtcatcccctcagtctgtagcccttttgtgtgagtgcctggcaagggtgacgtggggctgtttctgcgggcacagctgcagcaattaccggagtggaggcagggcccaggcagcactgccctccaagatcttcccttgggcttttcagcagtaaggggacatgcaccccaagggcctccacttggcctgaccttgctgcgggggctctctgtccccaggaacagtagagatggcaagcttatcgagaccctctctgcccagctgcctctgctccttcctcctcctcctcctcctccaagtgtcttccagctatgcagggcagttcagagtgataggaccaagacaccctatccgggctctggtcggggatgaagtggaattgccatgtcgcatatctcctgggaagaacgctacaggcatggaggtggggtggtaccgcccccccttctctagggtggttcatctctacagaaatggcaaggaccaagatggagaccaggcacctgaatatcggggccggacagagctgctgaaagatgctattggtgagggaaaggtgactctcaggatccggaatgtaaggttctcagatgaaggaggtttcacctgcttcttccgagatcattcttaccaagaggaggcagcaatggaattgaaagtagaagtgtctcactctgtcacccaggattggttgcagtggcacgatcatggctcattgcagcctccacctcccaggctcaagtgatcctcctgactcagcctcttgaatagctgagaccacaggcttgtgtcaccatgcccagatcctttctactgggtgagccctggagtgctggttctcctcgcggtgctgcctgtgctcctcctgcagatcactgttggcctcgtcttcctctgcctgcagtacagactgagaggaaaacttcgagcagagatagagaatctccaccggacttttgatccccactttctgagggtgccctgctggaagataaccctgtttgtaattgtgccggttcttggacccttggttgccttgatcatctgctacaactggctacatcgaagactagcagggcaattccttgaagagctacgaaatcccttctgagtgatgtcacatcttggcaggggtggaggagagcctggttgcccagggatttgtccttggggacatctcatccatcaagttgcacactcactggcatctttgctatggggacattccaatttgcactttcaggaacactctgaattccaagtagaattgatttcccttcttctgtcatctaccttttctcttcattttcccatttttattacccttctttccatttctctctccagtcttccacctggaagccctctctggctaaggacaggcaggtgcccctctctccatcagaggacacctgtactggagagcaacacaggatggtctctgccatgaactggaggccaggaatctcctcactgaaaattacagtatggtaactttgcaaatggtggttgtttcttccaagactccagccctgattgcgcaaaactgaaaggcatgtgaagggaaggaagaggaagagtgcaaaacattgaagagagagctgagtgagctgaagagtgaggatatgagtagccccaacccaaacctggagatggggagaaacctacagaatactagccagagctcctccttgtcttggcagcctactagggacctggggaagcaaaaacgaaagctgggcaacatgcctgctttagaatgttttccttctacttacacatcttccacaggtctcagaatctttccttcctctcatccttttctcctatcttcatatctatcagagtatccactgtttattcaacaactactacttgatggtcagacacaaacaaacaagctaggtgctaattaataaagatacgagttttggccgggtgcggtggctcacgcctgtaatcccagcactttgggaggccgaggcgggcgaatcacgaggtcaggagttcaagaccagcctggccaacatggtgaaaccccatctctactaaaaatacaaacaattaactgagcatagtggtgggcacctataataccagctactccggaggctgaggcaggagaatcgcttgaacccaggaggcagaggttgcagtgagctgagatcgcgccactgcactctagccggagtgacagagtaagactctgtctcaaaaataaataaataaataaataaataaataaataaataaataaataaataaaaaataataatacaagttttcataagcacacttct

SEQ ID NO: 264116 - DNA, 1436 bp, Artificial Sequence
  derived and/or modified sequence
aagatcttcccttgggcttttcagcagtaaggggacatgcaccccaagggcctccacttggcctgaccttgctgcgggggctctctgtccccaggaacagtagagatggcaagcttatcgagaccctctctgcccagctgcctctgctccttcctcctcctcctcctcctccaagtgtcttccagctatgcagggcagttcagagtgataggaccaagacaccctatccgggctctggtcggggatgaagtggaattgccatgtcgcatatctcctgggaagaacgctacagaaatggcaaggaccaagatggagaccaggcacctgaatatcggggccggacagagctgctgaaagatgctattggtgagggaaaggtgactctcaggatccggaatgtaaggttctcagatgaaggaggtttcacctgcttcttccgagatcattcttaccaagaggaggcagcaatggaattgaaagtagaagatcctttctactgggtgagccctggagtgctggttctcctcgcggtgctgcctgtgctcctcctgcagatcactcttggcctcgtcttcctctgcctgcagtacagactgagaggaaaacttcgagcagagatagagaatctccaccggacttttgatccccactttctgagggtgccctgctggaagataaccctgtttgtaattgtgccggttcttggacccttggttgccttgatcatctgctacaactggctacatcgaagactagcagggcaattccttgaagagctacgaaatcccttctgagtgatgtcacatcttggcaggggtggaggagagcctggttgcccagggatttgtccttggggacatctcatccatcaagttgcacactcactggcatctttgctatggggacattccaatttgcactttcaggaacactctgaattccaagtagaattgatttcccttcttctgtcatctaccttttctcttcattttcccatttttattacccttctttccatttctctctccagtcttccacctggaagccctctctggctaaggacaggcaggtgcccctctctccatcagaggacacctgtactggagagcaacacaggatggtctctgccatgaactggaggccaggaatctcctcactgaaaattacagtatggtaactttgcaaatggtggttgtttcttccaagactccagccctgattgcgcaaaactgaaaggcatgtgaagggaaggaagaggaagagtgcaaaacattgaagagagagctgagtgagctgaagagtgaggatatgagtagccccaacccaaacctggagatggggagaaacctacagaatactagccagagctcctccttgtcttggcagcctactagggacctggggaagcaaaaacgaaagctgggcaacatgcctgc

SEQ ID NO: 264117 - DNA, 2304 bp, Artificial Sequence
  derived and/or modified sequence
gtcatcccctcagtctgtagcccttttgtgtgagtgcctggcaagggtgacgtggggctgtttctgcgggcacagctgcagcaattaccggagtggaggcagggcccaggcagcactgccctccaagatcttcccttgggcttttcagcagtaaggggacatgcaccccaagggcctccacttggcctgaccttgctgcgggggctctctgtccccaggaacagtagagatggcaagcttatcgagaccctctctgcccagctgcctctgctccttcctcctcctcctcctcctccaagtgtcttccagctatgcagggcagttcagagtgataggaccaagacaccctatccgggctctggtcggggatgaagtggaattgccatgtcgcatatctcctgggaagaacgctacaggcatggaggtggggtggtaccgcccccccttctctagggtggttcatctctacagaaatggcaaggaccaagatggagaccaggcacctgaatatcggggccggacagagctgctgaaagatgctattggtgagggaaaggtgactctcaggatccggaatgtaaggttctcagatgaaggaggtttcacctgcttcttccgagatcattcttaccaagaggaggcagcaatggaattgaaagtagaagtgtctcactctgtcacccaggattggttgcagtggcacgatcatggctcattgcagcctccacctcccaggctcaagtgatcctcctgactcagcctcttgaatagctgagaccacaggcttgtgtcaccatgcccagatcctttctactgggtgagccctggagtgctggttctcctcgcggtgctgcctgtgctcctcctgcagatcactgttggcctcgtcttcctctgcctgcagtacagactgagaggaaaacttcgagcagagatagagaatctccaccggacttttgatccccactttctgagggtgccctgctggaagataaccctgtttgtaattgtgccggttcttggacccttggttgccttgatcatctgctacaactggctacatcgaagactagcagggcaattccttgaagagctacgaaatcccttctgagtgatgtcacatcttggcaggggtggaggagagcctggttgcccagggatttgtccttggggacatctcatccatcaagttgcacactcactggcatctttgctatggggacattccaatttgcactttcaggaacactctgaattccaagtagaattgatttcccttcttctgtcatctaccttttctcttcattttcccatttttattacccttctttccatttctctctccagtcttccacctggaagccctctctggctaaggacaggcaggtgcccctctctccatcagaggacacctgtactggagagcaacacaggatggtctctgccatgaactggaggccaggaatctcctcactgaaaattacagtatggtaactttgcaaatggtggttgtttcttccaagactccagccctgattgcgcaaaactgaaaggcatgtgaagggaaggaagaggaagagtgcaaaacattgaagagagagctgagtgagctgaagagtgaggatatgagtagccccaacccaaacctggagatggggagaaacctacagaatactagccagagctcctccttgtcttggcagcctactagggacctggggaagcaaaaacgaaagctgggcaacatgcctgctttagaatgttttccttctacttacacatcttccacaggtctcagaatctttccttcctctcatccttttctcctatcttcatatctatcagagtatccactgtttattcaacaactactacttgatggtcagacacaaacaaacaagctaggtgctaattaataaagatacgagttttggccgggtgcggtggctcacgcctgtaatcccagcactttgggaggccgaggcgggcgaatcacgaggtcaggagttcaagaccagcctggccaacatggtgaaaccccatctctactaaaaatacaaacaattaactgagcatagtggtgggcacctataataccagctactccggaggctgaggcaggagaatcgcttgaacccaggaggcagaggttgcagtgagctgagatcgcgccactgcactctagccggagtgacagagtaagactctgtctcaaaaataaataaataaataaataaataaataaataaataaataaataaataaataaaaaataataatacaagttttcataagcacacttct

SEQ ID NO: 264118 - DNA, 759 bp, Artificial Sequence
  derived and/or modified sequence
atggccagcctgagccggcccagcctgcccagctgcctgtgcagctttttgttgttactcctgctgcaggtgtcctcctcttacgctgggcagtttcgggttatcggcccgcgccacccgatcagagctctagtgggtgatgaggtggagctgccgtgcaggataagccccgggaagaatgcgaccgggatggaggtggggtggtaccgcccccccttttccagagtcgtgcatctttatcgcaacggtaaggatcaagacggcgaccaggcccctgagtatagagggcgcacagaacttctgaaagacgccattggggaggggaaggtcaccctacgtatccgaaacgtgcgatttagcgacgaaggcggctttacctgtttctttcgcgaccacagttaccaggaggaagcagccatggagctgaaagtcgaagaccccttttactgggttagccctggtgtgctggttcttctggcagtactgcctgtgttattacttcagatcaccgttggcttgatattcctctgccttcaataccgactgcgcgggaagctcagagctgagatcgagaacctgcatcgcacctttgatccacatttcctcagagtgccatgctggaagatcacactctttgtgatagttcccgttttaggccctctcgtggcgcttattatctgctacaattggctgcatcgtaggctcgccggccagttcctcgaagaactactattccacctcgaagccttgagcggctag

SEQ ID NO: 264119 - DNA, 744 bp, Artificial Sequence
  derived and/or modified sequence
atggccagcctgagccggcccagcctgcccagctgcctgtgcagcttcctgctgttgttattgcttcaggtgtcttcctcctatgccggacaattcagagtcatcggcccgcgccacccaattcgagctctggtgggcgacgaagtggagcttccgtgcagaataagtccgggtaagaatgctacagggatggaggttgggtggtatcgccctccgttcagtagagtggtccacctctaccggaacgggaaagaccaggacggggatcaggcgcccgaatatcgcggccgaacagagctgctgaaggacgcaattggggagggaaaagttaccttgaggattcgtaacgtgcgcttttccgacgaaggcgggtttacttgtttcttccgagatcactcataccaggaggaagcggccatggagcttaaggtggaggatcctttctattgggtttcccctggcgtcctggttctgctggccgttctgcctgtattgctactccagatcacagtcgggctgattttcctgtgtctgcaatacaggctgagaggaaagcttagagcagaaatcgagaaccttcacaggacattcgatccacacttcctgagggttccctgctggaagatcactctgtttgtgatcgtacccgtactggggcctctcgtagctctgatcatatgttacaattggctgcacagaagactggcagggcaatttctggaggagttacgaaatcctttttag

SEQ ID NO: 264120 - DNA, 744 bp, Artificial Sequence
  derived and/or modified sequence
atggccagcctgagccggcccagcctgcccagctgcctgtgcagcttccttcttctgcttttgttacaggtcagctcaagctatgccggtcagttccgggtgatcggtcctaggcatcccatccgagctcttgttggagacgaagtcgagcttccttgtagaatctcacctggcaagaatgccacgggaatggaggtggggtggtatcggcctcctttctcacgggttgtgcatctgtaccgcaatggaaaggatcaagacggagatcaggcgccagaatatcgtggccgaacggaacttttaaaagatgccatcggggagggaaaggtgactctcagaatccgcaacgtgcgattctccgatgagggaggctttacctgcttcttcagggatcatagctaccaggaggaggccgcaatggaactgaaagtggaggaccccttttattgggtgagtccaggcgtgctagttctgctggccgtccttccagtgcttcttctgcaaatcaccgtgggactggtgtttctgtgcctgcaatataggttgcgaggtaagctgcgagcagagatcgagaatctgcatcgcacatttgacccacactttctccgcgtgccttgctggaaaattaccctgtttgttatagtcccagtgctcggacccttggtggctttgatcatttgctacaactggctgcatcgcagactggcaggtcagttcctggaagagctgcgcaatcctttctag

SEQ ID NO: 264121 - DNA, 744 bp, Artificial Sequence
  derived and/or modified sequence
atggccagcctgagccggcccagcctgcccagctgcctgtgcagctttctgctgctcctgctgcttcaggtttctagcagttacgcaggtcagtttagggtaatcggccctcgtcatccgataagagcgctggtaggtgacgaagtcgagctgccatgcagaatcagtccggggaaaaacgcaacaggaatggaggtcggatggtacagaccccccttttcccgggtcgtgcacttgtaccggaatggaaaagatcaggacggagatcaggcccccgaatatcgcggacggacagagctgttaaaggatgcaattggcgaaggaaaggtaactcttaggattcggaacgtgcgcttctctgacgagggcgggttcacatgcttctttagagatcatagttaccaggaagaagccgccatggaattgaaagttgaagatccgttctattgggtgagcccaggagtcctggtgctgctggccgtcctgcctgtgctcctccttcagataacagtgggactcgtgttcctgtgtttgcagtaccgactgcgcgggaaactgagggccgagatcgagaacctacaccgtaccttcgatccccacttcctccgcgtgccgtgctggaagatcaccttatttgtcattgtccctgtgttgggcccactggttgccctaattatctgttacaattggctacataggcgtctggcgggccaattcctggaggaactcaggaatccgttctag

SEQ ID NO: 264122 - DNA, 759 bp, Artificial Sequence
  derived and/or modified sequence
atggccagcctgagccggcccagcctgcccagctgcctgtgcagctttctgctgctgctgctcctccaggtgtcttcctcctacgctggccagtttcgcgtcattggtcctaggcatcctatacgcgcattagttggggacgaagtcgaactgccttgtcggatcagtccaggaaaaaatgccacgggcatggaggtcggctggtaccgaccccccttcagccgagtggtgcacctgtataggaacggaaaagatcaggatggagatcaggcccctgagtaccgaggacggactgaattgctgaaagatgctatcggcgagggaaaagtcaccctgagaatacgcaacgtgcgttttagtgatgagggagggtttacttgtttttttcgggaccactcatatcaggaggaggcggctatggagctgaaagtggaagaccctttctattgggtgtctccaggggttctggtgttgctggctgtcctacccgttctcttgctgcaaatcaccgtagggttagtcttcctgtgcctgcagtatcgtttgcgggggaaactgcgagcggagatcgagaacctgcataggacatttgacccccacttccttcgggtcccatgttggaagattaccctattcgttattgttccggtgctcggaccactcgtcgccttaatcatctgctataattggctccaccgacggctggccggacagtttctggaggaactcctattccatctcgaggctctgagcggttag

SEQ ID NO: 264123 - DNA, 744 bp, Artificial Sequence
  derived and/or modified sequence
atggccagcctgagccggcccagcctgcccagctgcctgtgcagctttcttttactcctgctcctgcaagttagctcgtcttatgctgggcaattcagggttatcggcccacgtcatccaattcgggcacttgttggcgatgaagtagagttgccttgcaggattagccctgggaagaatgcgaccggcatggaggttggctggtaccgcccaccattttcacgcgtggtccacctctaccgtaacggaaaggaccaagatggcgaccaagcgcccgaatatcgtggtcggacggagctgctcaaagatgctatcggtgagggaaaggtgactctgagaatcagaaacgtgaggttttctgacgagggcgggtttacctgtttttttagggaccacagttatcaggaggaagctgcaatggagctgaaggttgaggacccattttattgggtgagcccaggagtgttggtgctgctagccgtcctccccgttctgttgttacagatcacagtagggctggtgttcctttgcctacagtaccggctgagagggaagttgcgggctgaaatcgaaaatctccatcgtaccttcgatcctcatttcttgcgcgtaccgtgctggaagatcacactcttcgtgattgttcccgtgctggggcccctcgtggcactcattatttgctataactggctgcaccggcgtctggccggtcagtttttagaggagctgcggaaccccttttag

SEQ ID NO: 264124 - DNA, 759 bp, Artificial Sequence
  derived and/or modified sequence
atggccagcctgagccggcccagcctgcccagctgcctgtgcagcttcctgctgctgctgctgctccaggtgagctcttcatatgcaggacagttcagagtgattgggccaagacacccgattcgggcgctggtgggcgatgaggttgaactgccatgtcgtatctctccggggaaaaacgcaaccgggatggaggtggggtggtaccgtccccctttttctcgggtggtacacttgtatagaaatggtaaggatcaggatggcgatcaggcgcccgagtaccggggacggacagagctccttaaagatgctattggcgaaggaaaggtgaccctgcgcatccggaatgtcagatttagcgacgagggcggctttacatgcttcttccgtgaccacagctatcaggaagaggccgcaatggagctaaaagtagaggacccattttactgggtgtcgcctggagtgttggttctgttggccgtgttacccgttctgctcctgcaaatcacagtgggcctcgttttcctgtgccttcagtatcgcctgaggggtaaactgagagccgagattgagaacctccacaggacgttcgacccgcactttctgagggtgccctgttggaagatcactctgtttgttatcgtgccagtcctgggtccgctggtagccctgataatatgttacaattggcttcaccgcagactggcaggacaattcttggaggaactcctgtttcatttggaggccttgagcggttag

SEQ ID NO: 264125 - DNA, 759 bp, Artificial Sequence
  derived and/or modified sequence
atggccagcctgagccggcccagcctgcccagctgcctgtgcagcttccttcttttgctcctgttgcaggtcagtagtagctatgcaggacagttccgagttataggcccacggcaccccattcgtgccctggtgggagacgaggtcgagctgccctgcaggatcagccccggcaagaatgcaacagggatggaggtgggatggtataggcctccttttagtagagttgtccacctgtataggaatgggaaagaccaagatggggatcaggcccccgagtatcgcggcagaacagaactacttaaagatgctataggtgaaggaaaggtaactctcagaattcggaatgtgcgcttttcagatgagggcggcttcacctgttttttccgagatcacagctatcaggaggaggcagcaatggaactgaaggttgaagacccattctactgggtctcaccaggggtgctcgtcctgctggcagtgttacccgtgctacttctgcagatcacagtcgggctcgtattcctatgtctgcagtatcgccttcgagggaagctccgtgctgagatcgagaatctgcatcgcacctttgaccctcacttcctgagggtgccctgttggaagattactctctttgtgatcgtgccagtgttggggccccttgtcgcccttattatttgctacaattggctgcaccgacgtctagcaggccagttcctggaagaattgctgtttcacctggaggcgctctccggttag

SEQ ID NO: 264126 - DNA, 759 bp, Artificial Sequence
  derived and/or modified sequence
atggccagcctgagccggcccagcctgcccagctgcctgtgcagcttcttgttgctgttgctgctgcaggtgtcgagtagctatgccgggcagttccgggttattggaccacgccaccccatacgcgccctcgtaggtgatgaggtggagcttccgtgccgcattagccccggaaaaaatgccacaggcatggaagtggggtggtaccggccgccattttcccgagtggttcacttgtatcgcaacggaaaggaccaagatggtgaccaggcaccggaataccgcggacgaactgagctcctcaaagacgccatcggagaaggcaaggtcacattgcggattcgcaatgtgcgtttcagtgatgaaggtgggttcacttgtttctttcgggatcatagttatcaggaggaggcggctatggagttgaaagtggaggatcccttctattgggtgtcacctggggtgttggtactgctggctgtcctgcctgtccttctgctccagattacggtgggattggtgtttttgtgcttgcaatacaggttgagaggcaaactgcgggcagagatcgagaacctccacaggacatttgacccccattttttgcgggttccatgttggaaaatcaccctgtttgtgatcgttcctgttctcggtccactggttgcgctgattatctgttacaactggcttcatcgccgacttgcaggccagttcctggaagagctgctcttccatttggaggctcttagcggctag

SEQ ID NO: 264127 - DNA, 744 bp, Artificial Sequence
  derived and/or modified sequence
atggccagcctgagccggcccagcctgcccagctgcctgtgcagcttccttctgctcctccttttgcaggtgtctagttcatatgctggccagttccgcgtcataggtccccgccacccgattagagcactcgtcggggacgaggtagaactgccttgtcgaatttcacccggtaagaatgccaccggaatggaagtgggctggtacaggcctcccttttcacgcgtcgttcacttgtatcgcaatggcaaggatcaggacggtgaccaggcccccgaatacagaggacggaccgaacttcttaaggatgcgattggggaaggaaaggtcactcttaggattcgaaatgtgcgattttccgatgaggggggattcacgtgtttcttcagagatcactcataccaggaggaggccgcgatggaactcaaggttgaggatccattctactgggtcagtcctggtgtattggtcctgttggccgtgttacccgtgttgctgctgcagataacagtcgggttagttttcctgtgtctgcagtatcggttgaggggaaagctgagagcagaaattgagaacctgcaccgcaccttcgatccgcactttttacgggtgccttgctggaaaataaccctgtttgtgattgtgccggtcttggggcctctagttgcactgatcatctgctataactggctgcacagacgccttgctggccagtttctggaagagctccgtaatccgttctag

SEQ ID NO: 264128 - DNA, 744 bp, Artificial Sequence
  derived and/or modified sequence
atggccagcctgagccggcccagcctgcccagctgcctgtgcagcttcctgcttttactcttgcttcaggtatcctcgtcatatgccggtcagtttagagtgatcggtccacgccatccaatccgcgctttagtgggcgatgaagtcgaactgccctgtagaatatctcccggcaagaacgccactggaatggaggtcggctggtaccgcccacctttctctcgggttgtccatctctatcgtaacggcaaagatcaggatggcgaccaggcgccagaatatcgaggacgaacagaattgcttaaggacgccatcggagagggtaaagtgactctgcgcatacggaacgtgagattctctgatgaaggggggttcacgtgtttctttcgagaccattcttatcaggaggaagcagccatggagctcaaggtggaggatccattctactgggtgagccccggcgttctggtcctgctggctgtgctacccgtccttctcctacagatcacggtgggactggtgttcctgtgtctccagtataggctcagaggaaaattgagagccgaaatcgaaaacttacacaggacatttgacccacacttcctccgcgtgccttgttggaaaatcacactttttgtcatagttcctgtgctggggccactggttgcccttatcatctgttataattggctgcaccgccgtcttgccggtcagtttctggaggaactgaggaatccattttag

SEQ ID NO: 264129 - DNA, 759 bp, Artificial Sequence
  derived and/or modified sequence
atggccagcctgagccggcccagcctgcccagctgcctgtgcagctttttattgttactgcttctgcaggtatcctcctcatatgcgggccaatttagagtgatcgggccgagacaccctattagagccctggttggagacgaggtggagctgccttgccggatatcaccaggcaaaaacgccactggcatggaggtaggctggtatagaccacctttctcacgtgtggtgcacctgtatagaaatgggaaagaccaggatggagaccaggcccccgagtaccgtggtcgaactgagctcctgaaggacgctataggtgaaggaaaagtgaccctacgtatcaggaacgtcagattcagcgatgaaggaggtttcacttgtttttttcgcgaccacagctaccaggaagaggctgcgatggaactcaaggtcgaggaccccttctattgggtgagcccgggcgttttggttctcctagctgtattgcctgtgctgctgctgcagatcacagtaggtctggtttttctgtgcctccagtataggctccgagggaaacttagggccgaaatcgaaaatctgcacagaacttttgatccccactttctgagagtcccatgttggaagatcaccttgtttgttatcgtgcctgtcctaggaccgctggtggccctgatcatctgctacaattggctgcatagacgcctggcaggccagtttctcgaagagttgctctttcatctggaagcactctcaggctag

SEQ ID NO: 264130 - DNA, 759 bp, Artificial Sequence
  derived and/or modified sequence
atggccagcctgagccggcccagcctgcccagctgcctgtgcagcttcctgctcctgctgctgctgcaggtcagctcttcatatgcaggacagtttcgagtgatcggccctagacatcccatccgcgccctcgtgggggacgaagtggaactgccttgccgcatatcccccggaaaaaatgctaccggaatggaggtgggatggtatcggccaccattttcacgcgtggttcacttgtacaggaacggcaaagaccaggacggtgaccaggcccctgagtaccggggacggacggagctgctcaaagatgcgataggagaggggaaggtcacactgcgaatccggaatgtgagattcagtgatgagggagggtttacgtgctttttccgggatcacagctatcaggaagaggcggcaatggaactgaaagtggaggatcctttttactgggtgagcccaggtgtcttggtactcctagccgtgttgcctgtcctgctccttcagatcactgtagggttagtcttcctctgcttgcagtataggctcaggggcaaactaagagccgaaattgaaaacctacatagaaccttcgatccgcattttcttcgagtcccctgctggaagattacccttttcgttatcgtgcccgtgctgggccctctggttgcactgattatctgctataactggttgcacaggaggctggccgggcaattcctggaagaactcttgtttcacctagaggcactgtccggatag

SEQ ID NO: 264131 - DNA, 744 bp, Artificial Sequence
  derived and/or modified sequence
atggccagcctgagccggcccagcctgcccagctgcctgtgcagcttcttgttgctcctgctcctgcaggtgtcttccagttacgctgggcagttccgagttattggcccgcggcaccccatccgcgcactcgtcggagacgaagtggaattgccatgtcgaattagccccggcaaaaacgctaccggcatggaggttggatggtaccgcccacctttttctagggtggtccacctgtatcgaaacgggaaagatcaggacggtgaccaggcccccgagtatcgcggtagaaccgagctcctgaaagatgccatcggggagggcaaggtgacactgcgcatccgcaacgtgcgcttttcagacgaagggggcttcacatgcttcttccgcgaccactcctatcaagaagaggctgccatggaactcaaggtagaagaccctttttattgggtctcacccggagtgttggtgctgctggccgtgcttccagtgctgttgttgcaaatcacggtaggcctagtatttctgtgcctccagtaccgcttacgagggaaactacgggcggaaattgaaaacttgcataggacattcgatcctcatttcctgagagtgccctgctggaagataaccctttttgtcatcgttccagtgctcggacccctcgtggcactgattatttgttacaactggttgcacaggcgcctggcagggcaatttctggaggaactcaggaatccattctag

SEQ ID NO: 264132 - DNA, 759 bp, Artificial Sequence
  derived and/or modified sequence
atggccagcctgagccggcccagcctgcccagctgcctgtgcagcttcctcttgctactacttctccaggtatcttcctcctatgccggccagtttcgagtgattgggccacggcatcccattcgcgccctggtgggggacgaagttgaactgccttgtagaattagcccaggaaaaaacgcgactgggatggaagtggggtggtaccggccacccttctccagagtcgtacatctgtaccggaatggtaaggaccaagacggagatcaggcacctgaatacagagggaggaccgaattactgaaggatgctattggagaaggcaaagtgactctgaggattaggaacgtccggttcagtgatgaggggggatttacttgcttcttccgagaccacagctaccaggaggaagcagccatggaactcaaagtagaagaccccttttattgggtgtctccaggcgtgctggtgttacttgcagtgttgccagtactcctcttgcaaatcacactgggcctcgtgtttctctgcctccaataccgactgcgtggtaagctccgagccgagattgaaaacttacacagaacttttgatccccacttcctgcgcgttccatgttggaaaatcaccctattcgttatcgtccctgtcctggggcctctggtagccctgattatttgttataattggctccataggcgtttggctggccagttcttagaggagctgttgtttcacctcgaggcactgtccgggtag

SEQ ID NO: 264133 - DNA, 744 bp, Artificial Sequence
  derived and/or modified sequence
atggccagcctgagccggcccagcctgcccagctgcctgtgcagcttcttgctgctgctcctgttgcaggtttcttccagctatgccgggcagttccgggtgatcggtccccgacatccaatccgggcactggttggtgacgaggtcgaattgccttgtcggatctcccctgggaaaaacgcaactggaatggaggtgggatggtatagacctccctttagcagagtggtacacctctacagaaatgggaaagaccaggacggcgaccaggcccctgagtataggggaaggaccgaacttctgaaagacgccatcggcgaaggaaaggtaactttgcgaatcagaaacgttcggtttagcgacgaaggaggctttacttgtttttttagggatcacagttaccaggaagaggccgctatggaactcaaggtggaagatccattttattgggtctctcccggcgtgctcgtgttattagctgtgctgccggtgctcctccttcagattaccctcggtttagtttttctatgcctacagtaccgtcttaggggaaagctccgcgccgagatagaaaacctccacaggaccttcgatcctcactttctcagagttccgtgctggaagatcactcttttcgtgatcgtccctgtgctcgggccccttgttgccctgatcatctgctacaattggctgcaccggcgcctggctggtcaattccttgaggagctgcgaaatccattttag

SEQ ID NO: 264134 - DNA, 534 bp, Artificial Sequence
  derived and/or modified sequence
atgagccacatcagctgggaggagcggtaccggaacggcaaggaccaagacggggaccaggctccggaatataggggtcgtacagaactgcttaaggacgccatcggagagggaaaggtgacactgcgcatcaggaacgttaggttctctgacgagggcggattcacctgctttttcagagaccattcctaccaggaagaggcagcaatggagctcaaggtggaggatcccttttattgggtcagcccaggagtgctcgtccttctcgctgtgctaccggtgctgctcctccagattactgtaggtctggtcttcctgtgccttcagtaccggctgcgtggaaagctccgggccgagatagaaaatctgcatcggacattcgacccccattttttgcgagtgccttgctggaaaatcaccctgtttgtgattgtgccagtcctcggtcctttagttgctttgattatttgctacaattggttgcacagaagactggcgggccaattcctcgaggagctgcggaaccctttttag

SEQ ID NO: 264135 - DNA, 534 bp, Artificial Sequence
  derived and/or modified sequence
atgagccacatcagctgggaggagcggtaccggaacggcaaggaccaggatggagatcaagctcccgagtatagggggcggaccgagctgctgaaggacgctattggggagggaaaggtcaccctgaggattcgcaatgtgcggttctccgatgaagggggctttacctgcttcttcagggaccattcctaccaggaggaagctgccatggagctgaaagtggaagaccccttctattgggtgtcccctggtgtgttggtcctcctggcggtactccctgtgttactgctgcagatcaccgtagggctcgtgtttctttgcctccagtaccgccttcgagggaagctacgtgccgaaattgagaatttacaccgtacatttgatccgcacttcctgagagtgccatgttggaagattacactcttcgtgatcgtgcctgttctgggcccgttggtagcgcttataatctgttacaattggttgcatagacgtctggccgggcaatttctagaggagcttagaaatccattctag

SEQ ID NO: 264136 - DNA, 534 bp, Artificial Sequence
  derived and/or modified sequence
atgagccacatcagctgggaggagcggtaccggaacggcaaggaccaagacggtgatcaggctcccgaatatcgtgggagaactgaactgctcaaagacgccattggggaaggaaaagtgaccttgcgaattcgcaacgtgcggttctccgacgagggagggttcacatgcttcttccgcgatcacagttaccaggaggaagctgcaatggagttaaaagtagaagatcctttttactgggtgagccctggggtgttggtgctgctcgctgtactgcccgttcttctcctccagattactgtggggctggtctttctgtgcttgcaatacagactgagagggaagctgcgcgcagagatcgaaaacttgcaccgtacgttcgatccccactttcttcgggtcccttgttggaagatcacgctcttcgtgattgtgccagtcctcggacccttggttgcgctgatcatctgttataattggctgcacagacgcctcgccggtcagttcctggaggagctgcgtaatccattttag

SEQ ID NO: 264137 - DNA, 534 bp, Artificial Sequence
  derived and/or modified sequence
atgagccacatcagctgggaggagcggtaccggaacggcaaggaccaggacggtgatcaggctcctgaatataggggccgcactgaactcctgaaggacgccataggagagggcaaggtgactctcagaatccggaacgtacggttttctgatgaaggcggatttacgtgtttcttcagggaccactcttaccaagaagaggcagccatggagttgaaagtcgaggatcctttttactgggtgagcccaggggtgctggtccttttagcagtgctacccgtgctcctgcttcaaatcactgttggactagtcttcttgtgtctccagtataggctgagaggcaagctccgggcggaaatcgaaaacctccacaggacgttcgacccccatttcctccgggtaccgtgttggaaaatcacgctctttgtcatcgtgcctgtccttggcccactcgttgcccttattatctgctacaattggcttcaccgcagattggcaggccagtttttggaggagctgaggaatccattttag

SEQ ID NO: 264138 - DNA, 534 bp, Artificial Sequence
  derived and/or modified sequence
atgagccacatcagctgggaggagcggtaccggaacggcaaggaccaagacggagaccaggcacccgaatatcgtggaagaacagagctgcttaaagatgcaatcggggagggaaaagtgactctgcgcatcagaaatgtacgattcagcgatgagggaggatttacttgttttttcagggaccacagctaccaggaggaggcggccatggagctcaaggtggaagaccctttctattgggtatctcccggtgtgctcgttctgctggccgtattgcctgttctcctgctgcagataacactgggattggttttcctttgtctacagtatcggctaagaggaaaattacgggcagaaattgaaaacctgcatcggacctttgacccccacttcttacgtgttccttgttggaagatcaccctctttgtgattgtccctgtcctggggcccctggttgcactgattatctgctacaattggctgcaccggaggttagctggccagttcctggaggaactccgtaatccattctag

SEQ ID NO: 264139 - DNA, 534 bp, Artificial Sequence
  derived and/or modified sequence
atgagccacatcagctgggaggagcggtaccggaacggcaaggaccaagacggggaccaggcaccagaatatcggggcaggacggaactgctgaaggacgctatcggtgaggggaaggtaaccctgcgcatcagaaacgtcagatttagcgacgaggggggatttacatgcttctttcgagatcactcatatcaagaggaagctgccatggaactgaaggtggaagatcccttctactgggtcagccccggagtgcttgtgctgttggcggtgctccccgtgttactccttcagatcaccgtcggactggtgtttttgtgcctgcagtacaggctgcgaggtaaattgagggccgaaattgaaaaccttcatcggacctttgacccccacttcctacgggtgccctgctggaagatcacactattcgtgatcgtgcctgtgcttggtcccctcgtggctctgataatctgctacaactggctgcatcggaggttggccggccagttcctggaggagctgagaaacccattctag

SEQ ID NO: 264140 - DNA, 534 bp, Artificial Sequence
  derived and/or modified sequence
atgagccacatcagctgggaggagcggtaccggaacggcaaggaccaggacggggatcaggcgcccgagtacagggggaggaccgagctgctcaaggacgcaatcggggaaggcaaggtcaccttgcggattcggaatgttcggttcagtgatgaggggggatttacatgtttcttccgcgaccactcatatcaggaagaagcagccatggaactgaaggtcgaagaccctttctactgggtgagtccaggtgtgttggttctcctcgccgtccttccagttttgcttttgcagattacagtgggtctggtttttctgtgtctgcaataccggctgaggggaaagctcagggccgaaattgagaatctccaccgcacatttgaccctcacttcctgcgtgtgccctgctggaaaattacactgttcgtgattgtccctgttctgggtccattagtcgccctaattatatgttacaactggctgcacaggcgcctcgccgggcaattcttagaggagctgcggaaccccttctag

SEQ ID NO: 264141 - DNA, 759 bp, Artificial Sequence
  derived and/or modified sequence
atggcttcgttgtccagaccttccctgccctcctgtctttgttcgtttctgctactgttgcttctccaggtgtcaagtagctatgcaggccagttccgagtaattggcccacgacatcctatacgtgctcttgtcggggacgaggttgagttgccttgccgcatttccccgggaaaaaacgccacgggtatggaggtcggatggtatcgaccacctttcagtcgagtggtgcatctctaccgtaacggtaaagatcaggacggggaccaggctcctgagtatcgcggacggaccgaactgctgaaggatgccatcggggaggggaaagtgactctgcgaatccgcaacgtgaggttctcagacgagggtggcttcacatgctttttcagggatcatagctatcaggaggaggccgcaatggaactcaaggttgaggaccctttttattgggttagccccggagttctggtactgctagcagtattgcctgtgctgttactgcagataacagtaggactgatatttctttgccttcagtaccggctgcggggaaaattgcgagccgagattgagaacctgcaccggaccttcgacccacattttctcagggtgccctgctggaaaataacactctttgtgattgttcctgtccttggtccattggtagcactgattatatgttacaactggctgcaccggagactcgcgggacagtttctcgaggagctactgttccatctggaggccctgagcgggtag

SEQ ID NO: 264142 - DNA, 744 bp, Artificial Sequence
  derived and/or modified sequence
atggctagcctgagccggccttccttgccgagttgtttgtgctcatttctcctgctgctgctcctccaggtctcgagctcttacgcgggacagtttcgggtgataggtccccgacacccaattcgcgcactggtcggggacgaagtggaactgccatgccgcatttcacccggaaagaatgcgaccggcatggaggttggatggtatcgcccacctttctctagggttgtgcatctttacagaaacgggaaggaccaggatggcgaccaggccccagaatacagaggccgtacagaactgttaaaagacgctatcggcgaaggtaaagtgactctgcgcatccggaacgtcagatttagcgacgaaggcggatttacgtgctttttcagagatcacagctaccaagaggaagcagccatggaacttaaagtggaagatcccttttattgggttagcccgggagtgctggtgcttttggcagtgctacccgtgctgctccttcaaattactgtagggttgatattcctgtgcctccagtaccgcttaaggggcaagctccgggctgaaattgaaaacctgcatcgaaccttcgaccctcactttctgagagttccttgctggaaaattacccttttcgtcattgtgcccgtcctcggcccactggtggctttgattatctgctacaattggctgcacagaagactggcgggtcagtttctcgaggaactacgcaatcctttttag

SEQ ID NO: 264143 - DNA, 744 bp, Artificial Sequence
  derived and/or modified sequence
atggccagtctgagccgccctagtctcccgtcgtgcctgtgctcattcctcctgttgctcctgctgcaagtctcaagttcatacgccggtcagtttcgagtgattgggccacggcaccccatcagggctttagtcggagacgaggtcgagctcccctgtaggatctctcctggcaagaacgcaaccggcatggaagtgggatggtatagacctcccttcagccgtgttgtccatttgtacagaaacggcaaggaccaggatggggaccaggctcctgaataccggggaaggacagagctcttgaaggacgcgatcggagagggtaaagtgactctgaggatccggaacgttagatttagcgatgaagggggtttcacttgcttctttcgcgatcactcctaccaggaggaagccgctatggagttaaaggtcgaggatcccttctactgggtctctcctggcgtgctcgtactgctggcggtgcttccagtgctgctcctacagatcacagtggggctcgtgttcctttgtctgcagtataggcttaggggaaaactccgcgctgaaattgaaaatttacatcgaaccttcgacccccattttctgagggtgccctgctggaagatcaccctatttgtcatcgtgccagtcttaggccctttggtggctttgatcatctgctacaattggctccataggcgcctagcaggacaatttttggaggagctgcgcaacccattctag

SEQ ID NO: 264144 - DNA, 744 bp, Artificial Sequence
  derived and/or modified sequence
atggcttcattgtctcgccctagcctccccagctgtctatgctctttcctgctgttgctgctcctgcaggtctcaagctcctacgccggacagttcagggtcatcggtcccaggcatcccatcagagcgctcgtgggggacgaggtggagctcccctgtaggatcagtccgggtaaaaatgccacagggatggaggtaggatggtataggccacctttcagtagagtcgtgcacctgtatcgaaatggcaaggatcaggatggtgaccaagcccctgagtatagagggagaacagagctcctgaaagacgccataggtgaaggcaaagtgacacttagaatccggaatgtaagattctccgatgagggcggttttacctgcttctttagagaccactcctatcaggaggaggcagccatggaactgaaggtcgaggaccctttctactgggtatctccaggggttttagtgctgctggctgtcttaccagtcttgcttttgcagatcacagtgggcctggtgttcttgtgcctgcagtacagactgcgaggaaagctgcgtgccgagatcgaaaatcttcaccggactttcgacccccatttcctgcgcgtgccctgctggaaaatcactctgtttgtaattgtccccgtattgggccctctggtggccctgatcatatgttataattggctgcatcggaggttagctggccagttccttgaggaactaagaaatccattttag

SEQ ID NO: 264145 - DNA, 759 bp, Artificial Sequence
  derived and/or modified sequence
atggccagcctttctcgacctagtttgcctagttgcctctgcagtttcctgctcttactcctgttgcaagtgtccagttcttatgccggtcagttccgcgtgattggacccagacatccgataagggccttggtgggggacgaggtggagctcccctgtaggatctctccaggcaagaacgccaccggaatggaggtgggatggtaccggccaccattttcccgcgttgtacacctctatcggaacggaaaggatcaggatggagatcaggccccagaataccgtggacggaccgaattgctgaaagacgctatcggcgaaggcaaggtcacattaagaatacgcaacgtgagattctcagacgaagggggttttacttgcttctttagggatcacagctaccaggaggaggcagcaatggagctaaaagtggaagaccccttctattgggtgtccccgggtgttcttgtgctgttggccgttttgcctgtcttgctgttacagatcacagttggcttagtgtttttatgcctgcagtatcgactgcggggaaaacttagagcggaaatagagaatctgcacagaacattcgatcctcacttcttgcgtgttccctgctggaaaattaccttgtttgtcattgtccccgtccttggacctctggttgcgctcattatctgctataactggctgcacaggcggttggcaggacagttcctcgaggagcttctgtttcatctagaagccctgagcggatag

SEQ ID NO: 264146 - DNA, 744 bp, Artificial Sequence
  derived and/or modified sequence
atggcatccttgtcccggcctagtctgccctcttgtctatgcagcttcctacttctgctccttctgcaggtttcctcttcatatgccggacagtttagggtgataggtccaaggcatcccattagagctctggtcggcgatgaagtcgagcttccttgccgcatctcgcctggaaagaacgccacggggatggaggtggggtggtacagacccccattttctcgggtggtacacctgtaccgtaacggaaaagatcaggatggcgatcaagcacctgaataccgaggcaggacagaactcctgaaggacgccattggagaaggcaaggtcacactgcgcatcaggaacgtgaggttcagtgatgaggggggatttacttgtttcttccgggaccatagctatcaggaggaagctgccatggagctaaaagtagaggatcctttctattgggttagcccaggcgtgttggtgttgctcgcggttcttcccgtactgctgctacagatcacagtcggactggtgttcctttgtctccagtatcgcctacggggaaagctgagagccgagatcgagaacctccacagaacattcgatcctcattttctgagagtgccatgctggaagatcactttgttcgtaattgtgcccgtcttgggccctctagttgccctcatcatatgctataattggctccacagaagactggctggacagttcttggaggaattgagaaaccccttctag

SEQ ID NO: 264147 - DNA, 759 bp, Artificial Sequence
  derived and/or modified sequence
atggcttctctgtccagacctagtctgccttcatgtctgtgctcattccttctgttactcctactccaggtctcctcttcatatgccggacagttccgagtcatcgggcctagacatccaatccgagcactggtaggtgacgaagtggagctcccttgccgaataagtccagggaaaaacgccaccggaatggaggtgggctggtaccgcccacctttctcacgagttgttcatctgtataggaatgggaaagatcaggacggagatcaggctcctgaataccggggacggacagagcttctcaaagacgctatcggggagggtaaggttactctgcggatacggaacgttcgtttttctgatgaaggcggattcacctgtttctttcgcgatcacagctatcaggaagaagccgctatggaactaaaagtcgaagatccgttttattgggtcagccccggtgtcctggtcctcctggctgtgctgcccgttctgctgctacagatcacagttggactggtattcctgtgtctacagtacaggttacggggaaagcttagagctgagattgaaaacctgcacaggacattcgacccgcactttttaagagtaccctgctggaagatcaccctgtttgtgatcgtccccgtgctcggtcctttggttgctctcattatctgctataactggctgcatcgcaggttggctggtcaattcttggaggagctgctgtttcacttagaagctctctctggctag

SEQ ID NO: 264148 - DNA, 759 bp, Artificial Sequence
  derived and/or modified sequence
atggcaagcctgagtcggccttctctgccatcatgtttgtgttcttttctactgctccttctcttacaggtgtcaagcagctacgcaggccagttccgcgtaatcggtccacggcaccctatccgggcactggtgggggacgaagtggagctgccttgtagaattagtccaggaaaaaatgccacagggatggaggtcgggtggtataggcctccattttcgagggtggtgcatctgtataggaacgggaaagatcaggatggcgaccaggcccctgagtacaggggcaggactgaactgctgaaggatgctattggcgagggcaaggttactcttagaatccggaatgtccgcttttctgatgaaggcggatttacttgcttttttagagatcattcataccaagaggaagcagccatggagctaaaggtggaggaccctttctattgggtgagtccaggcgtgctagtgctactagccgtcctgcctgtccttttgctgcaaattaccgttggcttggtctttctttgtctacagtaccggttacgcggtaaactgagggcagagattgaaaaccttcacagaacatttgacccgcatttcctgcgggtgccttgctggaaaatcaccttgttcgtgatagtcccagtcctcggccctctggtcgctctaatcatatgttacaattggctacataggaggctggctgggcaattcctggaggaactgttgtttcacctcgaggcattgagcggctag

SEQ ID NO: 264149 - DNA, 759 bp, Artificial Sequence
  derived and/or modified sequence
atggccagcttgtctagaccatctttacctagttgcctgtgcagtttcctcttgctgctcttattgcaggtgagcagcagctacgctggacagtttcgagtaattggcccacgccatcccatcagggctttggtgggcgatgaggtagagctgccctgccggatctctccaggcaaaaacgccacaggaatggaggttggctggtatagacctcccttttcacgggtcgtgcacctgtaccggaatggaaaggatcaagatggtgatcaggcacccgagtaccgcggaagaaccgagttactcaaggacgcaattggggaaggtaaagtgacactcaggatccgaaatgtgcggttttccgacgagggtgggttcacctgcttcttccgtgaccacagctaccaagaggaagcggcaatggagctaaaggtcgaggacccattttattgggtgtctccaggcgttctcgtgctgctggcagtcttacccgtgctgctgctccagattaccgttggtctggtgttcctgtgcctccagtatagattgcgcggaaagcttcgggcagaaattgaaaatctgcacagaacatttgaccctcatttcctccgagtcccttgttggaagatcaccctgttcgtgattgtaccagtgctgggacctctcgttgctctcatcatatgttataactggcttcatagacgcctggcaggtcaattcctggaggagctgttgtttcacttagaggctcttagcggctag

SEQ ID NO: 264150 - DNA, 744 bp, Artificial Sequence
  derived and/or modified sequence
atggccagcctgtcccgaccatccctgcccagctgtctgtgttctttcctgttgcttctcctcttacaggtctcatcatcctacgcaggtcagtttcgagtgatcggcccacgccatcccattcgcgctttggttggcgacgaggtcgaattgccttgcaggatttccccaggaaagaatgccacaggaatggaagtgggctggtaccgaccccctttctcccgtgtggtgcatctgtataggaacggcaaggaccaggatggggatcaggcaccagagtacagaggcaggacggagctgcttaaggacgccataggggaaggcaaggtcaccctcaggatcaggaatgtgcggtttagtgacgaaggtgggtttacctgctttttcagggaccactcatatcaagaggaggctgcaatggaactgaaggtcgaggatccattttattgggtttcccctggagtgttggtactcttggccgtattgcccgtactcctgctgcagattacggtcggactggtctttctctgtctgcagtacagactccggggtaagctgagggccgaaattgaaaatctgcaccggacctttgacccccacttcctgagagtgccctgttggaagattactttgttcgttattgtgcccgtccttggacctttagtggcccttatcatctgctacaattggctgcatagaagacttgccggacagttcctggaggagctgcgtaaccctttttag

SEQ ID NO: 264151 - DNA, 744 bp, Artificial Sequence
  derived and/or modified sequence
atggcatccctgtcgcgaccctctctgccctcctgcctgtgttcctttctcctcttactgcttcttcaagtatcttcaagctacgctgggcagtttagggtaattgggccaaggcaccccatccgggcactcgtgggagacgaagtcgaactaccgtgtaggatcagtccaggcaagaacgccaccgggatggaggtggggtggtaccgaccccctttttcacgggttgttcacttatatagaaatggaaaagaccaagacggcgaccaggcaccagaatataggggcagaacagagctgctgaaggacgcaataggggaggggaaagtaactctgaggatccgaaacgtccggttttctgacgagggcggattcacttgctttttccgggaccattcatatcaggaagaggccgctatggagctgaaagtggaagatccgttctattgggtaagccccggagtgcttgtgctgttggctgtgctgccagttctgctccttcagattactgtgggcttggtattcctgtgcttacagtaccgcctgcgaggaaagcttcgggcagaaatcgagaatttacaccgcaccttcgaccctcacttcctcagagtgccttgctggaagattaccctcttcgttatcgttccagttttagggcctctggtggctttaattatatgctacaattggcttcatagaagactggcaggccagtttcttgaggagttaaggaaccctttctag

SEQ ID NO: 264152 - DNA, 759 bp, Artificial Sequence
  derived and/or modified sequence
atggcaagcctctcccggccttcattgccgtcttgtttgtgcagtttcctgctcctactgttgcttcaggtatcatcaagctatgcaggacagttccgcgtcatcgggcctaggcatccaatcagagctctggtcggggatgaggtcgaattaccatgtaggatcagccctggtaaaaacgccactggcatggaagtaggctggtaccgccctccgttcagcagggtggtgcatctataccgcaacggaaaagaccaggatggggatcaggctcctgaatatcggggtcggaccgagctgttgaaggacgccattggagaggggaaggtcaccctgaggattcgcaatgtacgtttctctgacgagggcggattcacctgcttctttagggatcattcatatcaggaggaggccgcaatggagctcaaagtggaggaccctttttattgggtctcacccggtgtactggtacttttggccgttttgccagtgctgcttctgcagatcaccgtcggcctggttttcctttgtctgcaataccgtctgcgtggcaagctccgggcagaaatcgagaacctccataggacattcgacccccacttcctcagagtgccgtgctggaaaatcaccctgtttgttattgttcccgtcttgggtcccctcgtggccttgattatttgctataactggctccaccgcaggctagccggacagttcctggaggagcttctgtttcacttagaggccttgtccgggtag

SEQ ID NO: 264153 - DNA, 759 bp, Artificial Sequence
  derived and/or modified sequence
atggcatccctgagccgccctagcctgccaagttgcctgtgctcattcctcctcctgttactactgcaggtttctagcagttacgctggccagttccgagttataggtcccagacacccaatccgagcactggtgggcgatgaagtagaacttccatgtcggatctcgccgggaaagaacgctactggtatggaggtcggctggtatcgccctcccttttcccgcgtcgtgcacctttatagaaacgggaaggaccaggatggcgatcaagcaccggaataccgagggcgaacagaactgctgaaagacgctatcggggagggcaaagttacgttgaggatccggaacgtgcgcttttcagacgagggcggattcacatgttttttcagggaccattcatatcaggaggaggccgcaatggagctcaaagtggaagatccgttttattgggtgtctccgggtgtcctggtactcttggcagtgctcccagttctcctgctgcagattacggttgggctggtatttctctgcctgcagtacagactgcggggtaaattgcgtgccgaaatcgaaaacctgcaccggactttcgacccacacttcctccgcgttccctgctggaagataactctgtttgttatcgtgcccgttttgggacctctggttgcactgatcatatgttataactggctgcatagacgcttagctggccagttcctagaggagctactgttccaccttgaggctctgtccggctag

SEQ ID NO: 264154 - DNA, 744 bp, Artificial Sequence
  derived and/or modified sequence
atggcgagcctctcccgtccaagtctgccttcctgtctttgtagctttctccttttgttgctgctacaagtttcatcctcctatgccggtcagttcagagtcatcggcccaaggcaccctatcagggcacttgtgggcgatgaagtggaactcccatgcaggattagccccggtaagaatgccaccggcatggaggtgggttggtatagaccccctttttctcgcgtggtgcatttgtataggaatggcaaggatcaggacggcgaccaggctcccgagtatcgcggtagaacagagttactcaaggacgccatcggtgaaggtaaggtgacgctccgtattcgcaatgtccgctttagcgatgagggaggttttacttgcttcttccgtgatcattcttaccaggaagaggcagctatggagttgaaagtcgaagatcccttctactgggtgtcacccggtgtgttagtgttactcgccgtattaccggtcctcctgctccagatcactgtgggcctggtttttttgtgtttgcaatataggctgaggggtaaactgagagcagagatcgaaaacctgcaccgcaccttcgacccccactttctgcgggtcccttgctggaagataactttatttgtgatcgtgcctgttttgggcccactggtcgccttaattatttgttacaattggctgcatcgtcggctggcagggcagtttcttgaggaactgcggaatccgttctag

SEQ ID NO: 264155 - DNA, 759 bp, Artificial Sequence
  derived and/or modified sequence
atggccagcctctcccggcctagcttaccatcatgcctgtgctcattccttctacttctcctgcttcaagtctcatcttcatatgccggacagttccgtgtcattggcccaaggcatccgataagggcactcgtgggagacgaagtggaactgccatgtcgcatatcgccaggcaaaaacgctacgggcatggaagtgggctggtacagaccacccttctctcgcgttgtgcacttgtacagaaatggtaaggaccaggatggggaccaggcaccagagtaccgcggacgtacagagctacttaaggacgctatcggcgaagggaaggtaacactcaggatcaggaacgtacgattttccgatgaagggggattcacatgtttttttagggatcactcctaccaggaagaggccgcaatggagctgaaagtcgaggaccccttctattgggtgagcccaggagtcctcgtgttattggctgtgctcccggtgctgctgctgcagattaccctgggactcgtctttctctgcttacagtatcggctacggggtaagctgcgcgctgaaattgagaatctccatcgcacctttgatccccacttcttacgggtcccctgctggaaaatcacattgtttgtgatcgtgcccgtgctggggccacttgttgcgctgattatctgttacaactggctgcataggcggctggccggacagtttttggaggaacttttgttccacctggaggcactgtctggttag

SEQ ID NO: 264156 - DNA, 744 bp, Artificial Sequence
  derived and/or modified sequence
atggcctcactctcacgaccgagcttgcctagctgcttgtgctccttcctcctcctccttttgttgcaagtgtcttcttcttacgctggacagtttagagtcatcggtcccagacaccccatacgggctctcgtgggggatgaggtcgagctcccctgtcgtataagcccaggaaagaacgctacgggcatggaggtcggctggtatcggccacccttctctagagtggtgcacttatacagaaacgggaaggaccaggatggggaccaagcgccagagtaccggggtcgcaccgagttgcttaaagacgccatcggtgaagggaaggtgactcttcggatacgcaatgtgcgattctcggatgagggagggttcacttgctttttcagggatcatagctatcaggaggaggcggctatggagttgaaagtcgaggatcccttttactgggtgtctcccggagttttggtcctgcttgccgtcctgccagtgctgttgttgcagataacccttggcctcgtgtttctttgcctccagtacagacttcggggtaaactgagagccgagatagaaaatctgcatcgcacattcgacccacattttctgcgcgtgccttgttggaagattacactgttcgtgatagtccctgttctgggcccacttgtggcactgataatctgttacaattggctgcatcggagactggcaggccagttcctcgaagaactacggaatcccttttag

SEQ ID NO: 264157 - DNA, 534 bp, Artificial Sequence
  derived and/or modified sequence
atgtcacacatcagttgggaggaacgttaccggaacggcaaggatcaggatggcgaccaggcaccagagtataggggacgtaccgagctgctcaaggatgccattggtgagggtaaagtcacgcttcgtattaggaatgtaaggttctcagatgaggggggatttacttgcttttttagagaccactcctaccaggaggaagccgcaatggagcttaaagtggaggatccattttactgggttagtcccggtgtgctagtgttgcttgccgttttgccagtgctgcttctgcaaataactgttggtctggtcttcctttgcttgcagtataggcttcggggaaagctccgagcagaaatcgaaaatctgcacagaacttttgaccctcattttctcagagtgccctgctggaagattacactatttgttattgtgccggttctaggccctttagtggcgttgatcatttgttataactggttacacaggcggctggcaggtcaattcctggaagagttgcgaaatccattttag

SEQ ID NO: 264158 - DNA, 534 bp, Artificial Sequence
  derived and/or modified sequence
atgtcacacatttcctgggaggaacggtaccggaacggcaaagaccaggacggggatcaggctcctgagtatagaggaagaacagaattgttgaaggacgcaattggggaaggcaaagtgacactgcggatcagaaacgtgagattctcagatgaaggcggattcacatgcttttttcgagatcattcataccaggaggaggccgctatggaattaaaggtggaagatcccttctattgggtgtcacctggggtgcttgtcctgttggccgtgctgccagtcctgctgctgcagataacggtgggtctggtgttcctgtgtctccagtacaggctgcgcggaaaactacgagccgagattgagaatttgcatagaaccttcgacccgcacttcctgcgggtgccttgctggaaaataactctgttcgtcatcgtgcctgtgttgggaccccttgtggcgcttatcatctgctacaattggctgcatagacgcctggccggacagttcctggaggagctgcggaatcccttctag

SEQ ID NO: 264159 - DNA, 534 bp, Artificial Sequence
  derived and/or modified sequence
atgtctcatatcagttgggaggagaggtatcgcaacggtaaagatcaggacggtgatcaggcccctgaataccgcggaaggaccgagctcctgaaggacgccattggagaggggaaggtcacattgcgaatccgaaatgtgcgcttcagtgacgaggggggatttacttgcttttttcgtgaccactcataccaggaggaggccgcaatggagttgaaagtcgaggatccgttttactgggttagccctggcgtgttagtcctgcttgccgtgcttccggtgctcttgctacagattaccgttgggctggtctttttgtgcctgcagtacaggttgcggggaaagttaagagctgagatagaaaatctgcatcggacttttgatcctcacttcttgcgggtgccttgctggaaaattaccctgttcgtgattgtccccgtgctcggcccactggtcgctctaatcatatgctacaattggttgcacaggcgcctcgccggacaatttctggaggagcttagaaatccattctag

SEQ ID NO: 264160 - DNA, 534 bp, Artificial Sequence
  derived and/or modified sequence
atgtctcatatctcttgggaagaacgctacaggaacggcaaggaccaggacggagaccaggcacctgaatatcggggacgaactgagctgctcaaggacgctattggcgaaggtaaagtcaccctgcgtattcgcaatgtcaggttctccgacgagggaggttttacctgcttcttccgagatcatagctaccaggaggaagctgctatggagctcaaggtggaagacccattctattgggtgtcacctggcgtcctcgttttgctggctgtgctgcctgtccttcttctgcaaattacagttggtctcgttttcctttgcctgcagtaccgcctccgcggaaagttgcgcgctgagatcgagaaccttcaccgtaccttcgatcctcacttcctaagggtgccttgttggaagatcacactgtttgtgattgttcctgtgctaggacccttggtagcgttgattatttgctacaattggctgcatcgcaggctcgccggtcagtttctggaggagctacgtaatcccttttag

SEQ ID NO: 264161 - DNA, 534 bp, Artificial Sequence
  derived and/or modified sequence
atgtctcatatttcatgggaggagagatatcggaacgggaaagaccaggacggtgaccaagcacccgaatacagaggcagaactgagttactgaaggacgccataggggaaggtaaggtgaccttgcggatccggaacgttaggttttccgatgaggggggtttcacctgcttcttccgggatcactcctaccaggaggaggccgctatggagctgaaagtggaagacccgttctattgggtatccccgggagttctagtgttactggctgttcttccagtactcttgctacagattaccctgggactcgtgtttttgtgtctgcagtatcgcctacgcggaaaactccgagccgagatagagaacctccatcgcacatttgatcctcactttttacgtgtgccttgttggaaaatcacgctcttcgtgatcgtgccagtgctcggaccactcgtggcccttataatctgctataattggttgcataggcgcctggccggtcagttcctggaagagttgaggaacccattttag

SEQ ID NO: 264162 - DNA, 534 bp, Artificial Sequence
  derived and/or modified sequence
atgtcacatataagctgggaggagagatatagaaacggcaaagatcaagatggtgaccaggcccctgaatacaggggaaggacagaactgctcaaggatgccattggggagggaaaagtgactctacggattcggaatgtgcgcttcagcgatgagggcggatttacttgcttttttcgtgaccattcctaccaagaagaggctgctatggagcttaaggtcgaggaccctttttattgggtgagccctggcgtgctggtacttctggctgtgctgcccgtactcctacttcagatcacagtcgggctggtgtttttatgcctgcagtaccgcttgcggggtaaactgcgtgccgaaattgaaaacttgcatcggaccttcgaccctcacttcctgagggtgccttgctggaaaattactctttttgtgatcgtgcccgttttggggccactggtggcactgattatatgctataactggctccataggagattggcgggacagttccttgaggagctgaggaatccgttctag

SEQ ID NO: 264163 - DNA, 534 bp, Artificial Sequence
  derived and/or modified sequence
atgagccacattagttgggaggaacgctacaggaacggcaaagatcaggatggagatcaggccccagagtacagaggtagaactgaactgctaaaagacgcaatcggagagggaaaggtgacacttcggatcaggaacgtgcgattttccgacgagggcggttttacatgcttttttcgggatcattcttaccaggaagaggcagccatggagctcaaggtcgaggacccattctactgggtctctcctggcgttttggtgctgctggccgtcctacccgtcttgctgcttcagattaccgtgggcctggtctttctgtgcctccaataccggctacgtggcaagctgcgtgcagagattgagaacctgcataggacctttgacccccactttctcagggtgccttgttggaagataaccctttttgttattgtgccggtgttggggcctctcgtggctctgatcatctgctacaactggcttcacaggcgactggccggtcagttccttgaagagctaagaaaccctttttag

SEQ ID NO: 264164 - DNA, 759 bp, Artificial Sequence
  derived and/or modified sequence
atggccagcctgagcagacccagcctgcccagctgcctgtgcagcttcctgctgctgctgctgctgcaggtgagcagcagctacgccggccagttcagagtgatcggccccagacaccccatcagagccctggtgggcgacgaggtggagctgccctgcagaatcagccccggcaagaacgccaccggcatggaggtgggctggtacagaccccccttcagcagagtggtgcacctgtacagaaacggcaaggaccaggacggcgaccaggcccccgagtacagaggcagaaccgagctgctgaaggacgccatcggcgagggcaaggtgaccctgagaatcagaaacgtgagattcagcgacgagggcggcttcacctgcttcttcagagaccacagctaccaggaggaggccgccatggagctgaaggtggaggaccccttctactgggtgagccccggcgtgctggtgctgctggccgtgctgcccgtgctgctgctgcagatcaccgtgggcctgatcttcctgtgcctgcagtacagactgagaggcaagctgagagccgagatcgagaacctgcacagaaccttcgacccccacttcctgagagtgccctgctggaagatcaccctgttcgtgatcgtgcccgtgctgggccccctggtggccctgatcatctgctacaactggctgcacagaagactggccggccagttcctggaggagctgctgttccacctggaggccctgagcggctag

SEQ ID NO: 264165 - DNA, 744 bp, Artificial Sequence
  derived and/or modified sequence
atggccagcctgagcagacccagcctgcccagctgcctgtgcagcttcctgctgctgctgctgctgcaggtgagcagcagctacgccggccagttcagagtgatcggccccagacaccccatcagagccctggtgggcgacgaggtggagctgccctgcagaatcagccccggcaagaacgccaccggcatggaggtgggctggtacagaccccccttcagcagagtggtgcacctgtacagaaacggcaaggaccaggacggcgaccaggcccccgagtacagaggcagaaccgagctgctgaaggacgccatcggcgagggcaaggtgaccctgagaatcagaaacgtgagattcagcgacgagggcggcttcacctgcttcttcagagaccacagctaccaggaggaggccgccatggagctgaaggtggaggaccccttctactgggtgagccccggcgtgctggtgctgctggccgtgctgcccgtgctgctgctgcagatcaccgtgggcctgatcttcctgtgcctgcagtacagactgagaggcaagctgagagccgagatcgagaacctgcacagaaccttcgacccccacttcctgagagtgccctgctggaagatcaccctgttcgtgatcgtgcccgtgctgggccccctggtggccctgatcatctgctacaactggctgcacagaagactggccggccagttcctggaggagctgagaaaccccttctag

SEQ ID NO: 264166 - DNA, 744 bp, Artificial Sequence
  derived and/or modified sequence
atggccagcctgagcagacccagcctgcccagctgcctgtgcagcttcctgctgctgctgctgctgcaggtgagcagcagctacgccggccagttcagagtgatcggccccagacaccccatcagagccctggtgggcgacgaggtggagctgccctgcagaatcagccccggcaagaacgccaccggcatggaggtgggctggtacagaccccccttcagcagagtggtgcacctgtacagaaacggcaaggaccaggacggcgaccaggcccccgagtacagaggcagaaccgagctgctgaaggacgccatcggcgagggcaaggtgaccctgagaatcagaaacgtgagattcagcgacgagggcggcttcacctgcttcttcagagaccacagctaccaggaggaggccgccatggagctgaaggtggaggaccccttctactgggtgagccccggcgtgctggtgctgctggccgtgctgcccgtgctgctgctgcagatcaccgtgggcctggtgttcctgtgcctgcagtacagactgagaggcaagctgagagccgagatcgagaacctgcacagaaccttcgacccccacttcctgagagtgccctgctggaagatcaccctgttcgtgatcgtgcccgtgctgggccccctggtggccctgatcatctgctacaactggctgcacagaagactggccggccagttcctggaggagctgagaaaccccttctag

SEQ ID NO: 264167 - DNA, 759 bp, Artificial Sequence
  derived and/or modified sequence
atggccagcctgagcagacccagcctgcccagctgcctgtgcagcttcctgctgctgctgctgctgcaggtgagcagcagctacgccggccagttcagagtgatcggccccagacaccccatcagagccctggtgggcgacgaggtggagctgccctgcagaatcagccccggcaagaacgccaccggcatggaggtgggctggtacagaccccccttcagcagagtggtgcacctgtacagaaacggcaaggaccaggacggcgaccaggcccccgagtacagaggcagaaccgagctgctgaaggacgccatcggcgagggcaaggtgaccctgagaatcagaaacgtgagattcagcgacgagggcggcttcacctgcttcttcagagaccacagctaccaggaggaggccgccatggagctgaaggtggaggaccccttctactgggtgagccccggcgtgctggtgctgctggccgtgctgcccgtgctgctgctgcagatcaccgtgggcctggtgttcctgtgcctgcagtacagactgagaggcaagctgagagccgagatcgagaacctgcacagaaccttcgacccccacttcctgagagtgccctgctggaagatcaccctgttcgtgatcgtgcccgtgctgggccccctggtggccctgatcatctgctacaactggctgcacagaagactggccggccagttcctggaggagctgctgttccacctggaggccctgagcggctag

SEQ ID NO: 264168 - DNA, 759 bp, Artificial Sequence
  derived and/or modified sequence
atggccagcctgagcagacccagcctgcccagctgcctgtgcagcttcctgctgctgctgctgctgcaggtgagcagcagctacgccggccagttcagagtgatcggccccagacaccccatcagagccctggtgggcgacgaggtggagctgccctgcagaatcagccccggcaagaacgccaccggcatggaggtgggctggtacagaccccccttcagcagagtggtgcacctgtacagaaacggcaaggaccaggacggcgaccaggcccccgagtacagaggcagaaccgagctgctgaaggacgccatcggcgagggcaaggtgaccctgagaatcagaaacgtgagattcagcgacgagggcggcttcacctgcttcttcagagaccacagctaccaggaggaggccgccatggagctgaaggtggaggaccccttctactgggtgagccccggcgtgctggtgctgctggccgtgctgcccgtgctgctgctgcagatcaccctgggcctggtgttcctgtgcctgcagtacagactgagaggcaagctgagagccgagatcgagaacctgcacagaaccttcgacccccacttcctgagagtgccctgctggaagatcaccctgttcgtgatcgtgcccgtgctgggccccctggtggccctgatcatctgctacaactggctgcacagaagactggccggccagttcctggaggagctgctgttccacctggaggccctgagcggctag

SEQ ID NO: 264169 - DNA, 744 bp, Artificial Sequence
  derived and/or modified sequence
atggccagcctgagcagacccagcctgcccagctgcctgtgcagcttcctgctgctgctgctgctgcaggtgagcagcagctacgccggccagttcagagtgatcggccccagacaccccatcagagccctggtgggcgacgaggtggagctgccctgcagaatcagccccggcaagaacgccaccggcatggaggtgggctggtacagaccccccttcagcagagtggtgcacctgtacagaaacggcaaggaccaggacggcgaccaggcccccgagtacagaggcagaaccgagctgctgaaggacgccatcggcgagggcaaggtgaccctgagaatcagaaacgtgagattcagcgacgagggcggcttcacctgcttcttcagagaccacagctaccaggaggaggccgccatggagctgaaggtggaggaccccttctactgggtgagccccggcgtgctggtgctgctggccgtgctgcccgtgctgctgctgcagatcaccctgggcctggtgttcctgtgcctgcagtacagactgagaggcaagctgagagccgagatcgagaacctgcacagaaccttcgacccccacttcctgagagtgccctgctggaagatcaccctgttcgtgatcgtgcccgtgctgggccccctggtggccctgatcatctgctacaactggctgcacagaagactggccggccagttcctggaggagctgagaaaccccttctag

SEQ ID NO: 264170 - DNA, 534 bp, Artificial Sequence
  derived and/or modified sequence
atgagccacatcagctgggaggagagatacagaaacggcaaggaccaggacggcgaccaggcccccgagtacagaggcagaaccgagctgctgaaggacgccatcggcgagggcaaggtgaccctgagaatcagaaacgtgagattcagcgacgagggcggcttcacctgcttcttcagagaccacagctaccaggaggaggccgccatggagctgaaggtggaggaccccttctactgggtgagccccggcgtgctggtgctgctggccgtgctgcccgtgctgctgctgcagatcaccgtgggcctggtgttcctgtgcctgcagtacagactgagaggcaagctgagagccgagatcgagaacctgcacagaaccttcgacccccacttcctgagagtgccctgctggaagatcaccctgttcgtgatcgtgcccgtgctgggccccctggtggccctgatcatctgctacaactggctgcacagaagactggccggccagttcctggaggagctgagaaaccccttctag

SEQ ID NO: 264171 - DNA, 534 bp, Artificial Sequence
  derived and/or modified sequence
atgagccacatcagctgggaggagagatacagaaacggcaaggaccaggacggcgaccaggcccccgagtacagaggcagaaccgagctgctgaaggacgccatcggcgagggcaaggtgaccctgagaatcagaaacgtgagattcagcgacgagggcggcttcacctgcttcttcagagaccacagctaccaggaggaggccgccatggagctgaaggtggaggaccccttctactgggtgagccccggcgtgctggtgctgctggccgtgctgcccgtgctgctgctgcagatcaccctgggcctggtgttcctgtgcctgcagtacagactgagaggcaagctgagagccgagatcgagaacctgcacagaaccttcgacccccacttcctgagagtgccctgctggaagatcaccctgttcgtgatcgtgcccgtgctgggccccctggtggccctgatcatctgctacaactggctgcacagaagactggccggccagttcctggaggagctgagaaaccccttctag

SEQ ID NO: 264172 - protein, 213 aa, Artificial Sequence
  derived and/or modified sequence
MASLSRPSLPSCLCSFLLLLLLQVSSSYAGQFRVIGPRHPIRALVGDEVELPCRISPGKNATGMEVGWYRPPFSRVVHLYRNGKDQDGDQAPEYRGRTELLKDAIGEGKVTLRIRNVRFSDEGGFTCFFRDHSYQEEAAMELKVEDPFYWVSPGVLVLLAVLPVLLLQITVGLVFLCLQYRLRGKLRAEIENLHRTFGQFLEELLFHLEALSG

SEQ ID NO: 264173 - protein, 213 aa, Artificial Sequence
  derived and/or modified sequence
MASLSRPSLPSCLCSFLLLLLLQVSSSYAGQFRVIGPRHPIRALVGDEVELPCRISPGKNATGMEVGWYRPPFSRVVHLYRNGKDQDGDQAPEYRGRTELLKDAIGEGKVTLRIRNVRFSDEGGFTCFFRDHSYQEEAAMELKVEDPFYWVSPGVLVLLAVLPVLLLQITVGLIFLCLQYRLRGKLRAEIENLHRTFGQFLEELLFHLEALSG

SEQ ID NO: 264174 - protein, 213 aa, Artificial Sequence
  derived and/or modified sequence
MASLSRPSLPSCLCSFLLLLLLQVSSSYAGQFRVIGPRHPIRALVGDEVELPCRISPGKNATGMEVGWYRPPFSRVVHLYRNGKDQDGDQAPEYRGRTELLKDAIGEGKVTLRIRNVRFSDEGGFTCFFRDHSYQEEAAMELKVEDPFYWVSPGVLVLLAVLPVLLLQITLGLVFLCLQYRLRGKLRAEIENLHRTFGQFLEELLFHLEALSG

SEQ ID NO: 264175 - protein, 229 aa, Artificial Sequence [sequence omitted]

SEQ ID NO: 264176 - protein, 229 aa, Artificial Sequence
  derived and/or modified sequence
MASLSRPSLPSCLCSFLLLLLLQVSSSYAGQFRVIGPRHPIRALVGDEVELPCRISPGKNATGMEVGWYRPPFSRVVHLYRNGKDQDGDQAPEYRGRTELLKDAIGEGKVTLRIRNVRFSDEGGFTCFFRDHSYQEEAAMELKVEDPFYWVSPGVLVLLAVLPVLLLQITLGLVFLCLQYRLRGKLRAEIENLHRTFESFGVLGPQVKEPKKTGQFLEELLFHLEALSG

SEQ ID NO: 264177 - protein, 229 aa, Artificial Sequence
  derived and/or modified sequence
MASLSRPSLPSCLCSFLLLLLLQVSSSYAGQFRVIGPRHPIRALVGDEVELPCRISPGKNATGMEVGWYRPPFSRVVHLYRNGKDQDGDQAPEYRGRTELLKDAIGEGKVTLRIRNVRFSDEGGFTCFFRDHSYQEEAAMELKVEDPFYWVSPGVLVLLAVLPVLLLQITVGLIFLCLQYRLRGKLRAEIENLHRTFESFGVLGPQVKEPKKTGQFLEELLFHLEALSG

SEQ ID NO: 264178 - protein, 179 aa, Artificial Sequence
  derived and/or modified sequence
  misc_feature (1)..(1): Xaa can be any naturally occurring amino acid
XQFRVIGPRHPIRALVGDEVELPCRISPGKNATGMEVGWYRPPFSRVVHLYRNGKDQDGDQAPEYRGRTELLKDAIGEGKVTLRIRNVRFSDEGGFTCFFRDHSYQEEAAMELKVEDPFYWVSPGVLVLLAVLPVLLLQITVGLVFLCLQYRLRGKLRAEIENLHRTFGQFLEELRNPF

SEQ ID NO: 264179 - protein, 179 aa, Artificial Sequence
  derived and/or modified sequence
  misc_feature (1)..(1): Xaa can be any naturally occurring amino acid
XQFRVIGPRHPIRALVGDEVELPCRISPGKNATGMEVGWYRPPFSRVVHLYRNGKDQDGDQAPEYRGRTELLKDAIGEGKVTLRIRNVRFSDEGGFTCFFRDHSYQEEAAMELKVEDPFYWVSPGVLVLLAVLPVLLLQITLGLVFLCLQYRLRGKLRAEIENLHRTFGQFLEELRNPF

SEQ ID NO: 264180 - protein, 208 aa, Artificial Sequence
  derived and/or modified sequence
MASLSRPSLPSCLCSFLLLLLLQVSSSYAGQFRVIGPRHPIRALVGDEVELPCRISPGKNATGMEVGWYRPPFSRVVHLYRNGKDQDGDQAPEYRGRTELLKDAIGEGKVTLRIRNVRFSDEGGFTCFFRDHSYQEEAAMELKVEDPFYWVSPGVLVLLAVLPVLLLQITVGLIFLCLQYRLRGKLRAEIENLHRTFGQFLEELRNPF

SEQ ID NO: 264181 - protein, 208 aa, Artificial Sequence [sequence omitted]

SEQ ID NO: 264182 - DNA, 540 bp, Artificial Sequence
  derived and/or modified sequence
taacagtttcgggtaataggcccccggcaccctattcgcgctttggtcggggacgaagtcgagttaccttgtcggatttcccctggaaagaatgcaacaggtatggaggtgggatggtatcggcccccattttcgcgggttgtgcacctgtacaggaacggaaaggatcaagacggagatcaagctcccgagtatcgcggtaggaccgagctgcttaaagatgctattggggaggggaaggtgaccttacggattcgaaacgtccgattcagcgacgagggcggctttacatgctttttcagagaccactcatatcaggaggaggcagcaatggaattaaaggttgaggacccattctactgggtgtctcctggcgtcttggttctactggccgtactccccgtgctcctgttgcagattaccgtaggcctcgtgtttttgtgtctgcaataccggctacgggggaaactacgggccgaaattgagaacttacatcgtacttttggtcaatttctggaggagttaaggaacccattctag

SEQ ID NO: 264183 - DNA, 540 bp, Artificial Sequence
  derived and/or modified sequence
tgacaattcagagtgattggaccaagacaccctattcgcgccctagtgggggacgaagtagagctgccatgtagaatatcaccaggtaagaacgcgacggggatggaggtcggatggtaccgccccccgttttcacgcgttgtccacctttaccgaaatgggaaggatcaggacggcgaccaggctcctgagtatagaggaaggaccgagctcctgaaagacgccatcggtgaaggtaaagtaaccctgcgaatccgcaatgtacgcttctccgatgaaggcggattcacgtgcttcttcagagaccacagctaccaggaggaagctgcgatggaactcaaggtggaagaccccttctattgggtttcacctggcgtactggtgctactggctgtgttacccgtcctgctgctccagataacagtcgggctcgtctttttgtgtcttcagtacagactgcgggggaaactacgtgccgaaatagagaacctgcaccgcaccttcggccagttcctcgaggaactgagaaatccattttag

SEQ ID NO: 264184 - DNA, 540 bp, Artificial Sequence
  derived and/or modified sequence
tgacaatttcgcgtgatcgggcctcgccaccctattagagcacttgtgggcgacgaggtggagctgccatgccgcatatcacccggaaagaatgcgaccgggatggaggtcggttggtacagaccaccattctcccgggtcgtccacttgtatagaaatgggaaggaccaggacggtgatcaggcacctgagtaccgaggtcgcactgagctgctgaaagatgctatcggagaggggaaggtcacccttagaatcaggaacgtgcgcttctcagacgagggggggttcacatgtttctttagggatcacagttaccaggaggaggccgcaatggagctcaaagttgaggatccgttctactgggtgagcccaggagtcctcgttctcctggcagtgcttcctgttctgttgcttcagatcactgtcgggttggtgtttttatgtctacagtaccggttgcgtgggaagttacgcgctgaaatcgagaacctccatcgcaccttcgggcagtttctggaagaactgcgaaatcctttttag

SEQ ID NO: 264185 - DNA, 540 bp, Artificial Sequence
  derived and/or modified sequence
tgacagttccgcgttattggacccaggcatcccattcgggcccttgttggggatgaagtggagttgccctgcagaatcagccctggaaaaaacgccacaggcatggaggttggttggtaccgcccgccattttcaagagtcgtgcatttatatcgcaacgggaaggatcaagacggagatcaagccccagaatatcggggcaggacagagctgctgaaagatgcaataggtgaggggaaggtgaccctgcggattagaaacgtacgttttagcgacgaggggggctttacctgtttctttagagatcacagctaccaggaggaggctgctatggagctcaaggtggaggatcccttttactgggtctccccgggggtgctcgtcttacttgcagtcctgcccgttctccttctgcagattaccgtcggcctcgtctttctatgcctacagtaccggctgcgcggtaagctgcgagccgaaatcgaaaatctgcatagaactttcggtcaattccttgaggagctgcgcaacccattttag

SEQ ID NO: 264186 - DNA, 540 bp, Artificial Sequence
  derived and/or modified sequence
tgacagttcagagtaattggccctcgccaccctatcagagccctggttggagatgaagtagaactcccatgccggatcagccctggaaagaatgcgaccgggatggaagtggggtggtacagaccccccttctcaagagtggtgcacttgtaccggaacggtaaggaccaggacggtgaccaggcaccagaatacagagggagaaccgaattactgaaggacgcaatcggcgagggcaaagttacactaagaatccgtaacgttcgcttttcagatgagggtggcttcacttgtttttttagggaccatagttatcaagaggaggctgctatggagcttaaggttgaggatcccttctactgggttagccccggtgtcctggtgctcctcgcagtgctcccagtcttactgcttcaaatcactcttggactggtgttcttatgtctccagtatagactgcgagggaagttgagggctgagatcgagaatctccataggacctttggccagtttttggaggaattaaggaaccccttctag

SEQ ID NO: 264187 - DNA, 627 bp, Artificial Sequence
  derived and/or modified sequence
atggcctccctgtcccgcccatctctgccatcatgtctgtgcagtttcctccttctgctgctcttgcaggtaagtagttcatacgctggacagtttagggttatcggacccaggcaccctatacgcgctctggtcggcgatgaggtcgagctgccctgcaggatctctcccgggaagaacgcaaccggcatggaagttggatggtatagaccccctttcagccgggtcgtgcacttgtacaggaacggtaaggaccaggacggagaccaggctcctgaatatcgcgggcgcacagaactgttgaaagatgccatcggggaggggaaggtgaccctgcgcatcagaaatgtgcggttttctgacgaaggcggatttacctgttttttccgggatcacagttatcaagaagaggctgccatggagctgaaagtggaggatcccttttactgggtgagccccggagtgttagtgttgctggctgtattacctgttttgcttcttcagatcaccgtcggactgatctttctgtgcctacagtaccggcttagaggcaagctccgtgcagaaatagagaacctccaccggacattcggacagttcctggaggagttgaggaatccattttag

SEQ ID NO: 264188 - DNA, 540 bp, Artificial Sequence
  derived and/or modified sequence
tgacaattccgggtgattgggcctaggcaccccatcagggccctcgtgggggatgaagtggagctgccctgtcgcatctctccaggcaagaatgcgacgggcatggaagttggctggtatcggccacctttctcccgtgtcgtgcatttgtacagaaacggaaaggaccaggatggtgaccaggccccagaataccgaggcaggacagaacttttgaaagacgccattggcgaggggaaggtaactctgcggataagaaatgtgcggtttagcgacgagggagggtttacctgttttttccgggaccacagctatcaggaggaggccgctatggagctgaaggtggaagaccctttctactgggtgtcccccggagtcctggtattgctcgcagtactgcctgttttactcctacagattactgtgggacttgtgtttctctgtcttcaatatcggctcagaggcaaactgcgagcagaaatagaaaacctacaccgaaccttcggccagttcctagaggagcttagaaatcccttttag

SEQ ID NO: 264189 - DNA, 540 bp, Artificial Sequence
  derived and/or modified sequence
tgacagttccgcgttatcgggccccgccatccaattcgtgccctggtcggggatgaagtcgagcttccctgcaggatcagtccaggaaagaatgcaacagggatggaagtgggttggtacaggccccccttctcacgggtggtccacctgtaccgtaatggtaaagaccaggacggcgatcaggcccccgaatacaggggccgcacagaactgcttaaagacgctatcggagagggaaaagtgacattaaggataagaaatgtgcggtttagcgacgagggcggcttcacatgtttctttcgagaccatagttatcaagaggaggcagcaatggagctgaaggtggaggatcccttttattgggtgtcccccggggttcttgtgttgttggccgtcttgccagtgctgcttttgcagattactgtaggactggtttttctgtgcctgcagtacagactccgaggtaagctccgcgccgagatcgaaaacctacatcgcacttttggtcaattcctggaagagctgagaaacccgttctag

SEQ ID NO: 264190 - DNA, 627 bp, Artificial Sequence
  derived and/or modified sequence
atggcctctctgagcagaccatcgctgccttcctgtctgtgcagcttcctgctgctattactgttgcaagtctccagtagttacgctggccagttcagagtgattggcccccggcacccaatccgcgctcttgtaggggacgaggtggaattaccatgccgaatctccccagggaaaaatgctaccggcatggaggtcgggtggtaccgacctccctttagtagagtggtccatctttaccggaacggtaaggaccaggatggtgatcaggcacctgaatatagaggcagaaccgagctgctgaaggatgcgatcggagaagggaaggtcacgttaagaataaggaatgtgaggttttcagacgagggagggttcacctgcttcttccgcgaccatagctatcaggaggaggctgccatggaattgaaggtagaggacccgttttactgggtctcccccggcgtccttgtactgctggctgtgcttcctgtgctcttgctgcaaattacagtggggctcgtgtttttatgccttcagtacagactgcgtggaaaactgagagccgaaatcgagaacctccaccgcactttcggacagtttctcgaggaactgcggaatccattctag

SEQ ID NO: 264191 - DNA, 627 bp, Artificial Sequence
  derived and/or modified sequence
atggcttcactcagcaggccctcacttccaagttgcttgtgctctttccttctgctgctactcttgcaggtgtcgtcatcctacgcaggacagtttcgtgtaatcggccccaggcacccgatcagggccctggtaggagatgaggttgagctcccatgcaggatttcacctggtaaaaacgctacgggcatggaggtcggttggtatcggccacccttctcaagggtggtgcatctgtaccgaaacgggaaggaccaggacggcgaccaagcacccgaataccgcgggcgtactgagctactcaaagacgccattggggaaggcaaagtcacgctacgcattcgtaacgtgaggtttagtgatgagggcgggttcacctgtttcttcagggatcatagttaccaggaagaagccgccatggaactgaaggtcgaagatccattctactgggtaagtcctggcgtactggtgctgttggccgtactgccagtgttgctgctccaaatcaccgttggactggtgttcctctgccttcagtataggctgcgtggcaagctgagagccgagatcgagaatctgcaccggacattcggacaattcctcgaggagctgagaaatcctttttag

SEQ ID NO: 264192 - DNA, 627 bp, Artificial Sequence
  derived and/or modified sequence
atggccagtctgtctcgcccatctttgccttcctgcctctgttcctttctcctgcttttattacttcaagtgtcatcaagttatgcaggccagttccgcgtgatcggccccagacatcccattagggccctggtcggcgatgaagtagagctgccgtgccgcatttctcccgggaaaaacgccactggcatggaggtggggtggtatcgtccgccgttcagccgtgtcgtgcacctgtaccgcaacgggaaagaccaggatggcgatcaggcacccgagtacagggggcggacagagctgctcaaagacgctatcggtgaagggaaggtgactcttcggatacgcaatgtgaggttcagcgacgaggggggctttacctgtttctttcgagaccactcttaccaggaagaggccgctatggaattaaaggtggaagacccattttattgggttagccctggcgttctggtgttgttggctgttcttcctgtcttgctgctgcagatcactgttgggctggtttttctttgcctccagtatagactgagggggaagcttagagccgaaattgagaatttgcatagaacttttgggcagttcctggaagagcttcggaaccctttctag

SEQ ID NO: 264193 - DNA, 627 bp, Artificial Sequence
  derived and/or modified sequence
atggcttccttatcacggccgtccctgcctagctgcttgtgtagcttcctacttcttctgcttctgcaggtcagctcctcctatgctgggcagtttcgggtaatcggaccaagacatccaatccgagctctagtgggtgacgaggttgagttaccctgccgcatttctcccggcaagaacgctactggcatggaagtgggctggtatcggccccccttttcaagagttgtgcacctgtatcgaaacggaaaggatcaagacggagaccaggcgcctgagtatcgaggccggactgagcttcttaaagatgctatcggtgagggcaaggttacactcagaattaggaacgttcggttttccgatgaagggggatttacctgcttttttagagaccatagttatcaggaggaagcagctatggagttgaaagtcgaagatcccttctactgggtgtcacctggagtactggtcttactcgctgttctccccgtgctgctgctgcagatcactgttggtctggttttcctgtgtctgcaataccggttgaggggaaagctgcgggccgaaatcgagaacctgcaccgcacatttggacaattcctcgaggaacttaggaatcctttctag

SEQ ID NO: 264194 - DNA, 627 bp, Artificial Sequence
  derived and/or modified sequence
atggcctccttgtcgcgcccatctctgccgtcatgtctctgttccttcctcctgcttcttctgctccaggtgtcctcgtcgtacgctggacagttccgtgtcatcggaccacggcaccctatcagggctctggtgggcgatgaagtggagctcccatgtaggataagtcctggcaagaacgcaactggaatggaggttggctggtataggcccccatttagccgtgtcgtgcatctctacagaaacggtaaagatcaagatggcgatcaggctccagagtaccgggggagaactgaacttttgaaagatgccatcggagaaggaaaggtgacgctgcggattcgtaacgtgcgattctcagacgagggtggcttcacctgttttttccgggaccatagttatcaggaagaagctgccatggagctcaaggttgaagacccattttattgggttagccctggcgttctggtgttgctggctgtgctgcctgtcctgcttctgcagatcaccgtgggactcgtatttctgtgtttacagtaccggctcagaggtaaactacgagctgagatagagaatctccatcgtacattcggtcaatttctcgaagagcttaggaaccctttttag

SEQ ID NO: 264195 - DNA, 627 bp, Artificial Sequence
  derived and/or modified sequence
atggcctccctgtcaagaccttctttgcccagctgcctgtgctcattccttcttctattacttcttcaggtgtcaagcagctatgctgggcaatttagagtgataggaccacgacaccccattcgggcccttgttggtgacgaagtcgagctgccttgcagaatctcacccggtaagaatgcaacgggaatggaggtgggctggtacagacccccgttctctcgcgtggtacacctgtatcgcaatggcaaggaccaggatggcgaccaagctccggagtatagaggaagaacagagctgcttaaggatgcaattggcgaaggaaaggtaacattgcgtatacggaatgtgcgcttctccgatgagggtggattcacctgttttttcagagaccactcttatcaggaggaggctgccatggagctgaaggtcgaagatcccttctactgggtttcgccaggagtgctagtacttctcgcagttctgccggttctgcttctgcagatcacagtgggcctggtctttttgtgcttacagtaccggcttcgtgggaagctgcgagctgaaattgaaaatctccatcgcacctttgggcaattcctagaggaactacgcaaccctttttag

SEQ ID NO: 264196 - DNA, 540 bp, Artificial Sequence
  derived and/or modified sequence
tgacagttccgggtcatcggccccaggcaccccatccgggccctggtgggagatgaggtggagctgccctgccgcatcagccctgggaagaatgccaccggcatggaggtgggctggtaccggccccccttcagccgggtggtgcacctgtacagaaatggcaaggaccaggatggagaccaggcccctgagtaccggggccgcacagagctgctgaaggatgccatcggggagggcaaggtgaccctgcgcatcagaaatgtgcgcttcagtgatgagggcggcttcacctgcttcttccgggaccacagctaccaggaggaggccgccatggagctgaaggtggaggaccccttctactgggtgtcccctggggtgctggtgctgctggccgtgctgcctgtgctgctgctgcagatcaccgtgggcctggtgttcctgtgcctgcagtaccgcctgcggggcaagctgcgggcagaaattgagaacctgcacaggaccttcggccagttcctggaggagctgaggaaccccttctag

SEQ ID NO: 264197 - DNA, 540 bp, Artificial Sequence
  derived and/or modified sequence
tgacagttccgggtcatcggccccaggcaccccatccgggccctggtgggagatgaggtggagctgccctgccgcatcagccctgggaagaatgccaccggcatggaggtgggctggtaccggccccccttcagccgggtggtgcacctgtacagaaatggcaaggaccaggatggagaccaggcccctgagtaccggggccgcacagagctgctgaaggatgccatcggggagggcaaggtgaccctgcgcatcagaaatgtgcgcttcagtgatgagggcggcttcacctgcttcttccgggaccacagctaccaggaggaggccgccatggagctgaaggtggaggaccccttctactgggtgtcccctggggtgctggtgctgctggccgtgctgcctgtgctgctgctgcagatcaccctgggcctggtgttcctgtgcctgcagtaccgcctgcggggcaagctgcgggcagaaattgagaacctgcacaggaccttcggccagttcctggaggagctgaggaaccccttctag

SEQ ID NO: 264198 - DNA, 627 bp, Artificial Sequence
  derived and/or modified sequence
atggccagcctgagccggcccagcctgcccagctgcctgtgcagcttcctgctgctgctgctgctgcaggtgagcagcagctatgccggccagttccgggtgattggccccaggcaccccatccgggccctggtgggagatgaggtggagctgccctgccgcatcagccctgggaagaatgccaccggcatggaggtgggctggtacagaccacccttcagccgggtggtgcacctgtacagaaatggcaaggaccaggatggagaccaggcccctgagtaccggggccgcacagagctgctgaaggatgccatcggggagggcaaggtgaccctgcgcatcagaaatgtgcgcttcagtgatgaaggaggcttcacctgcttcttccgggaccacagctaccaggaggaggccgccatggagctgaaggtggaggaccccttctactgggtgtccccaggagtgctggtgctgctggccgtgctgcctgtgctgctgctgcagatcaccgtgggcctcatcttcctgtgcctgcagtaccgcctgcggggcaagctgcgggcagaaattgagaacctgcacaggaccttcggccagttcctggaggagctgaggaaccccttctag

SEQ ID NO: 264199 - DNA, 627 bp, Artificial Sequence
  derived and/or modified sequence
atggccagcctgagccggcccagcctgcccagctgcctgtgcagcttcctgctgctgctgctgctgcaggtgagcagcagctatgccggccagttccgggtgattggccccaggcaccccatccgggccctggtgggagatgaggtggagctgccctgccgcatcagccctgggaagaatgccaccggcatggaggtgggctggtacagaccacccttcagccgggtggtgcacctgtacagaaatggcaaggaccaggatggagaccaggcccctgagtaccggggccgcacagagctgctgaaggatgccatcggggagggcaaggtgaccctgcgcatcagaaatgtgcgcttcagtgatgaaggaggcttcacctgcttcttccgggaccacagctaccaggaggaggccgccatggagctgaaggtggaggaccccttctactgggtgtccccaggagtgctggtgctgctggccgtgctgcctgtgctgctgctgcagatcaccgtgggcctggtgttcctgtgcctgcagtaccgcctgcggggcaagctgcgggcagaaattgagaacctgcacaggaccttcggccagttcctggaggagctgaggaaccccttctag

SEQ ID NO: 264200 - DNA, 1730 bp, Artificial Sequence
  derived and/or modified sequence
ggcagttcagagtgataggaccaagacaccctatccgggctctggtcggggatgaagtggaattgccatgtcgcatatctcctgggaagaacgctacaggcatggaggtggggtggtaccgcccccccttctctagggtggttcatctctacagaaatggcaaggaccaagatggagaccaggcacctgaatatcggggccggacagagctgctgaaagatgctattggtgagggaaaggtgactctcaggatccggaatgtaaggttctcagatgaaggaggtttcacctgcttcttccgagatcattcttaccaagaggaggcagcaatggaattgaaagtagaagatcctttctactgggtgagccctggagtgctggttctcctcgcggtgctgcctgtgctcctcctgcagatcactgttggcctcgtcttcctctgcctgcagtacagactgagaggaaaacttcgagcagagatagagaatctccaccggacttttgggcaattccttgaagagctacgaaatcccttctgagtgatgtcacatcttggcaggggtggaggagagcctggttgcccagggatttgtccttggggacatctcatccatcaagttgcacactcactggcatctttgctatggggacattccaatttgcactttcaggaacactctgaattccaagtagaattgatttcccttcttctgtcatctaccttttctcttcattttcccatttttattacccttctttccatttctctctccagtcttccacctggaagccctctctggctaaggacaggcaggtgcccctctctccatcagaggacacctgtactggagagcaacacaggatggtctctgccatgaactggaggccaggaatctcctcactgaaaattacagtatggtaactttgcaaatggtggttgtttcttccaagactccagccctgattgcgcaaaactgaaaggcatgtgaagggaaggaagaggaagagtgcaaaacattgaagagagagctgagtgagctgaagagtgaggatatgagtagccccaacccaaacctggagatggggagaaacctacagaatactagccagagctcctccttgtcttggcagcctactagggacctggggaagcaaaaacgaaagctgggcaacatgcctgctttagaatgttttccttctacttacacatcttccacaggtctcagaatctttccttcctctcatccttttctcctatcttcatatctatcagagtatccactgtttattcaacaactactacttgatggtcagacacaaacaaacaagctaggtgctaattaataaagatatgagttttggccgggtgcggtggctcacgcctgtaatcccagcactttgggaggccgaggcgggcgaatcacgaggtcaggagttcgagaccagcctggccaacatggtgaaaccccatctctactaaaaatacaaacaattaactgagcatagtggtgggcacctataataccagctactccggaggctgaggcaggagaatcgcttgaacccaggaggcagaggttgcagtgagctgagatcgcgccactgcactctagccagagtgacagagtaagactctgtctcaaaaataaataaataaataaataaataaataaataaataaataaataaataaaaaataataatacaagttttcataagcacacttctaa

SEQ ID NO: 264201 - DNA, 1726 bp, Artificial Sequence
  derived and/or modified sequence
ggcagttcagagtgataggaccaagacaccctatccgggctctggtcggggatgaagtggaattgccatgtcgcatatctcctgggaagaacgctacaggcatggaggtggggtggtaccgcccccccttctctagggtggttcatctctacagaaatggcaaggaccaagatggagaccaggcacctgaatatcggggccggacagagctgctgaaagatgctattggtgagggaaaggtgactctcaggatccggaatgtaaggttctcagatgaaggaggtttcacctgcttcttccgagatcattcttaccaagaggaggcagcaatggaattgaaagtagaagatcctttctactgggtgagccctggagtgctggttctcctcgcggtgctgcctgtgctcctcctgcagatcactgttggcctcgtcttcctctgcctgcagtacagactgagaggaaaacttcgagcagagatagagaatctccaccggacttttgggcaattccttgaagagctacgaaatcccttctgagtgatgtcacatcttggcaggggtggaggagagcctggttgcccagggatttgtccttggggacatctcatccatcaagttgcacactcactggcatctttgctatggggacattccaatttgcactttcaggaacactctgaattccaagtagaattgatttcccttcttctgtcatctaccttttctcttcattttcccatttttattacccttctttccatttctctctccagtcttccacctggaagccctctctggctaaggacaggcaggtgcccctctctccatcagaggacacctgtactggagagcaacacaggatggtctctgccatgaactggaggccaggaatctcctcactgaaaattacagtatggtaactttgcaaatggtggttgtttcttccaagactccagccctgattgcgcaaaactgaaaggcatgtgaagggaaggaagaggaagagtgcaaaacattgaagagagagctgagtgagctgaagagtgaggatatgagtagccccaacccaaacctggagatggggagaaacctacagaatactagccagagctcctccttgtcttggcagcctactagggacctggggaagcaaaaacgaaagctgggcaacatgcctgctttagaatgttttccttctacttacacatcttccacaggtctcagaatctttccttcctctcatccttttctcctatcttcatatctatcagagtatccactgtttattcaacaactactacttgatggtcagacacaaacaaacaagctaggtgctaattaataaagatacgagttttggccgggtgcggtggctcacgcctgtaatcccagcactttgggaggccgaggcgggcgaatcacgaggtcaggagttcaagaccagcctggccaacatggtgaaaccccatctctactaaaaatacaaacaattaactgagcatagtggtgggcacctataataccagctactccggaggctgaggcaggagaatcgcttgaacccaggaggcagaggttgcagtgagctgagatcgcgccactgcactctagccggagtgacagagtaagactctgtctcaaaaataaataaataaataaataaataaataaataaataaataaataaaaaataataatacaagttttcataagcacacttctaa

SEQ ID NO: 264202 - DNA, 1734 bp, Artificial Sequence
  derived and/or modified sequence
ggcagttcagagtgataggaccaagacaccctatccgggctctggtcggggatgaagtggaattgccatgtcgcatatctcctgggaagaacgctacaggcatggaggtggggtggtaccgcccccccttctctagggtggttcatctctacagaaatggcaaggaccaagatggagaccaggcacctgaatatcggggccggacagagctgctgaaagatgctattggtgagggaaaggtgactctcaggatccggaatgtaaggttctcagatgaaggaggtttcacctgcttcttccgagatcattcttaccaagaggaggcagcaatggaattgaaagtagaagatcctttctactgggtgagccctggagtgctggttctcctcgcggtgctgcctgtgctcctcctgcagatcactgttggcctcgtcttcctctgcctgcagtacagactgagaggaaaacttcgagcagagatagagaatctccaccggacttttgggcaattccttgaagagctacgaaatcccttctgagtgatgtcacatcttggcaggggtggaggagagcctggttgcccagggatttgtccttggggacatctcatccatcaagttgcacactcactggcatctttgctatggggacattccaatttgcactttcaggaacactctgaattccaagtagaattgatttcccttcttctgtcatctaccttttctcttcattttcccatttttattacccttctttccatttctctctccagtcttccacctggaagccctctctggctaaggacaggcaggtgcccctctctccatcagaggacacctgtactggagagcaacacaggatggtctctgccatgaactggaggccaggaatctcctcactgaaaattacagtatggtaactttgcaaatggtggttgtttcttccaagactccagccctgattgcgcaaaactgaaaggcatgtgaagggaaggaagaggaagagtgcaaaacattgaagagagagctgagtgagctgaagagtgaggatatgagtagccccaacccaaacctggagatggggagaaacctacagaatactagccagagctcctccttgtcttggcagcctactagggacctggggaagcaaaaacgaaagctgggcaacatgcctgctttagaatgttttccttctacttacacatcttccacaggtctcagaatctttccttcctctcatccttttctcctatcttcatatctatcagagtatccactgtttattcaacaactactacttgatggtcagacacaaacaaacaagctaggtgctaattaataaagatacgagttttggccgggtgcggtggctcacgcctgtaatcccagcactttgggaggccgaggcgggcgaatcacgaggtcaggagttcaagaccagcctggccaacatggtgaaaccccatctctactaaaaatacaaacaattaactgagcatagtggtgggcacctataataccagctactccggaggctgaggcaggagaatcgcttgaacccaggaggcagaggttgcagtgagctgagatcgcgccactgcactctagccggagtgacagagtaagactctgtctcaaaaataaataaataaataaataaataaataaataaataaataaataaataaataaaaaataataatacaagttttcataagcacacttctaa

SEQ ID NO: 264203 - DNA, 1722 bp, Artificial Sequence
  derived and/or modified sequence
ggcagttcagagtgataggaccaagacaccctatccgggctctggtcggggatgaagtggaattgccatgtcgcatatctcctgggaagaacgctacaggcatggaggtggggtggtaccgcccccccttctctagggtggttcatctctacagaaatggcaaggaccaagatggagaccaggcacctgaatatcggggccggacagagctgctgaaagatgctattggtgagggaaaggtgactctcaggatccggaatgtaaggttctcagatgaaggaggtttcacctgcttcttccgagatcattcttaccaagaggaggcagcaatggaattgaaagtagaagatcctttctactgggtgagccctggagtgctggttctcctcgcggtgctgcctgtgctcctcctgcagatcactcttggcctcgtcttcctctgcctgcagtacagactgagaggaaaacttcgagcagagatagagaatctccaccggacttttgggcaattccttgaagagctacgaaatcccttctgagtgatgtcacatcttggcaggggtggaggagagcctggttgcccagggatttgtccttggggacatctcatccatcaagttgcacactcactggcatctttgctatggggacattccaatttgcactttcaggaacactctgaattccaagtagaattgatttcccttcttctgtcatctaccttttctcttcattttcccatttttattacccttctttccatttctctctccagtcttccacctggaagccctctctggctaaggacaggcaggtgcccctctctccatcagaggacacctgtactggagagcaacacaggatggtctctgccatgaactggaggccaggaatctcctcactgaaaattacagtatggtaactttgcaaatggtggttgtttcttccaagactccagccctgattgcgcaaaactgaaaggcatgtgaagggaaggaagaggaagagtgcaaaacattgaagagagagctgagtgagctgaagagtgaggatatgagtagccccaacccaaacctggagatggggagaaacctacagaatactagccagagctcctccttgtcttggcagcctactagggacctggggaagcaaaaacgaaagctgggcaacatgcctgctttagaatgttttccttctacttacacatcttccacaggtctcagaatctttccttcctctcatccttttctcctatcttcatatctatcagagtatccactgtttattcaacaactactacttgatggtcagacacaaacaaacaagctaggtgctaattaataaagatacgagttttggccgggtgcggtggctcacgcctgtaatcccagcactttgggaggccgaggcgggcgaatcacgaggtcaggagttcaagaccagcctggccaacatggtgaaaccccatctctactaaaaatacaaacaattaactgagcatagtggtgggcacctataataccagctactccggaggctgaggcaggagaatcgcttgaacccaggaggcagaggttgcagtgagctgagatcgcgccactgcactctagccggagtgacagagtaagactctgtctcaaaaataaataaataaataaataaataaataaataaataaataaaaaataataatacaagttttcataagcacacttctaa

SEQ ID NO: 264204 - DNA, 1814 bp, Artificial Sequence
  derived and/or modified sequence
atggcaagcttatcaagaccctctctgcccagctgcctctgctccttcctcctcctcctcctcctccaagtgtcttccagctatgcagggcagttcagagtgataggaccaagacaccctatccgggctctggtcggggatgaagtggaattgccatgtcgcatatctcctgggaagaacgctacaggcatggaggtggggtggtaccgcccccccttctctagggtggttcatctctacagaaatggcaaggaccaagatggagaccaggcacctgaatatcggggccggacagagctgctgaaagatgctattggtgagggaaaggtgactctcaggatccggaatgtaaggttctcagatgaaggaggtttcacctgcttcttccgagatcattcttaccaagaggaggcagcaatggaattgaaagtagaagatcctttctactgggtgagccctggagtgctggttctcctcgcggtgctgcctgtgctcctcctgcagatcactgttggcctcatcttcctctgcctgcagtacagactgagaggaaaacttcgagcagagatagagaatctccaccggacttttgggcaattccttgaagagctacgaaatcccttctgagtgatgtcacatcttggcaggggtggaggagagcctggttgcccagggatttgtccttggggacatctcatccatcaagttgcacactcactggcatctttgctatggggacattccaatttgcactttcaggaacactctgaattccaagtagaattgatttcccttcttctgtcatctaccttttctcttcattttcccatttttattacccttctttccatttctctctccagtcttccacctggaagccctctctggctaaggacaggcaggtgcccctctctccatcagaggacacctgtactggagagcaacacaggatggtctctgccatgaactggaggccaggaatctcctcactgaaaattacagtatggtaactttgcaaatggtggttgtttcttccaagactccagccctgattgcgcaaaactgaaaggcatgtgaagggaaggaagaggaagagtgcaaaacattgaagagagagctgagtgagctgaagagtgaggatatgagtagccccaacccaaacctggagatggggagaaacctacagaatactagccagagctcctccttgtcttggcagcctactagggacctggggaagcaaaaacgaaagctgggcaacatgcctgctttagaatgttttccttctacttacacatcttccacaggtctcagaatctttccttcctctcatccttttctcctatcttcatatctatcagagtatccactgtttattcaacaactactacttgatggtcagacacaaacaaacaagctaggtgctaattaataaagatacgagttttggccgggtgcggtggctcacgcctgtaatcccagcactttgggaggccgaggcgggcgaatcacgaggtcaggagttcaagaccagcctggccaacatggtgaaaccccatctctactaaaaatacaaacaattaactgagcatagtggtgggcacctataataccagctactccggaggctgaggcaggagaatcgcttgaacccaggaggcagaggttgcagtgagctgagatcgtgccactgcactctagccggagtgacagagtaagactctgtctcaaaaataaataaataaataaataaataaataaataaataaataaataaaaaataataatacaagttttcataagcacacttctaa

SEQ ID NO: 264205 - DNA, 1726 bp, Artificial Sequence
  derived and/or modified sequence
ggcagttcagagtgataggaccaagacaccctatccgggctctggtcggggatgaagtggaattgccatgtcgcatatctcctgggaagaacgctacaggcatggaggtggggtggtaccgcccccccttctctagggtggttcatctctacagaaatggcaaggaccaagatggagaccaggcacctgaatatcggggccggacagagctgctgaaagatgctattggtgagggaaaggtgactctcaggatccggaatgtaaggttctcagatgaaggaggtttcacctgcttcttccgagatcattcttaccaagaggaggcagcaatggaattgaaagtagaagatcctttctactgggtgagccctggagtgctggttctcctcgcggtgctgcctgtgctcctcctgcagatcactgttggcctcgtcttcctctgcctgcagtacagactgagaggaaaacttcgagcagagatagagaatctccaccggacttttgggcaattccttgaagagctacgaaatcccttctgagtgatgtcacatcttggcaggggtggaggagagcctggttgcccagggatttgtccttggggacatctcatccatcaagttgcacactcactggcatctttgctatggggacattccaatttgcactttcaggaacactctgaattccaagtagaattgatttcccttcttctgtcatctaccttttctcttcattttcccatttttattacccttctttccatttctctctccagtcttccacctggaagccctctctggctaaggacaggcaggtgcccctctctccatcagaggacacctgtactggagagcaacacaggatggtctctgccatgaactggaggccaggaatctcctcactgaaaattacagtatggtaactttgcaaatggtggttgtttcttccaagactccagccctgattgcgcaaaactgaaaggcatgtgaagggaaggaagaggaagagtgcaaaacattgaagagagagctgagtgagctgaagagtgaggatatgagtagccccaacccaaacctggagatggggagaaacctacagaatactagccagagctcctccttgtcttggcagcctactagggacctggggaagcaaaaacgaaagctgggcaacatgcctgctttagaatgttttccttctacttacacatcttccacaggtctcagaatctttccttcctctcatccttttctcctatcttcatatctatcagagtatccactgtttattcaacaactactacttgatggtcagacacaaacaaacaagctaggtgctaattaataaagatacgagttttggccgggtgcggtggctcacgcctgtaatcccagcactttgggaggccgaggcgggcgaatcacgaggtcaggagttcgagaccagcctggccaacatggtgaaaccccatctctactaaaaatacaaacaattaactgagcatagtggtgggcacctataataccagctactccggaggctgaggcaggagaatcgcttgaacccaggaggcagaggttgcagtgagctgagatcgcgccactgcactctagccagagtgacagagtaagactctgtctcaaaaataaataaataaataaataaataaataaataaataaataaataaaaaataataatacaagttttcataagcacacttctaa

SEQ ID NO: 264206 - DNA, 1730 bp, Artificial Sequence
  derived and/or modified sequence
ggcagttcagagtgataggaccaagacaccctatccgggctctggtcggggatgaagtggaattgccatgtcgcatatctcctgggaagaacgctacaggcatggaggtggggtggtaccgcccccccttctctagggtggttcatctctacagaaatggcaaggaccaagatggagaccaggcacctgaatatcggggccggacagagctgctgaaagatgctattggtgagggaaaggtgactctcaggatccggaatgtaaggttctcagatgaaggaggtttcacctgcttcttccgagatcattcttaccaagaggaggcagcaatggaattgaaagtagaagatcctttctactgggtgagccctggagtgctggttctcctcgcggtgctgcctgtgctcctcctgcagatcactgttggcctcgtcttcctctgcctgcagtacagactgagaggaaaacttcgagcagagatagagaatctccaccggacttttgggcaattccttgaagagctacgaaatcccttctgagtgatgtcacatcttggcaggggtggaggagagcctggttgcccagggatttgtccttggggacatctcatccatcaagttgcacactcactggcatctttgctatggggacattccaatttgcactttcaggaacactctgaattccaagtagaattgatttcccttcttctgtcatctaccttttctcttcattttcccatttttattacccttctttccatttctctctccagtcttccacctggaagccctctctggctaaggacaggcaggtgcccctctctccatcagaggacacctgtactggagagcaacacaggatggtctctgccatgaactggaggccaggaatctcctcactgaaaattacagtatggtaactttgcaaatggtggttgtttcttccaagactccagccctgattgcgcaaaactgaaaggcatgtgaagggaaggaagaggaagagtgcaaaacattgaagagagagctgagtgagctgaagagtgaggatatgagtagccccaacccaaacctggagatggggagaaacctacagaatactagccagagctcctccttgtcttggcagcctactagggacctggggaagcaaaaacgaaagctgggcaacatgcctgctttagaatgttttccttctacttacacatcttccacaggtctcagaatctttccttcctctcatccttttctcctatcttcatatctatcagagtatccactgtttattcaacaactactacttgatggtcagacacaaacaaacaagctaggtgctaattaataaagatacgagttttggccgggtgcggtggctcacgcctgtaatcccagcactttgggaggccgaggcgggcgaatcacgaggtcaggagttcaagaccagcctggccaacatggtgaaaccccatctctactaaaaatacaaacaattaactgagcatagtggtgggcacctataataccagctactccggaggctgaggcaggagaatcgcttgaacccaggaggcagaggttgcagtgagctgagatcgcgccactgcactctagccggagtgacagagtaagactctgtctcaaaaataaataaataaataaataaataaataaataaataaataaataaataaaaaataataatacaagttttcataagcacacttctaa

SEQ ID NO: 264207 - DNA, 2045 bp, Artificial Sequence
  derived and/or modified sequence
gtcatcccctcagtctgtagcccttttgtgtgagtgcctggcaagggtgacgtggggctgtttctgcgggcacagctgcagcaattaccggagtggaggcagggcccaggcagcactgccctccaagatcttcccttgggcttttcagcagtaaggggacatgcaccccaagggcctccacttggcctgaccttgctgcgggggctctctgtccccaggaacagtagagatggcaagcttatcgagaccctctctgcccagctgcctctgctccttcctcctcctcctcctcctccaagtgtcttccagctatgcagggcagttcagagtgataggaccaagacaccctatccgggctctggtcggggatgaagtggaattgccatgtcgcatatctcctgggaagaacgctacaggcatggaggtggggtggtaccgcccccccttctctagggtggttcatctctacagaaatggcaaggaccaagatggagaccaggcacctgaatatcggggccggacagagctgctgaaagatgctattggtgagggaaaggtgactctcaggatccggaatgtaaggttctcagatgaaggaggtttcacctgcttcttccgagatcattcttaccaagaggaggcagcaatggaattgaaagtagaagatcctttctactgggtgagccctggagtgctggttctcctcgcggtgctgcctgtgctcctcctgcagatcactgttggcctcgtcttcctctgcctgcagtacagactgagaggaaaacttcgagcagagatagagaatctccaccggacttttgggcaattccttgaagagctacgaaatcccttctgagtgatgtcacatcttggcaggggtggaggagagcctggttgcccagggatttgtccttggggacatctcatccatcaagttgcacactcactggcatctttgctatggggacattccaatttgcactttcaggaacactctgaattccaagtagaattgatttcccttcttctgtcatctaccttttctcttcattttcccatttttattacccttctttccatttctctctccagtcttccacctggaagccctctctggctaaggacaggcaggtgcccctctctccatcagaggacacctgtactggagagcaacacaggatggtctctgccatgaactggaggccaggaatctcctcactgaaaattacagtatggtaactttgcaaatggtggttgtttcttccaagactccagccctgattgcgcaaaactgaaaggcatgtgaagggaaggaagaggaagagtgcaaaacattgaagagagagctgagtgagctgaagagtgaggatatgagtagccccaacccaaacctggagatggggagaaacctacagaatactagccagagctcctccttgtcttggcagcctactagggacctggggaagcaaaaacgaaagctgggcaacatgcctgctttagaatgttttccttctacttacacatcttccacaggtctcagaatctttccttcctctcatccttttctcctatcttcatatctatcagagtatccactgtttattcaacaactactacttgatggtcagacacaaacaaacaagctaggtgctaattaataaagatatgagttttggccgggtgcggtggctcacgcctgtaatcccagcactttgggaggccgaggcgggcgaatcacgaggtcaggagttcgagaccagcctggccaacatggtgaaaccccatctctactaaaaatacaaacaattaactgagcatagtggtgggcacctataataccagctactccggaggctgaggcaggagaatcgcttgaacccaggaggcagaggttgcagtgagctgagatcgcgccactgcactctagccagagtgacagagtaagactctgtctcaaaaataaataaataaataaataaataaataaataaataaataaataaataaaaaataataatacaagttttcataagcacacttct

SEQ ID NO: 264208 - DNA, 2045 bp, Artificial Sequence
  derived and/or modified sequence
gtcatcccctcagtctgtagcccttttgtgtgagtgcctggcaagggtgacgtggggctgtttctgcgggcacagctgcagcaattaccggagtggaggcagggcccaggcagcactgccctccaagatcttcccttgggcttttcagcagtaaggggacatgcaccccaagggcctccacttggcctgaccttgctgcgggggctctctgtccccaggaacagtagagatggcaagcttatcgagaccctctctgcccagctgcctctgctccttcctcctcctcctcctcctccaagtgtcttccagctatgcagggcagttcagagtgataggaccaagacaccctatccgggctctggtcggggatgaagtggaattgccatgtcgcatatctcctgggaagaacgctacaggcatggaggtggggtggtaccgcccccccttctctagggtggttcatctctacagaaatggcaaggaccaagatggagaccaggcacctgaatatcggggccggacagagctgctgaaagatgctattggtgagggaaaggtgactctcaggatccggaatgtaaggttctcagatgaaggaggtttcacctgcttcttccgagatcattcttaccaagaggaggcagcaatggaattgaaagtagaagatcctttctactgggtgagccctggagtgctggttctcctcgcggtgctgcctgtgctcctcctgcagatcactgttggcctcgtcttcctctgcctgcagtacagactgagaggaaaacttcgagcagagatagagaatctccaccggacttttgggcaattccttgaagagctacgaaatcccttctgagtgatgtcacatcttggcaggggtggaggagagcctggttgcccagggatttgtccttggggacatctcatccatcaagttgcacactcactggcatctttgctatggggacattccaatttgcactttcaggaacactctgaattccaagtagaattgatttcccttcttctgtcatctaccttttctcttcattttcccatttttattacccttctttccatttctctctccagtcttccacctggaagccctctctggctaaggacaggcaggtgcccctctctccatcagaggacacctgtactggagagcaacacaggatggtctctgccatgaactggaggccaggaatctcctcactgaaaattacagtatggtaactttgcaaatggtggttgtttcttccaagactccagccctgattgcgcaaaactgaaaggcatgtgaagggaaggaagaggaagagtgcaaaacattgaagagagagctgagtgagctgaagagtgaggatatgagtagccccaacccaaacctggagatggggagaaacctacagaatactagccagagctcctccttgtcttggcagcctactagggacctggggaagcaaaaacgaaagctgggcaacatgcctgctttagaatgttttccttctacttacacatcttccacaggtctcagaatctttccttcctctcatccttttctcctatcttcatatctatcagagtatccactgtttattcaacaactactacttgatggtcagacacaaacaaacaagctaggtgctaattaataaagatacgagttttggccgggtgcggtggctcacgcctgtaatcccagcactttgggaggccgaggcgggcgaatcacgaggtcaggagttcaagaccagcctggccaacatggtgaaaccccatctctactaaaaatacaaacaattaactgagcatagtggtgggcacctataataccagctactccggaggctgaggcaggagaatcgcttgaacccaggaggcagaggttgcagtgagctgagatcgcgccactgcactctagccggagtgacagagtaagactctgtctcaaaaataaataaataaataaataaataaataaataaataaataaataaataaaaaataataatacaagttttcataagcacacttct

SEQ ID NO: 264209 - DNA, 2049 bp, Artificial Sequence
  derived and/or modified sequence
gtcatcccctcagtctgtagcccttttgtgtgagtgcctggcaagggtgacgtggggctgtttctgcgggcacagctgcagcaattaccggagtggaggcagggcccaggcagcactgccctccaagatcttcccttgggcttttcagcagtaaggggacatgcaccccaagggcctccacttggcctgaccttgctgcgggggctctctgtccccaggaacagtagagatggcaagcttatcgagaccctctctgcccagctgcctctgctccttcctcctcctcctcctcctccaagtgtcttccagctatgcagggcagttcagagtgataggaccaagacaccctatccgggctctggtcggggatgaagtggaattgccatgtcgcatatctcctgggaagaacgctacaggcatggaggtggggtggtaccgcccccccttctctagggtggttcatctctacagaaatggcaaggaccaagatggagaccaggcacctgaatatcggggccggacagagctgctgaaagatgctattggtgagggaaaggtgactctcaggatccggaatgtaaggttctcagatgaaggaggtttcacctgcttcttccgagatcattcttaccaagaggaggcagcaatggaattgaaagtagaagatcctttctactgggtgagccctggagtgctggttctcctcgcggtgctgcctgtgctcctcctgcagatcactgttggcctcgtcttcctctgcctgcagtacagactgagaggaaaacttcgagcagagatagagaatctccaccggacttttgggcaattccttgaagagctacgaaatcccttctgagtgatgtcacatcttggcaggggtggaggagagcctggttgcccagggatttgtccttggggacatctcatccatcaagttgcacactcactggcatctttgctatggggacattccaatttgcactttcaggaacactctgaattccaagtagaattgatttcccttcttctgtcatctaccttttctcttcattttcccatttttattacccttctttccatttctctctccagtcttccacctggaagccctctctggctaaggacaggcaggtgcccctctctccatcagaggacacctgtactggagagcaacacaggatggtctctgccatgaactggaggccaggaatctcctcactgaaaattacagtatggtaactttgcaaatggtggttgtttcttccaagactccagccctgattgcgcaaaactgaaaggcatgtgaagggaaggaagaggaagagtgcaaaacattgaagagagagctgagtgagctgaagagtgaggatatgagtagccccaacccaaacctggagatggggagaaacctacagaatactagccagagctcctccttgtcttggcagcctactagggacctggggaagcaaaaacgaaagctgggcaacatgcctgctttagaatgttttccttctacttacacatcttccacaggtctcagaatctttccttcctctcatccttttctcctatcttcatatctatcagagtatccactgtttattcaacaactactacttgatggtcagacacaaacaaacaagctaggtgctaattaataaagatacgagttttggccgggtgcggtggctcacgcctgtaatcccagcactttgggaggccgaggcgggcgaatcacgaggtcaggagttcaagaccagcctggccaacatggtgaaaccccatctctactaaaaatacaaacaattaactgagcatagtggtgggcacctataataccagctactccggaggctgaggcaggagaatcgcttgaacccaggaggcagaggttgcagtgagctgagatcgcgccactgcactctagccggagtgacagagtaagactctgtctcaaaaataaataaataaataaataaataaataaataaataaataaataaataaataaaaaataataatacaagttttcataagcacacttct

SEQ ID NO: 264210 - DNA, 2041 bp, Artificial Sequence
  derived and/or modified sequence
gtcatcccctcagtctgtagcccttttgtgtgagtgcctggcaagggtgacgtggggctgtttctgcgggcacagctgcagcaattaccggagtggaggcagggcccaggcagcactgccctccaagatcttcccttgggcttttcagcagtaaggggacatgcaccccaagggcctccacttggcctgaccttgctgcgggggctctctgtccccaggaacagtagagatggcaagcttatcgagaccctctctgcccagctgcctctgctccttcctcctcctcctcctcctccaagtgtcttccagctatgcagggcagttcagagtgataggaccaagacaccctatccgggctctggtcggggatgaagtggaattgccatgtcgcatatctcctgggaagaacgctacaggcatggaggtggggtggtaccgcccccccttctctagggtggttcatctctacagaaatggcaaggaccaagatggagaccaggcacctgaatatcggggccggacagagctgctgaaagatgctattggtgagggaaaggtgactctcaggatccggaatgtaaggttctcagatgaaggaggtttcacctgcttcttccgagatcattcttaccaagaggaggcagcaatggaattgaaagtagaagatcctttctactgggtgagccctggagtgctggttctcctcgcggtgctgcctgtgctcctcctgcagatcactgttggcctcgtcttcctctgcctgcagtacagactgagaggaaaacttcgagcagagatagagaatctccaccggacttttgggcaattccttgaagagctacgaaatcccttctgagtgatgtcacatcttggcaggggtggaggagagcctggttgcccagggatttgtccttggggacatctcatccatcaagttgcacactcactggcatctttgctatggggacattccaatttgcactttcaggaacactctgaattccaagtagaattgatttcccttcttctgtcatctaccttttctcttcattttcccatttttattacccttctttccatttctctctccagtcttccacctggaagccctctctggctaaggacaggcaggtgcccctctctccatcagaggacacctgtactggagagcaacacaggatggtctctgccatgaactggaggccaggaatctcctcactgaaaattacagtatggtaactttgcaaatggtggttgtttcttccaagactccagccctgattgcgcaaaactgaaaggcatgtgaagggaaggaagaggaagagtgcaaaacattgaagagagagctgagtgagctgaagagtgaggatatgagtagccccaacccaaacctggagatggggagaaacctacagaatactagccagagctcctccttgtcttggcagcctactagggacctggggaagcaaaaacgaaagctgggcaacatgcctgctttagaatgttttccttctacttacacatcttccacaggtctcagaatctttccttcctctcatccttttctcctatcttcatatctatcagagtatccactgtttattcaacaactactacttgatggtcagacacaaacaaacaagctaggtgctaattaataaagatacgagttttggccgggtgcggtggctcacgcctgtaatcccagcactttgggaggccgaggcgggcgaatcacgaggtcaggagttcgagaccagcctggccaacatggtgaaaccccatctctactaaaaatacaaacaattaactgagcatagtggtgggcacctataataccagctactccggaggctgaggcaggagaatcgcttgaacccaggaggcagaggttgcagtgagctgagatcgcgccactgcactctagccagagtgacagagtaagactctgtctcaaaaataaataaataaataaataaataaataaataaataaataaataaaaaataataatacaagttttcataagcacacttct

SEQ ID NO: 264211 - DNA, 2041 bp, Artificial Sequence
  derived and/or modified sequence
gtcatcccctcagtctgtagcccttttgtgtgagtgcctggcaagggtgacgtggggctgtttctgcgggcacagctgcagcaattaccggagtggaggcagggcccaggcagcactgccctccaagatcttcccttgggcttttcagcagtaaggggacatgcaccccaagggcctccacttggcctgaccttgctgcgggggctctctgtccccaggaacagtagagatggcaagcttatcgagaccctctctgcccagctgcctctgctccttcctcctcctcctcctcctccaagtgtcttccagctatgcagggcagttcagagtgataggaccaagacaccctatccgggctctggtcggggatgaagtggaattgccatgtcgcatatctcctgggaagaacgctacaggcatggaggtggggtggtaccgcccccccttctctagggtggttcatctctacagaaatggcaaggaccaagatggagaccaggcacctgaatatcggggccggacagagctgctgaaagatgctattggtgagggaaaggtgactctcaggatccggaatgtaaggttctcagatgaaggaggtttcacctgcttcttccgagatcattcttaccaagaggaggcagcaatggaattgaaagtagaagatcctttctactgggtgagccctggagtgctggttctcctcgcggtgctgcctgtgctcctcctgcagatcactgttggcctcgtcttcctctgcctgcagtacagactgagaggaaaacttcgagcagagatagagaatctccaccggacttttgggcaattccttgaagagctacgaaatcccttctgagtgatgtcacatcttggcaggggtggaggagagcctggttgcccagggatttgtccttggggacatctcatccatcaagttgcacactcactggcatctttgctatggggacattccaatttgcactttcaggaacactctgaattccaagtagaattgatttcccttcttctgtcatctaccttttctcttcattttcccatttttattacccttctttccatttctctctccagtcttccacctggaagccctctctggctaaggacaggcaggtgcccctctctccatcagaggacacctgtactggagagcaacacaggatggtctctgccatgaactggaggccaggaatctcctcactgaaaattacagtatggtaactttgcaaatggtggttgtttcttccaagactccagccctgattgcgcaaaactgaaaggcatgtgaagggaaggaagaggaagagtgcaaaacattgaagagagagctgagtgagctgaagagtgaggatatgagtagccccaacccaaacctggagatggggagaaacctacagaatactagccagagctcctccttgtcttggcagcctactagggacctggggaagcaaaaacgaaagctgggcaacatgcctgctttagaatgttttccttctacttacacatcttccacaggtctcagaatctttccttcctctcatccttttctcctatcttcatatctatcagagtatccactgtttattcaacaactactacttgatggtcagacacaaacaaacaagctaggtgctaattaataaagatacgagttttggccgggtgcggtggctcacgcctgtaatcccagcactttgggaggccgaggcgggcgaatcacgaggtcaggagttcaagaccagcctggccaacatggtgaaaccccatctctactaaaaatacaaacaattaactgagcatagtggtgggcacctataataccagctactccggaggctgaggcaggagaatcgcttgaacccaggaggcagaggttgcagtgagctgagatcgcgccactgcactctagccggagtgacagagtaagactctgtctcaaaaataaataaataaataaataaataaataaataaataaataaataaaaaataataatacaagttttcataagcacacttct

SEQ ID NO: 264212 - DNA, 540 bp, Artificial Sequence
  derived and/or modified sequence
tgacagttccgggtgatcggcccccggcaccccatccgggccctggtcggagacgaggtcgaactgccttgcaggatctctcctgggaaaaatgctactggtatggaggtggggtggtacagacctccgttctctcgtgtggtacacctgtatagaaatgggaaggaccaggatggcgaccaagccccggagtatcgaggccgaaccgagttgctgaaggatgccattggagagggtaaagtcacactgcgcatccggaatgttcggtttagcgacgaaggcggcttcacctgtttcttccgagaccacagctaccaggaggaggccgcaatggagctcaaagtcgaagatcctttctattgggttagccctggtgtactcgtcttgttggcggtcctgccagttctgctcctgcaaatcacagtcgggctcgtgtttctgtgtctccagtacagactcagggggaaactgagggccgagatagaaaatttacatagaactttcgggcagttccttgaagagctccgaaatccgttttag

SEQ ID NO: 264213 - DNA, 540 bp, Artificial Sequence
  derived and/or modified sequence
tgacagttccgggtgatcggcccccggcaccccatccgggccctggtgggggatgaagtcgaactcccgtgtcgtatctccccgggcaaaaatgcaaccggaatggaggtgggctggtaccggcctccatttagcagggtcgtccacctgtatagaaacgggaaggatcaggacggagaccaggctccagaatatagggggaggaccgaactgttaaaagacgcaattggggagggcaaggtgaccctgcgaatcagaaatgtccgtttttccgacgaaggcgggttcacctgtttctttagagatcattcttaccaggaggaggccgctatggaactgaaagtggaggaccctttctactgggtgagtcccggcgtgctggtgcttctggcggtacttccagtgttgctgctccaaatcaccgtaggtctggtgtttctttgtctgcagtataggcttcgggggaaactcagagctgagattgagaacttgcacagaacattcggccaattcctggaggaactcaggaatcccttctag

SEQ ID NO: 264214 - DNA, 540 bp, Artificial Sequence
  derived and/or modified sequence
tgacagttccgggtgatcggcccccggcaccccatccgggccctggtcggcgacgaagtggagctgccttgtaggataagccccggtaagaacgcaacagggatggaggtggggtggtacaggcctcccttcagcagggtggttcatctatatcgaaatggtaaggaccaggacggagatcaggctcctgaataccgaggacgtactgaattactcaaggacgctatcggcgaaggcaaggtgactcttagaatccggaatgttagatttagcgatgaaggcgggttcacatgtttctttagagatcacagctaccaggaagaggccgctatggagttgaaggtagaggatccgttctactgggtttccccgggggttctggtcctcctggccgtgctccctgtcctgctgctgcagatcacggttggtcttgtatttttgtgccttcagtacaggttgcgaggcaaactgcgggcagagatcgaaaacttgcaccgcacatttggtcagtttctggaggaactacgtaatcccttttag

SEQ ID NO: 264215 - DNA, 540 bp, Artificial Sequence
  derived and/or modified sequence
tgacagttccgggtgatcggcccccggcaccccatccgggccctggtgggagacgaagtggagctgccctgccgcataagccctgggaagaacgctactggtatggaggtgggctggtaccggccccccttcagtcgcgttgttcacctgtataggaacggcaaggatcaggacggggatcaagcaccggagtatagaggcagaaccgaactgcttaaggacgcaattggggagggcaaagtgacgcttcgaattcggaatgtacggttttcggacgaggggggttttacctgtttcttcagagaccactcctatcaggaggaggcagctatggaactaaaagtagaagatcccttctactgggtttctccaggagttcttgtgctgctcgcagttctccccgtgctgttgcttcaaatcactgttgggctcgtttttttgtgcctgcagtaccgtctccgaggcaaattacgtgctgagatcgagaacctccataggacttttgggcaattccttgaggagctccgaaatcccttctag

SEQ ID NO: 264216 - DNA, 540 bp, Artificial Sequence
  derived and/or modified sequence
tgacagttccgggtgatcggcccccggcaccccatccgggccctggtgggagatgaggtggaactgccttgtagaatcagtcccggcaagaacgccacagggatggaagtgggatggtataggccacctttctccagggtcgtccatctttatcgcaacggaaaggatcaggacggcgatcaggctcccgagtatcgcgggcgcacagaactcctcaaggacgctattggcgagggtaaggtcacgctgcgcatcagaaatgtcagattctctgatgagggtggttttacctgcttctttcgagaccacagttatcaggaagaagctgctatggagctcaaggtagaggacccattctactgggtctcaccgggtgtcctggtgctgctggcagtgttacccgtactgctactgcagattacccttggtttagtgttcctgtgcttacagtacagacttagaggcaagctgagggccgaaatcgagaacctccatcgaacattcggacagtttctggaagagctgcgcaaccctttctag

SEQ ID NO: 264217 - DNA, 627 bp, Artificial Sequence
  derived and/or modified sequence
atggccagcctgagccggcccagcctgcccagctgcctgtgcagctttcttctgctgttactactgcaggttagctcttcctacgctggtcagtttagagttatcggtcctcggcatcctatcagagccctggtaggcgacgaggtggaactcccatgcaggatcagtccagggaaaaatgccactggaatggaggtgggctggtacaggcccccgttctcccgcgttgtacatctgtatagaaatgggaaggatcaggacggcgatcaggcccctgaatacaggggtcgtacagagctgttgaaagacgccatcggggagggaaaggttaccctccgcatacggaacgtgcgtttttctgatgaaggggggttcacctgcttctttcgcgaccatagctaccaagaagaagctgcaatggaactgaaggttgaggatccattctattgggtctcccccggagtgctggtcctgcttgccgtgctgcccgtcctgcttctccagatcaccgtaggactcatctttctgtgcttacagtaccggctgcggggcaagcttagagccgaaatagagaatctgcacagaactttcggccagttcctcgaggagctcaggaatcctttctag

SEQ ID NO: 264218 - DNA, 540 bp, Artificial Sequence
  derived and/or modified sequence
tgacagttccgggtgatcggcccccggcaccccatccgggccctggtaggggacgaagttgaactcccttgccgcatcagcccaggcaagaatgctaccgggatggaggtgggctggtacaggcctcctttcagccgcgtggtgcacctttatagaaatggaaaagatcaggacggcgaccaagctcccgaataccgtggaagaacagaactgctgaaggatgcgataggcgaagggaaggtcactttaaggatccgtaacgtccgcttcagtgacgagggaggattcacttgtttcttccgcgatcattcttaccaggaagaagcagcgatggagcttaaagtggaggaccccttttactgggtgtctcctggagtgctcgtcctgcttgccgtgctgccagtcctgctgctgcagatcactgtgggattagtcttcctgtgtttacagtatcggctgcgtggaaagctccgggcggaaatcgaaaatttgcaccggacttttggacagttcctcgaggagctccgaaatcccttttag

SEQ ID NO: 264219 - DNA, 540 bp, Artificial Sequence
  derived and/or modified sequence
tgacagttccgggtgatcggcccccggcaccccatccgggccctggtaggcgacgaagtggagttgccttgtcgcatctcacccggaaagaatgccacaggaatggaagttgggtggtatcgaccccccttttctcgggtcgtgcatctgtacaggaatggtaaggatcaggacggcgaccaggcacctgagtacaggggccgcacagagctcctcaaagacgccattggagaaggaaaggtcacgttgagaatcaggaacgtacggttttcggacgagggcggattcacctgcttctttcgcgaccactcttaccaggaggaagccgcaatggaactgaaagttgaagatcccttttattgggtatctcctggagtgctagtgctgctcgcagtactgccagttctccttctgcaaatcaccgtcggactggtatttttgtgcctgcagtaccggttacggggaaaactcagagctgaaattgaaaatctccaccgtacatttggacaattcctcgaagagttgaggaatcccttctag

SEQ ID NO: 264220 - DNA, 627 bp, Artificial Sequence
  derived and/or modified sequence
atggccagcctgagccggcccagcctgcccagctgcctgtgcagcttcctcctgctgttgctcctacaggtcagcagtagctacgcaggacaattccgtgtgataggacctcggcaccccatcagggctctagttggtgacgaggtggagctgccatgcaggatcagcccgggaaaaaacgccacaggaatggaagtagggtggtaccgaccccctttctcaagagtcgtccatttataccgaaatggaaaggaccaggacggcgatcaggctcctgaataccgggggcggactgagttgctcaaagacgctattggagaaggcaaggtgacactgcgtattaggaacgttcggttcagtgacgaagggggcttcacctgttttttcagagatcattcctatcaagaggaagctgcaatggagttgaaggtggaggacccattttattgggtctcgcctggggtgttggttctactggccgtactgcccgtcctgttgttacaaatcactgttggtttagtgttcctgtgtctgcaatatcgcctgcgcggtaaactgcgcgctgaaatagagaacctgcatagaacatttgggcagttcctggaggagctgcggaatcctttttag

SEQ ID NO: 264221 - DNA, 627 bp, Artificial Sequence
  derived and/or modified sequence
atggccagcctgagccggcccagcctgcccagctgcctgtgcagcttcttgctcttactgctccttcaggtgtcctctagttacgctggtcagtttcgggtcattgggcctagacaccccatacgggcccttgtaggggacgaggtcgaactgccgtgtaggatttctcctggtaaaaacgcgaccggcatggaagtcggctggtatcggccaccatttagcagagttgttcatctgtatcgaaatggaaaagaccaggacggggaccaagccccagagtacaggggacgcacagagctgttaaaagacgcaattggcgaaggcaaggtcaccctccgcatccggaatgtgagattttcggacgaaggtggattcacctgcttctttcgagatcactcctatcaggaggaagcggccatggagctgaaagtcgaagatcccttttactgggtgagtccgggggtattggtcttacttgctgtgttaccagtgctccttcttcagattacggtgggcctggtgttcctttgcctgcagtacaggctccggggaaagctccgcgccgagattgaaaacctgcacagaaccttcggacagtttttggaagaactcaggaacccattctag

SEQ ID NO: 264222 - DNA, 627 bp, Artificial Sequence
  derived and/or modified sequence
atggccagcctgagccggcccagcctgcccagctgcctgtgcagctttctgcttctgttacttctgcaggtaagcagttcctacgcgggccaattccgcgtcatagggcctcgacaccctatccgggcactggtgggcgacgaagtcgagctaccttgtcgtatttctcctggcaagaatgccacaggcatggaagttggatggtaccgcccaccattctccagagtcgtgcacctgtacagaaatggtaaggaccaggatggagatcaggcgccagaatatagaggccgcacggagctgctgaaagatgcgatcggcgaggggaaagtgactttacgtatcagaaacgtgcggttttctgatgagggcgggtttacatgtttcttccgcgaccacagttatcaggaagaggcagcaatggagcttaaggttgaggaccccttctattgggtgtcacctggggttctggtgctcctggccgtgctgccggtgctgctgctgcagatcacagtcggtttggtgtttttgtgccttcagtatcgcctgcggggcaagctccgggccgaaattgagaatcttcaccggacatttggtcagtttctagaagagttacggaaccctttctag

SEQ ID NO: 264223 - DNA, 627 bp, Artificial Sequence
  derived and/or modified sequence
atggccagcctgagccggcccagcctgcccagctgcctgtgcagcttccttctgctgctccttctgcaggtgagttcatcctacgcaggacagtttcgggttatcggaccacgacacccaatacgggctttagtaggtgatgaagtggagcttccctgtaggatctcgccgggtaaaaacgcaaccggaatggaggtggggtggtatcgaccccccttttctagagttgtgcatctctatcggaatggtaaagatcaggacggtgatcaagcgcctgagtatcgaggtcgcacggagctcttaaaggatgcaataggtgaaggaaaggtgacgttgagaattagaaatgtccgattcagcgatgaggggggcttcacttgcttcttcagggatcacagctaccaggaggaggccgctatggaactcaaggtagaggatccgttttattgggtctcccccggcgtcctcgtgttactagccgtgcttcctgtgctgctgttgcaaatcactgtgggcctggtctttctgtgcctgcaataccgcctgcggggaaaactgagggctgaaattgaaaacttgcaccgtacctttgggcaattcctggaggagctgcgtaaccccttctag

SEQ ID NO: 264224 - DNA, 627 bp, Artificial Sequence
  derived and/or modified sequence
atggccagcctgagccggcccagcctgcccagctgcctgtgcagcttcttgttactcctgcttctccaggtttcttcatcctacgccggccagttcagggttattggaccaagacaccccatccgggccttggtgggggatgaggtggaactgccttgccgcatctctccaggcaaaaacgcaaccggaatggaagtggggtggtacagaccccccttctctcgggtcgttcacctgtatcgtaacggaaaagatcaggatggcgaccaggcgcctgagtatcgcggaagaacagaattgctgaaagacgctatcggtgaagggaaggtgaccctgcggatcagaaatgtccggtttagtgacgagggaggctttacatgtttttttagagaccatagttatcaggaagaagcagccatggaactaaaggtggaggatcctttttactgggtgtcacccggtgttcttgtcctgctcgcggtgctgcctgtcctgctgttacagattaccgtaggcctggtcttcctctgtttgcagtatagacttcggggaaaattgcgggccgagattgaaaatcttcaccgaacttttgggcagtttcttgaagagctccgcaatccattctag

SEQ ID NO: 264225 - DNA, 627 bp, Artificial Sequence
  derived and/or modified sequence
atggccagcctgagccggcccagcctgcccagctgcctgtgcagctttctgttactgctattgttgcaggtcagcagtagctatgccggccagtttagggtcataggccccagacaccccattcgagcactggtcggcgacgaggttgagcttccgtgccgcattagcccgggtaagaacgctacaggcatggaggttgggtggtatcgacccccgtttagtagggttgtccatctttaccgcaatggaaaggaccaggacggagaccaggcccctgagtatagagggagaaccgaactgctaaaggacgcaataggggaaggcaaagtgactctccgcataaggaatgtgaggttctccgacgaaggggggttcacttgcttcttcagggaccatagttaccaggaggaagccgccatggagctgaaagtggaggatccgttctattgggtatcacctggggtgctcgtcctacttgctgttctgccggtcttgctcctgcagatcacagtgggattggtcttcctctgtctacagtaccggctccgggggaagctgcgtgcagaaatagagaacctgcacagaacttttggacaatttctggaagaactgcggaacccattctag

SEQ ID NO: 264226 - DNA, 540 bp, Artificial Sequence
  derived and/or modified sequence
tgacagtttcgagtgatcggccctcgtcatccaatccgcgctctcgtgggggacgaagtggaactaccttgccgcataagcccagggaaaaacgcgactggcatggaggtgggctggtaccgaccacctttctctcgcgtagtccacctgtatagaaacgggaaggatcaggatggagatcaagcccctgagtaccgaggcagaaccgaactgctgaaggatgccatcggagaaggaaaagtcacgctgcgaatccgtaacgtgaggtttagcgatgaaggcggttttacctgttttttcagagaccattcatatcaagaagaggccgctatggaactaaaagtagaagaccccttctactgggttagccccggagtgttggtcttgctggctgtgctacccgtcctgctgctccagattaccgtcgggctggtcttcctatgtctacagtacagactcaggggcaagcttagagctgaaatcgagaatctccacaggaccttcggccagttcctggaggagctgcgaaaccccttttag

SEQ ID NO: 264227 - DNA, 540 bp, Artificial Sequence
  derived and/or modified sequence
tgacaatttagagtaattgggccacgacaccccattcgcgcactggtgggagacgaggtggaactcccctgccgtatttcaccaggaaagaacgcaaccggtatggaagttggctggtatcgcccacccttctctcgtgtagtgcatctgtataggaacgggaaagatcaagacggcgaccaggcccctgaatataggggacggactgaactcctgaaggatgccatcggcgaaggtaaagtcaccctccggattcggaatgtacgatttagtgacgaaggcggatttacatgttttttcagagatcactcctatcaagaggaagctgccatggagttaaaagtggaggatccgttctactgggtttctcccggtgtgctggtactgttggctgtacttccagtcctgctcttacagatcaccgtgggcctggtgttcttgtgcctgcaatatcgtcttcggggaaagctgcgtgccgaaatcgaaaatctccaccgcactttcggacagttcttggaggagctcagaaatcccttctag

SEQ ID NO: 264228 - DNA, 540 bp, Artificial Sequence
  derived and/or modified sequence
taacagttcagagtgattggacccaggcacccaatccgcgctctcgtgggggatgaagtggagttgccatgccgcattagccccggaaagaacgctactggcatggaagttggttggtataggcctccttttagccgcgtggtgcacctgtatcgaaacgggaaggaccaagacggagaccaggctcccgaataccgcggaaggactgagcttctgaaagatgccatcggagaagggaaggtaacccttcgcattcggaacgtgcggttctccgacgaagggggttttacatgcttttttagggatcacagttatcaggaggaagccgctatggagttgaaagtggaagacccgttttactgggtctccccaggggttttagtgttgctggcagtcttgcccgtgctcctgctgcagattacagtgggcctggtttttctatgtcttcaatataggttgcggggtaagctgcgcgcagagattgaaaaccttcacaggacttttggccaattccttgaggagctacgaaatcccttctag

SEQ ID NO: 264229 - DNA, 540 bp, Artificial Sequence
  derived and/or modified sequence
tgacagttccgcgttatcggcccacgccaccctatacgggctcttgtgggtgacgaggttgaactcccttgccgaattagcccgggaaagaatgctacaggtatggaagtgggctggtatcgaccaccattctccagagtggttcacctgtatagaaacggcaaagaccaagacggcgatcaagcacctgaatacagaggaagaaccgagttgctaaaggacgcaataggtgaggggaaagtgactcttcgcatccgcaacgtgcgttttagcgacgaagggggatttacgtgcttcttcagggatcactcatatcaagaggaggcagccatggaactgaaggtggaggaccccttctactgggtgtctcctggggtgctcgtacttctggccgttctgcccgtccttttactgcaaatcacagtcgggctggtcttcctttgtctgcagtaccggctcagaggcaagctgcgtgcagagattgagaacctccaccgcacatttggccagttcctggaagaactcaggaatcccttttag

SEQ ID NO: 264230 - DNA, 540 bp, Artificial Sequence
  derived and/or modified sequence
tagcagtttcgagtgatcggccctcggcatcctatccgggctctggtgggagacgaggtcgagctgccttgtagaatctctcccggaaagaacgccaccggcatggaggtgggctggtaccgacccccatttagtcgggttgtgcatctatatagaaacggaaaggaccaggacggagaccaggcacccgaatataggggcagaacggagcttctgaaagacgccatcggggaagggaaggtcaccctgcgcattcgtaatgtgagattttcagatgagggaggctttacttgtttcttccgggaccatagctaccaagaggaagcagctatggaacttaaagttgaggaccccttttattgggtatctccgggagttctcgtgcttcttgccgtcctcccagtcttattgttgcagatcacattgggtttggtttttttatgtttgcaataccgcttacgcggaaagctgagagccgaaatcgaaaacctgcatagaaccttcggtcagtttctggaagagctgagaaatcccttctag

SEQ ID NO: 264231 - DNA, 627 bp, Artificial Sequence
  derived and/or modified sequence
atggcatccctctctaggccctctttgccctcctgcctatgctcctttcttttacttttgcttcttcaggtgtcttcgtcatatgctggccaatttcgtgtgatcggtcctcgccatcccattagagctttagtaggggacgaagtcgagcttccttgccggatctcaccaggcaagaacgctactggcatggaggtgggctggtatcgcccaccatttagcagagtcgttcatttatatcgcaatggaaaggaccaggacggcgaccaagccccagaataccgcggtagaaccgaattactgaaggacgctattggagagggtaaagtcaccctgcggataaggaatgtgcggttctctgatgaagggggattcacatgtttcttccgcgaccatagttaccaggaggaggccgctatggagcttaaagtggaagaccctttctattgggtgtcccctggcgttctggtcctgctggctgtgctgcccgttttgctcctacagataaccgttggcctaatcttcctttgtctccagtacagactgcgtgggaaactgcgggctgaaatagagaatctgcatagaacatttggtcagtttcttgaggagctgcggaaccccttctag

SEQ ID NO: 264232 - DNA, 540 bp, Artificial Sequence
  derived and/or modified sequence
tgacagttcagggtgataggtcctaggcatcctatcagggccttagtaggagatgaggtggagttaccctgtagaatttcccccggaaagaacgccaccggtatggaagtgggatggtatagaccccctttctctcgagttgtgcatttgtaccgtaatggtaaagaccaggatggcgaccaagctcctgaataccgagggaggaccgagcttctgaaagatgccatcggagagggcaaggtcactctacgcatcagaaatgtccgctttagcgacgaaggcggattcacatgcttttttcgagatcacagctaccaggaggaggctgccatggaattaaaagtggaggaccctttttactgggtgtcaccgggtgtgcttgttttgctcgccgtgttacccgttctgctcctgcagatcactgtgggcctcgtatttttgtgcctccagtaccggctcagggggaagcttagagccgagatcgaaaatctgcataggacctttggacagttcctggaggagctgagaaaccctttctag

SEQ ID NO: 264233 - DNA, 540 bp, Artificial Sequence
  derived and/or modified sequence
taacaatttagggtgatcgggcctaggcatcccatccgcgcactggtcggagacgaagtcgaacttccgtgtcggatatcaccaggcaaaaacgcaaccggaatggaggtgggttggtatcggcctcctttctcccgcgtggtccacctgtaccgcaatgggaaggaccaggatggcgatcaggcgccagaataccgaggaaggaccgagctcctgaaagatgcgattggggaaggaaaggtcaccctcaggatccgtaacgtcaggtttagcgacgaaggaggctttacctgcttttttcgggaccatagttatcaagaggaggctgccatggaactgaaagttgaagaccctttttactgggtttcgcccggtgttttggttctactagctgtgcttcctgtgttgctgttgcagattacggttggtctggtcttcttgtgcctgcaatatcggttaagaggaaagctgcgggcagagatcgaaaatctgcaccggacattcggccagttcctggaggaactccggaatcctttttag

SEQ ID NO: 264234 - DNA, 627 bp, Artificial Sequence
  derived and/or modified sequence
atggcctcgctctcccggccatccctccctagctgtctgtgcagcttcctgctgttgctcttgctccaggtatcttcttcttatgccggacagttcagggtgatcggaccaaggcaccctatccgggctctggtgggtgatgaagtggaattgccttgtcgcatatcacccggaaaaaatgcaaccggtatggaagtcggatggtaccggccaccgttctcccgcgtggtgcacctgtacaggaacggcaaggatcaggatggtgaccaggcccctgaatacagaggccgtacagaactgctgaaggatgccatcggagaagggaaggtcacactgcggatacgcaatgtgcggttctctgacgagggcggtttcacttgctttttcagagaccacagttaccaagaggaggcggcaatggaactcaaagtggaggatcccttttattgggtatctcccggagtgctcgtactgctagcggtactgcctgtccttctcctccagatcaccgtcggactggtgttcctgtgccttcagtataggttacgaggtaaactgagggccgagatcgaaaacctgcaccggacctttggccagttcctagaagagttacgcaatcccttctag

SEQ ID NO: 264235 - DNA, 627 bp, Artificial Sequence
  derived and/or modified sequence
atggcctctctgagccgcccttctttgccgagttgtttgtgctcattcctgctgctccttctcctgcaggtttcatcctcatacgctggccaattcagagtcattggccctcgacatcccatccgggcactcgtcggcgatgaagtggaactgccctgtcggatctcaccaggcaagaatgctaccggcatggaggtcggctggtaccgaccacccttttcccgcgttgtacacctgtacagaaatggtaaagaccaggacggtgatcaagcccctgaatacagaggaagaacggagctcctgaaggatgccattggagagggtaaggtgactctccggatccggaatgttcgcttctccgacgaaggtggcttcacttgcttcttccgggaccacagctaccaggaagaggcagctatggagctgaaggtggaagatcccttttattgggtgagccctggggtgttagttttgctcgccgtgttgcctgtcctgcttctgcagattacagtcggcctggtgtttctgtgcttacagtaccggctccgcggtaagcttcgcgctgagattgaaaatcttcacagaacattcggacagtttcttgaggagctgcggaatcctttttag

SEQ ID NO: 264236 - DNA, 627 bp, Artificial Sequence
  derived and/or modified sequence
atggccagcctgagccgcccttccctcccgtcctgcctttgttcctttctattgctccttttactccaagtgtctagctcgtatgccggtcaatttcgtgtgatcggcccacggcaccccattcgggctctggtgggcgatgaggtggagttaccttgtagaatctcaccgggtaagaatgctactggtatggaggtcgggtggtaccggccaccgttctctagagtcgtgcatttgtatcggaatgggaaagaccaggacggcgatcaggctccggagtatcgtggccgaacagaactgctgaaggacgctattggagaaggtaaagtcacgcttcgtatcagaaacgttcgcttttctgacgaaggaggattcacctgcttctttagagatcactcctaccaggaagaagccgcaatggagctaaaagttgaagaccccttctactgggtgtcccccggagtgctggtcctgttagctgtgttgccagtgttgctcttacagatcacggtgggactggtttttctctgtcttcagtatcgtctaagaggaaagctgcgcgctgagatcgaaaacctgcaccgtacctttgggcagttcttggaagagctgcgaaacccattctag

SEQ ID NO: 264237 - DNA, 627 bp, Artificial Sequence
  derived and/or modified sequence
atggcatccttgtctagaccatcactaccttcttgtttgtgcagtttcttgctcctcttactgttgcaagtgtcctcaagctatgcaggccagtttcgtgtcatcggcccacgccaccccattcgcgctctggtgggtgacgaagttgagttgccttgtcgaatctcacctgggaagaatgccactggaatggaggtgggttggtatcgacccccattttcaagggtggtgcacttatatcgaaacggcaaagaccaggatggagaccaagctccggaatatcggggtagaacagagctgctaaaggacgccataggtgaaggcaaggttacgctcaggattaggaatgtcaggtttagcgatgaggggggatttacatgcttctttcgcgaccactcataccaggaagaggctgccatggagctgaaagttgaagatcctttctactgggtctcgccaggcgtattagtcctgttggccgtattgccagtgctgctgctccagatcaccgtgggactggtgttcctgtgtctgcagtaccgacttcgagggaagctgcgggcagagattgagaaccttcacagaacatttgggcagttcctcgaagagctcagaaaccctttctag

SEQ ID NO: 264238 - DNA, 627 bp, Artificial Sequence
  derived and/or modified sequence
atggcatcactcagccgtccatccttaccctcatgcttgtgtagtttcttactcctactgttgctgcaggtatcatcctcatatgcgggtcaattccgggtgattggcccacgccatccaattagggctcttgtcggcgacgaggtggagctgccatgtaggatatctccaggcaagaacgccaccggcatggaggttggatggtatagacccccattcagccgggtcgtgcacctgtatcgaaacgggaaggatcaagacggggatcaggcccctgagtatcgagggagaaccgagctgcttaaagatgcaatcggtgaaggaaaagtcacacttaggatccgcaatgtgcggttctccgacgaaggtggttttacttgtttcttccgcgaccactcctaccaagaggaggccgctatggaactgaaggtggaagacccgttttattgggtctcacctggagtcctagtgcttctggcagtcctgcccgtgcttctgctgcaaattaccgtaggtctagtcttcttgtgtttgcagtatagacttcggggaaagctgagagctgagattgagaaccttcacaggacgtttggacaatttctcgaagagctgcggaatccattttag

SEQ ID NO: 264239 - DNA, 627 bp, Artificial Sequence
  derived and/or modified sequence
atggcatctctgagtcgcccttcgttgccatcatgtttatgctcctttctactgcttctgctgcttcaggtcagctcaagttacgctggacagttccgtgtcataggcccaagacaccctatcagggcattggtgggcgacgaagtggagcttccgtgccggatctcaccaggcaagaatgcaacaggcatggaggtggggtggtaccgaccccctttttccagagtggtgcatctgtatcgcaatggaaaagaccaggacggggatcaggccccagagtataggggacgcaccgagcttctgaaggacgcaattggcgaggggaaggttactctgaggatacggaatgtgaggttctcagacgagggtggttttacatgcttctttcgcgatcacagttatcaagaagaggccgcaatggagttaaaagtggaggatcctttttattgggtctctcctggggtcctggtcctcctggccgttctaccagtgcttctgttacagattacggtcggactggtcttcctctgtctgcagtaccggctccgaggcaagctcagagctgaaatagaaaatctgcatcgaactttcggtcagttcctggaggaattacggaacccgttctag

SEQ ID NO: 264240 - DNA, 540 bp, Artificial Sequence
  derived and/or modified sequence
tgacagttcagagtgatcggccccagacaccccatcagagccctggtgggcgacgaggtggagctgccctgcagaatcagccccggcaagaacgccaccggcatggaggtgggctggtacagaccccccttcagcagagtggtgcacctgtacagaaacggcaaggaccaggacggcgaccaggcccccgagtacagaggcagaaccgagctgctgaaggacgccatcggcgagggcaaggtgaccctgagaatcagaaacgtgagattcagcgacgagggcggcttcacctgcttcttcagagaccacagctaccaggaggaggccgccatggagctgaaggtggaggaccccttctactgggtgagccccggcgtgctggtgctgctggccgtgctgcccgtgctgctgctgcagatcaccgtgggcctggtgttcctgtgcctgcagtacagactgagaggcaagctgagagccgagatcgagaacctgcacagaaccttcggccagttcctggaggagctgagaaaccccttctag

SEQ ID NO: 264241 - DNA, 540 bp, Artificial Sequence
  derived and/or modified sequence
tgacagttcagagtgatcggccccagacaccccatcagagccctggtgggcgacgaggtggagctgccctgcagaatcagccccggcaagaacgccaccggcatggaggtgggctggtacagaccccccttcagcagagtggtgcacctgtacagaaacggcaaggaccaggacggcgaccaggcccccgagtacagaggcagaaccgagctgctgaaggacgccatcggcgagggcaaggtgaccctgagaatcagaaacgtgagattcagcgacgagggcggcttcacctgcttcttcagagaccacagctaccaggaggaggccgccatggagctgaaggtggaggaccccttctactgggtgagccccggcgtgctggtgctgctggccgtgctgcccgtgctgctgctgcagatcaccctgggcctggtgttcctgtgcctgcagtacagactgagaggcaagctgagagccgagatcgagaacctgcacagaaccttcggccagttcctggaggagctgagaaaccccttctag

SEQ ID NO: 264242 - DNA, 627 bp, Artificial Sequence
  derived and/or modified sequence
atggccagcctgagcagacccagcctgcccagctgcctgtgcagcttcctgctgctgctgctgctgcaggtgagcagcagctacgccggccagttcagagtgatcggccccagacaccccatcagagccctggtgggcgacgaggtggagctgccctgcagaatcagccccggcaagaacgccaccggcatggaggtgggctggtacagaccccccttcagcagagtggtgcacctgtacagaaacggcaaggaccaggacggcgaccaggcccccgagtacagaggcagaaccgagctgctgaaggacgccatcggcgagggcaaggtgaccctgagaatcagaaacgtgagattcagcgacgagggcggcttcacctgcttcttcagagaccacagctaccaggaggaggccgccatggagctgaaggtggaggaccccttctactgggtgagccccggcgtgctggtgctgctggccgtgctgcccgtgctgctgctgcagatcaccgtgggcctgatcttcctgtgcctgcagtacagactgagaggcaagctgagagccgagatcgagaacctgcacagaaccttcggccagttcctggaggagctgagaaaccccttctag

SEQ ID NO: 264243 - DNA, 627 bp, Artificial Sequence
  derived and/or modified sequence
atggccagcctgagcagacccagcctgcccagctgcctgtgcagcttcctgctgctgctgctgctgcaggtgagcagcagctacgccggccagttcagagtgatcggccccagacaccccatcagagccctggtgggcgacgaggtggagctgccctgcagaatcagccccggcaagaacgccaccggcatggaggtgggctggtacagaccccccttcagcagagtggtgcacctgtacagaaacggcaaggaccaggacggcgaccaggcccccgagtacagaggcagaaccgagctgctgaaggacgccatcggcgagggcaaggtgaccctgagaatcagaaacgtgagattcagcgacgagggcggcttcacctgcttcttcagagaccacagctaccaggaggaggccgccatggagctgaaggtggaggaccccttctactgggtgagccccggcgtgctggtgctgctggccgtgctgcccgtgctgctgctgcagatcaccgtgggcctggtgttcctgtgcctgcagtacagactgagaggcaagctgagagccgagatcgagaacctgcacagaaccttcggccagttcctggaggagctgagaaaccccttctag

SEQ ID NO: 264244 - protein, 131 aa, Artificial Sequence
  derived and/or modified sequence
MASLSRPSLPSCLCSFLLLLLLQVSSSYADPFYWVSPGVLVLLAVLPVLLLQITVGLIFLCLQYRLRGKLRAEIENLHRTFDPHFLRVPCWKITLFVIVPVLGPLVALIICYNWLHRRLAGQFLEELRNPF

SEQ ID NO: 264245 - protein, 131 aa, Artificial Sequence [sequence omitted]

SEQ ID NO: 264246 - protein, 131 aa, Artificial Sequence
  derived and/or modified sequence
MASLSRPSLPSCLCSFLLLLLLQVSSSYADPFYWVSPGVLVLLAVLPVLLLQITLGLVFLCLQYRLRGKLRAEIENLHRTFDPHFLRVPCWKITLFVIVPVLGPLVALIICYNWLHRRLAGQFLEELRNPF

SEQ ID NO: 264247 - DNA, 396 bp, Artificial Sequence
  derived and/or modified sequence
atggcgtccttatccaggccgtctttgccctcatgcctctgctcgtttctgctgctgctgctgctgcaggtgagctcctcttatgctgacccattctattgggtgtctcctggggtgctagttctgctggccgtgctcccagtgctgctgctgcagatcaccgtaggactcatctttttgtgtctgcagtacagactccgggggaagcttagagcagaaatagaaaacctccatcgaacttttgacccccatttcctgagggtgccatgctggaagatcaccctgttcgtgattgtgcctgtcctggggccccttgtcgccctcatcatttgctataactggttgcatagaagattggcaggtcaatttttggaagagttaagaaacccattctag

SEQ ID NO: 264248 - DNA, 396 bp, Artificial Sequence
  derived and/or modified sequence
atggccagtctctccagacccagtctaccctcctgcctctgctccttcctgcttctgcttctgctacaggtcagttcgtcttatgccgacccgttctattgggttagtccaggcgtgctggtgcttctagctgtgctgcctgttcttctattacaaattactgtgggactggtgttcctctgtctgcaataccgccttcgcggaaagcttcgggcagagattgaaaatctgcatcgcacatttgatccccacttcctcagagttccctgttggaaaataaccctgttcgtgatcgtgccggtcctgggcccactcgtggccctgatcatatgttacaattggctgcatcgccgactggccggccagttcttagaagaactcaggaacccgttttag

SEQ ID NO: 264249 - DNA, 396 bp, Artificial Sequence
  derived and/or modified sequence
atggccagtctaagtcgccctagccttccttcctgtctgtgctctttcctcctcctccttcttctacaggtgtctagttcgtacgcagaccccttctattgggtgtctcccggtgtgcttgtgctgcttgcagttttacctgtgctgctgctgcagattacagtgggactagtgtttctctgtctgcaataccgattgagaggcaaactacgcgcggagatcgaaaatctgcaccgcactttcgatccacattttttgcgcgtgccatgctggaaaatcacattgttcgtcatagtccccgtgctcggacctttggtggcgcttatcatatgttataactggctccacagacgcctggcaggacagtttttggaggagctgaggaacccattctag

SEQ ID NO: 264250 - DNA, 396 bp, Artificial Sequence
  derived and/or modified sequence
atggcctctctctccagacccagtctgccctcctgcctgtgttcattcctgctactcctgctgctgcaggtctccagttcctacgccgacccattctattgggtgtcccccggcgtgttggtcctgctcgcagttctgccagtgctgcttctccagattacactaggcttggtattcctatgtcttcagtaccgtctccgcggcaagcttcgagccgaaattgagaacctgcaccggacattcgaccctcattttctgagggtcccatgttggaagatcactctgtttgttatagtacctgtgctcggacctctggtggccctgattatttgttacaactggttgcacaggaggttggcaggtcaattccttgaggagctgcgaaatcccttttag

SEQ ID NO: 264251 - DNA, 396 bp, Artificial Sequence
  derived and/or modified sequence
atggcgtctctgtcacggccctcactgccttcctgtctgtgtagtttcctcctcctgttgttgcttcaagtttccagttcctacgccgaccccttttactgggtgtctcccggggtgctggtactactagccgttttgcctgtactgctgttgcaaatcaccgtggggcttgtcttcctgtgcctccagtaccggttaagagggaagctgcgcgctgaaatagagaacttacatcggacattcgaccctcactttctgagggtgccttgctggaaaatcaccttgtttgtgatagtgcccgtgttggggcccctcgttgctctgatcatttgctacaattggctccaccggaggcttgccgggcaattcctcgaggagctgcggaaccccttctag

SEQ ID NO: 264252 - DNA, 396 bp, Artificial Sequence
  derived and/or modified sequence
atggcttcactctcgaggccctctctcccctcttgcctctgcagtttcttgctgcttcttttgctgcaggtgagctcatcttatgccgatcctttttactgggtgtccccaggtgtcctggttctgctggctgtgctacccgttcttctcctgcagatcacagtagggctggtatttctgtgtcttcaatacagattgagggggaaattgcgggcagagatagagaatttgcacaggacatttgacccgcatttcctgcgagtgccatgttggaaaattacgctctttgtcattgtgccagtacttgggcctttggtcgccctgatcatttgctacaattggctgcatcgtaggcttgcaggacagtttttagaggaactgaggaatccattctag

SEQ ID NO: 264253 - DNA, 396 bp, Artificial Sequence
  derived and/or modified sequence
atggcaagcttgagtagaccctcacttccctcctgtctgtgctctttcctgcttctactactccttcaggtgtcatcgagctacgccgacccattttactgggtgagcccaggcgttttggtactgctcgcagtcttacccgtgttgctgctgcagatcactgtgggattggtgtttctgtgcttacagtacagactgcgcggcaaactccgggcggaaatcgaaaacttacaccgtacattcgatcctcacttcctgagggtcccctgctggaagatcacgctgtttgttatcgtgcctgtcttggggccacttgtggcactcatcatctgttataactggctacaccgcaggctcgccggacagttcttggaggagttgaggaaccctttctag

SEQ ID NO: 264254 - DNA, 396 bp, Artificial Sequence
  derived and/or modified sequence
atggccagcctgagccgaccaagtttgccatcctgtttgtgttcattcctgctgctcctgctcttgcaggtctcgagttcatacgccgatcccttttattgggtctcccccggagtgctggttctgcttgcagtgctgccagtcctgcttttgcagatcaccgtaggccttgtatttctatgcctgcagtacaggctgcgcggtaagcttcgcgcagagatcgagaacctgcaccgcacttttgatccccatttcctgagagtgccctgttggaagatcacactgtttgtaatagtccccgtgctcggcccactcgttgcccttattatctgctataattggctgcacagacgcctggcaggtcagttcttggaagagttacgcaatcccttttag

SEQ ID NO: 264255 - DNA, 396 bp, Artificial Sequence
  derived and/or modified sequence
atggccagcctgagccggcccagcctgcccagctgcctgtgcagcttcctgctgctgctgctgctgcaggtgagcagcagctatgctgaccccttctactgggtgtccccaggagtgctggtgctgctggccgtgctgcctgtgctgctgctgcagatcaccgtgggcctcatcttcctgtgcctgcagtaccgcctgcggggcaagctgcgggcagaaattgagaacctgcacaggacctttgacccccacttcctgcgggtgccctgctggaagatcaccctcttcgtcatcgtgcctgtgctgggccccctggtggccctgatcatctgctacaactggctgcaccggcggctggccggccagttcctggaggagctgaggaaccccttctag

SEQ ID NO: 264256 - DNA, 396 bp, Artificial Sequence
  derived and/or modified sequence
atggccagcctgagccggcccagcctgcccagctgcctgtgcagcttcctgctgctgctgctgctgcaggtgagcagcagctatgctgaccccttctactgggtgtccccaggagtgctggtgctgctggccgtgctgcctgtgctgctgctgcagatcaccgtgggcctggtgttcctgtgcctgcagtaccgcctgcggggcaagctgcgggcagaaattgagaacctgcacaggacctttgacccccacttcctgcgggtgccctgctggaagatcaccctcttcgtcatcgtgcctgtgctgggccccctggtggccctgatcatctgctacaactggctgcaccggcggctggccggccagttcctggaggagctgaggaaccccttctag

SEQ ID NO: 264257 - DNA, 396 bp, Artificial Sequence
  derived and/or modified sequence
atggccagcctgagccggcccagcctgcccagctgcctgtgcagcttcctgctgctgctgctgctgcaggtgagcagcagctatgctgaccccttctactgggtgtccccaggagtgctggtgctgctggccgtgctgcctgtgctgctgctgcagatcaccctgggcctggtgttcctgtgcctgcagtaccgcctgcggggcaagctgcgggcagaaattgagaacctgcacaggacctttgacccccacttcctgcgggtgccctgctggaagatcaccctcttcgtcatcgtgcctgtgctgggccccctggtggccctgatcatctgctacaactggctgcaccggcggctggccggccagttcctggaggagctgaggaaccccttctag

SEQ ID NO: 264258 - DNA, 1529 bp, Artificial Sequence
  derived and/or modified sequence
cttttgtgtgagtgcctggcaagggtgacgtggggctgtttctgcgggcacagctgcagcaattaccggagtggaggcagggcccaggcagcactgccctccaagatcttcccttgggcttttcagcagtaaggggacatgcaccccaagggcctccacttggcctgaccttgctgcgggggctctctgtccccaggaacagtagagatggcaagcttatcaagaccctctctgcccagctgcctctgctccttcctcctcctcctcctcctccaagtgtcttccagctatgcagatcctttctactgggtgagccctggagtgctggttctcctcgcggtgctgcctgtgctcctcctgcagatcactgttggcctcatcttcctctgcctgcagtacagactgagaggaaaacttcgagcagagatagagaatctccaccggacttttgatccccactttctgagggtgccctgctggaagataaccctgtttgtaattgtgccggttcttggacccttggttgccttgatcatctgctacaactggctacatcgaagactagcagggcaattccttgaagagctacgaaatcccttctgagtgatgtcacatcttggcaggggtggaggagagcctggttgcccagggatttgtccttggggacatctcatccatcaagttgcacactcactggcatctttgctatggggacattccaatttgcactttcaggaacactctgaattccaagtagaattgatttcccttcttctgtcatctaccttttctcttcattttcccatttttattacccttctttccatttctctctccagtcttccacctggaagccctctctggctaaggacaggcaggtgcccctctctccatcagaggacacctgtactggagagcaacacaggatggtctctgccatgaactggaggccaggaatctcctcactgaaaattacagtatggtaactttgcaaatggtggttgtttcttccaagactccagccctgattgcgcaaaactgaaaggcatgtgaagggaaggaagaggaagagtgcaaaacattgaagagagagctgagtgagctgaagagtgaggatatgagtagccccaacccaaacctggagatggggagaaacctacagaatactagccagagctcctccttgtcttggcagcctactagggacctggggaagcaaaaacgaaagctgggcaacatgcctgctttagaatgttttccttctacttacacatcttccacaggtctcagaatctttccttcctctcatccttttctcctatcttcatatctatcagagtatccactgtttattcaacaactactacttgatggtcagacacaaacaaacaagctaggtgctaattaataaagatacgagttttggccgggtgcggtggctcacgcctgtaatcccagcactttgggaggccgaggcgggcgaatcacgaggtcaggagttcaagaccagcctggccaacatggtgaaa

SEQ ID NO: 264259 - DNA, 1591 bp, Artificial Sequence
  derived and/or modified sequence
atggcaagcttatcgagaccctctctgcccagctgcctctgctccttcctcctcctcctcctcctccaagtgtcttccagctatgcagatcctttctactgggtgagccctggagtgctggttctcctcgcggtgctgcctgtgctcctcctgcagatcactgttggcctcgtcttcctctgcctgcagtacagactgagaggaaaacttcgagcagagatagagaatctccaccggacttttgatccccactttctgagggtgccctgctggaagataaccctgtttgtaattgtgccggttcttggacccttggttgccttgatcatctgctacaactggctacatcgaagactagcagggcaattccttgaagagctacgaaatcccttctgagtgatgtcacatcttggcaggggtggaggagagcctggttgcccagggatttgtccttggggacatctcatccatcaagttgcacactcactggcatctttgctatggggacattccaatttgcactttcaggaacactctgaattccaagtagaattgatttcccttcttctgtcatctaccttttctcttcattttcccatttttattacccttctttccatttctctctccagtcttccacctggaagccctctctggctaaggacaggcaggtgcccctctctccatcagaggacacctgtactggagagcaacacaggatggtctctgccatgaactggaggccaggaatctcctcactgaaaattacagtatggtaactttgcaaatggtggttgtttcttccaagactccagccctgattgcgcaaaactgaaaggcatgtgaagggaaggaagaggaagagtgcaaaacattgaagagagagctgagtgagctgaagagtgaggatatgagtagccccaacccaaacctggagatggggagaaacctacagaatactagccagagctcctccttgtcttggcagcctactagggacctggggaagcaaaaacgaaagctgggcaacatgcctgctttagaatgttttccttctacttacacatcttccacaggtctcagaatctttccttcctctcatccttttctcctatcttcatatctatcagagtatccactgtttattcaacaactactacttgatggtcagacacaaacaaacaagctaggtgctaattaataaagatacgagttttggccgggtgcggtggctcacgcctgtaatcccagcactttgggaggccgaggcgggcgaatcacgaggtcaggagttcaagaccagcctggccaacatggtgaaaccccatctctactaaaaatacaaacaattaactgagcatagtggtgggcacctataataccagctactccggaggctgaggcaggagaatcgcttgaacccaggaggcagaggttgcagtgagctgagatcgcgccactgcactctagccggagtgacagagtaagactctgtctcaaaaataaataaataaataaataaataaataaataaataaataaataaataaataaaaaataataatacaagttttcataagcacacttctaa

SEQ ID NO: 264260 - DNA, 1587 bp, Artificial Sequence
  derived and/or modified sequence
atggcaagcttatcgagaccctctctgcccagctgcctctgctccttcctcctcctcctcctcctccaagtgtcttccagctatgcagatcctttctactgggtgagccctggagtgctggttctcctcgcggtgctgcctgtgctcctcctgcagatcactgttggcctcgtcttcctctgcctgcagtacagactgagaggaaaacttcgagcagagatagagaatctccaccggacttttgatccccactttctgagggtgccctgctggaagataaccctgtttgtaattgtgccggttcttggacccttggttgccttgatcatctgctacaactggctacatcgaagactagcagggcaattccttgaagagctacgaaatcccttctgagtgatgtcacatcttggcaggggtggaggagagcctggttgcccagggatttgtccttggggacatctcatccatcaagttgcacactcactggcatctttgctatggggacattccaatttgcactttcaggaacactctgaattccaagtagaattgatttcccttcttctgtcatctaccttttctcttcattttcccatttttattacccttctttccatttctctctccagtcttccacctggaagccctctctggctaaggacaggcaggtgcccctctctccatcagaggacacctgtactggagagcaacacaggatggtctctgccatgaactggaggccaggaatctcctcactgaaaattacagtatggtaactttgcaaatggtggttgtttcttccaagactccagccctgattgcgcaaaactgaaaggcatgtgaagggaaggaagaggaagagtgcaaaacattgaagagagagctgagtgagctgaagagtgaggatatgagtagccccaacccaaacctggagatggggagaaacctacagaatactagccagagctcctccttgtcttggcagcctactagggacctggggaagcaaaaacgaaagctgggcaacatgcctgctttagaatgttttccttctacttacacatcttccacaggtctcagaatctttccttcctctcatccttttctcctatcttcatatctatcagagtatccactgtttattcaacaactactacttgatggtcagacacaaacaaacaagctaggtgctaattaataaagatatgagttttggccgggtgcggtggctcacgcctgtaatcccagcactttgggaggccgaggcgggcgaatcacgaggtcaggagttcgagaccagcctggccaacatggtgaaaccccatctctactaaaaatacaaacaattaactgagcatagtggtgggcacctataataccagctactccggaggctgaggcaggagaatcgcttgaacccaggaggcagaggttgcagtgagctgagatcgcgccactgcactctagccagagtgacagagtaagactctgtctcaaaaataaataaataaataaataaataaataaataaataaataaataaataaaaaataataatacaagttttcataagcacacttctaa

SEQ ID NO: 264261 - DNA, 1579 bp, Artificial Sequence
  derived and/or modified sequence
atggcaagcttatcgagaccctctctgcccagctgcctctgctccttcctcctcctcctcctcctccaagtgtcttccagctatgcagatcctttctactgggtgagccctggagtgctggttctcctcgcggtgctgcctgtgctcctcctgcagatcactcttggcctcgtcttcctctgcctgcagtacagactgagaggaaaacttcgagcagagatagagaatctccaccggacttttgatccccactttctgagggtgccctgctggaagataaccctgtttgtaattgtgccggttcttggacccttggttgccttgatcatctgctacaactggctacatcgaagactagcagggcaattccttgaagagctacgaaatcccttctgagtgatgtcacatcttggcaggggtggaggagagcctggttgcccagggatttgtccttggggacatctcatccatcaagttgcacactcactggcatctttgctatggggacattccaatttgcactttcaggaacactctgaattccaagtagaattgatttcccttcttctgtcatctaccttttctcttcattttcccatttttattacccttctttccatttctctctccagtcttccacctggaagccctctctggctaaggacaggcaggtgcccctctctccatcagaggacacctgtactggagagcaacacaggatggtctctgccatgaactggaggccaggaatctcctcactgaaaattacagtatggtaactttgcaaatggtggttgtttcttccaagactccagccctgattgcgcaaaactgaaaggcatgtgaagggaaggaagaggaagagtgcaaaacattgaagagagagctgagtgagctgaagagtgaggatatgagtagccccaacccaaacctggagatggggagaaacctacagaatactagccagagctcctccttgtcttggcagcctactagggacctggggaagcaaaaacgaaagctgggcaacatgcctgctttagaatgttttccttctacttacacatcttccacaggtctcagaatctttccttcctctcatccttttctcctatcttcatatctatcagagtatccactgtttattcaacaactactacttgatggtcagacacaaacaaacaagctaggtgctaattaataaagatacgagttttggccgggtgcggtggctcacgcctgtaatcccagcactttgggaggccgaggcgggcgaatcacgaggtcaggagttcaagaccagcctggccaacatggtgaaaccccatctctactaaaaatacaaacaattaactgagcatagtggtgggcacctataataccagctactccggaggctgaggcaggagaatcgcttgaacccaggaggcagaggttgcagtgagctgagatcgcgccactgcactctagccggagtgacagagtaagactctgtctcaaaaataaataaataaataaataaataaataaataaataaataaaaaataataatacaagttttcataagcacacttctaa

SEQ ID NO: 264262 - DNA, 1583 bp, Artificial Sequence
  derived and/or modified sequence
atggcaagcttatcgagaccctctctgcccagctgcctctgctccttcctcctcctcctcctcctccaagtgtcttccagctatgcagatcctttctactgggtgagccctggagtgctggttctcctcgcggtgctgcctgtgctcctcctgcagatcactgttggcctcgtcttcctctgcctgcagtacagactgagaggaaaacttcgagcagagatagagaatctccaccggacttttgatccccactttctgagggtgccctgctggaagataaccctgtttgtaattgtgccggttcttggacccttggttgccttgatcatctgctacaactggctacatcgaagactagcagggcaattccttgaagagctacgaaatcccttctgagtgatgtcacatcttggcaggggtggaggagagcctggttgcccagggatttgtccttggggacatctcatccatcaagttgcacactcactggcatctttgctatggggacattccaatttgcactttcaggaacactctgaattccaagtagaattgatttcccttcttctgtcatctaccttttctcttcattttcccatttttattacccttctttccatttctctctccagtcttccacctggaagccctctctggctaaggacaggcaggtgcccctctctccatcagaggacacctgtactggagagcaacacaggatggtctctgccatgaactggaggccaggaatctcctcactgaaaattacagtatggtaactttgcaaatggtggttgtttcttccaagactccagccctgattgcgcaaaactgaaaggcatgtgaagggaaggaagaggaagagtgcaaaacattgaagagagagctgagtgagctgaagagtgaggatatgagtagccccaacccaaacctggagatggggagaaacctacagaatactagccagagctcctccttgtcttggcagcctactagggacctggggaagcaaaaacgaaagctgggcaacatgcctgctttagaatgttttccttctacttacacatcttccacaggtctcagaatctttccttcctctcatccttttctcctatcttcatatctatcagagtatccactgtttattcaacaactactacttgatggtcagacacaaacaaacaagctaggtgctaattaataaagatacgagttttggccgggtgcggtggctcacgcctgtaatcccagcactttgggaggccgaggcgggcgaatcacgaggtcaggagttcgagaccagcctggccaacatggtgaaaccccatctctactaaaaatacaaacaattaactgagcatagtggtgggcacctataataccagctactccggaggctgaggcaggagaatcgcttgaacccaggaggcagaggttgcagtgagctgagatcgcgccactgcactctagccagagtgacagagtaagactctgtctcaaaaataaataaataaataaataaataaataaataaataaataaataaaaaataataatacaagttttcataagcacacttctaa

SEQ ID NO: 264263 - DNA, 1587 bp, Artificial Sequence
  derived and/or modified sequence
atggcaagcttatcgagaccctctctgcccagctgcctctgctccttcctcctcctcctcctcctccaagtgtcttccagctatgcagatcctttctactgggtgagccctggagtgctggttctcctcgcggtgctgcctgtgctcctcctgcagatcactgttggcctcgtcttcctctgcctgcagtacagactgagaggaaaacttcgagcagagatagagaatctccaccggacttttgatccccactttctgagggtgccctgctggaagataaccctgtttgtaattgtgccggttcttggacccttggttgccttgatcatctgctacaactggctacatcgaagactagcagggcaattccttgaagagctacgaaatcccttctgagtgatgtcacatcttggcaggggtggaggagagcctggttgcccagggatttgtccttggggacatctcatccatcaagttgcacactcactggcatctttgctatggggacattccaatttgcactttcaggaacactctgaattccaagtagaattgatttcccttcttctgtcatctaccttttctcttcattttcccatttttattacccttctttccatttctctctccagtcttccacctggaagccctctctggctaaggacaggcaggtgcccctctctccatcagaggacacctgtactggagagcaacacaggatggtctctgccatgaactggaggccaggaatctcctcactgaaaattacagtatggtaactttgcaaatggtggttgtttcttccaagactccagccctgattgcgcaaaactgaaaggcatgtgaagggaaggaagaggaagagtgcaaaacattgaagagagagctgagtgagctgaagagtgaggatatgagtagccccaacccaaacctggagatggggagaaacctacagaatactagccagagctcctccttgtcttggcagcctactagggacctggggaagcaaaaacgaaagctgggcaacatgcctgctttagaatgttttccttctacttacacatcttccacaggtctcagaatctttccttcctctcatccttttctcctatcttcatatctatcagagtatccactgtttattcaacaactactacttgatggtcagacacaaacaaacaagctaggtgctaattaataaagatacgagttttggccgggtgcggtggctcacgcctgtaatcccagcactttgggaggccgaggcgggcgaatcacgaggtcaggagttcaagaccagcctggccaacatggtgaaaccccatctctactaaaaatacaaacaattaactgagcatagtggtgggcacctataataccagctactccggaggctgaggcaggagaatcgcttgaacccaggaggcagaggttgcagtgagctgagatcgcgccactgcactctagccggagtgacagagtaagactctgtctcaaaaataaataaataaataaataaataaataaataaataaataaataaataaaaaataataatacaagttttcataagcacacttctaa

SEQ ID NO: 264264 - DNA, 1583 bp, Artificial Sequence
  derived and/or modified sequence
atggcaagcttatcgagaccctctctgcccagctgcctctgctccttcctcctcctcctcctcctccaagtgtcttccagctatgcagatcctttctactgggtgagccctggagtgctggttctcctcgcggtgctgcctgtgctcctcctgcagatcactgttggcctcgtcttcctctgcctgcagtacagactgagaggaaaacttcgagcagagatagagaatctccaccggacttttgatccccactttctgagggtgccctgctggaagataaccctgtttgtaattgtgccggttcttggacccttggttgccttgatcatctgctacaactggctacatcgaagactagcagggcaattccttgaagagctacgaaatcccttctgagtgatgtcacatcttggcaggggtggaggagagcctggttgcccagggatttgtccttggggacatctcatccatcaagttgcacactcactggcatctttgctatggggacattccaatttgcactttcaggaacactctgaattccaagtagaattgatttcccttcttctgtcatctaccttttctcttcattttcccatttttattacccttctttccatttctctctccagtcttccacctggaagccctctctggctaaggacaggcaggtgcccctctctccatcagaggacacctgtactggagagcaacacaggatggtctctgccatgaactggaggccaggaatctcctcactgaaaattacagtatggtaactttgcaaatggtggttgtttcttccaagactccagccctgattgcgcaaaactgaaaggcatgtgaagggaaggaagaggaagagtgcaaaacattgaagagagagctgagtgagctgaagagtgaggatatgagtagccccaacccaaacctggagatggggagaaacctacagaatactagccagagctcctccttgtcttggcagcctactagggacctggggaagcaaaaacgaaagctgggcaacatgcctgctttagaatgttttccttctacttacacatcttccacaggtctcagaatctttccttcctctcatccttttctcctatcttcatatctatcagagtatccactgtttattcaacaactactacttgatggtcagacacaaacaaacaagctaggtgctaattaataaagatacgagttttggccgggtgcggtggctcacgcctgtaatcccagcactttgggaggccgaggcgggcgaatcacgaggtcaggagttcaagaccagcctggccaacatggtgaaaccccatctctactaaaaatacaaacaattaactgagcatagtggtgggcacctataataccagctactccggaggctgaggcaggagaatcgcttgaacccaggaggcagaggttgcagtgagctgagatcgcgccactgcactctagccggagtgacagagtaagactctgtctcaaaaataaataaataaataaataaataaataaataaataaataaataaaaaataataatacaagttttcataagcacacttctaa

SEQ ID NO: 264265 - DNA, 396 bp, Artificial Sequence
  derived and/or modified sequence
atggccagcctgagccggcccagcctgcccagctgcctgtgcagctttctactgctgctgctactccaggttagttctagctacgctgatcccttctactgggtttctcctggagtgctcgtcctactcgcggtcctgcccgtgctgcttctccaaattacagtgggcctgatcttcttgtgccttcagtatcggttgagggggaaactgcgggctgaaatcgagaatctgcatagaacattcgatccccatttcctgcgggtcccctgctggaagatcaccctgtttgtgatagtgccagtcctggggccactcgttgctttaattatctgctacaactggctgcatagacgtttagccgggcagtttctggaagagctgagaaatcctttctag

SEQ ID NO: 264266 - DNA, 396 bp, Artificial Sequence
  derived and/or modified sequence
atggccagcctgagccggcccagcctgcccagctgcctgtgcagcttcctattactgctcttactacaggtctcatccagttacgccgatcctttttactgggtgagcccaggcgtgctggtcttgctcgccgtgctgccggtgcttctcctgcagattaccgtaggattggtcttcctgtgcctgcagtaccggctgcgcggaaagctgcgggctgagattgaaaacctacacagaaccttcgatccacacttcttaagggtcccctgttggaagatcacacttttcgtcatcgtccccgtcctcgggcctctggtcgcacttataatctgctacaattggctccaccggcgactggcaggccaatttctcgaggagctgcgtaatccattttag

SEQ ID NO: 264267 - DNA, 396 bp, Artificial Sequence
  derived and/or modified sequence
atggccagcctgagccggcccagcctgcccagctgcctgtgcagcttcttgctgctcctgctgctgcaggtaagctcctcttatgccgaccccttctactgggtctctccaggcgtacttgtgctccttgcggtgctaccggtgcttctgcttcagatcacagttggcctggtgttcctgtgtcttcagtaccgactcagaggcaaattaagagctgaaatcgagaatctgcaccgtacatttgatccgcacttcctgcgcgtaccctgttggaaaatcactctcttcgtgatcgtccccgtgttaggaccgctggttgcactgattatctgctacaactggctgcatagacgtttggcgggccaattcttggaggagttacggaatcccttttag

SEQ ID NO: 264268 - DNA, 396 bp, Artificial Sequence
  derived and/or modified sequence
atggccagcctgagccggcccagcctgcccagctgcctgtgcagctttcttctccttctgctattgcaggtttcttcttcgtatgccgaccctttttactgggtgagccccggcgtgctagtcctactggccgtgttacctgttcttctgctgcagatcactctgggactggtgttcctctgtctccagtaccgattgcgaggaaaattaagggccgaaatagaaaacctgcatcggacatttgacccccattttctcagagtaccttgctggaaaattacattgttcgtgatagtgcccgtgctaggacctcttgtggccttgatcatatgctataattggctgcaccgaaggctcgccggccaattcctggaagagctgagaaatcctttctag

SEQ ID NO: 264269 - DNA, 396 bp, Artificial Sequence
  derived and/or modified sequence
atggccagcctgagccggcccagcctgcccagctgcctgtgcagcttcctgttgttgctgctccttcaggtctcaagtagctacgccgatcctttctactgggtgtcgcccggggtgctggtactgttagctgtgctaccagttctgctcctacaaatcacagtgggcctagtcttcctctgcctacagtatcgcttgcggggtaagctcagggcagagatcgagaacctccacagaacctttgacccccatttcctgagagtgccctgctggaagattactctgttcgtgatagtccctgtgctgggcccactggtcgctctcattatctgttacaactggctccacagacgccttgccggccagtttctggaagagttacgtaacccgttctag

SEQ ID NO: 264270 - DNA, 396 bp, Artificial Sequence
  derived and/or modified sequence
atggccagcctgagccggcccagcctgcccagctgcctgtgcagcttcctgctgcttcttctgttgcaggtcagttcttcatacgctgaccccttttattgggtgtctccaggggtgcttgtgctgctggcagtcctcccagtgctgctgctccagatcaccgtgggcctggtctttctgtgtctgcagtatcgcctgagaggaaagttgcgagcagagattgagaatctgcaccgcacctttgatcctcactttttgagagtgccatgctggaaaatcactctattcgtgattgtgcctgttctgggacctctggtggcactcattatttgctacaactggctccaccgaagactcgcaggccagttcctcgaggagctgcggaacccattctag

SEQ ID NO: 264271 - DNA, 396 bp, Artificial Sequence
  derived and/or modified sequence
atggccagcctgagccggcccagcctgcccagctgcctgtgcagcttccttctgctgctgctgctgcaggtgtcatctagttacgccgacccattctactgggtgagtccgggcgtgctcgttctgctggctgtgcttccggtcttgctgttacaaattacagtcggcctggtgttcttgtgtctccagtaccgtctgaggggaaagttacgggctgagatcgaaaacctacatcgaacattcgacccacacttcctaagggtaccatgttggaagataacactgtttgtcattgtgcctgtgctgggacccctagtggcgctcatcatttgttacaactggttacacagacggctggcagggcagttcctggaggaattgaggaatcccttttag

SEQ ID NO: 264272 - DNA, 396 bp, Artificial Sequence
  derived and/or modified sequence
atggccagcctgagccggcccagcctgcccagctgcctgtgcagcttcctgctgctactgctgctccaggtgagctctagttatgccgatcctttctactgggtctctcccggtgtcctggtgttacttgccgtgctcccagttcttctactgcagattacagtaggtctggtgttcctatgtctgcagtataggctccgcggaaagcttcgcgccgaaatcgaaaacctgcatcgcaccttcgatcctcacttcttgcgagtaccctgctggaagattacccttttcgtgatcgtgcctgtgctcggccccttggtggcccttattatctgttacaactggctccaccgacggcttgccggacagttcctggaagaactgcgtaaccctttctag

SEQ ID NO: 264273 - DNA, 396 bp, Artificial Sequence
  derived and/or modified sequence
atggccagtttgagccgacctagcctgccgtcctgcctatgctcgttcctacttttgctcctcctgcaggtgtcctcatcgtatgcggaccccttctattgggtatcaccaggagttctggtgctccttgccgtcttgcccgtcctcttactgcaaataaccgtagggttaatcttcctttgcctccaataccgtctcaggggtaagctgagggccgagatagaaaatctgcacagaaccttcgatcctcactttctaagggtaccctgctggaagatcacactcttcgtcatcgtgcccgtgctgggccctctcgttgccctgataatttgctataactggctgcatcgcagactggccggacagttcctggaagaattgcgcaacccgttctag

SEQ ID NO: 264274 - DNA, 396 bp, Artificial Sequence
  derived and/or modified sequence
atggctagtctcagccgtccctctttgccatcatgtctttgctccttcctgctgcttttgctacttcaggtgagttcaagctacgcagatcctttctactgggttagccctggagtcctggttctcctggccgtccttcccgtgctgcttttacagattactgttggactggtctttctatgcctacaataccgcctccgaggcaaactgcgggctgagatagagaatttgcatcgtacctttgatccgcatttcctcagagtcccctgttggaagattacactctttgtgattgtgcccgtcctcgggcctcttgtcgccctcattatctgctataattggttgcacagaaggctcgcaggacagttcctggaggagcttcggaatcccttttag

SEQ ID NO: 264275 - DNA, 396 bp, Artificial Sequence
  derived and/or modified sequence
atggcctccctttctcggccatccctccccagctgcctctgtagcttcctgctcctcctgttgctgcaggtgagtagcagttacgctgatccattttattgggttagtccaggcgtgctagtccttctggccgtgctgcccgtcctcctgctccagattaccgtgggcctcgttttcctgtgcttgcagtacaggctccggggaaagttgagggcagaaatcgaaaacctgcatcgcacttttgacccccactttctgcgggtcccctgttggaagatcaccctgttcgtgatcgtgccggtactgggaccattggtggctttaataatatgctataactggctccaccggagattagccggtcagtttttggaggagctgagaaacccattttag

SEQ ID NO: 264276 - DNA, 396 bp, Artificial Sequence
  derived and/or modified sequence
atggcctccctgagtcgcccttctctaccatcttgcctttgttctttcctgcttttactcctcttacaggtttcttcaagctatgctgatcctttctactgggtgtctcctggcgttctggtgttattagccgtcctcccagtcctgctcctccaaatcacgctcggcctggtcttcctctgcctgcagtataggctgagaggtaaattgcgcgcagagatcgaaaatctccaccggacatttgatccccacttcctgagagtgccctgctggaagattactttgttcgtcatagtacctgtcctgggaccactggtggcactgattatctgttacaactggttgcaccggcgactagctggccaattcctggaggagctgcggaatccgttttag

SEQ ID NO: 264277 - DNA, 396 bp, Artificial Sequence
  derived and/or modified sequence
atggccagcctctcacggccatccctcccttcctgcctgtgttcttttctgttacttctgctgctgcaggtcagcagctcctacgctgacccattttattgggttagtcccggtgtgctcgtgttgcttgccgtactgccagttctgctccttcaaatcacggtcgggctggttttcttatgtctgcagtacagattgaggggtaagctccgcgcagagattgagaatctgcaccggacttttgacccccactttctacgggtgccttgttggaaaataactttatttgtgatcgtgccagtgctgggacccttagtggcactgataatatgctacaactggttgcatagaaggctggccggtcagttcctggaagaactaaggaaccccttctag

SEQ ID NO: 264278 - DNA, 396 bp, Artificial Sequence
  derived and/or modified sequence
atggcatcacttagcaggccgtccctgccttcttgtctctgtagtttcttattactgttgctactgcaagtttcctcaagttatgccgatcccttttactgggtttcgcccggagtgctggtgttgctcgccgtactgccggtgctgctacttcagattacagtaggccttgtattcttgtgcctccagtaccggctgcgcggaaagctcagggctgaaatcgaaaacctacatagaaccttcgacccacattttctaagggttccatgctggaaaatcactcttttcgtcatcgtgcccgtactgggtccactagtcgccctcattatctgttataattggctccaccgcaggttagcaggccagtttctggaagaattacggaatcctttttag

SEQ ID NO: 264279 - DNA, 396 bp, Artificial Sequence
  derived and/or modified sequence
atggcaagcttatcacggccaagtctcccatcctgtttgtgttcctttctccttcttctcctgctgcaggtgtcaagtagttacgctgacccattctactgggtgagtcccggtgtgttggtcctgctggcagtcctcccggtgctcttgctgcaaatcacagttggcctggtgtttctgtgcctacagtataggttgcgtgggaaactgcgagcggagatagagaatttgcaccgcactttcgaccctcactttctgcgtgttccatgttggaaaatcacactgttcgtaattgtgcctgtgctgggccctctagtcgcgctgatcatatgctataattggttacataggaggctggcgggacagttccttgaagagttaaggaacccattttag

SEQ ID NO: 264280 - DNA, 396 bp, Artificial Sequence
  derived and/or modified sequence
atggcttctcttagtcgccctagcttgccaagctgtctctgttcttttctgctccttctgttactccaagtgtcgtcatcctatgccgatcccttctactgggtaagcccaggagtactagtgctcttggccgttctgccagttctactgctccagatcactgtgggattggtctttttgtgccttcagtataggctaagggggaagctgcgcgctgaaatcgagaaccttcacagaacatttgacccccatttcctgcgcgtaccttgttggaaaatcaccctgtttgttatcgtgcctgtgctagggcctctggtcgccctgattatatgctacaactggcttcatcgtcggctggctggacagttcctcgaagaactaagaaaccccttttag

SEQ ID NO: 264281 - DNA, 396 bp, Artificial Sequence
  derived and/or modified sequence
atggccagcctgagcagacccagcctgcccagctgcctgtgcagcttcctgctgctgctgctgctgcaggtgagcagcagctacgccgaccccttctactgggtgagccccggcgtgctggtgctgctggccgtgctgcccgtgctgctgctgcagatcaccgtgggcctgatcttcctgtgcctgcagtacagactgagaggcaagctgagagccgagatcgagaacctgcacagaaccttcgacccccacttcctgagagtgccctgctggaagatcaccctgttcgtgatcgtgcccgtgctgggccccctggtggccctgatcatctgctacaactggctgcacagaagactggccggccagttcctggaggagctgagaaaccccttctag

SEQ ID NO: 264282 - DNA, 396 bp, Artificial Sequence
  derived and/or modified sequence
atggccagcctgagcagacccagcctgcccagctgcctgtgcagcttcctgctgctgctgctgctgcaggtgagcagcagctacgccgaccccttctactgggtgagccccggcgtgctggtgctgctggccgtgctgcccgtgctgctgctgcagatcaccgtgggcctggtgttcctgtgcctgcagtacagactgagaggcaagctgagagccgagatcgagaacctgcacagaaccttcgacccccacttcctgagagtgccctgctggaagatcaccctgttcgtgatcgtgcccgtgctgggccccctggtggccctgatcatctgctacaactggctgcacagaagactggccggccagttcctggaggagctgagaaaccccttctag

SEQ ID NO: 264283 - DNA, 396 bp, Artificial Sequence
  derived and/or modified sequence
atggccagcctgagcagacccagcctgcccagctgcctgtgcagcttcctgctgctgctgctgctgcaggtgagcagcagctacgccgaccccttctactgggtgagccccggcgtgctggtgctgctggccgtgctgcccgtgctgctgctgcagatcaccctgggcctggtgttcctgtgcctgcagtacagactgagaggcaagctgagagccgagatcgagaacctgcacagaaccttcgacccccacttcctgagagtgccctgctggaagatcaccctgttcgtgatcgtgcccgtgctgggccccctggtggccctgatcatctgctacaactggctgcacagaagactggccggccagttcctggaggagctgagaaaccccttctag

SEQ ID NO: 264284 - protein, 1148 aa, Artificial Sequence
  derived and/or modified sequence
MPEPTKKEENEVPAPAPPPEEPSKEKEAGTTPAKDEEEVSPPSALPPGLGSRALERKDSDWTLVETPPGEEQAKQNANSQLSILFIEKPQGGTVKVGEDITFIAKVKAEDLLRKPTIKWFKGKWMDLASKAGKHLQLKETFERHSRVYTFEMQIIKAKDNFAGNYRCEVTYKDKFDSCSFDLEVHESTGTTPNIDIRSAFKRSGEGQEDAGELDFSGLLKRREVKQQEEEPQVDVWELLKNAKPSEYEKIAFQYGITDLRGMLKRLKRMRREEKKSAAFAKILDPAYQVDKGGRVRFVVELADPKLEVKWYKNGQEIRPSTKYIFEHKGCQRILFINNCQMTDDSEYYVTAGDEKCSTELFVREPPIMVTKQLEDTTAYCGERVELECEVSEDDANVKWFKNGEEIIPGPKSRYRIRVEGKKHILIIEGATKADAAEYSVMTTGGQSSAKLSVDLKPLKILTPLTDQTVNLGKEICLKCEISENIPGKWTKNGLPVQESDRLKVVHKGRIHKLVIANALTEDEGDYVFAPDAYNVTLPAKVHVIDPPKIILDGLDADNTVTVIAGNKLRLEIPISGEPPPKAMWSRGDKAIMEGSGRIRTESYPDSSTLVIDIAERDDSGVYHINLKNEAGEAHASIKVKVVDFPDPPVAPTVTEVGDDWCIMNWEPPAYDGGSPILGYFIERKKKQSSRWMRLNFDLCKETTFEPKKMIEGVAYEVRIFAVNAIGISKPSMPSRPFVPLAVTSPPTLLTVDSVTDTTVTMRWRPPDHIGAAGLDGYVLEYCFEGTEDWIVANKDLIDKTKFTITGLPTDAKIFVRVKAVNAAGASEPKYYSQPILVKEIIEPPKIRIPRHLKQTYIRRVGEAVNLVIPFQGKPRPELTWKKDGAEIDKNQINIRNSETDTIIFIRKAERSHSGKYDLQVKVDKFVETASIDIQIIDRPGPPQIVKIEDVWGENVALTWTPPKDDGNAAITGYTIQKADKKSMEWFTVIEHYHRTSATITELVIGNEYYFRVFSENMCGLSEDATMTKESAVIARDGKIYKNPVYEDFDFSEAPMFTQPLVNTYAIAGYNATLNCSVRGNPKPKITWMKNKVAIVDDPRYRMFSNQGVCTLEIRKPSPYDGGTYCCKAVNDLGTVEIECKLEVKVIAQ

SEQ ID NO: 264285 - DNA, 3447 bp, Artificial Sequence
  derived and/or modified sequence
atgccagaacccaccaagaaggaagaaaatgaagtgcccgctcccgcaccaccgcctgaggagccctcaaaggagaaagaagccggaacaacccccgctaaagatgaggaggaggtttcccctccctcagcactgccacccggcctgggcagtcgggcactagagaggaaggatagcgactggacgctagtggagactccccccggagaagagcaggccaaacagaacgctaacagtcaactttcaatcttgtttattgagaagccccaaggcgggacggttaaggtgggggaggacatcacatttatcgcgaaagttaaggccgaagacctgctgaggaagcccacaattaagtggttcaaaggaaaatggatggatttggcttccaaagctggcaagcacctgcaactgaaagagacatttgaacggcacagcagagtttatacatttgaaatgcaaatcattaaggccaaggacaactttgccggcaattataggtgcgaagttacttacaaagacaaatttgactcctgtagcttcgacctagaagtgcacgagagcaccggtactacgcctaatattgacattagatccgctttcaaaaggtccggcgagggccaggaggatgctggagagctagacttttcaggccttctgaaaaggcgggaggttaaacagcaagaagaagaaccacaggtggacgtgtgggagttgctgaagaatgccaagccatctgaatacgaaaaaatagcgtttcagtacggcatcactgatctacggggcatgctcaagaggctgaagagaatgcgcagagaggagaagaagtctgcagcattcgccaaaattctggatcccgcctatcaagtcgacaagggcggacgtgttcgctttgtcgtggagctcgccgaccccaagctggaggtcaaatggtacaagaatggccaggagattcgaccgtccactaagtacatttttgagcataagggctgtcaaagaattttattcatcaacaactgtcagatgacagacgattctgagtactacgtgactgctggcgacgagaagtgctcaacagagttgttcgtgagagaacctccgatcatggtgaccaagcaactggaggataccacggcctattgtggcgagcgcgtcgaactggaatgcgaggtctccgaggatgacgccaatgtcaagtggttcaaaaacggcgaggaaatcatcccaggccctaaatcacgttatcgcatacgagtggagggcaaaaagcacatcctcatcatcgagggcgccacaaaggccgacgcagctgagtacagcgtaatgacaactggcggtcagagctccgcgaaactgagtgtggaccttaagcccctgaaaatcctcacacctctgacagaccaaacagtcaatctgggcaaggagatttgtctgaagtgtgagatctccgagaatatacccggcaagtggactaagaacggacttccagttcaggagtcggacaggctgaaggtcgtgcacaaaggacggatacataagctcgtgattgccaacgctctcacggaagatgaaggtgattacgtgttcgcgcctgacgcatacaacgtcactctgcccgccaaggtacatgtaatcgacccgcctaagatcatactggacggtctagatgccgacaacacagtaactgtgattgccggcaacaaactgcgcctggaaattcctatctccggtgagccaccaccaaaggctatgtggtccagaggtgacaaagccatcatggagggaagtggacgtatcaggaccgagtcatatcctgacagttcgaccctggttatagacattgccgaaagagacgattctggtgtgtatcatattaacctgaaaaacgaagctggggaagcccacgcctctatcaaagtaaaagtggtggacttcccagaccctcccgtagcgccaacagttacagaggtgggcgatgattggtgtatcatgaactgggaacctcccgcctatgacggggggtcacccattctcggctacttcattgaaaggaagaagaagcagagttcacggtggatgcgcctcaactttgatctgtgtaaagagacaaccttcgagccaaaaaaaatgattgagggggtggcctacgaggtacgcatctttgccgtaaacgctataggcatatctaagccgtccatgccatcaagaccctttgtaccactggcagtgaccagccccccgacactgctaacggttgactccgtgacagacacgaccgtgacgatgaggtggagacccccagaccacatcggcgccgcaggcctcgatggttatgtgctggagtattgcttcgagggcactgaagattggatagtggccaacaaggacctgattgataagaccaagttcacgatcacaggcttgcccaccgacgcgaaaatttttgtgcgtgtaaaggccgttaacgccgctggagctagcgagcctaaatattacagccaacctatactggtgaaagagataatcgagcccccaaagattcgtataccccgtcatctcaaacaaacttatatcaggcgcgttggcgaggctgtaaatttggttatcccctttcagggaaagcccagaccagagctgacctggaagaaggacggagcggaaatagacaaaaatcagatcaatatccgtaacagtgagaccgataccattatctttatccgcaaagctgaacgctcccacagcgggaaatacgacctccaggttaaagtggacaaattcgtggagacagctagcatagacattcagataatcgacagaccggggccaccccaaatcgtaaagattgaggacgtgtggggggagaacgtcgccctgacgtggactccacccaaggatgacggcaatgctgcgattaccggatataccatccagaaggccgacaagaaatcgatggagtggtttacagttattgaacattaccacaggacttccgcaaccatcacggaacttgtcatcggcaacgagtactactttagggtcttctcggagaatatgtgcggactgtccgaagacgcaacaatgacaaaagagtctgccgtaattgcaagggacggcaaaatttataagaaccccgtgtacgaggatttcgactttagcgaggcccccatgtttacgcagcctctggtgaacacttacgccatcgctggctacaacgctaccctgaactgcagcgttcgtggtaacccgaagcccaagatcacttggatgaagaataaagtggcaatcgtggacgatcctcggtataggatgttcagtaaccaaggagtgtgcaccctcgaaattcgaaagcccagtccctatgacggcggcacatactgttgcaaagccgttaatgatctgggaacggtcgaaatcgaatgtaagttggaggtgaaggtgatagcacaatag

SEQ ID NO: 264286 - DNA, 3447 bp, Artificial Sequence
  derived and/or modified sequence
atgcctgagcccaccaagaaggaggagaatgaggtgcctgccccagcccctcctcctgaggagcccagcaaggagaaggaggccggcaccaccccagccaaggatgaggaggaggtgtccccaccttctgccctgcccccaggcctgggcagccgggccctggagaggaaggacagcgactggaccctggtggagaccccacctggagaggagcaggccaagcagaatgccaacagccagctgagcatcctcttcatcgagaagccccagggcggcaccgtgaaggtgggggaggacatcaccttcatcgccaaggtgaaggccgaggacctgctgaggaagcccaccatcaagtggttcaagggcaagtggatggacctggccagcaaggccggcaagcacctgcagctgaaggagacctttgagcggcacagccgggtgtacacctttgagatgcagatcatcaaggccaaggacaactttgctggcaactaccgctgtgaggtgacctacaaggacaagtttgacagctgcagctttgacctggaggtgcatgagagcacaggcaccacccccaacatcgacatccgcagcgccttcaagaggtctggagagggccaggaggatgctggggagctggacttcagcggcctgctgaagagaagagaggtgaagcagcaggaggaggagccccaggtggatgtgtgggagctgctgaagaatgccaagcccagtgaatatgagaagatcgccttccagtatggcatcacagacctgcggggcatgctgaagaggctgaagaggatgaggcgggaggagaagaagtctgctgcctttgccaagatcctggaccctgcctaccaggtggacaagggcggccgggtgcgctttgtggtggagctggccgaccccaagctggaggtgaagtggtacaagaatggccaggagatccggcccagcaccaagtacatctttgagcacaagggctgccagaggatcctcttcatcaacaactgccagatgacagatgattctgagtactacgtgacagctggagatgagaagtgcagcacagagctgtttgtgcgggagccccccatcatggtgaccaagcagctggaggacaccacagcctactgtggggagcgggtggagctggagtgtgaggtgtctgaagatgatgccaacgtgaagtggttcaagaatggagaggagatcatccctggccccaagagccgctaccgcatccgggtggagggcaagaagcacatcctgatcattgaaggagccaccaaggcagatgctgctgagtacagcgtgatgaccactggaggccagagcagcgccaagctgtctgtggacctgaagcccctgaagatcctgacccccctgacagaccagacagtgaacctgggcaaggagatctgcctgaagtgtgagatcagcgagaacatccctgggaagtggaccaagaatggcctgcctgtgcaggagagtgaccggctgaaggtggtgcacaagggccgcatccacaagctggtgattgccaatgccctgacagaagatgaaggagactatgtgtttgccccagatgcctacaacgtgaccctgcctgccaaggtgcacgtgattgacccccccaagatcatcctggatggcctggatgctgacaacacagtgacagtgattgctggcaacaagctgcggctggagatccccatctctggagagcccccacccaaggccatgtggagcagaggagacaaggccatcatggagggcagcggccgcatcagaacagagagctacccagacagcagcaccctggtgattgatattgctgagagagatgattctggagtgtaccacatcaacctgaagaatgaggccggggaggcccacgccagcatcaaggtgaaggtggtggacttcccagacccccctgtggcccccaccgtgacagaggtgggagatgactggtgcatcatgaactgggagcccccagcctatgatggcggcagccccatcctgggctacttcattgaaaggaagaagaagcagagcagccgctggatgaggctgaactttgacctgtgcaaggagaccacctttgagcccaagaagatgattgagggcgtggcctatgaggtgcgcatctttgctgtgaatgccatcggcatcagcaagcccagcatgcccagccggccctttgtgcccctggccgtgaccagcccccccaccctgctgactgtggacagcgtgacagacaccaccgtgaccatgcgctggaggcccccagaccacatcggggccgccggcctggatggctacgtgctggagtactgctttgagggcacagaggactggatcgtggccaacaaggacctgattgacaagaccaagttcaccatcaccggcctgcccacagatgccaagatctttgtgcgggtgaaggctgtgaatgctgctggggccagcgagcccaagtactacagccagcccatcctggtgaaggagatcatcgagccccccaagatccgcatccccaggcacctgaagcagacctacatccggcgggtgggggaggccgtgaacctggtgatccccttccagggcaagcccaggcctgagctgacctggaagaaggatggagctgagattgacaagaaccagatcaacatcagaaattctgaaacagacaccatcatcttcatcaggaaggccgagaggagccacagcggcaagtatgacctgcaggtgaaggtggacaagtttgtggagacagccagcattgacatccagatcatcgacaggcctggccccccccagatcgtgaagattgaagatgtgtggggagaaaatgtggccctgacctggaccccacccaaggatgatggaaatgctgccatcaccggctacaccatccagaaggctgacaagaagtccatggagtggttcaccgtgattgagcactaccacaggaccagcgccaccatcacagagctggtgattggaaatgagtactacttccgggtcttcagcgagaacatgtgtggcctgtctgaagatgccaccatgaccaaggagagcgctgtgattgccagagatggcaagatctacaagaaccctgtgtatgaggactttgacttcagcgaggcccccatgttcacccagcccctggtgaacacctacgccatcgccggctacaatgccaccctgaactgcagcgtgcggggcaaccccaagcccaagatcacctggatgaagaacaaggtggccatcgtggatgacccccgctacaggatgttcagcaaccagggcgtgtgcaccctggagatcaggaagcccagcccctatgatggcggcacctactgctgcaaggctgtgaatgacctgggcaccgtggagattgagtgcaagctggaggtgaaggtgattgcccagtag

SEQ ID NO: 264287 - DNA, 3871 bp, Artificial Sequence
  derived and/or modified sequence
gtcacaccgacctgcaccatctctcgcctgcctgtggggtttctgtcaactagtcgtggagggaaggagactctttaaagaataacatcttattgtggccatgccagaacccactaagaaagaggaaaatgaagtgccagccccagccccacccccggaagaaccaagtaaagagaaggaggccggaactacaccagcaaaagatgaagaggaagtctccccgcctagcgccttgcctccaggtttgggtagtcgggccctggagagaaaagattcagactggacccttgtcgaaactcctcctggggaggaacaagccaagcagaatgccaactcccagctgtccatcttgttcattgaaaaacctcaaggaggaacagtgaaagttggtgaagatatcaccttcatagccaaagtcaaggctgaagatcttctgagaaaacccactatcaaatggttcaaaggaaaatggatggacctggccagcaaagccgggaagcaccttcagctgaaggaaacctttgagaggcacagtcgggtgtacacatttgagatgcagatcatcaaggccaaagataactttgcaggaaattacagatgcgaggtcacctataaggataagtttgacagctgttcatttgatcttgaagtgcacgaatctactgggactactccaaacattgacatcagatctgctttcaagagaagtggagaaggtcaagaggatgcaggagaacttgactttagtggtctcctgaaacgtagggaggtgaagcagcaggaggaagaaccccaggtggacgtatgggagttgctgaagaacgcgaaacccagtgagtacgagaagatcgccttccagtatggaatcaccgacctgcgcggcatgctcaagcgactcaagcgcatgcgcagagaggagaagaagagcgcagcttttgcaaaaattcttgatcctgcatatcaggttgacaaaggaggcagagtgaggtttgttgtggagctggcagatccaaagttggaggtgaaatggtataaaaatggtcaagaaattcgacccagtaccaaatacatctttgaacacaaaggatgccagagaatcctgtttatcaataactgtcagatgacagatgattcagagtattatgtgacagccggtgatgagaaatgttccactgagctcttcgtaagagagcctccaattatggtgaccaaacagctggaagatacaactgcttattgtggggagagagtggaattagaatgtgaggtgtctgaagatgatgccaatgtaaaatggtttaagaatggtgaagagattatccctggtccaaaatcaagataccgaattagagttgagggtaaaaaacacatcttgatcatagagggagcaacaaaggctgatgctgcagaatattcagtaatgacaacaggaggacaatcatctgctaaacttagtgttgacttgaaacctctgaagattttgacacctctgactgatcagactgtaaatcttggaaaagaaatctgcctgaagtgtgaaatctctgaaaacataccaggaaaatggactaaaaatggcctacctgttcaggagagtgaccgtctaaaggtggttcacaagggaaggatccacaagttagtgatagccaatgccctcactgaagatgaaggtgattatgtatttgcacctgatgcctacaatgttactctgcctgccaaagttcatgttattgatcctcctaagatcatcctggatggtcttgatgctgacaacacagtgacagtgattgcaggaaacaagcttcgtcttgagatccccatcagcggagaaccacctcctaaagccatgtggagccggggagataaggctattatggaaggcagtggccggataagaacagaatcttaccctgatagcagcactctggtcattgatatagctgaaagagatgactctggtgtttaccacatcaatctgaaaaacgaagctggagaggcacatgcaagcatcaaggttaaagttgtggacttccctgatcctccagtggcaccgactgtgacagaggtgggagatgactggtgtatcatgaactgggagcctcctgcctacgacggaggctctccaatcctaggatattttattgagaggaagaagaaacaaagctccaggtggatgaggctgaattttgatctctgcaaagaaacaacttttgagcccaagaagatgattgaaggtgtggcctatgaggtccgcatctttgcagtcaatgccattggcatctccaagcccagtatgccctccaggccttttgttcctttggctgtaacaagccctcctactcttctgactgtggactctgtcactgacacgactgtcacgatgaggtggcgccccccagaccacattggtgcagcaggtttagatggctatgtgctagagtattgctttgaaggaactgaggactggatagttgcaaacaaagatctgattgacaagacgaagttcaccatcacaggtctgccaacagatgcaaagatctttgtgcgtgtgaaggctgttaatgcagctggtgccagcgagcccaagtactattctcagcccattctcgtgaaggaaatcatagaacctccaaagattcgcattccaagacacctgaagcaaacctatatccgcagagttggagaagctgtcaatctggttatacctttccagggaaaaccaagaccagaattaacttggaagaaggatggtgcagaaattgataagaatcaaataaacattcgcaactctgagactgatacaatcatatttattagaaaagcagagaggagccactctgggaaatatgatctgcaagtcaaagtggacaaattcgtggagaccgcatcaattgacatccagatcattgaccgtccaggtccaccccaaattgtgaagattgaggatgtctggggagaaaatgtcgctctcacatggactccaccaaaggatgatggaaatgctgctatcacaggctataccattcagaaggctgacaagaagagcatggaatggtttactgtcattgagcattatcatcgaaccagtgccaccattactgaattggtcatagggaatgaatattacttccgggtcttttctgaaaacatgtgtggcctcagtgaggatgccaccatgactaaagagagtgcagtgatcgccagggatggtaaaatctacaaaaatccagtgtatgaagactttgatttctcagaggcacccatgtttactcagcctttggttaacacctatgccatagctggttacaatgccaccctaaactgcagtgtgagaggaaatcctaagcctaaaataacctggatgaaaaacaaagttgctattgtggatgatccaagatacaggatgttcagcaaccagggagtctgtaccctggaaattcgcaagcccagcccctatgatggaggcacttactgctgcaaagcagtcaatgaccttgggacagtggagattgaatgcaaactggaggtgaaagtcattgcacaataaggatttttgaatgtataatatcatctaaggtgggctctccttctgcagactcctcttgcaaggcgtacctccaaacataattgattcgtatctgcgagacttacactcaagcaatcctgaggaatactgagggagggcctggctactgtctctctgcactctgctgctttgaaatctggttgaaatgagaaaaagcattttctgttttcccaccaggcccccaagtgtggtctttttctttcctcctaatgttgaagagaaaaaaaaaaaaaaaagtttgcccagattgcttaattaaaaattgcaaacaaaatctcatttgaa

SEQ ID NO: 264288 - DNA, 3447 bp, Artificial Sequence
  derived and/or modified sequence
atgcccgagcccaccaagaaggaggagaacgaggtgcccgcccccgccccccctcctgaggagcccagcaaggagaaagaggccggcaccacacctgctaaggacgaagaggaggtaagcccacccagcgcgttgccacctggccttggctccagggccctcgagcgtaaggactcagattggaccctagtcgagaccccgcccggagaagagcaggcaaagcagaacgctaattcacagttatcaatactgttcatcgaaaagcctcagggcggtacagtgaaagtgggggaagatatcacttttatcgctaaggtgaaggcagaagacctcctcaggaagccaacaatcaaatggtttaaggggaaatggatggacttggcaagcaaggcggggaagcacctgcagttgaaggaaacattcgagaggcactctcgtgtgtacacgttcgaaatgcagataatcaaggccaaggataatttcgccggcaactataggtgtgaagtgacgtataaggacaaattcgactcttgcagcttcgacttggaagtgcacgaatcaacaggaactacacctaacatagacatccgctccgcatttaaacgcagcggagagggccaggaagacgccggggagctggatttcagtggtcttctcaagcgccgtgaagtgaaacagcaggaggaagaaccacaggtcgatgtgtgggagctcctgaaaaatgcgaaaccctcagaatacgaaaagatagcctttcagtatggaattacggacctccgcggcatgctaaagcgactgaagcgcatgcggagagaggaaaagaagagtgccgcctttgcgaagattctggaccccgcttaccaggtggacaagggaggaagggtgcggttcgtcgtggaattagccgacccaaagttagaagtcaagtggtataaaaatggacaggaaattcgcccctccaccaaatacatattcgaacataaaggttgccaaagaattctgtttattaacaactgtcagatgacagatgatagcgagtattacgttactgcgggcgacgagaaatgttctaccgagctgttcgtcagggagcctcctattatggtcactaaacaattggaagatacaaccgcctactgtggagaacgtgttgaacttgagtgtgaggtgtccgaggatgatgcaaatgtaaagtggttcaagaatggtgaagagatcattccaggccctaagtcacggtataggattcgggttgagggaaaaaagcacattctaatcattgagggcgctacgaaagccgacgccgctgaatactcagtgatgactaccggtggtcagagcagtgcaaagttaagcgtggatcttaaacctcttaagattctgactccattgactgaccagaccgtaaatttaggcaaagaaatttgcctgaagtgtgaaatctctgaaaatattccaggcaaatggacaaaaaacggactgccggtccaggagagtgatcgccttaaagtggttcataaggggcgcatacacaaactcgtgatcgccaacgcactgaccgaagacgagggtgactacgttttcgccccagatgcatataacgtaaccctgccagcaaaggtccatgtgattgacccgccaaagatcatcctcgatggtctggacgcagataacaccgtcacagtgattgcagggaataagctgcggcttgaaatccctatctccggtgaaccgcccccaaaggcaatgtggtctcggggtgacaaagctatcatggaaggcagcggtcgcattaggactgaatcctatccggattcatctacactggtcattgacattgccgagagggatgacagtggagtctatcacatcaacctaaaaaacgaggcgggtgaggcccatgcgtccatcaaggtcaaagtggttgacttccctgatcctccagtcgccccaacagtgaccgaagtaggtgacgattggtgtattatgaactgggaacccccagcatatgacggcggaagtcccatcctgggttactttattgaaagaaaaaagaaacaaagcagcagatggatgagactcaattttgacttgtgcaaggaaacgacgtttgagcccaagaagatgatagaaggtgtcgcttacgaggtgcgcatctttgcagtgaacgcaatcggcataagcaagcccagtatgccaagtagaccatttgtgcccctggcagtgacatctccacctactttgcttaccgtggatagtgtaacagacacaaccgtgaccatgcgttggcggccacctgaccatattggcgctgccggtctcgatgggtacgtgcttgagtactgcttcgagggcacggaggactggattgtggctaacaaggaccttatcgacaagaccaaattcaccattactggattgcccacagacgcgaaaatcttcgtacgggtaaaggcagtcaacgcagctggagcttccgagccaaaatactatagccagcccattctggttaaggagataatagaacctccaaaaatcagaataccccggcatctgaagcagacctacattaggcgcgtgggtgaagccgtcaacctcgtcattcccttccagggtaagcctcggcctgagcttacttggaaaaaagacggcgcagagatcgacaagaatcagataaacatacggaatagcgagaccgacacaattatcttcattagaaaggccgaacgttcccactctgggaagtacgatttgcaggtgaaggtcgacaaattcgtggaaaccgcctctatagatatccagattatagaccgccctggacccccccaaattgtaaaaatcgaggatgtgtggggtgagaacgtcgcgctgacctggacaccccccaaggatgacggtaatgcagccattactggttacactattcaaaaagcagacaagaagtctatggagtggttcacggtgatagaacattaccataggactagtgcaaccatcaccgagttggtcattggtaatgaatactactttagagtcttcagcgaaaacatgtgcggcctatccgaagatgccacgatgactaaagaatcagcagtaatcgcccgggatggtaaaatctataagaatccggtttacgaggattttgacttctcagaggcgcccatgtttactcagcccctggttaacacttatgccatcgcaggctacaatgctaccttaaattgctctgtgcggggcaaccccaagcctaaaatcacctggatgaagaacaaagtggccattgtggatgaccctaggtatcgcatgttctcaaaccaaggcgtttgcaccctggagatcaggaagccgagcccttatgatggcggcacttattgctgcaaagccgtcaacgacctcggtactgtggagatcgaatgcaagcttgaagttaaggtgatcgcccagtag

SEQ ID NO: 264289 - DNA, 3447 bp, Artificial Sequence
  derived and/or modified sequence
atgcccgagcccaccaaaaaggaagagaatgaggtacctgcgcctgccccacccccagaagagccttccaaggagaaggaggcgggaaccacacccgcaaaggatgaggaggaggtgtcccccccatctgccctcccacccggattaggatctcgtgcccttgagcggaaggattccgactggaccctcgtagagaccccacccggagaggaacaggcgaaacaaaacgccaatagtcagttgagcatcctattcattgaaaagcctcagggtgggacagtcaaggtgggcgaagacattacctttattgccaaggtcaaagcagaggacctgttgcggaagcccactatcaaatggtttaagggaaagtggatggacctggcctccaaggctggaaagcacctgcagctgaaggagacattcgagaggcactcccgagtgtacacgttcgagatgcagatcattaaggctaaggacaatttcgctggtaactacaggtgtgaagttacatacaaagacaagttcgactcatgctccttcgatctagaggtgcacgagagtaccggaaccactccaaacattgacattaggtcagcatttaagcgttctggcgaaggacaggaagacgccggtgagctggacttctccgggctgctgaaacgacgagaggtcaagcagcaggaagaggagccccaggtggacgtttgggaactgctcaagaatgcaaagcctagtgagtatgaaaaaattgcctttcaatatggaatcacagatctccggggtatgttgaaacgcctcaagagaatgcgcagagaggagaagaagagcgcagctttcgccaagatcctggaccccgcttaccaggtcgataagggaggcagagtccggtttgttgtggaactggcggacccaaaactggaagtgaagtggtataaaaatggccaggagattcgcccttccaccaagtacatcttcgagcacaaagggtgccagagaatcctgttcatcaacaattgtcagatgacggatgacagcgaatattatgtgaccgcaggcgacgaaaaatgttctacggagcttttcgttagagaaccccctatcatggttaccaaacaacttgaagacaccaccgcttattgcggagagcgtgtcgaactggaatgtgaggtgtccgaggatgacgcgaacgtgaagtggttcaaaaacggggaagagatcattccaggacctaagtcccgctaccgaatccgcgttgaaggcaagaagcacatactcataattgagggcgcaacaaaagccgatgccgcagagtattcggtaatgactactggcggtcaatcatcggctaaactgtctgtggacctgaaaccattaaagattttgacacctttaaccgatcagacggttaatctgggcaaagaaatttgtctgaaatgtgagatctccgaaaacatccccggtaagtggactaagaacggcttgcccgttcaagagagcgataggctcaaggttgttcacaagggcaggatacataaactcgtcattgcaaacgccctcacggaagacgagggggattacgtctttgcccctgacgcttacaatgtgacgctgcccgctaaagtacacgtgatcgacccccctaaaattatcttggacggcctcgatgccgataacacagtcaccgtgatagccggaaacaagctcagattagagattcccatttcaggagagcctcccccaaaggccatgtggtctcggggagacaaggcgattatggaaggaagcggccgaattagaacagaatcatatcctgactcttcaacactggtgatcgatattgccgaacgtgatgacagcggtgtgtaccatatcaatctgaaaaacgaagccggtgaagcgcacgcgtctatcaaggtgaaggttgtggattttccggaccctcctgtagccccaaccgtcacagaagtcggggatgactggtgtatcatgaactgggagcctcccgcatacgacggagggtcacctatcctggggtacttcattgaaaggaagaagaagcaatctagtaggtggatgcgactgaatttcgacctctgcaaagaaactacatttgaaccaaaaaaaatgattgaaggggtggcgtacgaagttcgtatattcgcggttaatgctatcggaatatcgaagccgagcatgccctcgagaccgtttgtaccgctcgccgtcactagccccccaacactgctgaccgtcgattcagttaccgataccacagttactatgaggtggagacctccagaccacatcggggcagcaggcctcgatggctatgtgcttgaatattgtttcgaaggcacagaggattggatagtagctaacaaggatctcatcgataaaacaaaattcacgataactggacttcctactgatgcgaaaattttcgtgcgcgtcaaggctgtcaacgctgcgggagccagtgagcccaaatattatagtcagcctatcctggtgaaagagattatagagccccctaaaattcgcatcccccgtcacctgaaacagacatatatcaggcgcgtgggcgaagctgtaaacctcgtcatcccttttcagggtaaaccccgtcccgagctgacatggaaaaaggacggtgctgagatcgacaagaaccaaatcaacataagaaactcagagaccgacacaataattttcatccgcaaagctgaacgcagccatagtgggaagtacgatcttcaggttaaggtcgacaaatttgtggagacagcaagcattgatatacagattatcgataggcctggacctccccagatcgtgaagatagaagatgtgtggggtgagaatgtcgcactgacctggactccccctaaagacgacggtaacgccgcaattactggatatacaatacagaaagctgataagaaatccatggagtggttcaccgtaatcgaacattatcatcgaacatcagccacgatcaccgagttggttatcgggaacgagtactacttcagggtcttcagcgaaaacatgtgcggcttgagcgaagacgctacaatgaccaaagagagtgcggtgatcgctagagacgggaaaatttataagaatccggtctatgaagactttgatttctcagaggctcccatgtttacacaaccgctggtaaatacatacgccattgccggttacaacgccactctgaactgttctgtaaggggcaaccccaaaccgaaaattacatggatgaagaacaaagtggccattgtggacgaccctagataccgcatgttctccaaccagggtgtctgcacactggagatccgaaagccctcgccatacgacggaggcacatactgctgcaaagcggtaaatgatctcggaaccgttgagatcgaatgtaaactggaagtcaaggtgatcgctcaatag

SEQ ID NO: 264290 - DNA, 3447 bp, Artificial Sequence
  derived and/or modified sequence
atgcccgagcccaccaagaaggaggagaacgaggtgcccgcccccgcccccccccccgaggagcccagcaaggagaaggaggccggcaccacccccgccaaggacgaggaggaggtgagcccccccagcgccctgccccccggcctgggcagcagagccctggagagaaaggacagcgactggaccctggtggagaccccccccggcgaggagcaggccaagcagaacgccaacagccagctgagcatcctgttcatcgagaagccccagggcggcaccgtgaaggtgggcgaggacatcaccttcatcgccaaggtgaaggccgaggacctgctgagaaagcccaccatcaagtggttcaagggcaagtggatggacctggccagcaaggccggcaagcacctgcagctgaaggagaccttcgagagacacagcagagtgtacaccttcgagatgcagatcatcaaggccaaggacaacttcgccggcaactacagatgcgaggtgacctacaaggacaagttcgacagctgcagcttcgacctggaggtgcacgagagcaccggcaccacccccaacatcgacatcagaagcgccttcaagagaagcggcgagggccaggaggacgccggcgagctggacttcagcggcctgctgaagagaagagaggtgaagcagcaggaggaggagccccaggtggacgtgtgggagctgctgaagaacgccaagcccagcgagtacgagaagatcgccttccagtacggcatcaccgacctgagaggcatgctgaagagactgaagagaatgagaagagaggagaagaagagcgccgccttcgccaagatcctggaccccgcctaccaggtggacaagggcggcagagtgagattcgtggtggagctggccgaccccaagctggaggtgaagtggtacaagaacggccaggagatcagacccagcaccaagtacatcttcgagcacaagggctgccagagaatcctgttcatcaacaactgccagatgaccgacgacagcgagtactacgtgaccgccggcgacgagaagtgcagcaccgagctgttcgtgagagagccccccatcatggtgaccaagcagctggaggacaccaccgcctactgcggcgagagagtggagctggagtgcgaggtgagcgaggacgacgccaacgtgaagtggttcaagaacggcgaggagatcatccccggccccaagagcagatacagaatcagagtggagggcaagaagcacatcctgatcatcgagggcgccaccaaggccgacgccgccgagtacagcgtgatgaccaccggcggccagagcagcgccaagctgagcgtggacctgaagcccctgaagatcctgacccccctgaccgaccagaccgtgaacctgggcaaggagatctgcctgaagtgcgagatcagcgagaacatccccggcaagtggaccaagaacggcctgcccgtgcaggagagcgacagactgaaggtggtgcacaagggcagaatccacaagctggtgatcgccaacgccctgaccgaggacgagggcgactacgtgttcgcccccgacgcctacaacgtgaccctgcccgccaaggtgcacgtgatcgacccccccaagatcatcctggacggcctggacgccgacaacaccgtgaccgtgatcgccggcaacaagctgagactggagatccccatcagcggcgagcccccccccaaggccatgtggagcagaggcgacaaggccatcatggagggcagcggcagaatcagaaccgagagctaccccgacagcagcaccctggtgatcgacatcgccgagagagacgacagcggcgtgtaccacatcaacctgaagaacgaggccggcgaggcccacgccagcatcaaggtgaaggtggtggacttccccgacccccccgtggcccccaccgtgaccgaggtgggcgacgactggtgcatcatgaactgggagccccccgcctacgacggcggcagccccatcctgggctacttcatcgagagaaagaagaagcagagcagcagatggatgagactgaacttcgacctgtgcaaggagaccaccttcgagcccaagaagatgatcgagggcgtggcctacgaggtgagaatcttcgccgtgaacgccatcggcatcagcaagcccagcatgcccagcagacccttcgtgcccctggccgtgaccagcccccccaccctgctgaccgtggacagcgtgaccgacaccaccgtgaccatgagatggagaccccccgaccacatcggcgccgccggcctggacggctacgtgctggagtactgcttcgagggcaccgaggactggatcgtggccaacaaggacctgatcgacaagaccaagttcaccatcaccggcctgcccaccgacgccaagatcttcgtgagagtgaaggccgtgaacgccgccggcgccagcgagcccaagtactacagccagcccatcctggtgaaggagatcatcgagccccccaagatcagaatccccagacacctgaagcagacctacatcagaagagtgggcgaggccgtgaacctggtgatccccttccagggcaagcccagacccgagctgacctggaagaaggacggcgccgagatcgacaagaaccagatcaacatcagaaacagcgagaccgacaccatcatcttcatcagaaaggccgagagaagccacagcggcaagtacgacctgcaggtgaaggtggacaagttcgtggagaccgccagcatcgacatccagatcatcgacagacccggccccccccagatcgtgaagatcgaggacgtgtggggcgagaacgtggccctgacctggaccccccccaaggacgacggcaacgccgccatcaccggctacaccatccagaaggccgacaagaagagcatggagtggttcaccgtgatcgagcactaccacagaaccagcgccaccatcaccgagctggtgatcggcaacgagtactacttcagagtgttcagcgagaacatgtgcggcctgagcgaggacgccaccatgaccaaggagagcgccgtgatcgccagagacggcaagatctacaagaaccccgtgtacgaggacttcgacttcagcgaggcccccatgttcacccagcccctggtgaacacctacgccatcgccggctacaacgccaccctgaactgcagcgtgagaggcaaccccaagcccaagatcacctggatgaagaacaaggtggccatcgtggacgaccccagatacagaatgttcagcaaccagggcgtgtgcaccctggagatcagaaagcccagcccctacgacggcggcacctactgctgcaaggccgtgaacgacctgggcaccgtggagatcgagtgcaagctggaggtgaaggtgatcgcccagtag

SEQ ID NO: 264291 - protein, 1141 aa, Artificial Sequence
  derived and/or modified sequence
MPEPTKKEENEVPAPAPPPEEPSKEKEAGTTPAKDWTLVETPPGEEQAKQNANSQLSILFIEKPQGGTVKVGEDITFIAKVKAEDLLRKPTIKWFKGKWMDLASKAGKHLQLKETFERHSRVYTFEMQIIKAKDNFAGNYRCEVTYKDKFDSCSFDLEVHESTGTTPNIDIRSAFKRSGEGQEDAGELDFSGLLKRREVKQQEEEPQVDVWELLKNAKPSEYEKIAFQYGITDLRGMLKRLKRMRREEKKSAAFAKILDPAYQVDKGGRVRFVVELADPKLEVKWYKNGQEIRPSTKYIFEHKGCQRILFINNCQMTDDSEYYVTAGDEKCSTELFVREPPIMVTKQLEDTTAYCGERVELECEVSEDDANVKWFKNGEEIIPGPKSRYRIRVEGKKHILIIEGATKADAAEYSVMTTGGQSSAKLSVDLKPLKILTPLTDQTVNLGKEICLKCEISENIPGKWTKNGLPVQESDRLKVVHKGRIHKLVIANALTEDEGDYVFAPDAYNVTLPAKVHVIDPPKIILDGLDADNTVTVIAGNKLRLEIPISGEPPPKAMWSRGDKAIMEGSGRIRTESYPDSSTLVIDIAERDDSGVYHINLKNEAGEAHASIKVKVVDFPDPPVAPTVTEVGDDWCIMNWEPPAYDGGSPILGYFIERKKKQSSRWMRLNFDLCKETTFEPKKMIEGVAYEVRIFAVNAIGISKPSMPSRPFVPLAVTSPPTLLTVDSVTDTTVTMRWRPPDHIGAAGLDGYVLEYCFEGSTSAKQSDENGEAAYDLPAEDWIVANKDLIDKTKFTITGLPTDAKIFVRVKAVNAAGASEPKYYSQPILVKEIIEPPKIRIPRHLKQTYIRRVGEAVNLVIPFQGKPRPELTWKKDGAEIDKNQINIRNSETDTIIFIRKAERSHSGKYDLQVKVDKFVETASIDIQIIDRPGPPQIVKIEDVWGENVALTWTPPKDDGNAAITGYTIQKADKKSMEWFTVIEHYHRTSATITELVIGNEYYFRVFSENMCGLSEDATMTKESAVIARDGKIYKNPVYEDFDFSEAPMFTQPLVNTYAIAGYNATLNCSVRGNPKPKITWMKNKVAIVDDPRYRMFSNQGVCTLEIRKPSPYDGGTYCCKAVNDLGTVEIECKLEVKVIAQ

SEQ ID NO: 264292 - DNA, 3426 bp, Artificial Sequence
  derived and/or modified sequence
atgccagagcctactaaaaaagaagagaatgaggtgcctgcaccagcacccccccctgaggagccatctaaggagaaagaggcgggcacgactccagctaaggactggaccctcgtggaaactcctcctggtgaggagcaggctaaacagaacgccaattctcaactgtctatattgttcatcgagaagcctcagggcggcacagtcaaagtaggcgaagatataacttttatcgcaaaggtgaaggccgaggacctgttgagaaagcccaccataaagtggttcaaaggcaagtggatggacttagcgtcaaaagcaggcaagcacctgcaattgaaggaaacttttgagcgccattctagggtgtacactttcgagatgcagattatcaaagcaaaagataatttcgctggcaattatcgctgtgaggtgacgtataaagataaattcgacagttgttcttttgatctggaagttcacgagagtaccggaacgacaccaaacatagacataaggtccgcctttaaacgcagcggagagggtcaagaagacgccggggaactagacttcagtggtctactgaagcgtcgagaagtcaagcagcaggaagaggagccccaggtggacgtgtgggaacttctgaagaacgccaaaccttccgagtatgagaaaatcgcgtttcagtatgggattacagatctcaggggcatgctcaaaaggctgaagcgaatgcgcagggaggagaaaaaatcagctgcattcgctaagatcctggacccagcttatcaggtggataagggtggccgggtccgattcgttgtagagcttgccgaccccaagctggaagtcaagtggtacaagaacgggcaggagattcgtccaagtaccaagtatatcttcgaacataaagggtgccaaaggattcttttcattaacaattgtcagatgacagacgacagtgaatattacgtaacggccggggatgagaaatgcagcactgagttattcgtgagggagcccccaatcatggtgacaaaacagttagaggacactaccgcgtattgcggtgagagagtcgagctcgagtgcgaggtgtcagaagacgacgctaacgttaaatggttcaaaaacggcgaggagataattcccggccccaaatccaggtatcgtattagagtggaagggaaaaagcatattctgattatagagggtgcaactaaggccgatgctgcagaatactcggtcatgactaccggaggccagagctcagccaaactgtctgtggacttaaagccattgaagatactgacccctctgacagaccaaacagtgaatctggggaaggagatatgcctgaaatgcgaaatttcggagaacattcccggtaaatggaccaaaaacggactgcccgtgcaagaaagtgatcgactgaaagtggtgcacaagggtcgtattcataagctcgtgatagccaacgccctcactgaggacgaaggcgactacgtcttcgctcccgacgcatataatgtcactttaccagccaaggttcatgtaatcgacccacctaagattattctggatggcctagacgccgataacacggtaactgtgatcgccgggaacaaattgcggctcgagatcccaatcagtggggaaccacctcctaaggcaatgtggagcaggggggataaagccataatggagggaagcggtcgtatccgcactgagtcctacccggatagctctacattagtaatcgatattgcagaaagagatgacagcggggtataccacattaacctaaaaaatgaagctggcgaagcccacgcttccattaaggtcaaagtggtggacttcccggatcctcccgtggccccaactgttactgaggtgggagatgactggtgcattatgaattgggaacccccggcctacgatgggggatcccccattctgggatactttatcgaacgaaaaaagaaacagagctcaaggtggatgaggcttaacttcgacctctgcaaagaaacaacattcgaacctaaaaagatgatagaaggtgtggcttatgaggtacgcatattcgcagtgaacgccattgggatctcaaagccttctatgcccagccgaccttttgttcctctagccgtgacatcccctccaaccctgttaacagtcgattcagtgacagacacaaccgtcacaatgaggtggcgtccacccgaccatatcggggccgccggactggatggttacgtgctggaatactgctttgaaggtagcacttcagctaagcagtctgatgagaatggtgaggctgcatacgacctgccagcagaggattggatcgtcgcgaataaggatttgatcgacaagactaagtttacaatcaccgggctcccaacagacgcaaaaatttttgtcagggtcaaggctgtgaatgccgccggtgcttctgagccgaagtactacagtcagcccatacttgtgaaggagataattgaacctccaaagatcagaatcccgcgacaccttaaacagacttacattagaagagtcggagaagcagttaacctcgtgatacctttccagggcaaacctcgccctgagcttacttggaagaaagatggagcagagattgataagaaccaaattaacatcagaaactccgagaccgacacaatcatctttatccggaaggccgagcggtcccattccgggaaatatgatcttcaggtgaaggtggacaaattcgtcgaaaccgcctccatcgatatccagattattgaccggcctgggccccctcagatcgtcaaaatcgaagacgtgtggggcgaaaatgtcgccttgacttggacccctccaaaagacgacggaaacgcagctattaccggatacaccatacagaaggcggataagaaaagtatggagtggtttactgttattgaacactaccaccggacctcagccacaattactgaactggtaataggtaatgagtattactttcgcgtcttctctgagaacatgtgcgggttgtccgaagacgctacaatgacgaaagagtctgccgttatcgcgcgagatgggaagatttataaaaacccagtctatgaggacttcgatttttctgaggcgcctatgtttacacagcctctggtgaatacttacgctatcgcaggttataacgcaactctgaactgtagtgtgaggggtaatccaaaacctaagattacctggatgaaaaacaaggtcgccatagtggatgacccccgttacaggatgttctccaaccagggagtgtgcactctcgagattagaaaaccttccccatacgacggaggtacatattgctgtaaggcggtgaacgatctgggcacggtggaaatcgaatgcaagcttgaggtgaaggtgattgcccaatag

SEQ ID NO: 264293 - DNA, 3426 bp, Artificial Sequence
  derived and/or modified sequence
atgcctgaacctacaaaaaaggaagagaacgaggtgcctgcacccgcgccgcccccggaggaacccagcaaagaaaaggaagctggcacaacccccgccaaagattggacactggtggagactccccccggagaagaacaggccaagcagaatgctaatagccagctttccatcctgtttattgagaagccgcagggtgggaccgtgaaggttggggaggacatcacttttatcgcaaaagtcaaggccgaagatttgcttaggaagcccactattaaatggttcaaagggaagtggatggatctagcgtcaaaagccgggaaacatttacagctcaaagagaccttcgaacgccacagtcgggtgtacacctttgagatgcaaattattaaagccaaggacaattttgcaggaaactacagatgcgaggttacctacaaggataagtttgattcgtgctcattcgatttggaggtgcacgagtccacggggacgacccctaacatcgacataaggtccgccttcaaaaggagtggggaaggtcaagaagacgctggggagctggacttctcaggtctgctgaagagacgggaggtgaagcagcaggaggaagagccacaggtggacgtctgggagctgctgaaaaacgccaagccttctgaatacgagaaaatcgcgttccagtacggtattacagacctgcggggaatgctaaagcgattgaaaaggatgcgaagagaagagaaaaagtcggccgcattcgcgaagatcctggacccagcttatcaggtggataagggcggcagggtaagattcgttgtggaactcgccgaccccaaactcgaagtgaagtggtataagaacggccaggaaattagaccgtccaccaagtatatattcgaacacaagggttgccaacgcatcctcttcatcaacaattgccagatgaccgatgactctgagtattacgtgactgccggcgatgagaaatgttcaacagaactgtttgtgcgagaaccccctatcatggtgaccaaacagcttgaagataccactgcctactgcggagaacgcgttgaacttgagtgcgaggttagcgaggacgatgctaatgtgaaatggtttaaaaacggcgaagagatcattccaggcccaaagtctcgatacagaattcgagtggagggcaaaaagcatatcctcataattgaaggagctaccaaagcagatgcagccgaatactctgtcatgactacaggaggccagtccagcgctaaattgtctgtggatttgaaacctttaaaaattctgacacctctcaccgaccagaccgtaaacctgggaaaagagatttgccttaaatgtgaaataagcgagaacatccccggcaagtggaccaagaatggactgcccgtccaggagtcggaccggttgaaggtcgtccacaaaggccgtatccacaagttggtaattgctaacgccctaaccgaggatgaaggtgactacgtgtttgcacccgatgcatataacgtgactctgccagccaaagtacatgtcattgatccaccaaaaataattctcgatggactggatgccgacaatacggtaacagttatcgcgggcaacaaactgcgcctggaaattcccatttccggcgagccaccgccaaaggcaatgtggagtcgcggtgacaaagccatcatggaaggaagtgggagaatccggaccgaaagttatccggactcctcaactttagtgattgatattgcagaaagagacgatagcggcgtgtaccacattaatcttaaaaatgaagctggcgaagctcatgcttccatcaaggtcaaagtggtggactttcctgacccacctgtggcgcccacagtgacggaggtaggggacgactggtgcatcatgaattgggagcccccagcttacgatggaggctcccccatcctgggatacttcatagaaaggaaaaagaagcagtccagccggtggatgagactgaatttcgacctctgcaaggaaacaaccttcgagcctaaaaagatgattgaaggagtggcttatgaggtgcgtatcttcgccgtcaatgctatcggaatatccaaaccaagcatgcccagccgccccttcgtgccactcgctgtgacatctccaccgactttgctgactgtcgacagcgtaaccgataccacagtgaccatgaggtggcgtccgcccgatcatatcggagccgccggactagacggttacgtattagaatattgtttcgagggatcaacatcagcaaagcaatctgatgaaaacggcgaggcagcctatgacttgccagcagaggactggatagtggctaacaaggacctgatcgataagaccaaattcacaataacggggcttccaaccgatgctaaaatctttgtgcgagtgaaggcagtgaacgccgccggtgcctcagagcctaaatactatagccaaccaatactggttaaagaaatcatcgagcctcccaaaatccggatcccaaggcatctcaaacaaacttatatacgacgtgtgggagaggctgtgaatcttgtgatcccgttccaaggtaagcctcggcctgagctgacatggaagaaagacggtgctgagatcgataaaaaccagattaatattaggaatagcgagacagataccatcatttttatcagaaaggccgagagatcccacagcggaaaatacgacttgcaggtgaaggtggacaaatttgtggagacagcgtctatcgacatccagataatagacaggcctggaccccctcagatcgtaaagatcgaggacgtctggggcgagaatgtggcgctgacctggacacccccaaaggatgatggaaatgctgctataaccggctataccattcagaaggcagataagaaatcaatggagtggtttaccgtgatagagcattatcatcggaccagtgccacgattacagaactggtcatcgggaatgagtactacttcagagtattttctgaaaacatgtgtggcttatctgaggacgcaacaatgactaaagagtcagccgtgattgcacgcgacggcaaaatttacaagaacccagtgtacgaggacttcgatttcagcgaagccccaatgtttactcaacctctggttaatacatatgctattgccgggtataatgcaacgctgaattgttcagttagggggaacccgaagccgaagattacctggatgaagaataaggtagccatcgtggatgatcccaggtatcgcatgttctcgaaccagggcgtgtgcacgctggaaatcagaaagccatctccgtacgatgggggcacttactgctgcaaagctgtgaatgatctaggcaccgtcgaaatcgagtgcaaactggaagtaaaagttatcgcccagtag

SEQ ID NO: 264294 - DNA, 3426 bp, Artificial Sequence
  derived and/or modified sequence
atgcctgagcccaccaagaaggaggagaatgaggtgcctgccccagcccctcctcctgaggagcccagcaaggagaaggaggccggcaccaccccagccaaggactggaccctggtggagaccccacctggagaggagcaggccaagcagaatgccaacagccagctgagcatcctcttcatcgagaagccccagggcggcaccgtgaaggtgggggaggacatcaccttcatcgccaaggtgaaggccgaggacctgctgaggaagcccaccatcaagtggttcaagggcaagtggatggacctggccagcaaggccggcaagcacctgcagctgaaggagacctttgagcggcacagccgggtgtacacctttgagatgcagatcatcaaggccaaggacaactttgctggcaactaccgctgtgaggtgacctacaaggacaagtttgacagctgcagctttgacctggaggtgcatgagagcacaggcaccacccccaacatcgacatccgcagcgccttcaagaggtctggagagggccaggaggatgctggggagctggacttcagcggcctgctgaagaggcgggaggtgaagcagcaggaggaggagccccaggtggatgtgtgggagctgctgaagaatgccaagcccagtgaatatgagaagatcgccttccagtatggcatcacagacctgcggggcatgctgaagaggctgaagaggatgagaagagaggagaagaagtctgctgcctttgccaagatcctggaccctgcctaccaggtggacaagggcggccgggtgcgctttgtggtggagctggccgaccccaagctggaggtgaagtggtacaagaatggccaggagatccggcccagcaccaagtacatctttgagcacaagggctgccagaggatcctcttcatcaacaactgccagatgacagatgacagcgagtactacgtgacagctggagatgagaagtgcagcacagagctgtttgtgcgggagccccccatcatggtgaccaagcagctggaggacaccacagcctactgtggggagcgggtggagctggagtgtgaggtgtctgaagatgatgccaacgtgaagtggttcaagaatggagaggagatcatccctggccccaagagccgctaccgcatccgggtggagggcaagaagcacatcctgatcatcgagggcgccaccaaggcagatgctgctgagtacagcgtgatgaccaccggcggccagagcagcgccaagctgtctgtggacctgaagcccctgaagatcctgacccccctgacagaccagacagtgaacctgggcaaggagatctgcctgaagtgtgagatcagcgagaacatccctgggaagtggaccaagaatggcctgcctgtgcaggagagtgaccggctgaaggtggtgcacaagggccgcatccacaagctggtgattgccaatgccctgacagaagatgaaggagactatgtgtttgccccagatgcctacaacgtgaccctgcctgccaaggtgcacgtgattgatcctcccaagatcatcctggatggcctggatgctgacaacacagtgacagtgattgctggcaacaagctgcggctggagatccccatcagcggggagcccccacccaaggccatgtggagcagaggagacaaggccatcatggagggcagcggccgcatcagaacagagagctacccagacagcagcaccctggtgattgatattgctgagagagatgacagcggcgtgtaccacatcaacctgaagaatgaagctggggaggcccacgccagcatcaaggtgaaggtggtggacttcccagacccccctgtggcccccaccgtgacagaggtgggagatgactggtgcatcatgaactgggagcccccagcctatgatggcggcagccccatcctgggctacttcatcgagaggaagaagaagcagagcagccgctggatgaggctgaactttgacctgtgcaaggagaccacctttgagcccaagaagatgattgaaggagtggcctatgaggtgcgcatctttgctgtgaatgccatcggcatcagcaagcccagcatgcccagccggccctttgtgcccctggccgtgaccagcccccccaccctgctgactgtggacagcgtgacagacaccaccgtgaccatgcgctggaggcccccagaccacatcggggctgctggcctggatggctacgtgctggagtactgctttgagggcagcaccagcgccaagcagagtgatgaaaatggagaggccgcctatgacctgcctgctgaggactggatcgtggccaacaaggacctgattgacaagaccaagttcaccatcaccggcctgcccacagatgccaagatctttgtgcgggtgaaggctgtgaatgctgctggggccagcgagcccaagtactacagccagcccatcctggtgaaggagatcatcgagccccccaagatccgcatccccaggcacctgaagcagacctacatcagaagagtgggggaggccgtgaacctggtgatccccttccagggcaagcccaggcctgagctgacctggaagaaggatggagctgagattgacaagaaccagatcaacatccggaacagcgagacagacaccatcatcttcatcaggaaggccgagaggagccacagcggcaagtatgacctgcaggtgaaggtggacaagtttgtggagacagccagcattgacatccagatcatcgaccggcccggccccccccagatcgtgaagattgaagatgtgtggggagaaaatgtggccctgacctggaccccacccaaggatgatggaaatgctgccatcaccggctacaccatccagaaggctgacaagaagtccatggagtggttcaccgtcatcgagcactaccacaggaccagcgccaccatcacagagctggtgattggaaatgagtactacttccgggtcttcagcgagaacatgtgtggcctgtctgaagatgccaccatgaccaaggagagcgctgtgattgccagagatggcaagatctacaagaaccctgtgtatgaagattttgacttcagcgaggcccccatgttcacccagcccctggtgaacacctacgccatcgccggctacaatgccaccctgaactgcagcgtgcggggcaaccccaagcccaagatcacctggatgaagaacaaggtggccatcgtggatgacccccgctacaggatgttcagcaaccagggcgtgtgcaccctggagatcaggaagcccagcccctatgatggcggcacctactgctgcaaggctgtgaatgacctgggcaccgtggagattgagtgcaagctggaggtgaaggtgattgcccagtag

SEQ ID NO: 264295 - DNA, 3856 bp, Artificial Sequence
  derived and/or modified sequence
ttgtcacaccgacctgcaccatctctcgcctgcctgtggggtttctgtcaactagtcgtggagggaaggagactctttaaagaataacatcttattgtggccatgccagaacccactaagaaagaggaaaatgaagtgccagccccagccccacccccggaagaaccaagtaaagagaaggaggccggaactacaccagcaaaagactggacccttgtcgaaactcctcctggggaggaacaagccaagcagaatgccaactcccagctgtccatcttgttcattgaaaaacctcaaggaggaacagtgaaagttggtgaagatatcaccttcatagccaaagtcaaggctgaagatcttctgagaaaacccactatcaaatggttcaaaggaaaatggatggacctggccagcaaagccgggaagcaccttcagctgaaggaaacctttgagaggcacagtcgggtgtacacatttgagatgcagatcatcaaggccaaagataactttgcaggaaattacagatgcgaggtcacctataaggataagtttgacagctgttcatttgatcttgaagtgcacgaatctactgggactactccaaacattgacatcagatctgctttcaagagaagtggagaaggtcaagaggatgcaggagaacttgactttagtggtctcctgaaacgtagggaggtgaagcagcaggaggaagaaccccaggtggacgtatgggagttgctgaagaacgcgaaacccagtgagtacgagaagatcgccttccagtatggaatcaccgacctgcgcggcatgctcaagcgactcaagcgcatgcgcagagaggagaagaagagcgcagcttttgcaaaaattcttgatcctgcatatcaggttgacaaaggaggcagagtgaggtttgttgtggagctggcagatccaaagttggaggtgaaatggtataaaaatggtcaagaaattcgacccagtaccaaatacatctttgaacacaaaggatgccagagaatcctgtttatcaataactgtcagatgacagatgattcagagtattatgtgacagccggtgatgagaaatgttccactgagctcttcgtaagagagcctccaattatggtgaccaaacagctggaagatacaactgcttattgtggggagagagtggaattagaatgtgaggtgtctgaagatgatgccaatgtaaaatggtttaagaatggtgaagagattatccctggtccaaaatcaagataccgaattagagttgagggtaaaaaacacatcttgatcatagagggagcaacaaaggctgatgctgcagaatattcagtaatgacaacaggaggacaatcatctgctaaacttagtgttgacttgaaacctctgaagattttgacacctctgactgatcagactgtaaatcttggaaaagaaatctgcctgaagtgtgaaatctctgaaaacataccaggaaaatggactaaaaatggcctacctgttcaggagagtgaccgtctaaaggtggttcacaagggaaggatccacaagttagtgatagccaatgccctcactgaagatgaaggtgattatgtatttgcacctgatgcctacaatgttactctgcctgccaaagttcatgttattgatcctcctaagatcatcctggatggtcttgatgctgacaacacagtgacagtgattgcaggaaacaagcttcgtcttgagatccccatcagcggagaaccacctcctaaagccatgtggagccggggagataaggctattatggaaggcagtggccggataagaacagaatcttaccctgatagcagcactctggtcattgatatagctgaaagagatgactctggtgtttaccacatcaatctgaaaaacgaagctggagaggcacatgcaagcatcaaggttaaagttgtggacttccctgatcctccagtggcaccgactgtgacagaggtgggagatgactggtgtatcatgaactgggagcctcctgcctacgacggaggctctccaatcctaggatattttattgagaggaagaagaaacaaagctccaggtggatgaggctgaattttgatctctgcaaagaaacaacttttgagcccaagaagatgattgaaggtgtggcctatgaggtccgcatctttgcagtcaatgccattggcatctccaagcccagtatgccctccaggccttttgttcctttggctgtaacaagccctcctactcttctgactgtggactctgtcactgacacgactgtcacgatgaggtggcgccccccagaccacattggtgcagcaggtttagatggctatgtgctagagtattgctttgaaggaagtacatcagcaaaacagtctgatgaaaatggggaggctgcctatgatctgccagctgaggactggatagttgcaaacaaagatctgattgacaagacgaagttcaccatcacaggtctgccaacagatgcaaagatctttgtgcgtgtgaaggctgttaatgcagctggtgccagcgagcccaagtactattctcagcccattctcgtgaaggaaatcatagaacctccaaagattcgcattccaagacacctgaagcaaacctatatccgcagagttggagaagctgtcaatctggttatacctttccagggaaaaccaagaccagaattaacttggaagaaggatggtgcagaaattgataagaatcaaataaacattcgcaactctgagactgatacaatcatatttattagaaaagcagagaggagccactctgggaaatatgatctgcaagtcaaagtggacaaattcgtggagaccgcatcaattgacatccagatcattgaccgtccaggtccaccccaaattgtgaagattgaggatgtctggggagaaaatgtcgctctcacatggactccaccaaaggatgatggaaatgctgctatcacaggctataccattcagaaggctgacaagaagagcatggaatggtttactgtcattgagcattatcatcgaaccagtgccaccattactgaattggtcatagggaatgaatattacttccgggtcttttctgaaaacatgtgtggcctcagtgaggatgccaccatgactaaagagagtgcagtgatcgccagggatggtaaaatctacaaaaatccagtgtatgaagactttgatttctcagaggcacccatgtttactcagcctttggttaacacctatgccatagctggttacaatgccaccctaaactgcagtgtgagaggaaatcctaagcctaaaataacctggatgaaaaacaaagttgctattgtggatgatccaagatacaggatgttcagcaaccagggagtctgtaccctggaaattcgcaagcccagcccctatgatggaggcacttactgctgcaaagcagtcaatgaccttgggacagtggagattgaatgcaaactggaggtgaaagtcattgcacaataaggatttttgaatgtataatatcatctaaggtgggctctccttctgcagactcctcttgcaaggcgtacctccaaacataattgattcgtatctgcgagacttacactcaagcaatcctgaggaatactgagggagggcctggctactgtctctctgcactctgctgctttgaaatctggttgaaatgagaaaaagcattttctgttttcccaccaggcccccaagtgtggtctttttctttcctcctaatgttgaagagaaaaaaaaaaaaaaaagtttgcccagattgcttaattaaaaattgcaaacaaaatctcatttgaagtca

SEQ ID NO: 264296 - DNA, 3426 bp, Artificial Sequence
  derived and/or modified sequence
atgccagaacccactaagaaagaggaaaatgaagtgccagccccagccccacccccggaagaaccaagtaaagagaaggaggccggaactacaccagcaaaagactggacccttgtcgaaactcctcctggggaggaacaagccaagcagaatgccaactcccagctgtccatcttgttcattgaaaaacctcaaggaggaacagtgaaagttggtgaagatatcaccttcatagccaaagtcaaggctgaagatcttctgagaaaacccactatcaaatggttcaaaggaaaatggatggacctggccagcaaagccgggaagcaccttcagctgaaggaaacctttgagaggcacagtcgggtgtacacatttgagatgcagatcatcaaggccaaagataactttgcaggaaattacagatgcgaggtcacctataaggataagtttgacagctgttcatttgatcttgaagtgcacgaatctactgggactactccaaacattgacatcagatctgctttcaagagaagtggagaaggtcaagaggatgcaggagaacttgactttagtggtctcctgaaacgtagggaggtgaagcagcaggaggaagaaccccaggtggacgtatgggagttgctgaagaacgcgaaacccagtgagtacgagaagatcgccttccagtatggaatcaccgacctgcgcggcatgctcaagcgactcaagcgcatgcgcagagaggagaagaagagcgcagcttttgcaaaaattcttgatcctgcatatcaggttgacaaaggaggcagagtgaggtttgttgtggagctggcagatccaaagttggaggtgaaatggtataaaaatggtcaagaaattcgacccagtaccaaatacatctttgaacacaaaggatgccagagaatcctgtttatcaataactgtcagatgacagatgattcagagtattatgtgacagccggtgatgagaaatgttccactgagctcttcgtaagagagcctccaattatggtgaccaaacagctggaagatacaactgcttattgtggggagagagtggaattagaatgtgaggtgtctgaagatgatgccaatgtaaaatggtttaagaatggtgaagagattatccctggtccaaaatcaagataccgaattagagttgagggtaaaaaacacatcttgatcatagagggagcaacaaaggctgatgctgcagaatattcagtaatgacaacaggaggacaatcatctgctaaacttagtgttgacttgaaacctctgaagattttgacacctctgactgatcagactgtaaatcttggaaaagaaatctgcctgaagtgtgaaatctctgaaaacataccaggaaaatggactaaaaatggcctacctgttcaggagagtgaccgtctaaaggtggttcacaagggaaggatccacaagttagtgatagccaatgccctcactgaagatgaaggtgattatgtatttgcacctgatgcctacaatgttactctgcctgccaaagttcatgttattgatcctcctaagatcatcctggatggtcttgatgctgacaacacagtgacagtgattgcaggaaacaagcttcgtcttgagatccccatcagcggagaaccacctcctaaagccatgtggagccggggagataaggctattatggaaggcagtggccggataagaacagaatcttaccctgatagcagcactctggtcattgatatagctgaaagagatgactctggtgtttaccacatcaatctgaaaaacgaagctggagaggcacatgcaagcatcaaggttaaagttgtggacttccctgatcctccagtggcaccgactgtgacagaggtgggagatgactggtgtatcatgaactgggagcctcctgcctacgacggaggctctccaatcctaggatattttattgagaggaagaagaaacaaagctccaggtggatgaggctgaattttgatctctgcaaagaaacaacttttgagcccaagaagatgattgaaggtgtggcctatgaggtccgcatctttgcagtcaatgccattggcatctccaagcccagtatgccctccaggccttttgttcctttggctgtaacaagccctcctactcttctgactgtggactctgtcactgacacgactgtcacgatgaggtggcgccccccagaccacattggtgcagcaggtttagatggctatgtgctagagtattgctttgaaggaagtacatcagcaaaacagtctgatgaaaatggggaggctgcctatgatctgccagctgaggactggatagttgcaaacaaagatctgattgacaagacgaagttcaccatcacaggtctgccaacagatgcaaagatctttgtgcgtgtgaaggctgttaatgcagctggtgccagcgagcccaagtactattctcagcccattctcgtgaaggaaatcatagaacctccaaagattcgcattccaagacacctgaagcaaacctatatccgcagagttggagaagctgtcaatctggttatacctttccagggaaaaccaagaccagaattaacttggaagaaggatggtgcagaaattgataagaatcaaataaacattcgcaactctgagactgatacaatcatatttattagaaaagcagagaggagccactctgggaaatatgatctgcaagtcaaagtggacaaattcgtggagaccgcatcaattgacatccagatcattgaccgtccaggtccaccccaaattgtgaagattgaggatgtctggggagaaaatgtcgctctcacatggactccaccaaaggatgatggaaatgctgctatcacaggctataccattcagaaggctgacaagaagagcatggaatggtttactgtcattgagcattatcatcgaaccagtgccaccattactgaattggtcatagggaatgaatattacttccgggtcttttctgaaaacatgtgtggcctcagtgaggatgccaccatgactaaagagagtgcagtgatcgccagggatggtaaaatctacaaaaatccagtgtatgaagactttgatttctcagaggcacccatgtttactcagcctttggttaacacctatgccatagctggttacaatgccaccctaaactgcagtgtgagaggaaatcctaagcctaaaataacctggatgaaaaacaaagttgctattgtggatgatccaagatacaggatgttcagcaaccagggagtctgtaccctggaaattcgcaagcccagcccctatgatggaggcacttactgctgcaaagcagtcaatgaccttgggacagtggagattgaatgcaaactggaggtgaaagtcattgcacaataa

SEQ ID NO: 264297 - DNA, 3426 bp, Artificial Sequence
  derived and/or modified sequence
atgcccgagcccaccaagaaggaggagaacgaggtgcccgcccccgcgcctccccccgaggagcctagcaaagaaaaggaggctggaaccacgcctgccaaggactggaccctggtggagacaccccctggggaggagcaagcaaagcagaacgcgaattcccaactatccatcttgttcatagagaagccccagggcggcaccgtcaaagtcggtgaggatattacttttattgcaaaagtaaaagccgaggacttattacggaaacccaccataaaatggttcaaaggcaagtggatggaccttgcctcaaaggccggtaaacatcttcagctgaaggaaacattcgaaaggcactctagagtgtatacttttgaaatgcagatcatcaaagctaaagacaattttgccggtaactatcggtgcgaggtcacatacaaggataaattcgattcttgttccttcgatctggaggttcacgaaagtacgggtacaactcccaatatcgacattcggagcgcgtttaaacggtcaggcgagggccaggaggatgccggtgagttggatttctcaggtctgcttaaacggcgggaagtgaagcagcaggaggaggaaccccaagtagatgtttgggaactgctcaagaatgctaaaccatctgagtatgagaaaatcgccttccagtacggcatcaccgatctgcgcggcatgttgaagcgcctaaagaggatgcgcagggaggagaagaagagtgcagcatttgctaagatcttggaccccgcttaccaggtcgataagggcggtcgcgttagatttgtggtggagctggcagatcccaagctggaggttaagtggtataaaaacggtcaggaaattaggcccagcacgaagtatatctttgagcacaaggggtgccagaggatcctctttatcaataactgccaaatgacagacgattccgaatactacgtgacggctggcgatgagaaatgctctactgagctgttcgtgcgggaaccccctataatggttactaaacaactcgaggacactacagcttactgtggcgaacgagtagaactggaatgcgaggtttctgaggacgacgcaaacgtcaaatggttcaaaaatggcgaggagataataccgggcccaaagtctaggtaccgcatccgcgttgaggggaaaaagcatattttgatcatcgagggggctactaaagccgacgccgcagagtactctgttatgacaacgggcggccagagtagtgccaagctcagtgtggatcttaaaccactaaaaatacttacccctctgactgatcaaacagtcaatctgggaaaggagatttgtctgaaatgtgaaatctctgagaacatccccggcaagtggaccaagaatggactgcccgttcaggagagcgatagactgaaagtggtgcataaagggagaattcataagcttgtcatagccaatgctttgaccgaggatgagggcgattacgtcttcgcgccagacgcgtacaacgtgacgttacctgccaaggtacatgtaatcgatccccctaagattattctcgacggtcttgatgccgacaatacagtgaccgtgattgccggtaacaaactgaggcttgagatacccatctccggtgaacctcctcccaaagccatgtggagtcgcggggacaaagccattatggaaggtagcggccgaatcaggactgagtcttacccggattcctcaaccttggtgatagacattgcagaacgtgatgacagtggcgtgtaccatattaatctcaaaaacgaagcaggggaggctcatgcctccatcaaggtgaaggtggttgactttcccgacccccccgtcgcccctacggtaaccgaggtgggcgatgattggtgcatcatgaactgggaacctcctgcttatgatggtggctcacccatccttgggtacttcatcgagagaaagaagaagcagagttcgagatggatgagattaaactttgacctctgcaaggaaaccacattcgagcccaagaaaatgatcgagggggtagcttacgaagtccgcatctttgccgtgaatgccataggcatctccaaaccttcaatgccaagcagacccttcgtgcctttggcagtcacttctccccccaccctgctgaccgtggactcagtgactgacactactgtcaccatgaggtggaggccacctgatcatatcggcgccgcaggcctggatggttacgttctcgagtattgctttgagggctcaacctccgcaaaacagtcggatgagaacggggaggcggcgtatgatctaccagccgaggattggattgtggcaaacaaggacctgatcgacaagaccaagtttactatcactggcctgccaactgacgccaaaatatttgtaagggttaaggcagtgaatgccgcaggcgcctctgagccgaaatattacagccagcccatcctggttaaagaaattattgaacccccgaagattcgaataccaaggcatctgaaacagacttatatacgacgagtcggcgaggctgtgaacctcgtcatcccattccaaggtaagccccgacctgagctaacgtggaagaaagatggggcggagattgataaaaatcagataaacataagaaacagtgaaacagatacaatcatatttatcagaaaagctgaaaggagccacagcggcaaatatgatctccaggtgaaggtagataaattcgtggagacagcctccatcgatatccagattatcgatcgaccgggtcctcctcagattgtaaaaatcgaggatgtgtggggcgagaatgtggctttgacctggacaccaccaaaggacgacggtaacgccgccatcacagggtacacaattcaaaaagcagacaagaaatccatggagtggttcaccgtcattgagcactaccataggactagcgcaaccatcactgaacttgttattggaaatgagtactactttagggtgttttccgagaatatgtgtggactgagcgaggacgcaactatgacaaaggaatcggctgtgatcgcccgggatggcaagatctataagaaccccgtgtacgaggactttgatttctccgaagccccaatgttcacacagcctctagtgaatacatacgccatcgcaggctacaacgcaaccctgaattgttccgtgcgggggaatcctaagcctaagattacttggatgaaaaacaaggtcgcaatcgtggatgatccaagatatcgcatgtttagcaaccagggcgtgtgcaccctcgagattcgcaaaccgtccccgtacgacggtgggacgtactgttgcaaagccgttaacgaccttggcactgtagagatcgagtgtaaactggaggtgaaagtcatcgcccagtag

SEQ ID NO: 264298 - DNA, 3426 bp, Artificial Sequence
  derived and/or modified sequence
atgcccgagcccaccaagaaggaggagaacgaggtgcccgcccccgcacccccccctgaagaaccctctaaagagaaggaggccggcacaactcctgccaaggattggacattggtagaaacaccacctggtgaagagcaggcaaagcagaacgccaatagccaattaagcatcctttttatagaaaaacctcaggggggcactgtgaaggtcggggaagacatcacgttcattgctaaagtcaaggcagaggacttgctgcggaaacctacgatcaagtggtttaagggaaagtggatggacctggcctccaaagccggcaagcacctgcaactgaaggaaaccttcgaacggcactcccgcgtctacacattcgagatgcagataattaaggcaaaagacaatttcgccggcaactacagatgtgaggtcacttacaaggacaagtttgactcatgctcctttgacttagaggtgcacgagagcacaggcaccaccccgaacatcgatatccggtccgccttcaagaggagtggcgaaggtcaagaggacgctggcgaactggacttcagtggtctgctcaaacggcgggaggtcaaacaacaagaagaagagccacaggtggacgtctgggaactgcttaaaaatgcaaaaccttccgagtatgaaaagatcgctttccagtacggtattaccgaccttcgagggatgctcaagagattgaaaagaatgcggcgagaagagaaaaagtccgcagcttttgctaaaatccttgaccccgcttatcaggtagataagggcgggagggtccgcttcgtcgtggagttggcagaccctaaactggaggtgaagtggtacaagaatggacaagagatacgaccatctaccaaatatatcttcgaacataaaggatgtcagcgaatcttatttattaacaattgtcagatgacagacgactcagaatattatgttaccgcgggcgacgaaaaatgctctacggaattgtttgttagggagcctcctattatggtgacgaagcagctggaggacaccacggcttactgcggagagcgcgtcgagcttgagtgtgaggtgtctgaggacgacgcgaacgtcaaatggttcaaaaatggtgaagagatcatcccggggcctaaatccaggtataggatcagagttgaagggaagaagcacatccttatcatcgagggcgccaccaaagcagatgctgcagaatactccgttatgactaccggtggccaaagttcggcaaaactgtctgttgatctcaagcctctcaagatcctgacccccctgaccgatcagaccgtgaacctcggcaaagaaatctgtttgaagtgcgaaatctccgagaacatcccgggcaagtggacaaagaatggtcttcccgtccaagagtccgatagactgaaggtcgtccacaaggggcggatacacaagctggtgatagcaaatgccctgacggaggacgagggggattacgtgtttgctcctgatgcctacaacgtaaccctgcccgccaaagtgcacgtcatcgacccccctaaaattatccttgatggcttggatgccgacaacaccgtgactgtcatcgcgggcaacaagttgcgtctggaaataccaattagcggcgagcctccaccgaaagctatgtggtccaggggtgacaaggccatcatggagggatccggtagaatcaggaccgagagctaccccgattctagtaccctggttatagatattgcagagagggacgattccggcgtatatcatatcaacctgaagaatgaggctggagaggcacatgcttctattaaagttaaggtggtggactttcccgaccctccggtggcccccacagtgactgaggtaggtgatgactggtgcataatgaactgggaaccccccgcttacgacggaggttcccctatcctgggctacttcattgaaagaaaaaaaaaacagtcctcccggtggatgcgcctcaactttgatttatgtaaagagacaacgtttgagccgaagaagatgatcgagggggttgcctatgaggtaagaatctttgcagtcaatgcgatcgggattagcaaaccctctatgccctctcgacccttcgtgccactcgccgtgacatctcctcctaccctgctcactgtggactccgttacggacacaaccgtcacaatgcgatggagaccaccggatcacatcggagccgccgggttagatggatatgttctggaatactgcttcgaaggttccacttcagccaagcagagtgacgagaacggagaggccgcatatgacctccctgccgaggactggattgtggccaacaaagacctcattgacaagactaagtttacaataactggcctgccgacagatgccaagatctttgttcgtgtcaaggccgtgaacgctgcaggggcctctgagcccaagtattactcccaaccaattttagtgaaggaaattatcgaacctcccaagattcgcatcccccggcaccttaaacagacatacatccgccgcgtgggagaggccgtcaacctggtgatcccattccaaggcaagcctcgtcccgagttaacctggaaaaaggacggtgccgagattgacaaaaatcaaatcaacattcggaactcagagacagacaccattatttttattaggaaagccgaacgctcccactctgggaaatacgatcttcaagtgaaggtagacaagttcgtcgagaccgcttctatcgacatccagatcatagatcggccaggaccaccgcagatcgtcaaaatagaggatgtgtggggggagaatgtggctttgacttggacgcctcctaaagatgatgggaacgcagccataactggatacaccatccagaaggccgacaagaaatcaatggaatggttcaccgtcatcgaacactaccaccgaacgtccgccacaatcaccgaactggtgatagggaacgaatattattttcgggtctttagcgagaatatgtgtgggctgtcagaggacgcaactatgaccaaggaatccgccgtaatcgctcgggacgggaagatctataagaaccccgtgtacgaggattttgacttcagcgaggccccaatgttcacacaacccttagtgaacacctacgcaatcgctggatacaatgctaccctgaattgttccgtaaggggcaaccctaagccgaagattacttggatgaaaaacaaggtcgccattgtggatgaccctagatacaggatgttctctaaccagggggtgtgcaccctggaaatcagaaaacccagcccgtacgatgggggtacatactgttgtaaagcagtgaatgatctgggcaccgtggagattgaatgcaaattggaggtaaaggttattgctcagtag

SEQ ID NO: 264299 - DNA, 3426 bp, Artificial Sequence
  derived and/or modified sequence
atgcctgaacctacaaaaaaggaggagaacgaggttcctgcaccagcgcctccacctgaggagccgagtaaggagaaggaggctggtacaacaccagccaaggattggacactcgtcgagacacctccaggagaggagcaggcaaagcaaaatgcaaactcccaactctctattttgtttattgaaaagcctcaagggggaacagtcaaggtgggggaggatattactttcatcgccaaggtcaaggctgaagacctgctgcgcaaacccaccatcaaatggttcaaaggaaagtggatggatttagcttccaaggctggcaaacacctgcagcttaaggaaacattcgagcgccacagccgcgtttacacgtttgagatgcaaatcatcaaagccaaggataatttcgccggaaattacagatgcgaagtgacatataaggataaattcgatagttgttctttcgatctggaggtgcatgagagcaccggaaccacgccaaacatcgatatccgttcagctttcaaaagaagcggcgaaggccaagaggacgccggtgagctcgacttctccggcctgctaaagaggcgcgaagttaaacagcaggaggaggaaccacaggtggatgtctgggaactgctcaagaacgcaaagcctagtgagtatgagaaaattgcatttcagtatggcatcacagacctgagaggcatgctcaaacggctgaagcgcatgagaagagaagaaaagaaatctgccgcattcgccaagatcttggatcctgcttatcaagtagataaggggggacgggtcaggtttgtggtggaactcgctgaccctaaattagaagtgaagtggtataagaacggccaggagatccgccctagcaccaagtatattttcgagcacaaaggctgccagcgaatactctttataaataattgtcagatgaccgacgacagtgagtactacgtaacagccggagacgaaaagtgttccactgagctgttcgttcgcgaaccaccaattatggtcaccaaacagctggaggataccacggcatactgcggagaacgagtcgagttagaatgcgaagtctccgaagatgacgccaacgtcaagtggttcaaaaatggggaggaaatcatacccggacctaaaagtaggtatcggatcagggtggagggtaagaaacacatactgatcattgaaggagcaacaaaggctgatgccgctgaatacagcgtgatgaccaccggcggacagtcttctgcaaagctaagcgtagacctgaaaccactgaagattctgacacccttaactgaccagacagtcaatcttggcaaggaaatctgtttgaagtgtgagataagcgaaaacattcccggtaaatggacgaaaaacgggctgcccgttcaagagtcagacagactcaaggtggtgcacaagggcaggatacacaagctggtcatagcaaatgccctcaccgaggacgaaggcgattatgtgtttgcacccgatgcgtacaatgtgactctgccggcaaaagtccatgtgatcgaccctccaaagatcatactggacggactggatgccgacaataccgtgacggttattgccggtaacaaactgaggctcgaaatccccatttctggcgagcctcctcctaaggctatgtggagcaggggcgataaggctattatggagggctctggaaggattcggacggaatcatatcctgatagttccacacttgtcatcgatattgcagagcgcgatgatagcggcgtgtaccacattaatctgaagaacgaagccggtgaggcccacgcctcaataaaagtcaaggtggtggatttccccgaccccccagtagctcctaccgtcactgaagttggcgatgactggtgtataatgaactgggagccacctgcatacgatgggggatctccaatactgggatacttcatcgaaaggaaaaagaagcagtcttcacgatggatgaggctcaatttcgatctttgcaaggagacaacgttcgaacccaagaaaatgatcgaaggcgttgcttacgaggtcaggatcttcgctgtcaatgctatcggcataagcaagccctccatgccctctcgcccattcgtgcccctggcagtgacctcgccgccaaccctcctcacagtggacagcgttacggacaccaccgttaccatgcgctggagacccccagatcacatcggcgctgccggacttgatgggtacgttctggagtactgttttgaggggtcgacttctgctaagcagagcgacgagaacggggaggcagcttacgatctccccgctgaggactggatcgtagcgaataaagacttgatcgataagaccaagttcacaataaccggattgcctacagatgctaagattttcgtcagggtcaaggcagtgaacgccgctggcgcatctgaaccaaaatactactcccagcccatcctagtgaaggagataattgagccacctaaaatccgcataccgagacacctgaaacaaacttatatccgaagggtgggagaagctgtcaatcttgtgatcccctttcagggtaaacccaggccagagctcacctggaagaaagatggggctgagatcgacaaaaaccagattaacattcggaattccgagacagacaccattatattcatccggaaggccgaaagatctcatagcggcaagtacgatctgcaggttaaggtggacaaatttgttgagactgcctccatcgatattcagatcatcgatcggcctggccctccccagatcgttaagatagaggatgtgtggggcgagaacgtagcactgacttggacccctcccaaggacgacgggaacgctgccattaccggctacactattcagaaagccgacaaaaagagtatggagtggttcaccgtaatagaacattaccaccggacgtctgctacaatcaccgagctggtgatcggaaatgagtattattttcgcgtgttctcagagaatatgtgcggcctttcagaggatgcgacgatgacaaaagagagcgctgtcatcgcacgggacgggaagatctataaaaaccccgtctacgaggatttcgattttagtgaggcacctatgttcacccaaccacttgttaatacttacgcaattgccggttacaacgcaacgttgaattgctcagtcagggggaatccaaaacctaaaatcacttggatgaagaacaaggtggcaattgttgatgaccccagatatagaatgttctcaaatcagggagtctgtacactggagattcgtaagccaagcccctatgatgggggaacatattgctgcaaagcagtgaatgaccttggaacggtagaaatcgagtgtaagctcgaggtgaaagtaatagcccagtag

SEQ ID NO: 264300 - DNA, 3426 bp, Artificial Sequence
  derived and/or modified sequence
atgccagagcctacaaaaaaagaggaaaatgaagtccctgccccagccccaccccctgaagaaccctctaaagagaaagaggccggaacgacccctgcgaaggactggacgctggtggagacccctcctggcgaagagcaggctaaacagaacgcaaattctcaactgagcatcttattcattgaaaagccacaaggcggaacagtaaaggtcggtgaggacataacgtttatcgcaaaggtgaaagccgaagatttacttagaaaaccgaccattaagtggtttaaaggcaaatggatggacctggcatctaaagctggaaagcacctgcagctcaaggaaacatttgagcgccatagtcgtgtgtacaccttcgagatgcaaatcatcaaggcaaaggataattttgcaggcaattaccggtgcgaagtgacatacaaagacaaatttgatagctgttccttcgatctcgaagtccatgaatccacaggcaccactcccaatattgacataagatctgctttcaaacgaagcggcgaaggccaagaggatgctggtgaactcgatttctcagggcttctgaaacgccgtgaagtgaaacaacaggaagaggaaccacaggttgacgtgtgggagctgcttaagaacgctaaaccttctgagtatgaaaagatagcttttcaatacggtattacagatctcaggggcatgttgaagcggctcaaaagaatgagacgggaggagaagaagagcgcagcgtttgccaagatcctagatccagcttaccaggtggacaaaggtggacgggtaagattcgtggtagagttggcggatcccaagcttgaggtgaaatggtacaaaaacggacaggagatacgtcccagtacaaagtacatttttgaacacaaagggtgccagcggattcttttcatcaataattgccagatgaccgacgatagcgagtactacgtgaccgccggagacgagaagtgctccaccgaattgttcgtgagagagcccccaattatggtgacgaaacagctggaggacactaccgcgtactgtggcgagcgcgtggagttagaatgcgaagtttcagaagatgatgccaatgtcaagtggtttaaaaacggagaagaaattatcccagggccaaagtccagataccggatcagggtcgagggaaaaaaacatatcctgattatcgagggagctacaaaagccgatgccgcagaatacagcgtcatgaccaccggtggacagtccagcgccaaattgtcagtggacctcaagcccctgaagatcctcactcctctcaccgaccaaactgtgaatctgggcaaggagatatgtttgaaatgtgaaattagtgagaacatcccagggaagtggactaaaaacgggctcccagtacaggaaagtgatcggctcaaggtggttcacaagggaaggatacacaaactcgtgatcgcaaacgccttgacggaggacgagggagactacgtattcgcgcctgatgcctacaacgtcaccttgcctgctaaggtacacgtgatcgaccctcccaagatcatcctggacggactcgatgccgataacacggttaccgtgattgccggtaataaactgcgcctagagatcccaatcagcggggagccccctcctaaagcgatgtggtcccggggtgacaaggcaatcatggagggctcaggcagaataagaactgagtcctatcctgactcctcaaccctggttatagacattgccgagagagatgatagtggcgtgtaccacataaatcttaagaacgaagctggggaggcccatgcctcgattaaggtgaaggtagtggacttccccgacccaccagtagcacccacggttacagaggtgggcgacgactggtgcattatgaattgggaaccgcctgcctatgatggcggaagccccatcctgggatatttcatagaaaggaagaagaaacagagcagccgatggatgcgtttaaatttcgatctgtgtaaagaaacaaccttcgagcccaaaaaaatgattgagggggtagcctacgaagttcggatcttcgcagttaatgccattggaatttctaaaccctcaatgccttccaggcccttcgtccccctcgcggttacctccccaccaacactccttactgtagacagtgttactgataccaccgtgactatgcgttggcggcctcctgatcatatcggtgcagctggtctcgacggttacgttctggaatattgctttgaggggtcgacgtctgctaaacaaagtgacgagaacggagaagcagcctatgatctcccagccgaggactggattgtggcgaacaaggatctgattgacaagactaagttcactattacaggactacccacagacgcaaaaatttttgtacgggtgaaggctgtcaacgctgcgggagccagtgaacccaagtactatagtcagcctattttggtgaaagaaataattgagccacccaagattcgtatcccacggcatctgaaacagacatacattcgtagagtcggtgaggccgtcaacttagtcatacctttccagggcaagcccagacctgagctgacctggaagaaggatggggcagaaatcgataagaatcagataaacatccgcaacagtgagacagacactataattttcattagaaaggcagagaggtctcactctggaaagtatgatttgcaggtgaaggtggataaattcgtggaaactgccagcatcgacattcaaatcatcgacagacctggtccacctcagattgtcaaaatagaagatgtctggggggagaacgtagcactgacatggactccacccaaggacgacggaaacgcggctattaccggctatactatccagaaagctgacaaaaaaagtatggagtggtttaccgtaatcgagcattatcaccggacatcggcgacaatcaccgaactcgttataggaaatgagtactactttcgggtgttttctgagaacatgtgcggcctgagcgaagacgccactatgactaaggaatcagcagttatcgcaagggatggtaagatttacaagaaccctgtgtacgaagactttgacttctctgaggcgccaatgttcactcaacctctggtgaatacatacgccattgccggatataacgcaacactgaattgttccgtcagaggcaacccgaaaccgaagatcacatggatgaaaaataaagtagcgattgtggacgatccacgctaccggatgttcagtaatcagggagtgtgcacactcgaaatccgcaaacccagtccatacgacggaggcacttactgctgcaaggcggttaacgatctgggcaccgtggagatagagtgcaaactggaggtgaaagtaatcgcacaatag

SEQ ID NO: 264301 - DNA, 3426 bp, Artificial Sequence
  derived and/or modified sequence
atgcccgagcccaccaagaaggaggagaacgaggtgcccgcccccgcccccccccccgaggagcccagcaaggagaaggaggccggcaccacccccgccaaggactggaccctggtggagaccccccccggcgaggagcaggccaagcagaacgccaacagccagctgagcatcctgttcatcgagaagccccagggcggcaccgtgaaggtgggcgaggacatcaccttcatcgccaaggtgaaggccgaggacctgctgagaaagcccaccatcaagtggttcaagggcaagtggatggacctggccagcaaggccggcaagcacctgcagctgaaggagaccttcgagagacacagcagagtgtacaccttcgagatgcagatcatcaaggccaaggacaacttcgccggcaactacagatgcgaggtgacctacaaggacaagttcgacagctgcagcttcgacctggaggtgcacgagagcaccggcaccacccccaacatcgacatcagaagcgccttcaagagaagcggcgagggccaggaggacgccggcgagctggacttcagcggcctgctgaagagaagagaggtgaagcagcaggaggaggagccccaggtggacgtgtgggagctgctgaagaacgccaagcccagcgagtacgagaagatcgccttccagtacggcatcaccgacctgagaggcatgctgaagagactgaagagaatgagaagagaggagaagaagagcgccgccttcgccaagatcctggaccccgcctaccaggtggacaagggcggcagagtgagattcgtggtggagctggccgaccccaagctggaggtgaagtggtacaagaacggccaggagatcagacccagcaccaagtacatcttcgagcacaagggctgccagagaatcctgttcatcaacaactgccagatgaccgacgacagcgagtactacgtgaccgccggcgacgagaagtgcagcaccgagctgttcgtgagagagccccccatcatggtgaccaagcagctggaggacaccaccgcctactgcggcgagagagtggagctggagtgcgaggtgagcgaggacgacgccaacgtgaagtggttcaagaacggcgaggagatcatccccggccccaagagcagatacagaatcagagtggagggcaagaagcacatcctgatcatcgagggcgccaccaaggccgacgccgccgagtacagcgtgatgaccaccggcggccagagcagcgccaagctgagcgtggacctgaagcccctgaagatcctgacccccctgaccgaccagaccgtgaacctgggcaaggagatctgcctgaagtgcgagatcagcgagaacatccccggcaagtggaccaagaacggcctgcccgtgcaggagagcgacagactgaaggtggtgcacaagggcagaatccacaagctggtgatcgccaacgccctgaccgaggacgagggcgactacgtgttcgcccccgacgcctacaacgtgaccctgcccgccaaggtgcacgtgatcgacccccccaagatcatcctggacggcctggacgccgacaacaccgtgaccgtgatcgccggcaacaagctgagactggagatccccatcagcggcgagcccccccccaaggccatgtggagcagaggcgacaaggccatcatggagggcagcggcagaatcagaaccgagagctaccccgacagcagcaccctggtgatcgacatcgccgagagagacgacagcggcgtgtaccacatcaacctgaagaacgaggccggcgaggcccacgccagcatcaaggtgaaggtggtggacttccccgacccccccgtggcccccaccgtgaccgaggtgggcgacgactggtgcatcatgaactgggagccccccgcctacgacggcggcagccccatcctgggctacttcatcgagagaaagaagaagcagagcagcagatggatgagactgaacttcgacctgtgcaaggagaccaccttcgagcccaagaagatgatcgagggcgtggcctacgaggtgagaatcttcgccgtgaacgccatcggcatcagcaagcccagcatgcccagcagacccttcgtgcccctggccgtgaccagcccccccaccctgctgaccgtggacagcgtgaccgacaccaccgtgaccatgagatggagaccccccgaccacatcggcgccgccggcctggacggctacgtgctggagtactgcttcgagggcagcaccagcgccaagcagagcgacgagaacggcgaggccgcctacgacctgcccgccgaggactggatcgtggccaacaaggacctgatcgacaagaccaagttcaccatcaccggcctgcccaccgacgccaagatcttcgtgagagtgaaggccgtgaacgccgccggcgccagcgagcccaagtactacagccagcccatcctggtgaaggagatcatcgagccccccaagatcagaatccccagacacctgaagcagacctacatcagaagagtgggcgaggccgtgaacctggtgatccccttccagggcaagcccagacccgagctgacctggaagaaggacggcgccgagatcgacaagaaccagatcaacatcagaaacagcgagaccgacaccatcatcttcatcagaaaggccgagagaagccacagcggcaagtacgacctgcaggtgaaggtggacaagttcgtggagaccgccagcatcgacatccagatcatcgacagacccggccccccccagatcgtgaagatcgaggacgtgtggggcgagaacgtggccctgacctggaccccccccaaggacgacggcaacgccgccatcaccggctacaccatccagaaggccgacaagaagagcatggagtggttcaccgtgatcgagcactaccacagaaccagcgccaccatcaccgagctggtgatcggcaacgagtactacttcagagtgttcagcgagaacatgtgcggcctgagcgaggacgccaccatgaccaaggagagcgccgtgatcgccagagacggcaagatctacaagaaccccgtgtacgaggacttcgacttcagcgaggcccccatgttcacccagcccctggtgaacacctacgccatcgccggctacaacgccaccctgaactgcagcgtgagaggcaaccccaagcccaagatcacctggatgaagaacaaggtggccatcgtggacgaccccagatacagaatgttcagcaaccagggcgtgtgcaccctggagatcagaaagcccagcccctacgacggcggcacctactgctgcaaggccgtgaacgacctgggcaccgtggagatcgagtgcaagctggaggtgaaggtgatcgcccagtag

SEQ ID NO: 264302 - protein, 1123 aa, Artificial Sequence
  derived and/or modified sequence
MPEPTKKEENEVPAPAPPPEEPSKEKEAGTTPAKDWTLVETPPGEEQAKQNANSQLSILFIEKPQGGTVKVGEDITFIAKVKAEDLLRKPTIKWFKGKWMDLASKAGKHLQLKETFERHSRVYTFEMQIIKAKDNFAGNYRCEVTYKDKFDSCSFDLEVHESTGTTPNIDIRSAFKRSGEGQEDAGELDFSGLLKRREVKQQEEEPQVDVWELLKNAKPSEYEKIAFQYGITDLRGMLKRLKRMRREEKKSAAFAKILDPAYQVDKGGRVRFVVELADPKLEVKWYKNGQEIRPSTKYIFEHKGCQRILFINNCQMTDDSEYYVTAGDEKCSTELFVREPPIMVTKQLEDTTAYCGERVELECEVSEDDANVKWFKNGEEIIPGPKSRYRIRVEGKKHILIIEGATKADAAEYSVMTTGGQSSAKLSVDLKPLKILTPLTDQTVNLGKEICLKCEISENIPGKWTKNGLPVQESDRLKVVHKGRIHKLVIANALTEDEGDYVFAPDAYNVTLPAKVHVIDPPKIILDGLDADNTVTVIAGNKLRLEIPISGEPPPKAMWSRGDKAIMEGSGRIRTESYPDSSTLVIDIAERDDSGVYHINLKNEAGEAHASIKVKVVDFPDPPVAPTVTEVGDDWCIMNWEPPAYDGGSPILGYFIERKKKQSSRWMRLNFDLCKETTFEPKKMIEGVAYEVRIFAVNAIGISKPSMPSRPFVPLAVTSPPTLLTVDSVTDTTVTMRWRPPDHIGAAGLDGYVLEYCFEGTEDWIVANKDLIDKTKFTITGLPTDAKIFVRVKAVNAAGASEPKYYSQPILVKEIIEPPKIRIPRHLKQTYIRRVGEAVNLVIPFQGKPRPELTWKKDGAEIDKNQINIRNSETDTIIFIRKAERSHSGKYDLQVKVDKFVETASIDIQIIDRPGPPQIVKIEDVWGENVALTWTPPKDDGNAAITGYTIQKADKKSMEWFTVIEHYHRTSATITELVIGNEYYFRVFSENMCGLSEDATMTKESAVIARDGKIYKNPVYEDFDFSEAPMFTQPLVNTYAIAGYNATLNCSVRGNPKPKITWMKNKVAIVDDPRYRMFSNQGVCTLEIRKPSPYDGGTYCCKAVNDLGTVEIECKLEVKVIAQ

SEQ ID NO: 264303 - DNA, 3372 bp, Artificial Sequence
  derived and/or modified sequence
atgcctgagccaacaaaaaaggaggagaacgaagtccctgccccagcgccgccccccgaagagccctccaaggaaaaggaggccggcacaacccccgctaaagattggaccctggtggaaacacccccaggcgaggaacaggccaaacaaaacgctaacagtcaactctcaattctgttcatagagaagccgcagggagggactgtgaaggtgggggaggacatcacatttattgctaaagtgaaagcagaagacctcttacgaaagccaaccatcaaatggttcaaagggaagtggatggatttagcgtccaaagccggtaagcacctgcaactgaaggaaaccttcgagagacactccagggtgtacacatttgaaatgcagatcatcaaagccaaggataatttcgccgggaactatcgatgtgaagtgacgtacaaagacaagttcgatagctgcagcttcgatttagaggtccatgaaagtaccggcactacacccaatattgacattaggagcgcatttaaacgctcaggggagggccaggaggacgcgggggaactggactttagtgggctactcaaaaggagggaagtgaaacagcaggaggaagaacctcaagttgatgtctgggagcttctgaagaacgccaagcctagcgagtatgaaaaaattgcttttcaatatggcattacagacctcaggggcatgcttaagcgtttaaaacgcatgcgccgggaggagaagaaaagcgcagcattcgccaagatcctggatccagcctaccaggtggataaaggtgggcgggtgcgctttgtggtggagctggccgatcctaaattggaagttaaatggtacaaaaacggtcaggaaatacgtccttccactaagtacatcttcgaacataaaggctgtcagcgcatcttgttcatcaataattgccaaatgacagacgatagcgaatattatgtcactgccggagatgagaagtgtagcaccgagctattcgtgagggaaccaccaattatggtcacgaagcagctcgaggacacgaccgcttattgtggggaacgcgtggaattggaatgtgaagtgagtgaagacgatgcaaacgtgaagtggttcaaaaacggcgaagagatcattcctggccctaaatccaggtatcgcatacgcgtggagggaaagaaacacattctgatcattgagggtgcaacaaaggccgatgctgccgagtattctgtcatgacgactggaggtcagtcctctgccaagttaagcgttgacctgaaacctttgaaaatactgactcccttgacagatcagacagtgaacctcggaaaagagatctgccttaaatgcgaaatctcagaaaacatccccggcaaatggacaaaaaatggattgcccgtgcaggagtccgaccgactgaaggttgtgcacaagggccgcatccacaaacttgtgattgctaatgctttaactgaggatgagggggactacgtgttcgcccctgatgcttataatgtcacactgcccgccaaagtgcatgtgatcgacccacctaagattatcctggatggcctggacgcggacaatactgttacagtcatcgctgggaacaaactgaggttggaaatacctatctcaggagagccaccacctaaggcaatgtggtccagaggagataaagccattatggagggctctgggagaattcgcactgagtcctaccctgattccagcacccttgtcatagacatcgcagagagggatgactccggtgtctaccatattaaccttaagaacgaggccggtgaagctcacgccagcatcaaagtcaaagtggtggatttccctgacccacctgtggcgcccactgtgactgaagttggcgatgattggtgcatcatgaattgggagcctcccgcctacgacggggggtctccaatcctcggctattttattgaaagaaaaaagaagcagtcatcacggtggatgcgccttaactttgacttgtgtaaggagactactttcgaacctaaaaagatgattgaaggagtggcttacgaagtgcgaatttttgcagttaacgccattggcatctctaagccaagcatgcctagccgacccttcgtgccactcgctgtcacaagcccccctaccctactgaccgtggattctgtgacagataccacggttaccatgagatggaggcctcccgatcacatcggcgccgccggtctggacgggtacgtgctggagtattgttttgagggcactgaggactggatcgtggccaataaggatctcatagataaaaccaagtttaccattactgggctgcctactgacgctaagatcttcgtgagagtaaaggcagtgaatgccgcaggggcaagtgagcccaaatactactctcagcctatcctcgtgaaggaaattattgagccccccaaaatccgaattccccgacatttgaagcagacgtacatccgaagagtaggcgaggctgtgaatctcgtaattcctttccagggcaagccccggcctgagttaacctggaagaaggacggagcagaaattgataagaaccagattaatatccgtaacagtgagaccgacaccatcatctttattcggaaggccgagcgcagccactcagggaagtacgacctccaagtgaaggtcgacaagttcgttgagacagcatcaatagacatacaaatcatcgatcgcccgggtccgcctcagatcgtgaaaatcgaagacgtttggggcgagaacgtggccttaacctggactccacctaaggatgatgggaatgccgccattactgggtacacaattcaaaaagcggacaagaagtcgatggagtggttcaccgtgatcgagcactaccacaggaccagcgcgacaatcacagagctagtgatcggtaacgaatactatttcagagtgtttagtgaaaacatgtgcgggttgagcgaggacgctacaatgacaaaggagtccgcggtgatagccagagacggaaaaatttacaagaatcctgtctatgaggacttcgacttctctgaggcaccaatgttcacacagcccctagtgaatacctacgctatagccgggtacaacgcaacactgaactgttctgtgcgtggaaatcctaagccaaaaataacttggatgaagaacaaggttgccatcgttgacgaccctaggtaccgaatgtttagtaaccagggagtttgcactctagagattcggaaaccctcaccctacgacggaggaacttactgctgtaaggccgtcaatgaccttggcacagtcgaaatagagtgcaaactcgaggtaaaagtgatcgctcagtag

SEQ ID NO: 264304 - DNA, 3372 bp, Artificial Sequence
  derived and/or modified sequence
atgcctgagcccaccaagaaggaggagaatgaggtgcctgccccagcccctcctcctgaggagcccagcaaggagaaggaggccggcaccaccccagccaaggactggaccctggtggagaccccacctggagaggagcaggccaagcagaatgccaacagccagctgagcatcctcttcatcgagaagccccagggcggcaccgtgaaggtgggggaggacatcaccttcatcgccaaggtgaaggccgaggacctgctgaggaagcccaccatcaagtggttcaagggcaagtggatggacctggccagcaaggccggcaagcacctgcagctgaaggagacctttgagcggcacagccgggtgtacacctttgagatgcagatcatcaaggccaaggacaactttgctggcaactaccgctgtgaggtgacctacaaggacaagtttgacagctgcagctttgacctggaggtgcatgagagcacaggcaccacccccaacatcgacatccgcagcgccttcaagaggtctggagagggccaggaggatgctggggagctggacttcagcggcctgctgaagaggcgggaggtgaagcagcaggaggaggagccccaggtggatgtgtgggagctgctgaagaatgccaagcccagtgaatatgagaagatcgccttccagtatggcatcacagacctgcggggcatgctgaagaggctgaagaggatgagaagagaggagaagaagtctgctgcctttgccaagatcctggaccctgcctaccaggtggacaagggcggccgggtgcgctttgtggtggagctggccgaccccaagctggaggtgaagtggtacaagaatggccaggagatccggcccagcaccaagtacatctttgagcacaagggctgccagaggatcctcttcatcaacaactgccagatgacagatgacagcgagtactacgtgacagctggagatgagaagtgcagcacagagctgtttgtgcgggagccccccatcatggtgaccaagcagctggaggacaccacagcctactgtggggagcgggtggagctggagtgtgaggtgtctgaagatgatgccaacgtgaagtggttcaagaatggagaggagatcatccctggccccaagagccgctaccgcatccgggtggagggcaagaagcacatcctgatcatcgagggcgccaccaaggcagatgctgctgagtacagcgtgatgaccaccggcggccagagcagcgccaagctgtctgtggacctgaagcccctgaagatcctgacccccctgacagaccagacagtgaacctgggcaaggagatctgcctgaagtgtgagatcagcgagaacatccctgggaagtggaccaagaatggcctgcctgtgcaggagagtgaccggctgaaggtggtgcacaagggccgcatccacaagctggtgattgccaatgccctgacagaagatgaaggagactatgtgtttgccccagatgcctacaacgtgaccctgcctgccaaggtgcacgtgattgatcctcccaagatcatcctggatggcctggatgctgacaacacagtgacagtgattgctggcaacaagctgcggctggagatccccatcagcggggagcccccacccaaggccatgtggagcagaggagacaaggccatcatggagggcagcggccgcatcagaacagagagctacccagacagcagcaccctggtgattgatattgctgagagagatgacagcggcgtgtaccacatcaacctgaagaatgaagctggggaggcccacgccagcatcaaggtgaaggtggtggacttcccagacccccctgtggcccccaccgtgacagaggtgggagatgactggtgcatcatgaactgggagcccccagcctatgatggcggcagccccatcctgggctacttcatcgagaggaagaagaagcagagcagccgctggatgaggctgaactttgacctgtgcaaggagaccacctttgagcccaagaagatgattgaaggagtggcctatgaggtgcgcatctttgctgtgaatgccatcggcatcagcaagcccagcatgcccagccggccctttgtgcccctggccgtgaccagcccccccaccctgctgactgtggacagcgtgacagacaccaccgtgaccatgcgctggaggcccccagaccacatcggggctgctggcctggatggctacgtgctggagtactgctttgagggcacagaggactggatcgtggccaacaaggacctgattgacaagaccaagttcaccatcaccggcctgcccacagatgccaagatctttgtgcgggtgaaggctgtgaatgctgctggggccagcgagcccaagtactacagccagcccatcctggtgaaggagatcatcgagccccccaagatccgcatccccaggcacctgaagcagacctacatcagaagagtgggggaggccgtgaacctggtgatccccttccagggcaagcccaggcctgagctgacctggaagaaggatggagctgagattgacaagaaccagatcaacatccggaacagcgagacagacaccatcatcttcatcaggaaggccgagaggagccacagcggcaagtatgacctgcaggtgaaggtggacaagtttgtggagacagccagcattgacatccagatcatcgaccggcccggccccccccagatcgtgaagattgaagatgtgtggggagaaaatgtggccctgacctggaccccacccaaggatgatggaaatgctgccatcaccggctacaccatccagaaggctgacaagaagtccatggagtggttcaccgtcatcgagcactaccacaggaccagcgccaccatcacagagctggtgattggaaatgagtactacttccgggtcttcagcgagaacatgtgtggcctgtctgaagatgccaccatgaccaaggagagcgctgtgattgccagagatggcaagatctacaagaaccctgtgtatgaagattttgacttcagcgaggcccccatgttcacccagcccctggtgaacacctacgccatcgccggctacaatgccaccctgaactgcagcgtgcggggcaaccccaagcccaagatcacctggatgaagaacaaggtggccatcgtggatgacccccgctacaggatgttcagcaaccagggcgtgtgcaccctggagatcaggaagcccagcccctatgatggcggcacctactgctgcaaggctgtgaatgacctgggcaccgtggagattgagtgcaagctggaggtgaaggtgattgcccagtag

SEQ ID NO: 264305 - DNA, 3777 bp, Artificial Sequence
  derived and/or modified sequence
gcaccatctctcgcctgcctgtggggtttctgtcaactagtcgtggagggaaggagactctttaaagaataacatcttattgtggccatgccagaacccactaagaaagaggaaaatgaagtgccagccccagccccacccccggaagaaccaagtaaagagaaggaggccggaactacaccagcaaaagactggacccttgtcgaaactcctcctggggaggaacaagccaagcagaatgccaactcccagctgtccatcttgttcattgaaaaacctcaaggaggaacagtgaaagttggtgaagatatcaccttcatagccaaagtcaaggctgaagatcttctgagaaaacccactatcaaatggttcaaaggaaaatggatggacctggccagcaaagccgggaagcaccttcagctgaaggaaacctttgagaggcacagtcgggtgtacacatttgagatgcagatcatcaaggccaaagataactttgcaggaaattacagatgcgaggtcacctataaggataagtttgacagctgttcatttgatcttgaagtgcacgaatctactgggactactccaaacattgacatcagatctgctttcaagagaagtggagaaggtcaagaggatgcaggagaacttgactttagtggtctcctgaaacgtagggaggtgaagcagcaggaggaagaaccccaggtggacgtatgggagttgctgaagaacgcgaaacccagtgagtacgagaagatcgccttccagtatggaatcaccgacctgcgcggcatgctcaagcgactcaagcgcatgcgcagagaggagaagaagagcgcagcttttgcaaaaattcttgatcctgcatatcaggttgacaaaggaggcagagtgaggtttgttgtggagctggcagatccaaagttggaggtgaaatggtataaaaatggtcaagaaattcgacccagtaccaaatacatctttgaacacaaaggatgccagagaatcctgtttatcaataactgtcagatgacagatgattcagagtattatgtgacagccggtgatgagaaatgttccactgagctcttcgtaagagagcctccaattatggtgaccaaacagctggaagatacaactgcttattgtggggagagagtggaattagaatgtgaggtgtctgaagatgatgccaatgtaaaatggtttaagaatggtgaagagattatccctggtccaaaatcaagataccgaattagagttgagggtaaaaaacacatcttgatcatagagggagcaacaaaggctgatgctgcagaatattcagtaatgacaacaggaggacaatcatctgctaaacttagtgttgacttgaaacctctgaagattttgacacctctgactgatcagactgtaaatcttggaaaagaaatctgcctgaagtgtgaaatctctgaaaacataccaggaaaatggactaaaaatggcctacctgttcaggagagtgaccgtctaaaggtggttcacaagggaaggatccacaagttagtgatagccaatgccctcactgaagatgaaggtgattatgtatttgcacctgatgcctacaatgttactctgcctgccaaagttcatgttattgatcctcctaagatcatcctggatggtcttgatgctgacaacacagtgacagtgattgcaggaaacaagcttcgtcttgagatccccatcagcggagaaccacctcctaaagccatgtggagccggggagataaggctattatggaaggcagtggccggataagaacagaatcttaccctgatagcagcactctggtcattgatatagctgaaagagatgactctggtgtttaccacatcaatctgaaaaacgaagctggagaggcacatgcaagcatcaaggttaaagttgtggacttccctgatcctccagtggcaccgactgtgacagaggtgggagatgactggtgtatcatgaactgggagcctcctgcctacgacggaggctctccaatcctaggatattttattgagaggaagaagaaacaaagctccaggtggatgaggctgaattttgatctctgcaaagaaacaacttttgagcccaagaagatgattgaaggtgtggcctatgaggtccgcatctttgcagtcaatgccattggcatctccaagcccagtatgccctccaggccttttgttcctttggctgtaacaagccctcctactcttctgactgtggactctgtcactgacacgactgtcacgatgaggtggcgccccccagaccacattggtgcagcaggtttagatggctatgtgctagagtattgctttgaaggaactgaggactggatagttgcaaacaaagatctgattgacaagacgaagttcaccatcacaggtctgccaacagatgcaaagatctttgtgcgtgtgaaggctgttaatgcagctggtgccagcgagcccaagtactattctcagcccattctcgtgaaggaaatcatagaacctccaaagattcgcattccaagacacctgaagcaaacctatatccgcagagttggagaagctgtcaatctggttatacctttccagggaaaaccaagaccagaattaacttggaagaaggatggtgcagaaattgataagaatcaaataaacattcgcaactctgagactgatacaatcatatttattagaaaagcagagaggagccactctgggaaatatgatctgcaagtcaaagtggacaaattcgtggagaccgcatcaattgacatccagatcattgaccgtccaggtccaccccaaattgtgaagattgaggatgtctggggagaaaatgtcgctctcacatggactccaccaaaggatgatggaaatgctgctatcacaggctataccattcagaaggctgacaagaagagcatggaatggtttactgtcattgagcattatcatcgaaccagtgccaccattactgaattggtcatagggaatgaatattacttccgggtcttttctgaaaacatgtgtggcctcagtgaggatgccaccatgactaaagagagtgcagtgatcgccagggatggtaaaatctacaaaaatccagtgtatgaagactttgatttctcagaggcacccatgtttactcagcctttggttaacacctatgccatagctggttacaatgccaccctaaactgcagtgtgagaggaaatcctaagcctaaaataacctggatgaaaaacaaagttgctattgtggatgatccaagatacaggatgttcagcaaccagggagtctgtaccctggaaattcgcaagcccagcccctatgatggaggcacttactgctgcaaagcagtcaatgaccttgggacagtggagattgaatgcaaactggaggtgaaagtcattgcacaataaggatttttgaatgtataatatcatctaaggtgggctctccttctgcagactcctcttgcaaggcgtacctccaaacataattgattcgtatctgcgagacttacactcaagcaatcctgaggaatactgagggagggcctggctactgtctctctgcactctgctgctttgaaatctggttgaaatgagaaaaagcattttctgttttcccaccaggcccccaagtgtggtctttttctttcctcctaatgttgaagagaaaaaaaaaaaaaaaagtttgcccagattgcttaattaaaaattgcaaacaaaatctca

SEQ ID NO: 264306 - DNA, 3372 bp, Artificial Sequence
  derived and/or modified sequence
atgcccgagcccaccaagaaggaggagaacgaggtgcccgcccccgctcctcctccagaggaaccaagtaaagaaaaagaagccggcacgactccagcgaaagactggaccttggtggagactccccctggtgaagaacaggcaaagcagaacgcaaacagccagctttcaattctcttcatcgagaagccccaaggggggaccgttaaggtcggcgaggacattacatttatcgccaaggtgaaggcagaggatctacttcgcaaaccaactatcaagtggtttaaaggaaaatggatggatttagcttcgaaagccgggaagcacctgcagctgaaagagacttttgagagacattcgcgcgtctataccttcgaaatgcagatcatcaaagccaaagataatttcgctggtaattaccgatgtgaagtgacctacaaggacaagttcgactcctgctcttttgacctcgaggtgcacgaatctaccgggacgacccccaatatcgatattcgcagtgcctttaagagaagcggagagggacaggaagatgcgggtgagcttgattttagtggtttactgaaacgccgcgaggtgaaacagcaggaggaagagcctcaagtggacgtctgggagctcctgaagaacgctaagccttctgaatatgaaaaaatcgccttccagtacggtatcacggacttacggggtatgctcaaacgcctcaagcggatgcggcgtgaggaaaagaagtccgcagcctttgctaagatcctagacccagcctatcaggtcgacaagggaggccgcgtgcgcttcgtggtcgagctggctgaccccaagctggaagttaagtggtataagaatggccaggagatacggccctctacaaagtacatcttcgaacataagggatgccaaaggattttattcattaataattgtcaaatgaccgatgatagcgaatattacgtgactgccggcgacgagaagtgtagcacagagcttttcgtgcgcgaaccgcctatcatggttactaagcaattggaagatacgaccgcctattgcggcgagagagtcgagctggagtgcgaggtgagcgaggacgacgcgaacgtgaagtggttcaagaatggagaggaaatcatccccggccctaagtcacggtatagaatccgcgtagagggcaagaagcatatattaatcattgagggagcaaccaaggcggacgccgctgagtatagtgtgatgacaacaggagggcagtctagtgctaaactcagcgtggacctcaaacctttgaagatccttacccctctaactgatcagaccgtcaacttgggaaaggagatttgtctgaagtgcgagatatcagaaaatatccctggcaaatggacgaagaatggcctgccggtgcaagagtccgatcgactgaaagtcgtgcacaagggtagaattcacaagctggttattgccaatgccctgacagaagatgaaggagattatgtcttcgcgcccgatgcctacaatgtgaccttaccagcaaaggtgcacgtcatcgatcctcctaagattattctggatggcctggatgccgacaacacagtcacagttatcgctggaaacaagttacggctggaaattcctatcagtggcgaaccaccgcccaaagcaatgtggtctaggggcgacaaagcaattatggaggggagtgggcgcatccgaacagaaagctatccagacagctcaaccttggtgattgacatagccgagcgcgatgactcaggcgtataccatatcaacctgaagaatgaagctggtgaggcccacgcaagcatcaaggtcaaagtggtcgacttcccggatcccccagttgcgcccaccgtcacggaggtgggggatgattggtgtatcatgaattgggaaccacccgcttacgatggggggtctcccatcctgggatatttcatcgaaaggaaaaagaagcagagcagtagatggatgaggctgaactttgacctgtgcaaagagaccacctttgagcctaagaaaatgatcgagggcgttgcctacgaagttaggatcttcgcagttaacgccataggcatatccaagccaagtatgccctcaagaccctttgtgccgttagctgtgactagtcctcccacactgcttactgtagactccgttaccgacacgaccgtcacaatgcgctggaggccccccgaccatatcggcgcagccggattggacggatacgtcttggagtattgtttcgaggggacagaggactggatagtagctaataaggatcttatagataaaacaaagtttacaataactggcctccctactgatgcaaaaattttcgtgcgggtgaaagccgtcaatgcggccggcgcgagtgagccgaagtactatagccagcccatactggtcaaggagatcatcgagcctcctaaaattaggatccctaggcatctcaaacaaacctacattcggcgcgtgggcgaggcagtcaacctggttattccattccaggggaaacctagaccagaactgacctggaagaaggacggcgccgagattgataaaaaccagatcaatatcaggaattctgagactgacaccattatcttcatcagaaaggcagagcgctcgcattccggaaagtacgacttacaagtgaaggtcgataaattcgtggaaacggccagcatcgacatccaaatcatagataggcctggacccccccagattgtcaagatagaggatgtgtggggcgagaacgtggccctcacttggacgccaccaaaagacgatgggaatgctgccatcaccggctataccattcagaaggccgacaaaaaatctatggaatggtttactgtcatcgaacactatcaccggacatccgccacaattaccgaactggtgattggcaacgaatactatttcagagtcttctctgagaatatgtgtggactgagcgaagatgccacgatgaccaaagagagtgccgttatagcgcgagacggtaagatctacaaaaatcctgtatacgaagacttcgattttagcgaagcgcccatgtttacgcaacccctggtgaacacttacgctatagcagggtacaatgcgaccctgaactgctccgtacgaggcaatccaaagccgaagattacctggatgaagaacaaagtggcaatcgtagatgaccctagatatcgaatgttttccaatcaaggtgtgtgcaccctggagattcgtaaacctagcccttatgacggaggtacttactgctgtaaggccgtaaacgacctgggcaccgtggaaattgagtgcaaattagaggtgaaggtgatcgcccagtag

SEQ ID NO: 264307 - DNA, 3372 bp, Artificial Sequence
  derived and/or modified sequence
atgcctgaaccgactaaaaaggaggagaacgaagttccggctcccgctccaccaccagaagaacctagcaaagagaaggaggccggaactaccccagccaaagattggaccttggttgagacacctccaggggaagagcaggctaagcaaaacgctaatagccaactgtcaatcctgttcattgaaaagccccaaggaggcaccgttaaggtgggtgaggatatcactttcatcgccaaggtgaaagctgaagacttgttacgaaagccaaccattaaatggtttaaaggaaaatggatggatctggcaagtaaggctggcaaacatctccagctcaaagagacatttgagcgccacagcagggtttacacattcgaaatgcagatcattaaggcaaaagacaactttgctggcaattaccggtgcgaggttacctacaaagataagttcgactcctgttcttttgacctagaggttcatgagtccactggcactactcctaatatcgacatccgaagcgccttcaaacgatccggcgaagggcaggaggatgcgggagaattggacttctccgggctgttaaaacgtagggaagtaaaacagcaggaggaggaaccccaagttgatgtctgggaacttctaaagaatgccaaacctagcgagtatgaaaaaatcgcctttcaatacgggattactgatctgcgcggtatgctgaaacggctgaagcgaatgcgcagggaggaaaagaagtcagctgccttcgcaaagatcttggatcctgcttaccaagtagataagggcggtagggtccggtttgtggtcgaactagccgatcccaaattggaggtgaaatggtacaagaatggacaagagatcagaccaagtaccaaatacatcttcgaacataaagggtgtcagcggattctcttcatcaataactgtcagatgacagatgattcagagtattatgtgacagcaggagacgagaaatgttccacagagcttttcgttcgtgagccacccatcatggtgactaaacagttggaagacacaaccgcttactgcggggagagagtggagctggagtgcgaggttagcgaagacgatgcaaacgtgaagtggttcaaaaacggcgaggaaattataccgggtccgaagtcgcggtaccggatccgcgtagaaggtaagaaacacatcctgataatcgagggtgccacgaaagcagacgccgctgagtactcagtgatgaccacaggaggccagtcctctgcgaagctgtcggtggacctgaagcctttgaaaatcctaacgcccttgaccgatcagacagtgaacctgggaaaagaaatctgtctgaaatgtgagatcagcgaaaacattcccggtaaatggacaaaaaacgggctgcccgtccaggagtctgacaggctgaaagttgtgcataaaggcaggatacacaaactggtgattgccaatgccctgaccgaggatgaaggggactatgtcttcgcccctgatgcctataacgtgaccctccctgccaaggtgcacgtgattgaccccccaaagatcatacttgatggattggacgccgataacacagtaactgttatagctgggaacaaactgcgcctggaaatacctataagtggggagcctcccccaaaggcgatgtggtccagaggcgacaaggctattatggagggatccggcagaattaggactgagtcttacccggattcctcaactctggtgatcgatatcgcagaacgagacgactccggggtgtatcacataaacctgaaaaacgaagctggtgaagctcacgccagcatcaaagtcaaagttgtggacttccctgaccccccagtggctccaaccgttacagaagtcggtgacgattggtgtattatgaattgggagcctcccgcttatgatggaggatctccaattctgggctatttcattgaacggaaaaaaaagcaaagttctcgctggatgcgactgaattttgatttatgcaaggagactacttttgagccaaagaaaatgatcgaaggggtggcctatgaggtcaggattttcgcagtcaatgccataggcatatcaaagccgtccatgcccagtagaccctttgtccctctggccgtaacaagccctcccactctcttgaccgttgacagcgtcactgatacaacagttacaatgcgctggcggcctccggatcatattggtgcagcgggtcttgacggctatgtcttggagtactgcttcgagggtacagaggattggatcgtcgctaacaaagaccttattgataagaccaagttcacaatcaccggccttccgactgatgctaaaattttcgtccgcgtaaaagccgtcaacgccgctggggcaagcgagcccaaatattattctcagccgatcctggtgaaggaaatcatcgagcccccaaaaattaggatccctcgacacttaaagcagacctacatcagaagggtcggcgaagccgtgaatttggttattcccttccagggtaaaccaaggccggaactcacctggaagaaggatggcgcagagatcgacaaaaaccagatcaacattagaaatagtgagaccgacaccatcatcttcatccgcaaagcagagagatcccactcaggcaagtacgatctgcaggtcaaggtcgataagttcgtggagacagcgtctatcgatatacaaatcatcgaccgccctggccctcctcagattgtgaagatcgaggatgtatggggagaaaacgtggccctaacgtggacgccccctaaagacgatggtaatgcggctatcacgggctatactatccagaaggctgacaagaaaagtatggagtggttcaccgtcatagaacactatcaccgcactagtgcaactataacggaattagtgatcgggaatgaatactattttcgagtcttctccgaaaatatgtgtggactctctgaagacgccaccatgaccaaggagagcgccgttatcgcccgagacggcaaaatatacaagaatccagtgtacgaagacttcgatttcagtgaagcccctatgttcacccaaccattagtgaatacatacgccatcgctggctacaacgctacactgaattgtagtgtacgaggcaaccctaaacctaagatcacatggatgaagaacaaagtggcgatcgtggacgaccctcgatacaggatgttctctaaccagggggtctgcacactcgaaatccggaaaccctccccatacgatggtggcacctattgttgtaaggctgtcaacgatcttgggaccgtcgagatagagtgtaagctggaggtaaaggtgatcgcccagtag

SEQ ID NO: 264308 - DNA, 3372 bp, Artificial Sequence
  derived and/or modified sequence
atgcccgagcccaccaagaaggaggagaacgaggtgcccgcccccgcccccccccccgaggagcccagcaaggagaaggaggccggcaccacccccgccaaggactggaccctggtggagaccccccccggcgaggagcaggccaagcagaacgccaacagccagctgagcatcctgttcatcgagaagccccagggcggcaccgtgaaggtgggcgaggacatcaccttcatcgccaaggtgaaggccgaggacctgctgagaaagcccaccatcaagtggttcaagggcaagtggatggacctggccagcaaggccggcaagcacctgcagctgaaggagaccttcgagagacacagcagagtgtacaccttcgagatgcagatcatcaaggccaaggacaacttcgccggcaactacagatgcgaggtgacctacaaggacaagttcgacagctgcagcttcgacctggaggtgcacgagagcaccggcaccacccccaacatcgacatcagaagcgccttcaagagaagcggcgagggccaggaggacgccggcgagctggacttcagcggcctgctgaagagaagagaggtgaagcagcaggaggaggagccccaggtggacgtgtgggagctgctgaagaacgccaagcccagcgagtacgagaagatcgccttccagtacggcatcaccgacctgagaggcatgctgaagagactgaagagaatgagaagagaggagaagaagagcgccgccttcgccaagatcctggaccccgcctaccaggtggacaagggcggcagagtgagattcgtggtggagctggccgaccccaagctggaggtgaagtggtacaagaacggccaggagatcagacccagcaccaagtacatcttcgagcacaagggctgccagagaatcctgttcatcaacaactgccagatgaccgacgacagcgagtactacgtgaccgccggcgacgagaagtgcagcaccgagctgttcgtgagagagccccccatcatggtgaccaagcagctggaggacaccaccgcctactgcggcgagagagtggagctggagtgcgaggtgagcgaggacgacgccaacgtgaagtggttcaagaacggcgaggagatcatccccggccccaagagcagatacagaatcagagtggagggcaagaagcacatcctgatcatcgagggcgccaccaaggccgacgccgccgagtacagcgtgatgaccaccggcggccagagcagcgccaagctgagcgtggacctgaagcccctgaagatcctgacccccctgaccgaccagaccgtgaacctgggcaaggagatctgcctgaagtgcgagatcagcgagaacatccccggcaagtggaccaagaacggcctgcccgtgcaggagagcgacagactgaaggtggtgcacaagggcagaatccacaagctggtgatcgccaacgccctgaccgaggacgagggcgactacgtgttcgcccccgacgcctacaacgtgaccctgcccgccaaggtgcacgtgatcgacccccccaagatcatcctggacggcctggacgccgacaacaccgtgaccgtgatcgccggcaacaagctgagactggagatccccatcagcggcgagcccccccccaaggccatgtggagcagaggcgacaaggccatcatggagggcagcggcagaatcagaaccgagagctaccccgacagcagcaccctggtgatcgacatcgccgagagagacgacagcggcgtgtaccacatcaacctgaagaacgaggccggcgaggcccacgccagcatcaaggtgaaggtggtggacttccccgacccccccgtggcccccaccgtgaccgaggtgggcgacgactggtgcatcatgaactgggagccccccgcctacgacggcggcagccccatcctgggctacttcatcgagagaaagaagaagcagagcagcagatggatgagactgaacttcgacctgtgcaaggagaccaccttcgagcccaagaagatgatcgagggcgtggcctacgaggtgagaatcttcgccgtgaacgccatcggcatcagcaagcccagcatgcccagcagacccttcgtgcccctggccgtgaccagcccccccaccctgctgaccgtggacagcgtgaccgacaccaccgtgaccatgagatggagaccccccgaccacatcggcgccgccggcctggacggctacgtgctggagtactgcttcgagggcaccgaggactggatcgtggccaacaaggacctgatcgacaagaccaagttcaccatcaccggcctgcccaccgacgccaagatcttcgtgagagtgaaggccgtgaacgccgccggcgccagcgagcccaagtactacagccagcccatcctggtgaaggagatcatcgagccccccaagatcagaatccccagacacctgaagcagacctacatcagaagagtgggcgaggccgtgaacctggtgatccccttccagggcaagcccagacccgagctgacctggaagaaggacggcgccgagatcgacaagaaccagatcaacatcagaaacagcgagaccgacaccatcatcttcatcagaaaggccgagagaagccacagcggcaagtacgacctgcaggtgaaggtggacaagttcgtggagaccgccagcatcgacatccagatcatcgacagacccggccccccccagatcgtgaagatcgaggacgtgtggggcgagaacgtggccctgacctggaccccccccaaggacgacggcaacgccgccatcaccggctacaccatccagaaggccgacaagaagagcatggagtggttcaccgtgatcgagcactaccacagaaccagcgccaccatcaccgagctggtgatcggcaacgagtactacttcagagtgttcagcgagaacatgtgcggcctgagcgaggacgccaccatgaccaaggagagcgccgtgatcgccagagacggcaagatctacaagaaccccgtgtacgaggacttcgacttcagcgaggcccccatgttcacccagcccctggtgaacacctacgccatcgccggctacaacgccaccctgaactgcagcgtgagaggcaaccccaagcccaagatcacctggatgaagaacaaggtggccatcgtggacgaccccagatacagaatgttcagcaaccagggcgtgtgcaccctggagatcagaaagcccagcccctacgacggcggcacctactgctgcaaggccgtgaacgacctgggcaccgtggagatcgagtgcaagctggaggtgaaggtgatcgcccagtag

SEQ ID NO: 264309 - protein, 92 aa, Artificial Sequence
  derived and/or modified sequence
MGSTWGSPGWVRLALCLTGLVLSLYALHVKAARARDRDYRALCDVGTAISCSRVFSSRLPADTLGLCPDAAELPGVSRWFCLPGLDPVLRAL

SEQ ID NO: 264310 - DNA, 279 bp, Artificial Sequence
  derived and/or modified sequence
atgggcagcacctggggcagccccggctgggtgagactggccctgtgcctgaccggcctggtgctgagcctgtacgccctgcacgtgaaggccgccagagccagagacagagactacagagccctgtgcgacgtgggcaccgccatcagctgcagcagagtgttcagcagcagactgcccgccgacaccctgggcctgtgccccgacgccgccgagctgcccggcgtgagcagatggttctgcctgcccggcctggaccccgtgctgagagccctgtag

SEQ ID NO: 264311 - DNA, 279 bp, Artificial Sequence
  derived and/or modified sequence
atgggtagcacgtgggggagccctggctgggttcgactggcactgtgcctcactggcttggttctctcactctatgcactccacgtgaaggcggcccgcgcacgagatcgcgattaccgcgccctgtgtgacgtagggacagccattagttgctcccgcgtcttttcgagcagattgcccgccgacacgctaggactttgccccgacgccgccgagctgcccggggtttcgagatggttctgtctgcctggactggatcctgtcctccgggctctgtag

SEQ ID NO: 264312 - DNA, 279 bp, Artificial Sequence
  derived and/or modified sequence
atgggcagcacctggggcagccctggctgggtgcggctggccctgtgcctgaccggcctggtgctgagcctgtatgccctgcacgtgaaggccgcccgggcccgggaccgggactaccgggccctgtgtgatgtgggcacagccatcagctgcagcagggtcttcagcagccggctgcctgctgacaccctgggcctgtgcccagatgctgctgagctgcccggggtgagccgctggttctgcctgcccggcctggaccctgtgctgcgggccctgtag

SEQ ID NO: 264313 - DNA, 279 bp, Artificial Sequence
  derived and/or modified sequence
atgggcagcacctggggcagccccggctgggtgcggctggccctgtgcctcacgggcttggttctcagtctgtacgcattgcacgtgaaagccgcaagggcacgcgaccgagattaccgggctctctgcgacgtgggcacggcaatatcttgtagtcgggtcttctcctcccgtctgcctgctgacacgcttggcctttgcccagatgctgctgagctgccgggtgtcagtcggtggttctgcctgccaggtttagaccccgtcctgagagcgttatag

SEQ ID NO: 264314 - DNA, 279 bp, Artificial Sequence
  derived and/or modified sequence
atgggctcgacctggggttcacccggttgggtccgacttgctttgtgtctaactggacttgtcctatctttgtacgcactccacgtgaaagcagccagagccagggatagggattaccgggctctatgcgatgtgggcaccgccatctcctgttcaagagtgttcagcagcagactccccgcagatactctgggcctgtgtcccgatgcagctgagctgccaggggtgtcccgatggttctgcttgccgggtctggaccccgtcttgagagcattatag

SEQ ID NO: 264315 - DNA, 901 bp, Artificial Sequence
  derived and/or modified sequence
gcgattccgcacgtcccttacccgcttcactagtcccggcattcttcgctgttttcctaactcgcccgcttgactagcgccctggaacagccatttgggtcgtggagtgcgagcacggccggccaatcgccgagtcagagggccaggaggggcgcggccattcgccgcccggcccctgctccgtggctggttttctccgcgggcgcctcgggcggaacctggagataatgggcagcacctgggggagccctggctgggtgcggctcgctctttgcctgacgggcttagtgctctcgctctacgcgctgcacgtgaaggcggcgcgcgcccgggaccgggattaccgcgcgctctgcgacgtgggcaccgccatcagctgttcgcgcgtcttctcctccaggttgcctgcggacacgctgggcctctgtcctgatgctgctgagctccctggtgtctctcgctggttctgtctacctggcctggatcctgttcttcgtgctctatgatttctgcattgtttgtatcaccacctatgctatcaacgtgagcctgatgtggctcagtttccggaaggtccaagaaccccagggcaaggctaagaggcactgagccctcaacccaagccaggctgacctcatctgctttgctttggcatgtgagccttgcctaagggggcatatctgggtccctagaaggccctagatgtggggcttctagattaccccctcctcctgccatacccgcacatgacaatggaccaaatgtgccacacgctcgctcttttttacacccagtgcctctgactctgtccccatgggctggtctccaaagctctttccattgcccagggagggaaggttctgagcaataaagtttcttagatcaatcagccaagtctgaa

SEQ ID NO: 264316 - protein, 96 aa, Artificial Sequence
  derived and/or modified sequence
MTCHKRYKIQKKVREHHRKLRKEAKKRGHKKPRKDPGVPNSAPFKEALLREAELRKQRLEELKQQQKLDRQKELEKKRKLETNPDIKPSNVEPMEK

SEQ ID NO: 264317 - protein, 135 aa, Artificial Sequence
  derived and/or modified sequence
MTCHKRYKIQKKVREHHRKLRKEAKKRGHKKPRKDPGVPNSAPFKEALLREAELRKQRLEELKQQQKLDRQKELEKKRKLETNPDIKPSNVEPMEKEFGLCKTENKAKSGKQNSKKLYCQELKKVIEASDVVLEV

SEQ ID NO: 264318 - DNA, 1614 bp, Artificial Sequence
  derived and/or modified sequence
atgacttgccacaaacggtacaagattcagaagaaggtgagagaacatcatagaaagctgcggaaggaagcaaaaaagaggggacacaaaaagcccagaaaagatcccggggtgccaaactcagcaccctttaaggaggcgttgttacgtgaggccgaactccggaaacaaagacttgaagaactgaaacagcagcaaaagctggaccgtcagaaagaactggagaagaaacgaaagttagagacgaaccctgatataaagccctcgaacgtggaacccatggaaaaggagttcgggctgtgcaaaactgagaacaaggcaaagtcaggcaagcagaactctaagaagctgtattgccaagaacttaagaaagtcatcgaggcttcagacgtggtgctggaggtcctcgatgcgcgcgaccccctgggttgtcggtgcccgcaggttgaggaagccattgttcagtcagggcagaagaagttagtattgatactgaacaagtctgatctggtgccgaaagagaatttggaatcatggcttaattatctgaaaaaggaattgcccacagtcgttttcagggcctctaccaaaccgaaagacaaaggcaagataacgaaacgtgtaaaagccaagaagaatgccgcaccgttccggagcgaagtttgttttggcaaggaaggactttggaagttgctgggcgggttccaggaaacatgttctaaagcaatccgtgtgggcgttatcggattccccaatgtagggaaatcctctattattaattccttaaaacaggaacaaatgtgcaatgtaggcgtatctatgggccttaccaggtctatgcaggtggtaccgctggacaagcagatcactattattgactccccgtccttcatcgtctcgccactaaactccagcagcgcacttgcactccgcagtcctgcctcgatcgaggtggttaaacccatggaggccgcttcggctatcctatcgcaggctgacgcccggcaggtcgtgttgaagtatactgtcccaggctaccgcaatagtctggagttctttaccgtgttagcgcaacgccggggcatgcaccagaagggaggcattccgaatgttgagggtgcagctaaactcctgtggtctgagtggacaggtgcatccctcgcatactattgccaccctcctacatcttggactccaccaccatactttaatgaaagcatcgtggttgacatgaagtccggcttcaacttggaggaacttgagaagaacaacgcacagtctataagggccattaaaggcccacacctagctaattccatcctgttccagtcctctggcctgacgaatggaataatagaggagaaggatattcatgaagagctgccgaagcgtaaagagaggaagcaggaagaaagggaagatgataaagattctgatcaggagactgtggatgaggaagtcgatgagaactcctccggaatgtttgccgccgaggagactggagaagccctctcagaggagactactgccggcgaacagtctactcgatctttcatattggataaaattattgaagaggacgacgcctacgacttctccacagattacgtatag

SEQ ID NO: 264319 - DNA, 291 bp, Artificial Sequence
  derived and/or modified sequence
atgacttgccataaaaggtacaaaatccagaagaaagtgcgcgagcatcatcggaagctcaggaaagaggcgaaaaaaagaggccacaagaagccccgaaaggaccctggtgtccccaactccgcaccttttaaggaggctctgctgcgggaggccgagctgagaaaacagagactggaagagttgaagcaacagcaaaaactcgaccggcaaaaggaactcgagaagaagagaaagctggaaaccaacccggacatcaagccgtccaatgtcgaaccaatggagaaatag

SEQ ID NO: 264320 - DNA, 408 bp, Artificial Sequence
  derived and/or modified sequence
atgacttgtcataagcggtacaaaatccagaaaaaggtgagggaacaccatcgcaaactgagaaaggaagctaaaaagaggggccacaaaaagcctagaaaagatccaggggtgccaaactcggcccctttcaaggaagccctgctgagagaggccgaactgcggaaacagcggctggaagaactcaagcagcaacaaaaacttgatagacagaaagagctggaaaaaaaacggaaattggagaccaatccagacatcaagcctagcaacgtggagccaatggaaaaggagtttggcctttgcaaaacagagaataaggccaagagcggtaagcagaactcgaagaaactatattgccaggaactcaagaaggtaatagaagcttccgatgtcgttctggaagtttag

SEQ ID NO: 264321 - DNA, 1614 bp, Artificial Sequence
  derived and/or modified sequence
atgacctgccacaagcgctacaagatccagaagaaggtgcgggagcaccacaggaagctgaggaaggaggccaagaagaggggccacaagaagcccaggaaggaccccggggtgcccaacagcgcccccttcaaggaggccctgctgcgggaggccgagctgaggaagcagaggctggaggagctgaagcagcagcagaagctggaccggcagaaggagctggagaagaagaggaagctggagaccaacccagacatcaagcccagcaatgtggagcccatggagaaggagtttggcctgtgcaagacagagaacaaggccaagagcggcaagcagaacagcaagaagctgtactgccaggagctgaagaaggtgattgaggccagtgatgtggtgctggaggtgctggatgcccgggaccccctgggctgccgctgcccccaggtggaggaggccatcgtgcagagcggccagaagaagctggtgctgatcctgaacaagagtgacctggtgcccaaggagaacctggagagctggctgaactacctgaagaaggagctgcccaccgtggtgttccgggccagcaccaagcccaaggacaagggcaagatcaccaagagggtgaaggccaagaagaatgctgcccccttccgctctgaggtgtgcttcggcaaggagggcctgtggaagctgctgggcggcttccaggagacctgcagcaaggccatccgggtgggcgtcatcggcttccccaacgtgggcaagagcagcatcatcaacagcctgaagcaggagcagatgtgcaatgtgggcgtgtccatgggcctgaccaggtccatgcaggtggtgcccctggacaagcagatcaccatcatcgacagccccagcttcatcgtgagccccctgaacagcagcagcgccctggccctgcggagccctgccagcattgaggtggtgaagcccatggaggccgccagcgccatcctgagccaggctgatgcccggcaggtggtgctgaagtacacagtgcccggctacagaaacagcctggagttcttcaccgtgctggcccagaggcggggcatgcaccagaagggcggcatccccaacgtggagggcgccgccaagctgctgtggagcgagtggacaggagccagcctggcctactactgccacccccccacctcctggaccccaccaccctacttcaatgaaagcatcgtggtggacatgaagagcggcttcaacctggaggagctggagaagaacaatgcccagagcatccgggccatcaagggcccccacctggccaacagcatcctcttccagagcagcggcctgaccaacggcatcatcgaggagaaggacatccacgaggagctgcccaagaggaaggagaggaagcaggaggagagagaagatgacaaggacagcgaccaggagaccgtggatgaggaggtggatgagaacagcagcggcatgtttgctgctgaggagaccggggaggccctgtctgaggagaccacagctggggagcagagcaccaggagcttcatcctggacaagatcatcgaggaggatgatgcctatgacttcagcacagattatgtgtag

SEQ ID NO: 264322 - DNA, 291 bp, Artificial Sequence
  derived and/or modified sequence
atgacctgccacaagcgctacaagatccagaagaaggtgcgggagcaccacaggaagctgaggaaggaggccaagaagaggggccacaagaagcccaggaaggaccccggggtgcccaacagcgcccccttcaaggaggccctgctgcgggaggccgagctgaggaagcagaggctggaggagctgaagcagcagcagaagctggaccggcagaaggagctggagaagaagaggaagctggagaccaacccagacatcaagcccagcaatgtggagcccatggagaagtag

SEQ ID NO: 264323 - DNA, 408 bp, Artificial Sequence
  derived and/or modified sequence
atgacctgccacaagcgctacaagatccagaagaaggtgcgggagcaccacaggaagctgaggaaggaggccaagaagaggggccacaagaagcccaggaaggaccccggggtgcccaacagcgcccccttcaaggaggccctgctgcgggaggccgagctgaggaagcagaggctggaggagctgaagcagcagcagaagctggaccggcagaaggagctggagaagaagaggaagctggagaccaacccagacatcaagcccagcaatgtggagcccatggagaaggagtttggcctgtgcaagacagagaacaaggccaagagcggcaagcagaacagcaagaagctgtactgccaggagctgaagaaggtgattgaggccagtgatgtggtgctggaggtgtag

SEQ ID NO: 264324 - DNA, 1614 bp, Artificial Sequence
  derived and/or modified sequence
atgacctgccacaagcggtacaagatccagaagaaggtgcgggagcatcatcgtaagttgaggaaggaggccaagaaacgaggtcacaagaaacctaggaaagatccaggagtaccaaatagcgccccctttaaggaggctctgctcagggaagctgaactaaggaagcagaggttggaagagctgaagcagcagcagaagctggatcgtcaaaaagaactggagaagaaacgaaagctggagactaatccggacatcaaacctagtaacgtggagcctatggagaaggaattcggactttgcaagactgagaataaagccaaatccggaaagcagaatagtaaaaagctatactgtcaggagttgaagaaagttatagaagcttcggatgtggtgttggaagtgctagacgcgcgtgaccctctgggttgtcgctgtccgcaggtcgaggaggcgatcgtccagagtggccagaagaagctggtcctaatactgaacaaaagtgatctggttcctaaagagaatctggagtcctggttgaactatctcaagaaggaattgcctaccgtcgtgtttcgtgcttccacaaagcccaaagataaaggcaaaatcacaaaacgggttaaggctaagaagaatgcggcccccttccggtccgaggtgtgttttgggaaagaggggttgtggaaactgttgggcggcttccaggaaacctgtagtaaagctatcagggtgggcgtaatcggatttccaaacgttggcaaatcttctatcatcaacagcctcaagcaggaacagatgtgcaatgtaggtgtgtcgatggggctcacccgatccatgcaggtggtgcccctggacaaacaaatcaccattatagattcaccatcattcatcgtgagccctcttaacagcagctccgccctggctctgagatccccggcatcgattgaagtggtgaaaccaatggaggccgcctccgcaatcttaagccaagcagacgcgaggcaggtagtccttaagtatacggtgcccgggtaccgcaactctctggagttcttcacggttctagctcaaaggagggggatgcatcagaagggcggcatcccaaacgttgagggcgctgcaaagctgctttggagcgagtggaccggagccagcctagcttactattgtcatccccctactagctggactcctccaccttacttcaatgagagcatagtcgtagacatgaagtcagggtttaacctcgaggagcttgaaaaaaataacgcccagtcaatcagagcaatcaaggggcctcacctcgctaacagtatattgtttcagtcttctggcttgacaaatggtattattgaagagaaggacatccacgaggagcttcccaagagaaaagaaagaaaacaagaggaacgtgaggacgataaagattctgaccaggaaaccgtcgatgaagaagtggatgaaaattccagcggaatgttcgctgccgaagaaactggcgaggcattgtccgaggagaccacagccggcgaacaatccacaaggtcctttattttggataaaattatcgaggaggatgacgcgtatgacttttctaccgactacgtgtag

SEQ ID NO: 264325 - DNA, 291 bp, Artificial Sequence
  derived and/or modified sequence
atgacctgccacaagcggtacaagatccagaagaaggtgcgggagcaccacaggaagctcaggaaagaggccaagaagcgcggacataaaaaacctcgcaaagacccaggcgtccccaactcagccccgtttaaagaagctctcttaagagaagctgaactgcgcaagcagcggcttgaggaactcaagcagcagcagaaactggaccggcagaaagagctggagaagaaacggaagctggaaactaatccagatatcaagccatctaacgtggaacccatggaaaaatag

SEQ ID NO: 264326 - DNA, 408 bp, Artificial Sequence
  derived and/or modified sequence
atgacctgccacaagcggtacaagatccagaagaaggtgcgggagcaccatcggaagctgcggaaagaggctaagaagaggggacataagaagcctagaaaagatcccggtgtaccaaacagcgccccttttaaggaggccctgctgagggaggcggaactgcgtaaacagcgactggaggaacttaaacagcagcaaaaactcgaccgtcaaaaggagctggagaagaagcgtaaacttgaaaccaatcccgacatcaagccgagcaacgtcgagcctatggaaaaagaattcgggctgtgcaagactgagaataaggcgaaaagcgggaaacagaattcaaaaaagctgtactgccaggaactcaagaaggtcatagaggccagtgatgtggtcttggaagtgtag

SEQ ID NO: 264327 - DNA, 1614 bp, Artificial Sequence
  derived and/or modified sequence
atgacttgtcataaaaggtacaagatccagaagaaggttcgtgaacatcataggaagttgcgaaaagaggcaaagaaacgcggacataaaaagccacggaaagatcccggagtgcctaacagtgcgccttttaaggaagctcttctgcgcgaagctgagctccggaaacaacgactggaggagttaaagcaacaacaaaaactggaccggcaaaaggagctcgagaaaaagcgcaagttagagacaaaccctgatatcaaaccttcaaacgttgagccgatggaaaaagaatttggtttgtgcaagaccgaaaataaggcaaagtcagggaaacagaacagtaaaaaactgtattgccaggagttgaagaaggttatcgaagcgtctgatgtggtattagaggtcctggatgcgagagacccgctaggatgcagatgtcctcaggtggaggaggcaatcgtccagtcgggccagaaaaagctggtgctgattctgaacaaatccgatttagtgccaaaagaaaacctggagtcatggttaaattacctcaaaaaggaactcccaactgttgtgttccgcgcttccaccaaacccaaggacaagggcaaaatcactaaaagagtaaaagccaagaaaaacgctgccccatttcggtctgaagtctgtttcggcaaggaagggttgtggaaacttcttggaggctttcaggagacttgcagcaaggctattagggtgggtgtgatcggattcccaaatgttggcaaatcaagcattattaactcgctgaagcaggaacagatgtgcaacgtgggagtttctatgggtctgacccgatctatgcaggtggtccccctggataagcagatcactatcatcgactctccctcattcatcgtgtcacctctgaatagttccagtgcccttgcactcaggagtcctgcgagcatagaagtcgtgaaacctatggaagccgcttccgccattttgagccaggccgatgccagacaggtcgtgctcaagtacaccgttcccggttaccgtaatagcctcgaattttttacagtgctggcgcagcggcgaggtatgcaccagaaagggggtattcctaacgtggaaggggcagccaagctgctgtggtccgagtggacaggcgcatcccttgcctattattgccatccgcctacctcctggaccccccctccgtatttcaacgagagcattgtggtagatatgaagtctgggttcaacttggaagaacttgaaaaaaacaacgcccaatcgatacgcgctataaagggtccccatttggccaactccatcctctttcagtcctcgggactgacaaatggtattatcgaagagaaagacattcatgaagaactcccaaagagaaaggaacgcaaacaagaggagagggaagacgataaggactctgaccaggagacagtcgacgaggaggtggatgaaaacagctcaggaatgtttgcagctgaagagaccggtgaagccctgtctgaagaaaccaccgccggagagcagtcaaccagatcctttatcctggataaaattattgaggaggacgacgcttatgattttagcactgactacgtttag

SEQ ID NO: 264328 - DNA, 291 bp, Artificial Sequence
  derived and/or modified sequence
atgacctgccacaagagatacaagattcaaaagaaggtccgcgagcaccacagaaagttaagaaaagaagccaagaagcgtggccataagaaacccaggaaggaccctggagtacccaactctgcacctttcaaagaggccctcctgcgggaggctgagttaagaaagcaacgacttgaagaactgaaacagcagcagaaactcgatcgccagaaagagcttgagaagaagaggaaactggaaaccaaccccgacattaaaccatccaatgtggaacccatggagaagtag

SEQ ID NO: 264329 - DNA, 408 bp, Artificial Sequence
  derived and/or modified sequence
atgacttgtcacaagaggtacaagatccagaagaaggtgcgggagcaccataggaagctgaggaaagaggccaagaagaggggtcataaaaaacctcgcaaggatcccggagtcccaaatagcgcaccgtttaaagaggctcttctaagggaggccgagcttcggaagcagcggcttgaggaactgaagcagcagcagaagttggacaggcagaaagaactcgaaaaaaaacggaaactagagaccaatcctgatatcaagccatcaaacgtggagccgatggagaaggaatttggtctttgcaaaacagagaacaaggctaagagtggaaagcagaacagcaagaagctgtattgccaggagttgaagaaggtgatcgaggcgagcgatgtggtactagaagtgtag

SEQ ID NO: 264330 - DNA, 1614 bp, Artificial Sequence
  derived and/or modified sequence
atgacctgccacaagagatacaagatccagaagaaggtgagagagcaccacagaaagctgagaaaggaggccaagaagagaggccacaagaagcccagaaaggaccccggcgtgcccaacagcgcccccttcaaggaggccctgctgagagaggccgagctgagaaagcagagactggaggagctgaagcagcagcagaagctggacagacagaaggagctggagaagaagagaaagctggagaccaaccccgacatcaagcccagcaacgtggagcccatggagaaggagttcggcctgtgcaagaccgagaacaaggccaagagcggcaagcagaacagcaagaagctgtactgccaggagctgaagaaggtgatcgaggccagcgacgtggtgctggaggtgctggacgccagagaccccctgggctgcagatgcccccaggtggaggaggccatcgtgcagagcggccagaagaagctggtgctgatcctgaacaagagcgacctggtgcccaaggagaacctggagagctggctgaactacctgaagaaggagctgcccaccgtggtgttcagagccagcaccaagcccaaggacaagggcaagatcaccaagagagtgaaggccaagaagaacgccgcccccttcagaagcgaggtgtgcttcggcaaggagggcctgtggaagctgctgggcggcttccaggagacctgcagcaaggccatcagagtgggcgtgatcggcttccccaacgtgggcaagagcagcatcatcaacagcctgaagcaggagcagatgtgcaacgtgggcgtgagcatgggcctgaccagaagcatgcaggtggtgcccctggacaagcagatcaccatcatcgacagccccagcttcatcgtgagccccctgaacagcagcagcgccctggccctgagaagccccgccagcatcgaggtggtgaagcccatggaggccgccagcgccatcctgagccaggccgacgccagacaggtggtgctgaagtacaccgtgcccggctacagaaacagcctggagttcttcaccgtgctggcccagagaagaggcatgcaccagaagggcggcatccccaacgtggagggcgccgccaagctgctgtggagcgagtggaccggcgccagcctggcctactactgccacccccccaccagctggaccccccccccctacttcaacgagagcatcgtggtggacatgaagagcggcttcaacctggaggagctggagaagaacaacgcccagagcatcagagccatcaagggcccccacctggccaacagcatcctgttccagagcagcggcctgaccaacggcatcatcgaggagaaggacatccacgaggagctgcccaagagaaaggagagaaagcaggaggagagagaggacgacaaggacagcgaccaggagaccgtggacgaggaggtggacgagaacagcagcggcatgttcgccgccgaggagaccggcgaggccctgagcgaggagaccaccgccggcgagcagagcaccagaagcttcatcctggacaagatcatcgaggaggacgacgcctacgacttcagcaccgactacgtgtag

SEQ ID NO: 264331 - DNA, 291 bp, Artificial Sequence
  derived and/or modified sequence
atgacctgccacaagagatacaagatccagaagaaggtgagagagcaccacagaaagctgagaaaggaggccaagaagagaggccacaagaagcccagaaaggaccccggcgtgcccaacagcgcccccttcaaggaggccctgctgagagaggccgagctgagaaagcagagactggaggagctgaagcagcagcagaagctggacagacagaaggagctggagaagaagagaaagctggagaccaaccccgacatcaagcccagcaacgtggagcccatggagaagtag

SEQ ID NO: 264332 - DNA, 408 bp, Artificial Sequence
  derived and/or modified sequence
atgacctgccacaagagatacaagatccagaagaaggtgagagagcaccacagaaagctgagaaaggaggccaagaagagaggccacaagaagcccagaaaggaccccggcgtgcccaacagcgcccccttcaaggaggccctgctgagagaggccgagctgagaaagcagagactggaggagctgaagcagcagcagaagctggacagacagaaggagctggagaagaagagaaagctggagaccaaccccgacatcaagcccagcaacgtggagcccatggagaaggagttcggcctgtgcaagaccgagaacaaggccaagagcggcaagcagaacagcaagaagctgtactgccaggagctgaagaaggtgatcgaggccagcgacgtggtgctggaggtgtag

SEQ ID NO: 264333 - protein, 242 aa, Artificial Sequence
  derived and/or modified sequence
MRPLSMSGHFLLAPIPESSSDYLLPKDIKLAVLGAGRVGKSAMIVRFLTKRFIGDYEPNTGKLYSRLVYVEGDQLSLQIQDTPGGVQIQDSLPQVVDSLSKCVQWAEGFLLVYSITDYDSYLSIRPLYQHIRKVHPDSKAPVIIVGNKGDLLHARQVQTQDGIQLANELGSLFLEISTSENYEDVCDVFQHLCKEVSKMHGLSGERRRASIIPRPRSPNMQDLKRRFKQALSPKVKAPSALG

SEQ ID NO: 264334 - DNA, 729 bp, Artificial Sequence
  derived and/or modified sequence
atgcgccctctgtccatgagcgggcacttcctactggcccctatccctgaatcaagcagcgattatctgctgccaaaagatatcaaactggccgtgcttggcgcaggacgggtggggaaaagcgcaatgatcgttaggtttctgactaagaggttcatcggtgattacgaacccaacactggcaagctgtactctaggctggtttatgtggaaggagaccagctgagcttgcagattcaggacacgccagggggcgttcagatccaggacagcttgccacaggtcgtcgacagcctgtccaaatgcgttcaatgggccgaaggttttttgttggtttacagtattacagactacgactcgtacctgtcaatcagacccctataccagcacattaggaaagtacacccagattctaaagcccccgtcattattgtcggcaataaaggtgacctgttacacgctcgtcaggtccagacacaggacggcattcagctagccaatgaattgggctcactgtttttggaaattagcacaagtgaaaactacgaagacgtgtgcgacgtattccaacacctgtgcaaagaagtatctaagatgcatggattgagcggcgaacggcgcagagcttcgatcataccccggccacggtcaccaaatatgcaggacctcaagagacgatttaaacaggctctaagccctaaggtcaaagccccaagcgcactcggctag

SEQ ID NO: 264335 - DNA, 729 bp, Artificial Sequence
  derived and/or modified sequence
atgaggcccctgtccatgagcggccacttcctgctggcccccatccctgagagcagcagtgactacctgctgcccaaggacatcaagctggccgtgctgggcgccggccgggtgggcaagagcgccatgattgtgcgcttcctgaccaagcgcttcatcggggactatgagcccaacacaggcaagctgtacagccggctggtgtatgtggagggggaccagctgagcctgcagatccaggacaccccaggaggagtgcagatccaggacagcctgccccaggtggtggacagcctgagcaaatgtgtgcagtgggccgagggcttcctgctggtgtacagcatcacagattatgacagctacctgagcatccggcccctgtaccagcacatcaggaaggtgcacccagacagcaaggcccctgtgatcatcgtgggcaacaagggggacctgctgcacgcccggcaggtgcagacccaggacggcatccagctggccaatgagctgggcagcctcttcctggagatcagcaccagcgagaactatgaagatgtgtgtgatgtgttccagcacctgtgcaaggaggtgtccaagatgcacggcctgtctggagagaggagaagagccagcatcatcccccggcccaggagccccaacatgcaggacctgaagaggcgcttcaagcaggccctgagccccaaggtgaaggcccccagcgccctgggctag

SEQ ID NO: 264336 - DNA, 729 bp, Artificial Sequence
  derived and/or modified sequence
atgcggcccctgagcatgagcggccacttcctgctggcccccatcccagagtcctcctctgactaccttctgcctaaggatatcaaacttgctgtccttggcgccgggagggtaggcaagagtgcaatgatcgttcgattcctcactaagaggttcattggcgattatgagccaaacacaggaaagctgtactcaaggcttgtatacgttgagggtgatcaactgtcactccagatccaagataccccaggcggcgtccagatccaggactctctgccccaggttgtggattctctgagcaaatgcgttcaatgggcagagggctttttgctcgtgtatagcatcactgattacgattcatatctgagcattcgccctttataccagcacatccgcaaggtgcatccggacagtaaggcccccgtgatcatcgttggtaataagggcgacttgttgcacgcgcgccaggtccagactcaggatgggatccagctcgccaatgaattgggatccttgttcctggaaatctccacctctgaaaactacgaggatgtttgtgacgttttccagcacttgtgtaaagaggtctccaaaatgcacggcctgagcggggagagacgaagggcgtctatcatcccacggcctaggtcccccaacatgcaagatctgaaaaggagattcaaacaggcactgtctcccaaggtcaaggcaccctccgccctcggatag

SEQ ID NO: 264337 - DNA, 729 bp, Artificial Sequence
  derived and/or modified sequence
atgaggccgctgagtatgtcggggcacttccttctagcacctattcccgaaagctctagtgactacttactgcccaaagatattaaactggctgtccttggcgctgggagggtggggaaaagtgcaatgattgtgagattcctgactaaaagattcattggagattacgagcccaatactggaaaattgtactcacggttagtgtacgtcgagggcgaccagctcagcctgcaaatacaagacacgcctggcggtgtgcagatacaggactctcttccacaggtggttgactccctgagcaagtgcgttcagtgggcagaaggctttcttttagtgtacagcataactgattatgactcatatctctcaataagaccactctatcagcacatccgcaaagtgcaccccgattcgaaggccccagttatcattgtggggaataagggggacctcctccacgccaggcaggtccagacacaagacggaatccagctcgcgaatgagctcgggtctctcttcctggagattagtacatccgaaaactacgaggacgtctgcgatgtgtttcaacacctctgcaaggaggtcagcaaaatgcacgggctgagtggggaacgccgaagagcatccatcattccacgaccgagatcccccaacatgcaggatctgaagcggagattcaagcaagccctgtctccaaaggtgaaggccccaagcgccctcggatag

SEQ ID NO: 264338 - DNA, 1543 bp, Artificial Sequence
  derived and/or modified sequence
gggcctcccaaagtgctgggattacaggcgtaagccaccgcgcccagccccttagcaccttttaaaaataaaaagggcagcgttttacagcaatctgtcccattgttgcagaaacatccaactgattgcactttttcttcttctctcgtcaactcgtaactcctatctcaagttcacccacaggtctagtgactccggctggctgctgcggggcgaggagactcgcagaatgcctgactagaggccactcgcgcgctctggacggtggccgtatctccagggtctgagccccggagccgcagtcctgccgcagagcgcctggagccgcgagcagctagcagcccggcgaagcgcacagcctcggcgatagtcagctccgcggcctctgctcccgcccctcccggccgctccgggaaggggcggagacgaggaggagctgggacggccgccgcgctcccgggcgcaccaagccctttaaaagccgcgggccttgacagttctgcaggcagccgccgcggtcccggacctctagtcccgcactcccagctggcgagccggctccgggtgcggcgaggcccagccctctcggattgcgcgccggaccccgggacgcgctccatgcggccgctcagcatgtccgggcactttctgctcgcacccatccccgagtcctcctcggactacctactgcccaaggacatcaaactggcggtgctgggcgccggccgcgtgggcaagagcgcaatgatcgtgcgcttcctgaccaagagattcattggagactatgaaccgaatacaggcaagctgtattcacggctggtctatgtcgagggggaccagctctccctgcagatccaggatactcccgggggcgtccagatccaagacagcctcccccaggtcgtcgattccctgtccaaatgcgtgcagtgggccgagggttttctgctggtctattccatcacagactatgacagctacttgtccatccgacccctttatcagcacatccggaaggtccaccctgactctaaagcccctgtcatcatcgtgggcaacaagggggaccttttgcatgcccggcaggtgcagacacaggacggtattcagctagccaatgagctgggcagcctgttccttgaaatttccactagcgaaaactacgaagatgtctgtgatgtgtttcagcatctctgcaaagaagtgagcaagatgcacggcctcagtggggaaagaagaagagcctccatcatccctcggccccgctctcccaacatgcaggacctgaagagacgcttcaagcaggctctgtctcccaaagtcaaagccccctctgcactggggtgaactatctcagacagatgcctctcctttttaatacgcatttgtgcagctaaaagactgggcttctcgctttttaatcacacattcagagtttatttttataaaaaaattgattttcaagtacatgtgtatttctgaaaattcaaacagtgattgcctagaagctggataaaattttgttttgttttattaaaagaac

SEQ ID NO: 264339 - DNA, 729 bp, Artificial Sequence
  derived and/or modified sequence
atgagacccctgagcatgagcggccacttcctgctggcccccatccccgagagcagcagcgactacctgctgcccaaggacatcaagctggccgtgctgggcgccggcagagtgggcaagagcgccatgatcgtgagattcctgaccaagagattcatcggcgactacgagcccaacaccggcaagctgtacagcagactggtgtacgtggagggcgaccagctgagcctgcagatccaggacacccccggcggcgtgcagatccaggacagcctgccccaggtggtggacagcctgagcaagtgcgtgcagtgggccgagggcttcctgctggtgtacagcatcaccgactacgacagctacctgagcatcagacccctgtaccagcacatcagaaaggtgcaccccgacagcaaggcccccgtgatcatcgtgggcaacaagggcgacctgctgcacgccagacaggtgcagacccaggacggcatccagctggccaacgagctgggcagcctgttcctggagatcagcaccagcgagaactacgaggacgtgtgcgacgtgttccagcacctgtgcaaggaggtgagcaagatgcacggcctgagcggcgagagaagaagagccagcatcatccccagacccagaagccccaacatgcaggacctgaagagaagattcaagcaggccctgagccccaaggtgaaggcccccagcgccctgggctag

SEQ ID NO: 264340 - protein, 82 aa, Artificial Sequence
  derived and/or modified sequence
MAVFHDEVEIEDFQYDEDSETYFYPCPCGDNFSITKEDLENGEDVATCPSCSLIIKVIYDKDQFVCGETVPAPSANKELVKC

SEQ ID NO: 264341 - DNA, 249 bp, Artificial Sequence
  derived and/or modified sequence
atggccgtgttccacgacgaggtcgaaatcgaagatttccaatatgacgaggactctgagacatacttttacccttgtccttgtggtgacaactttagcattaccaaggaggacttggagaacggcgaggatgtggctacctgcccctcttgctcccttataatcaaagtaatttatgataaagaccagtttgtatgcggcgagacagttcccgcaccaagcgccaacaaggaattggtgaagtgctag

SEQ ID NO: 264342 - DNA, 249 bp, Artificial Sequence
  derived and/or modified sequence
atggctgtgttccatgatgaggtggagattgaggacttccagtatgatgaagattctgagacctacttctacccctgcccctgtggggacaacttcagcatcaccaaggaggacctggagaatggagaagatgtggccacctgccccagctgcagcctcatcatcaaggtgatctatgacaaggaccagtttgtgtgtggggagaccgtgcctgcccccagcgccaacaaggagctggtgaagtgctag

SEQ ID NO: 264343 - DNA, 249 bp, Artificial Sequence
  derived and/or modified sequence
atggccgtgttccacgacgaggtggagatcgaggacttccagtacgacgaggactctgagacttacttttacccctgcccttgtggcgacaacttcagcatcacaaaagaggatctcgaaaacggggaagatgttgccacttgcccctcttgctccctcattataaaggtgatttacgataaagaccagtttgtgtgcggggaaaccgtccctgctccaagcgcaaacaaggagctggtgaagtgctag

SEQ ID NO: 264344 - DNA, 249 bp, Artificial Sequence
  derived and/or modified sequence
atggccgtgttccacgacgaggtcgagatcgaagattttcaatacgatgaagacagcgagacatacttctatccatgcccttgcggcgacaatttcagtatcactaaagaggatctcgagaacggcgaggacgtagctacttgcccatcgtgttccctgattatcaaggttatctacgataaagaccaattcgtgtgcggcgaaacagttcctgcacccagcgctaataaggagctcgtgaagtgctag

SEQ ID NO: 264345 - DNA, 249 bp, Artificial Sequence
  derived and/or modified sequence
atggccgtgttccacgacgaggtggagatcgaggacttccagtacgacgaggacagcgagacctacttctacccctgcccctgcggcgacaacttcagcatcaccaaggaggacctggagaacggcgaggacgtggccacctgccccagctgcagcctgatcatcaaggtgatctacgacaaggaccagttcgtgtgcggcgagaccgtgcccgcccccagcgccaacaaggagctggtgaagtgctag

SEQ ID NO: 264346 - DNA, 3131 bp, Artificial Sequence
  derived and/or modified sequence
gatgatgccgagcccaggccggttccggcgaagttaaaccctcggagctggcctcggactgctggggcgttaccccttcggccacccccgctgaccatggcagtgtttcatgacgaggtggaaatcgaggacttccaatatgacgaggactcggagacgtatttctatccctgcccatgtggagataacttctccatcaccaaggaagatttggagaatggggaagacgtggcaacgtgtcctagctgctctctcattataaaagtgatttatgacaaagatcagtttgtgtgtggagaaacagtcccagccccttcagccaacaaagaattagttaaatgctgaagaagccttcaggaatccaaatcctgaacatttggaatgagcccagatagaaatatcgaatgcaaagctactggcttcacagagacaaccatttatgatttgctgttctgtaagagtgtggattctttctatcaactgctgatatcatcttcaggaagcaagtccataacatgacatatctggattttgtgcttagaaccttaaattggaagcattcttaattatgcatctaaatttaaaagaagataatttcaaaacagtgctttctttcccttggtttcatcattttcatatcttaaaccaaattacttcggtatctgacaacagcatcatctacctcagtcattaggatttcttaataaaaaagagattgtatttttgacttggttattaagattattaaaattagcccttcctttgaaatatgacatcagctttgctgttctaaatttaaaattagttgcttcatcagtaccacacttccagtttctataccaagccagtctcctcagttttcccattagaatggacatgttctgttcagcgtgtcatttctgtaatgcttcatgcagagagtttggtcatagtattaaagagaaaatacagtgaggtcacaatgtctccagagctaaaagttagtgaacaagaaagaaagtccaaaatgaagtgatgaaagaatgaggacttttcttatattctgcatattccttggaagtcaggacaagatgaaaagaaaaacatccaaaagaagtgaaattggtgacagaatgagaggagcaaagcataccagtgtagtaagtggaatgtttgaatgactttgccaggtcagagcaagtaatatttctgtatctgagtttttgtttgtgttttgataaggctaatgaaattgcattccaggtaggggttaacgtcaaatttccatggctggtagctgtgcttttggcatatcacagtgttgtgtcactactacaaggtaaagcatctacagcggagaatgagcttgaaaatgagagacctattgtgaataaatatgcccatgagagcatatttaataagcctctataacatgcagccaaaccagacattcactcctgcagagaaatgttgccctggagaaaaagaaatatataaagataggctatcacccttcttttgctgcagtactaagcatagcaagaaattagaatcatttacattggaaatttgaaaattccctttatatacacaactttactgtgtataaataaaaaatatttattaatgcagtgatgtccgtcaggttgttttaggaatggcttctgcaattagaaaaatagcttgctagaatgtaaatgttctgttactggtaaatgtactgcacacattcattggacgttaaaacaagtgagtagccttttttacctgccagcagcatggctgtgtgcagccactaggctgagacaataaattaccaaaaattataatgtaccgagctgaaaatgctcagtacattatgtggcatattctggatgtgatgagaaatctcattgccatttgggacactgacatcccagaagtaatccacaactgctttgcaaaagcaaagtgactgctcagatgaacagagcagagtactcactcactatggtggcatcagctgcaaagcaaaatgaactgtcccatgatcatgttgatggttttctagatactgccaacatgttagctctttctgatgctgatgagtttcaaacacgaacagacacccttgatgtgggtttgctaagaacatagaagaacaggaagaaaagttgccaggttcacacatcccaggaaaaaagaagcataaaaagcattagcagtcagtgactgatgataatgctgcaataatgggaatggttttgtttctaaaccaaattatttctaaatcaaatcatttattgctttgtttctaaagcaattgagtcactaagtttgtgaactgtaggagaacacatcaagattgaatcctgtgttaagcagaaggtaaaaccagagccaggcgcagtggctcgtgcctgtaatcccagctactcaggaagctaaggcaggaggatcatgtgaggccaggagttcaagactagcctgggcaacatagaaagaccctgtctctaaaaaatcttcttttaattagcaaggtgtggggccttgagcaaattgcttgggcccaggagtttgaggctgtggtgagctgtgatcacaccactgcgttccagcctgtgtgacagggcaagacctcatgcctaaaaaataaagagaaagcagagtaaaactggactctgagatacgactaaagttctgtgtgatacgtgtgccttatttagctcaagacattcctggagcacctataaaaactgacttgtaatccaggctatgtctctttttagcttcgtaatctttggcaaggccattggattcttcagctgtacaattaggagactcgatcaggtgattgcctttctcagctgtcagttctctaatttcaggcttggtagcttgtaggaactgaaattgcaattaaaacctttataaactcaaactaaatcatgaattacagaaaaagtccattcttccaaaacttgatgttaccacacttacaagtttaaaatatgaagtcgactgtttaaaggattctgcatatattctagtgtgcacattcagaaacatttttcttggaaaaagtacccaacattttttataactgcacatattaatttattgccagaataaattgcattgcatgctaaataaagtcagataattcaaatcca

SEQ ID NO: 264347 - protein, 394 aa, Artificial Sequence
  derived and/or modified sequence
MAMAYLAWRLARRSCPSSLQVTSFPVVQLHMNRTAMRASQKDFENSMNQVKLLKKDPGNEVKLKLYALYKQATEGPCNMPKPGVFDLINKAKWDAWNALGSLPKEAARQNYVDLVSSLSPSLESSSQVEPGTDRKSTGFETLVVTSEDGITKIMFNRPKKKNAINTEMYHEIMRALKAASKDDSIITVLTGNGDYYSSGNDLTNFTDIPPGGVEEKAKNNAVLLREFVGCFIDFPKPLIAVVNGPAVGISVTLLGLFDAVYASDRATFHTPFSHLGQSPEGCSSYTFPKIMSPAKATEMLIFGKKLTAGEACAQGLVTEVFPDSTFQKEVWTRLKAFAKLPPNALRISKEVIRKREREKLHAVNAEECNVLQGRWLSDECTNAVVNFLSRKSKL

SEQ ID NO: 264348 - protein, 227 aa, Artificial Sequence
  derived and/or modified sequence
MYHEIMRALKAASKDDSIITVLTGNGDYYSSGNDLTNFTDIPPGGVEEKAKNNAVLLREFVGCFIDFPKPLIAVVNGPAVGISVTLLGLFDAVYASDRATFHTPFSHLGQSPEGCSSYTFPKIMSPAKATEMLIFGKKLTAGEACAQGLVTEVFPDSTFQKEVWTRLKAFAKLPPNALRISKEVIRKREREKLHAVNAEECNVLQGRWLSDECTNAVVNFLSRKSKL

SEQ ID NO: 264349 - DNA, 1185 bp, Artificial Sequence
  derived and/or modified sequence
atggccatggcctacctggcctggagactggccagaagaagctgccccagcagcctgcaggtgaccagcttccccgtggtgcagctgcacatgaacagaaccgccatgagagccagccagaaggacttcgagaacagcatgaaccaggtgaagctgctgaagaaggaccccggcaacgaggtgaagctgaagctgtacgccctgtacaagcaggccaccgagggcccctgcaacatgcccaagcccggcgtgttcgacctgatcaacaaggccaagtgggacgcctggaacgccctgggcagcctgcccaaggaggccgccagacagaactacgtggacctggtgagcagcctgagccccagcctggagagcagcagccaggtggagcccggcaccgacagaaagagcaccggcttcgagaccctggtggtgaccagcgaggacggcatcaccaagatcatgttcaacagacccaagaagaagaacgccatcaacaccgagatgtaccacgagatcatgagagccctgaaggccgccagcaaggacgacagcatcatcaccgtgctgaccggcaacggcgactactacagcagcggcaacgacctgaccaacttcaccgacatcccccccggcggcgtggaggagaaggccaagaacaacgccgtgctgctgagagagttcgtgggctgcttcatcgacttccccaagcccctgatcgccgtggtgaacggccccgccgtgggcatcagcgtgaccctgctgggcctgttcgacgccgtgtacgccagcgacagagccaccttccacacccccttcagccacctgggccagagccccgagggctgcagcagctacaccttccccaagatcatgagccccgccaaggccaccgagatgctgatcttcggcaagaagctgaccgccggcgaggcctgcgcccagggcctggtgaccgaggtgttccccgacagcaccttccagaaggaggtgtggaccagactgaaggccttcgccaagctgccccccaacgccctgagaatcagcaaggaggtgatcagaaagagagagagagagaagctgcacgccgtgaacgccgaggagtgcaacgtgctgcagggcagatggctgagcgacgagtgcaccaacgccgtggtgaacttcctgagcagaaagagcaagctgtag

SEQ ID NO: 264350 - DNA, 1380 bp, Artificial Sequence
  derived and/or modified sequence
acccccgagcccccgcagccctagagccgcccaagggatggcgatggcgtacttggcttggagactggcgcggcgttcgtgtccgaggtcactagtttcccggtagttcagctgcacatgaatagaacagcaatgagagccagtcagaaggactttgaaaattcaatgaatcaagtgaaactcttgaaaaaggatccaggaaacgaagtgaagctaaaactctacgcgctatataagcaggccactgaaggaccttgtaacatgcccaaaccaggtgtatttgacttgatcaacaaggccaaatgggacgcatggaatgcccttggcagcctgcccaaggaagctgccaggcagaactatgtggatttggtgtccagtttgagtccttcattggaatcctctagtcaggtggagcctggaacagacaggaaatcaactgggtttgaaactctggtggtgacctccgaagatggcatcacaaagatcatgttcaaccggcccaaaaagaaaaatgccataaacactgagatgtatcatgaaattatgcgtgcacttaaagctgccagcaaggatgactcaatcatcactgttttaacaggaaatggtgactattacagtagtgggaatgatctgactaacttcactgatattccccctggtggagtagaggagaaagctaaaaataatgccgttttactgagggaatttgtgggctgttttatagattttcctaagcctctgattgcagtggtcaatggtccagctgtgggcatctccgtcaccctccttgggctattcgatgccgtgtatgcatctgacagggcaacatttcatacaccatttagtcacctaggccaaagtccggaaggatgctcctcttacacttttccgaagataatgagcccagccaaggcaacagagatgcttatttttggaaagaagttaacagcgggagaggcatgtgctcaaggacttgttactgaagttttccctgatagcacttttcagaaagaagtctggaccaggctgaaggcatttgcaaagcttcccccaaatgccttgagaatttcaaaagaggtaatcaggaaaagagagagagaaaaactacacgctgttaatgctgaagaatgcaatgtccttcagggaagatggctatcagatgaatgcacaaatgctgtggtgaacttcttatccagaaaatcaaaactgtgatgaccactacagcagagtaaagcatgtccaaggaaggatgtgctgttacctctgatttccagtactggaactaaataagcttcattgtgccttttgtagtgctagaatatcaattacaatgatgatatttcactacagctctgatgaataaaaagttttgtaaaacaa

SEQ ID NO: 264351 - DNA, 1407 bp, Artificial Sequence
  derived and/or modified sequence
acccccgagcccccgcagccctagagccgcccaagggatggcgatggcgtacttggcttggagactggcgcggcgttcgtgtccgagttctctgcaggtcactagtttcccggtagttcagctgcacatgaatagaacagcaatgagagccagtcagaaggactttgaaaattcaatgaatcaagtgaaactcttgaaaaaggatccaggaaacgaagtgaagctaaaactctacgcgctatataagcaggccactgaaggaccttgtaacatgcccaaaccaggtgtatttgacttgatcaacaaggccaaatgggacgcatggaatgcccttggcagcctgcccaaggaagctgccaggcagaactatgtggatttggtgtccagtttgagtccttcattggaatcctctagtcaggtggagcctggaacagacaggaaatcaactgggtttgaaactctggtggtgacctccgaagatggcatcacaaagatcatgttcaaccggcccaaaaagaaaaatgccataaacactgagatgtatcatgaaattatgcgtgcacttaaagctgccagcaaggatgactcaatcatcactgttttaacaggaaatggtgactattacagtagtgggaatgatctgactaacttcactgatattccccctggtggagtagaggagaaagctaaaaataatgccgttttactgagggaatttgtgggctgttttatagattttcctaagcctctgattgcagtggtcaatggtccagctgtgggcatctccgtcaccctccttgggctattcgatgccgtgtatgcatctgacagggcaacatttcatacaccatttagtcacctaggccaaagtccggaaggatgctcctcttacacttttccgaagataatgagcccagccaaggcaacagagatgcttatttttggaaagaagttaacagcgggagaggcatgtgctcaaggacttgttactgaagttttccctgatagcacttttcagaaagaagtctggaccaggctgaaggcatttgcaaagcttcccccaaatgccttgagaatttcaaaagaggtaatcaggaaaagagagagagaaaaactacacgctgttaatgctgaagaatgcaatgtccttcagggaagatggctatcagatgaatgcacaaatgctgtggtgaacttcttatccagaaaatcaaaactgtgatgaccactacagcagagtaaagcatgtccaaggaaggatgtgctgttacctctgatttccagtactggaactaaataagcttcattgtgccttttgtagtgctagaatatcaattacaatgatgatatttcactacagctctgatgaataaaaagttttgtaaaacaagcttaagaattcacaca

SEQ ID NO: 264352 - DNA, 1405 bp, Artificial Sequence
  derived and/or modified sequence
ggataccgctgtccaggcgaaggtcgccgccgttggaagaccctccttccctattgtctaggtggcaacaggattttgctttgctggttttccggtgaggtcactagtttcccggtagttcagctgcacatgaatagaacagcaatgagagccagtcagaaggactttgaaaattcaatgaatcaagtgaaactcttgaaaaaggatccaggaaacgaagtgaagctaaaactctacgcgctatataagcaggccactgaaggaccttgtaacatgcccaaaccaggtgtatttgacttgatcaacaaggccaaatgggacgcatggaatgcccttggcagcctgcccaaggaagctgccaggcagaactatgtggatttggtgtccagtttgagtccttcattggaatcctctagtcaggtggagcctggaacagacaggaaatcaactgggtttgaaactctggtggtgacctccgaagatggcatcacaaagatcatgttcaaccggcccaaaaagaaaaatgccataaacactgagatgtatcatgaaattatgcgtgcacttaaagctgccagcaaggatgactcaatcatcactgttttaacaggaaatggtgactattacagtagtgggaatgatctgactaacttcactgatattccccctggtggagtagaggagaaagctaaaaataatgccgttttactgagggaatttgtgggctgttttatagattttcctaagcctctgattgcagtggtcaatggtccagctgtgggcatctccgtcaccctccttgggctattcgatgccgtgtatgcatctgacagggcaacatttcatacaccatttagtcacctaggccaaagtccggaaggatgctcctcttacacttttccgaagataatgagcccagccaaggcaacagagatgcttatttttggaaagaagttaacagcgggagaggcatgtgctcaaggacttgttactgaagttttccctgatagcacttttcagaaagaagtctggaccaggctgaaggcatttgcaaagcttcccccaaatgccttgagaatttcaaaagaggtaatcaggaaaagagagagagaaaaactacacgctgttaatgctgaagaatgcaatgtccttcagggaagatggctatcagatgaatgcacaaatgctgtggtgaacttcttatccagaaaatcaaaactgtgatgaccactacagcagagtaaagcatgtccaaggaaggatgtgctgttacctctgatttccagtactggaactaaataagcttcattgtgccttttgtagtgctagaatatcaattacaatgatgatatttcactacagctctgatgaataaaaagttttgtaaaacaagcttaagaattca

SEQ ID NO: 264353 - DNA, 1402 bp, Artificial Sequence
  derived and/or modified sequence
acccccgagcccccgcagccctagagccgcccaagggatggcgatggcgtacttggcttggagactggcgcggcgttcgtgtccgagttctctgcaggtcactagtttcccggtagttcagctgcacatgaatagaacagcaatgagagccagtcagaaggactttgaaaattcaatgaatcaagtgaaactcttgaaaaaggatccaggaaacgaagtgaagctaaaactctacgcgctatataagcaggccactgaaggaccttgtaacatgcccaaaccaggtgtatttgacttgatcaacaaggccaaatgggacgcatggaatgcccttggcagcctgcccaaggaagctgccaggcagaactatgtggatttggtgtccagtttgagtccttcattggaatcctctagtcaggtggagcctggaacagacaggaaatcaactgggtttgaaactctggtggtgacctccgaagatggcatcacaaagatcatgttcaaccggcccaaaaagaaaaatgccataaacactgagatgtatcatgaaattatgcgtgcacttaaagctgccagcaaggatgactcaatcatcactgttttaacaggaaatggtgactattacagtagtgggaatgatctgactaacttcactgatattccccctggtggagtagaggagaaagctaaaaataatgccgttttactgagggaatttgtgggctgttttatagattttcctaagcctctgattgcagtggtcaatggtccagctgtgggcatctccgtcaccctccttgggctattcgatgccgtgtatgcatctgacagggcaacatttcatacaccatttagtcacctaggccaaagtccggaaggatgctcctcttacacttttccgaagataatgagcccagccaaggcaacagagatgcttatttttggaaagaagttaacagcgggagaggcatgtgctcaaggacttgttactgaagttttccctgatagcacttttcagaaagaagtctggaccaggctgaaggcatttgcaaagcttcccccaaatgccttgagaatttcaaaagaggtaatcaggaaaagagagagagaaaaactacacgctgttaatgctgaagaatgcaatgtccttcagggaagatggctatcagatgaatgcacaaatgctgtggtgaacttcttatccagaaaatcaaaactgtgatgaccactacagcagagtaaagcatgtccaaggaaggatgtgctgttacctctgatttccagtactggaactaaataagcttcattgtgccttttgtagtgctagaatatcaattacaatgatgatatttcactacagctctgatgaataaaaagttttgtaaaacaagcttaagaattc

SEQ ID NO: 264354 - DNA, 1548 bp, Artificial Sequence
  derived and/or modified sequence
gcgatggcgtacttggcttggagactggcgcggcgttcgtgtccgaggtaagcttggagtcccggccgttcggcccatggtcgcccgcaggataccgctgtccaggcgaaggtcgccgccgttggaagaccctccttccctattgtctaggtggcaacaggattttgctttgctggttttccggtgaggtagtgctaaaaagtgacgacctcacgcgcgccctcctgcaccgctgggcccggagtgttctctgcaggtcactagtttcccggtagttcagctgcacatgaatagaacagcaatgagagccagtcagaaggactttgaaaattcaatgaatcaagtgaaactcttgaaaaaggatccaggaaacgaagtgaagctaaaactctacgcgctatataagcaggccactgaaggaccttgtaacatgcccaaaccaggtgtatttgacttgatcaacaaggccaaatgggacgcatggaatgcccttggcagcctgcccaaggaagctgccaggcagaactatgtggatttggtgtccagtttgagtccttcattggaatcctctagtcaggtggagcctggaacagacaggaaatcaactgggtttgaaactctggtggtgacctccgaagatggcatcacaaagatcatgttcaaccggcccaaaaagaaaaatgccataaacactgagatgtatcatgaaattatgcgtgcacttaaagctgccagcaaggatgactcaatcatcactgttttaacaggaaatggtgactattacagtagtgggaatgatctgactaacttcactgatattccccctggtggagtagaggagaaagctaaaaataatgccgttttactgagggaatttgtgggctgttttatagattttcctaagcctctgattgcagtggtcaatggtccagctgtgggcatctccgtcaccctccttgggctattcgatgccgtgtatgcatctgacagggcaacatttcatacaccatttagtcacctaggccaaagtccggaaggatgctcctcttacacttttccgaagataatgagcccagccaaggcaacagagatgcttatttttggaaagaagttaacagcgggagaggcatgtgctcaaggacttgttactgaagttttccctgatagcacttttcagaaagaagtctggaccaggctgaaggcatttgcaaagcttcccccaaatgccttgagaatttcaaaagaggtaatcaggaaaagagagagagaaaaactacacgctgttaatgctgaagaatgcaatgtccttcagggaagatggctatcagatgaatgcacaaatgctgtggtgaacttcttatccagaaaatcaaaactgtgatgaccactacagcagagtaaagcatgtccaaggaaggatgtgctgttacctctgatttccagtactggaactaaataagcttcattgtgccttttgtagtgctagaatatcaattacaatgatgatatttcactacagctctgatgaataaaaagttttgtaaaaca

SEQ ID NO: 264355 - DNA, 1185 bp, Artificial Sequence
  derived and/or modified sequence
atggctatggcctatttagcttggaggcttgcccgacggtcttgtccttcctctttacaggtgacgtccttccccgtcgtgcagttgcatatgaatcgcacggctatgagagcttcacagaaggacttcgagaatagcatgaaccaggtgaagctcctcaagaaggatcccgggaacgaggtaaaactcaaactgtatgctctttataagcaggccaccgagggtccatgtaatatgcccaagcccggggtttttgatctgatcaacaaagcgaagtgggacgcgtggaatgccctcggcagcctaccgaaggaggctgctcggcagaactatgtggatctggttagctctctgtcgccttcactggagtcctcctcgcaggtggagcccggaacggatcggaaaagtacaggctttgaaacgctcgtcgtgactagtgaggatggcataacgaagataatgttcaatcggcccaaaaagaaaaacgcaattaacaccgagatgtatcacgagatcatgcgggctctgaaagcagcatccaaagatgatagtattattactgtcttaactggcaacggtgactactattcgagcggaaatgatctgacaaattttacagatatacctccaggcggcgttgaggagaaagccaagaacaatgcagtgctccttagggaatttgtcggttgtttcatcgacttccccaagccattgatcgcagtcgtgaacgggcctgccgtgggcattagcgtcacactgctggggctcttcgacgcggtctacgcgtctgatagggcaaccttccacacaccattctctcacttgggccagagccctgaaggatgcagtagttatacctttcccaaaattatgagccccgctaaagcaaccgaaatgcttatcttcggtaagaaacttaccgccggggaagcctgcgcccagggcctggtgactgaagtttttccggactcaacttttcaaaaggaggtatggaccaggctgaaagccttcgcaaagctcccacccaacgcgctgcgtatctcgaaagaggtgatcaggaagcgggaaagagagaaacttcacgcagtcaatgctgaggagtgtaatgtactgcaaggtcgttggttaagcgacgaatgtacaaacgcagtggtgaatttcttaagccggaagagcaaactctag

SEQ ID NO: 264356 - DNA, 1185 bp, Artificial Sequence
  derived and/or modified sequence
atggccatggcctacctggcctggaggctggcccggcgcagctgccccagcagcctgcaggtgaccagcttccctgtggtgcagctgcacatgaacagaacagccatgagggccagccagaaggactttgagaacagcatgaaccaggtgaagctgctgaagaaggaccctggaaatgaggtgaagctgaagctgtatgccctgtacaagcaggccacagagggcccctgcaacatgcccaagccaggagtgtttgacctgatcaacaaggccaagtgggatgcctggaatgccctgggcagcctgcccaaggaggccgcccggcagaactacgtggacctggtgagcagcctgagccccagcctggagagcagcagccaggtggagcccggcacagacaggaagagcactggatttgagaccctggtggtgaccagtgaagatggcatcaccaagatcatgttcaaccggcccaagaagaagaatgccatcaacacagagatgtaccacgagatcatgagggccctgaaggccgccagcaaggatgacagcatcatcaccgtgctgactggaaatggagactactacagcagtggaaatgacctgaccaacttcacagacatccccccaggcggcgtggaggagaaggccaagaacaatgctgtgctgctgcgggagtttgtgggctgcttcatcgacttccccaagcccctgattgctgtggtgaatggacctgctgtgggcatctctgtgaccctgctgggcctgtttgatgctgtgtatgccagtgaccgggccaccttccacacccccttcagccacctgggccagagccctgagggctgcagcagctacaccttccccaagatcatgagccctgccaaggccacagagatgctgatctttgggaagaagctgacagctggggaggcctgtgcccagggcctggtgacagaggtgtttcctgacagcaccttccagaaggaggtgtggacccggctgaaggcctttgccaagctgcccccaaatgccctgcgcatcagcaaggaggtgatcaggaagcgggagcgggagaagctgcatgctgtgaatgcagaagaatgtaatgtgctgcagggccgctggctgagtgatgaatgtaccaatgctgtggtgaacttcctgagcaggaagagcaagctgtag

SEQ ID NO: 264357 - DNA, 1185 bp, Artificial Sequence
  derived and/or modified sequence
atggccatggcctacctggcctggcggctggcccggcggagctgcccctcctctctgcaggtcacttccttcccagtggttcaactgcatatgaacagaacggccatgcgcgctagccagaaggatttcgagaactctatgaaccaggtgaaactgctgaagaaagatcctgggaatgaagtcaagctgaagctctacgctctttacaagcaggctaccgaaggcccttgtaacatgccaaagcctggcgttttcgacctgattaataaggccaagtgggacgcttggaatgctctcggaagtctgcccaaggaagccgcgcgacagaactacgtggacctggttagctctttatctcctagtctggagtcaagttctcaggtcgaacccggcacggatagaaagtcaaccggattcgagaccttagtggtcacctcagaggacggaatcaccaaaattatgttcaaccgcccaaagaaaaaaaacgccatcaataccgaaatgtaccatgagatcatgcgcgctctgaaggctgctagcaaggacgatagcatcattaccgtgcttaccggaaatggggactattattcttcaggaaatgacctgactaacttcacagatatcccccctggcggggtggaagagaaggccaagaacaacgctgtgttgctgcgggaatttgtagggtgcttcattgacttccctaagcctttaatcgccgtcgtgaacggacctgccgttggcatctcggtgaccctgctggggctgtttgacgctgtgtacgcaagcgatcgggctacatttcatacgcctttcagccatttgggccaaagtcctgaaggctgcagcagttacacgtttccaaagatcatgtcacctgccaaagcgaccgagatgttgatctttggcaaaaaactgactgctggagaggcctgtgcccaggggcttgtgaccgaggttttccctgacagcacatttcagaaagaagtgtggacaaggctcaaggccttcgcaaagctcccccctaacgcactgcgaatcagcaaagaggtgattaggaaacgagagcgcgaaaagctgcacgccgtcaatgccgaagaatgcaacgtgctgcagggacgctggctgtcagacgaatgcaccaacgcagtagtcaatttcctgagtcggaaatcaaagttgtag

SEQ ID NO: 264358 - DNA, 1185 bp, Artificial Sequence
  derived and/or modified sequence
atggccatggcctatcttgcctggaggcttgccaggaggtcatgccctagctctctgcaggtgactagcttccccgtcgtgcaactccacatgaacaggactgccatgcgcgcttcccagaaagacttcgagaacagtatgaaccaagtgaagctgctcaaaaaagaccctggcaatgaagtgaagctaaaactgtacgccctgtataagcaggccaccgagggtccctgtaacatgccaaagcctggggttttcgaccttattaataaggctaaatgggacgcatggaatgctctgggctctctgcccaaggaagctgcaaggcaaaattatgtcgacctcgtgtcctcattgagtccctcgttggaatcaagctctcaggtggaaccaggcacagataggaagagcacgggcttcgagacattagtcgtgacatccgaagatgggataaccaagatcatgtttaatcggcctaagaagaagaacgccataaacacagaaatgtaccatgaaattatgcgagccctgaaagccgcttcaaaggatgacagcatcatcacagtcctgaccggcaacggtgattactattcctcagggaacgaccttacgaacttcaccgacatccctccaggcggtgtggaggaaaaggcaaaaaataatgctgttctgcttagagagttcgtgggatgcttcattgatttccccaagccgcttattgctgtggtaaatggcccagctgtggggatctcggttactctcctagggttgttcgacgctgtctatgcaagcgatagagctaccttccatactccattttcacacctgggtcaatcacccgagggttgtagtagctatacctttccaaagataatgtccccagccaaagcaaccgagatgctgatatttggaaaaaaactgacagccggtgaggcatgtgcacagggattggtgacagaggtttttcctgactcaacttttcagaaggaggtgtggaccagactcaaagcctttgctaagcttcccccaaatgccctgaggatatctaaagaagtaattaggaagagggaacgcgaaaagttgcacgccgtgaatgcggaggagtgcaatgtgctccaggggcgatggctgagcgacgaatgcactaatgcagttgtcaacttcctcagcagaaagagtaagctgtag

SEQ ID NO: 264359 - protein, 362 aa, Artificial Sequence
  derived and/or modified sequence
MAPKQDPKPKFQEGERVLCFHGPLLYEAKCVKVAIKDKQVKYFIHYSGWNKKSAVRPRRSEKSLKTHEDIVALFPVPEGAPSVHHPLLTSSWDEWVPESRVLKYVDTNLQKQRELQKANQEQYAEGKMRGAAPGKKTSGLQQKNVEVKTKKNKQKTPGNGDGGSTSETPQPPRKKRARVDPTVENEETFMNRVEVKVKIPEELKPWLVDDWDLITRQKQLFYLPAKKNVDSILEDYANYKKSRGNTDNKEYAVNEVVAGIKEYFNVMLGTQLLYKFERPQYAEILADHPDAPMSQVYGAPHLLRLFVRIGAMLAYTPLDEKSLALLLNYLHDFLKYLAKNSATLFSASDYEVAPPEYHRKAV

SEQ ID NO: 264360 - protein, 235 aa, Artificial Sequence
  derived and/or modified sequence
MRGAAPGKKTSGLQQKNVEVKTKKNKQKTPGNGDGGSTSETPQPPRKKRARVDPTVENEETFMNRVEVKVKIPEELKPWLVDDWDLITRQKQLFYLPAKKNVDSILEDYANYKKSRGNTDNKEYAVNEVVAGIKEYFNVMLGTQLLYKFERPQYAEILADHPDAPMSQVYGAPHLLRLFVRIGAMLAYTPLDEKSLALLLNYLHDFLKYLAKNSATLFSASDYEVAPPEYHRKAV

SEQ ID NO: 264361 - DNA, 1089 bp, Artificial Sequence
  derived and/or modified sequence
atggctcccaagcaggatccgaaaccaaaattccaggagggggaaagagtcctctgtttccacggccccctcctttacgaggccaaatgcgtcaaggttgctatcaaagataaacaggtcaaatatttcatccactattcaggttggaataagaaatcggccgtacggcctagacggtctgagaagagccttaaaacccacgaggatatcgttgccctgtttcccgtgcccgaaggagctccatccgttcatcaccctctcctgacctcctcctgggatgagtgggtccctgagagccgggtactcaaatacgttgatactaacctgcagaaacaacgggaactgcagaaggcaaaccaggaacagtatgcagagggcaagatgaggggcgccgcaccaggtaaaaaaacgagcggcctgcagcagaagaacgtcgaggtgaaaaccaagaagaataaacaaaagactcctgggaacggcgacggagggagcacttcagagactccacagcccccaagaaagaagcgcgcaagggtggaccccactgtagaaaacgaggagacgttcatgaatcgggtggaggtcaaagtcaaaattcccgaggagctgaaaccctggctcgtggacgattgggaccttatcaccagacagaaacagctcttttacctacccgccaagaagaacgtagattcaatcctggaagactatgctaattataagaaatccagaggcaataccgacaataaggaatacgccgttaatgaagtggttgcaggaattaaggagtatttcaacgtgatgctggggactcagctgttgtataagttcgaaaggccacagtacgccgagatcctggcagatcatcccgacgcgccaatgtcgcaagtgtacggcgccccgcatctgcttaggctgttcgttagaatcggcgcaatgctggcctatactccgcttgatgagaaaagtctggccctcttactgaattacttgcacgatttccttaagtacctagcgaaaaatagtgctaccttgttcagcgcatcagactatgaggtggcccctcccgagtatcacagaaaggctgtgtag

SEQ ID NO: 264362 - DNA, 1089 bp, Artificial Sequence
  derived and/or modified sequence
atggcccccaagcaggaccccaagcccaagttccaggagggggagcgggtgctgtgcttccacggccccctgctgtatgaggccaagtgtgtgaaggtggccatcaaggacaagcaggtgaagtacttcatccactacagcggctggaacaagaagtctgctgtgcggccccggcgctctgagaagagcctgaagacccatgaggacatcgtggccctcttccctgtgcctgagggcgcccccagcgtgcaccaccccctgctgaccagctcctgggatgagtgggtgcctgagagccgggtgctgaagtatgtggacaccaacctgcagaagcagcgggagctgcagaaggccaaccaggagcagtatgcagagggcaagatgagaggagctgcccctgggaagaagaccagcggcctgcagcagaagaatgtggaggtgaagaccaagaagaacaagcagaagaccccaggaaatggagatggcggcagcaccagcgagaccccccagccccccaggaagaagagggcccgggtggaccccaccgtggagaatgaggagaccttcatgaacagagtggaggtgaaggtgaagatccctgaggagctgaagccctggctggtggatgactgggacctgatcacccggcagaagcagctgttctacctgcctgccaagaagaatgtggacagcatcctggaggactatgccaactacaagaagagccggggcaacacagacaacaaggagtatgctgtgaatgaggtggtggccggcatcaaggagtacttcaacgtgatgctgggcacccagctgctgtacaagtttgagcggccccagtatgcagagatcctggccgaccacccagatgcccccatgagccaggtgtatggagccccccacctgctgcggctgtttgtgagaattggagccatgctggcctacacccccctggatgagaagagcctggccctgctgctgaactacctgcatgacttcctgaagtacctggccaagaacagcgccaccctcttcagcgccagtgactatgaggtggcccctcctgagtaccacaggaaggctgtgtag

SEQ ID NO: 264363 - DNA, 2359 bp, Artificial Sequence
  derived and/or modified sequence
gcgtgcgcggcgggctgtcgttggctggagcagcggctgcgcgggtcgcggtgctgtgaggtctgcgggcgctggcaaatccggcccaggatgtagagctggcagtgcctgacggcgcgtctgacgcggagttgggtggggtagagagtagggggcggtagtcgggggtggtgggagaaggaggaggcggcgaatcacttataaatggcgccgaagcaggacccgaagcctaaattccaggagggtgagcgagtgctgtgctttcatgggcctcttctttatgaagcaaagtgtgtaaaggttgccataaaggacaaacaagtgaaatacttcatacattacagtggttggaataaaaaaagtgctgtgaggcccaggcgctctgaaaaatctttgaagacacatgaggatattgtagccctttttcctgttcctgaaggagctccctcagtacaccaccccctcctgacctctagttgggatgaatgggttccggagagcagagtactcaaatacgtggacaccaatttgcagaaacagcgagaacttcaaaaagccaatcaggagcagtatgcagaggggaagatgagaggggctgccccaggaaagaagacatctggtctgcaacagaaaaatgttgaagtgaaaacgaaaaagaacaaacagaaaacacctggaaatggagatggtggcagtaccagtgagacccctcagcctcctcggaagaaaagggcccgggtagatcctactgttgaaaatgaggaaacattcatgaacagagttgaagttaaagtaaagattcctgaagagctaaaaccgtggcttgttgatgactgggacttaattaccaggcaaaaacagctcttttatcttcctgccaagaagaatgtggattccattcttgaggattatgcaaattacaagaaatctcgtggaaacacagataataaggagtatgcggttaatgaagttgtggcagggataaaagaatacttcaacgtaatgttgggtacccagctactctataaatttgagagaccacagtatgctgaaattcttgcagatcatcccgatgcacccatgtcccaggtgtatggagcgccacatctcctgagattatttgtacgaattggagcaatgttggcttatacacctctggatgagaagagccttgctttattactcaattatcttcacgatttcctaaagtacctggcaaagaattctgcaactttgttcagtgccagcgattatgaagtggctcctcctgagtaccatcggaaagctgtgtgagaggcactctcactcacttatgtttggatctccgtaaacacatttttgttcttagtctatctcttgtacaaacgatgtgctttgaagatgttagtgtataacaattgatgtttgttttctgtttgattttaaacagagaaaaaataaaagggggtaatagctccttttttcttctttctttttttttttcatttcaaaattgctgccagtgttttcaatgatggacaacagagggatatgctgtagagtgttttattgcctagttgacaaagctgcttttgaatgctggtggttctattcctttgacactacgcacttttataatacatgttaatgctatatgacaaaatgctctgattcctagtgccaaaggttcaattcagtgtatataactgaacacactcatccatttgtgcttttgtttttttttatggtgcttaaagtaaagagcccatcctttgcaagtcatccatgttgttacttaggcattttatcttggctcaaattgttgaagaatggtggcttgtttcatggtttttgtatttgtgtctaatgcacgttttaacatgatagacgcaatgcattgtgtagctagttttctggaaaagtcaatcttttaggaattgtttttcagatcttcaataaattttttctttaaatttcaaagaacaatgtgcttgtgttgatgccttacaaaaaccattgtatatttgtgtattccttcttgtatttagacagtggtttttcaggtgcgtgctttgttttctggtatggcctttatggaatgagacgctttagctttggtacgtagcgctaatccatagcagctttggcagtttgctgtcttgagtcttagctaaaaagttagaagtttacatgactgttttttttattttccctaaattattacttactctgagcattaattaagggcattttcacctgtgtaaaattatggtcagcttttttctgtctataattgtttacttttgtgggtttactctagaaacatgagccaaaaatgtcaatagacaacacagtattaaaataacccaaaagttgtaaa

SEQ ID NO: 264364 - DNA, 1089 bp, Artificial Sequence
  derived and/or modified sequence
atggcccccaagcaggaccccaagcccaagttccaggagggcgagcgcgttctgtgcttccatggcccattactatacgaagcaaagtgcgtcaaggtcgcgattaaagataagcaggttaagtactttatccactactcaggctggaacaaaaagtcagctgtaaggccgcgacgaagtgaaaagtctctgaaaacccatgaagacatagtagcattgttccctgtgcctgaaggcgcccccagtgtgcaccacccccttctgacatcctcctgggatgagtgggtccctgagagccgcgtgttgaaatatgttgatacaaaccttcagaaacagcgggagctccagaaggccaaccaggagcagtacgcggagggaaaaatgaggggtgctgcacctggtaagaagacctctggtctacagcaaaagaacgtagaagtaaaaacgaaaaaaaataagcagaaaacacctggtaatggagacggcggatctacgtcagagacgcctcaacccccgaggaagaagcgcgccagagtggatcccaccgtggagaatgaggagacctttatgaatagagttgaggtcaaggtgaagattccagaggagctcaagccgtggctggttgacgactgggacttgattactcggcaaaagcagctcttctatttgcccgccaagaaaaacgttgatagtatcttagaggactatgccaactataagaagagccggggtaacacagacaacaaagagtacgccgtcaatgaagtcgttgcaggcattaaggagtatttcaatgtcatgctgggcacccagctgctttataaatttgaacggcctcagtacgccgagatcctggcagaccaccctgacgcacctatgagccaggtgtacggggccccgcacctgctacggttgttcgtccgtattggggccatgttagcctacactccccttgacgagaagagtctggcacttctcctcaactacttacatgattttctaaagtatttggccaagaactcagccactctgttctcggcatcggattacgaagtcgcaccaccggaatatcatcgcaaagctgtttag

SEQ ID NO: 264365 - DNA, 1089 bp, Artificial Sequence
  derived and/or modified sequence
atggccccaaagcaagaccctaaacccaagttccaggagggagagcgagtgctgtgttttcatgggcctctgctgtacgaggccaagtgcgtcaaggtggcaatcaaagacaagcaggtgaagtacttcattcactactctggctggaataagaagagtgccgttcgacccagacgtagcgagaagtctctgaagacccacgaggacattgtggccctgttccctgtacccgagggcgcaccaagcgtccatcatccactcctgacaagctcatgggatgagtgggtaccagagagtcgggtgctgaagtatgtggacacaaacctgcaaaagcagcgcgaactgcagaaagcgaatcaagagcagtacgcggaggggaaaatgagaggggctgcccctggtaagaaaacctcgggtctccaacagaagaacgttgaggtaaaaacaaaaaagaacaaacaaaaaacgcccggaaatggggatggcggatcgacttccgagacaccgcagcctccaaggaagaagcgtgcccgagtcgatcctaccgtcgaaaacgaggaaacgttcatgaaccgagtggaggtcaaagtaaagattccggaggaattaaagccatggctggtggacgactgggacttaatcacccgccagaaacagctgttctatttacccgcaaagaagaacgttgactcaattctggaggactacgctaactacaaaaagagcagggggaacaccgacaataaagagtatgccgtgaacgaagttgttgcgggaatcaaggaatattttaacgtcatgctcggcacacagctgttgtacaaattcgagcggcctcaatatgctgagatcctggccgatcacccagatgcaccaatgtcccaagtatacggcgcaccacatctgctgagactatttgtacgcattggcgcaatgctagcatacacgcctttggacgaaaaatctctggctctgctgctgaactacttacacgactttctgaagtatctggcgaagaactccgccaccttgttttcagctagtgactatgaagtagcccctcctgagtaccatagaaaagcggtctag

SEQ ID NO: 264366 - DNA, 1089 bp, Artificial Sequence
  derived and/or modified sequence
atggcccccaagcaggaccccaagcccaagttccaggagggcgagagagtgctgtgcttccacggccccctgctgtacgaggccaagtgcgtgaaggtggccatcaaggacaagcaggtgaagtacttcatccactacagcggctggaacaagaagagcgccgtgagacccagaagaagcgagaagagcctgaagacccacgaggacatcgtggccctgttccccgtgcccgagggcgcccccagcgtgcaccaccccctgctgaccagcagctgggacgagtgggtgcccgagagcagagtgctgaagtacgtggacaccaacctgcagaagcagagagagctgcagaaggccaaccaggagcagtacgccgagggcaagatgagaggcgccgcccccggcaagaagaccagcggcctgcagcagaagaacgtggaggtgaagaccaagaagaacaagcagaagacccccggcaacggcgacggcggcagcaccagcgagaccccccagccccccagaaagaagagagccagagtggaccccaccgtggagaacgaggagaccttcatgaacagagtggaggtgaaggtgaagatccccgaggagctgaagccctggctggtggacgactgggacctgatcaccagacagaagcagctgttctacctgcccgccaagaagaacgtggacagcatcctggaggactacgccaactacaagaagagcagaggcaacaccgacaacaaggagtacgccgtgaacgaggtggtggccggcatcaaggagtacttcaacgtgatgctgggcacccagctgctgtacaagttcgagagaccccagtacgccgagatcctggccgaccaccccgacgcccccatgagccaggtgtacggcgccccccacctgctgagactgttcgtgagaatcggcgccatgctggcctacacccccctggacgagaagagcctggccctgctgctgaactacctgcacgacttcctgaagtacctggccaagaacagcgccaccctgttcagcgccagcgactacgaggtggccccccccgagtaccacagaaaggccgtgtag

SEQ ID NO: 264367 - protein, 208 aa, Artificial Sequence
  derived and/or modified sequence
MQATADSTKMDCVWSNWKSQAIDLLYWRDIKQTGIVFGSFLLLLFSLTQFSVVSVVAYLALAALSATISFRIYKSVLQAVQKTDEGHPFKAYLELEITLSQEQIQKYTDCLQFYVNSTLKELRRLFLVQDLVDSLKFAVLMWLLTYVGALFNGLTLLLMAVVSMFTLPVVYVKHQAQIDQYLGLVRTHINAVVAKIQAKIPGAKRHAE

SEQ ID NO: 264368 - DNA, 627 bp, Artificial Sequence
  derived and/or modified sequence
atgcaagctacagcggattccactaagatggattgcgtgtggagtaactggaaatcccaggccattgacctcctgtattggcgtgatatcaagcaaacaggcattgtctttgggtcttttctgctgttgctgttcagcctgacacagttctctgtggtttcagtggtcgcttacttagctttggctgctttgtccgccacgatatctttccgcatttacaagtctgtcctgcaagctgtccaaaaaacagatgaggggcaccccttcaaagcctacctagagctggagatcactttgtctcaggaacagatacaaaaatacaccgactgccttcagttttacgttaactctaccctcaaagaactgcgccggcttttcctggttcaggacctggttgactccctgaaatttgctgtacttatgtggctcctaacctacgtaggagccctttttaatggcctgaccctgttactgatggctgtggtcagcatgttcacactgcccgtggtatacgtcaagcaccaggcacagatagatcaatacctgggattggtgagaacacatataaatgccgtggttgctaagatccaggcaaaaattcccggagctaaaaggcacgccgaatag

SEQ ID NO: 264369 - DNA, 627 bp, Artificial Sequence
  derived and/or modified sequence
atgcaggccacagctgacagcaccaagatggactgtgtgtggagcaactggaagagccaggccatcgacctgctgtactggagggacatcaagcagacaggaattgtgtttggcagcttcctgctgctgctcttcagcctgacccagttctctgtggtgtctgtggtggcctacctggccctggccgccctgagcgccaccatctccttccgcatctacaagtctgtgctgcaggccgtgcagaagacagatgagggccaccccttcaaggcctacctggagctggagatcaccctgagccaggagcagatccagaagtacacagactgcctgcagttctacgtgaacagcaccctgaaggagctgcggcggctcttcctggtgcaggacctggtggacagcctgaagtttgctgtgctgatgtggctgctgacctacgtgggcgccctcttcaacggcctgaccctgctgctgatggctgtggtgtccatgttcaccctgcctgtggtgtatgtgaagcaccaggcccagattgaccagtacctgggcctggtgaggacccacatcaatgctgtggtggccaagatccaggccaagatccctggggccaagagacatgctgagtag

SEQ ID NO: 264370 - DNA, 627 bp, Artificial Sequence
  derived and/or modified sequence
atgcaggccaccgccgacagcaccaagatggactgcgtgtggagcaattggaaatcacaagcgattgatctgctctattggcgcgacatcaaacagacaggcatcgtgtttggctcttttctgctcctcctgtttagtttaacccaattctctgtggtctccgtcgtcgcttacctcgccctcgcagccctgtcggccaccatcagcttccgcatttacaagtctgttttgcaggcggtgcagaagaccgacgagggacatcccttcaaagcgtacctggaattggagatcaccctttcccaggaacagattcagaagtataccgattgcctccagttctatgtaaattctactctcaaagagttaaggcggctgttcctcgttcaagatctcgtggattccctgaagtttgccgtgctgatgtggttactcacatacgtgggagctctgtttaacggactgaccttgctactcatggccgtggtttccatgtttaccttgccagtcgtgtatgtgaaacaccaggcccagatcgatcagtatctcggtctggttcgcacccatattaatgcggtagttgccaagattcaggccaaaattcccggggctaagagacacgccgagtag

SEQ ID NO: 264371 - DNA, 627 bp, Artificial Sequence
  derived and/or modified sequence
atgcaggccaccgcagattctaccaaaatggattgcgtatggtctaactggaagagtcaggccatcgacttgctttattggcgggatatcaagcagacgggaatcgtgtttggctccttccttctattgctttttagtctgactcagtttagtgtggttagtgtcgtggcctacttggctctcgccgcactgagcgccaccatatccttccggatctataagagtgttctccaagccgtgcagaagactgacgagggacatccgtttaaggcatacttggaactcgagattaccctatcacaagagcagattcagaagtacacagactgtctgcagttctacgtaaattccactctcaaagaactgcggaggttgttcttagttcaggacctcgtggacagcttgaaattcgcagtgttgatgtggcttctcacatacgtgggagcgttgtttaatggtttgactctcctgttgatggccgtcgtctcgatgttcaccctgccagttgtgtacgtgaagcatcaggcgcaaatcgaccagtacctggggctggtgcgcacccatatcaacgcggtagtagccaaaatccaggccaaaatacccggtgcgaaacgtcacgcagagtag

SEQ ID NO: 264372 - DNA, 1703 bp, Artificial Sequence
  derived and/or modified sequence
agaaccgctttacccgtctccagggtagcacccttgggcagcccagccaacgctgtcgcgtggagcggcgcccgcatccccatgcgcgcaggcggctccggggccgcgccgcgctgattcgctgccggccgcgcagactgcggcgccagcgacgctcccgcccctcaccgcgcgccgcctggtgcagcctcagtctctccgcagccgcgcggccactgcgagcccagccgcagcagccgggcaccaacgcttgagtgcacgctcggcgcccccgaggagagccacggcgagcccccaaagcccgcacgatgcaggccactgccgattccaccaagatggactgtgtgtggagcaactggaaaagtcaggctattgacctgttgtattggcgggacatcaagcagacgggcatcgtgtttgggagtttcctgctgctgctcttctccctgacccagttcagcgtggtgagcgtcgtggcctacctggccctggccgcactctcagccaccatcagtttccgcatctacaagtctgttttacaagcagtgcagaaaaccgacgaaggccaccctttcaaggcctacttggagcttgagatcaccctttctcaggagcagattcagaagtacacggactgcctgcagttctacgtgaacagcacacttaaggaactgaggaggctcttccttgtccaggacctggtggattccttaaaatttgcagtcctgatgtggctcctgacctacgttggcgctctcttcaatggcctgaccctgctgctcatggctgtggtttcaatgtttactctacctgtagtgtatgttaagcaccaggcacagattgaccaatatctgggacttgtgaggactcacataaatgctgttgtggcaaagattcaggctaaaatcccaggcgctaagaggcatgctgagtaaactgatttcccaccggggactggacacaaacaggaatgtctggagtggtaacagctctcttcttactcattactgcaaattgattgtctttcccccctccctccagtaccataatcttagagacaaaccttaaaacagctgtttttaggctgttccttgtactcttaggatatttgagtcacttgtgtcaaccactaaagtatagagaaaagtgtattagatgtggtttttaattttgtgttgctaaaaaaagtgcatgatggtgagagcccaagttatctttccctcttcggtgttcttcttctcttctctgcaatgcttctgtagcttctaatgttccccgtggctaggcctttcctgccgagtgctctgatgcaatagtggaaatcgcttatatgtccttgggttgctggttggattaatctttaataacaatatatagaattgtagactgatgttttagcatttttccaacacacacaacgtaaaaataaaagcagtcgaccgcacttatggtaatcagttttgtataacttaaaataattaaataaatgaataaatccaaaacaaacatgcagtacttttgttgtatgggattggtgggctgatttacatgtatggttactaaaaagtaccagcatgttaactttattacaatttgtattactttctctgtagttcctaatggattcaattacggactctggatatttgcacttatgtacttgatactgaatgcataaataaatgttactaaatgtagaatgt

SEQ ID NO: 264373 - DNA, 627 bp, Artificial Sequence
  derived and/or modified sequence
atgcaggccaccgccgacagcaccaagatggactgcgtgtggagcaactggaagagccaggccatcgacctgctgtactggagagacatcaagcagaccggcatcgtgttcggcagcttcctgctgctgctgttcagcctgacccagttcagcgtggtgagcgtggtggcctacctggccctggccgccctgagcgccaccatcagcttcagaatctacaagagcgtgctgcaggccgtgcagaagaccgacgagggccaccccttcaaggcctacctggagctggagatcaccctgagccaggagcagatccagaagtacaccgactgcctgcagttctacgtgaacagcaccctgaaggagctgagaagactgttcctggtgcaggacctggtggacagcctgaagttcgccgtgctgatgtggctgctgacctacgtgggcgccctgttcaacggcctgaccctgctgctgatggccgtggtgagcatgttcaccctgcccgtggtgtacgtgaagcaccaggcccagatcgaccagtacctgggcctggtgagaacccacatcaacgccgtggtggccaagatccaggccaagatccccggcgccaagagacacgccgagtag

SEQ ID NO: 264374 - protein, 319 aa, Artificial Sequence
  derived and/or modified sequence
MVGEMETKEKPKPTPDYLMQLMNDKKLMSSLPNFCGIFNHLERLLDEEISRVRKDMYNDTLNGSTEKRSAELPDAVGPIVQLQEKLYVPVKEYPDFNFVGRILGPRGLTAKQLEAETGCKIMVRGKGSMRDKKKEEQNRGKPNWEHLNEDLHVLITVEDAQNRAEIKLKRAVEEVKKLLVPAAEGEDSLKKMQLMELAILNGTYRDANIKSPALAFSLAATAQAAPRIITGPAPVLPPAALRTPTPAGPTIMPLIRQIQTAVMPNGTPHPTAAIVPPGPEAGLIYTPYEYPYTLAPATSILEYPIEPSGVLGMAFPTKG

SEQ ID NO: 264375 - DNA, 960 bp, Artificial Sequence
  derived and/or modified sequence
atggtgggcgagatggagaccaaggagaagcccaagcccacccccgactacctgatgcagctgatgaacgacaagaagctgatgagcagcctgcccaacttctgcggcatcttcaaccacctggagagactgctggacgaggagatcagcagagtgagaaaggacatgtacaacgacaccctgaacggcagcaccgagaagagaagcgccgagctgcccgacgccgtgggccccatcgtgcagctgcaggagaagctgtacgtgcccgtgaaggagtaccccgacttcaacttcgtgggcagaatcctgggccccagaggcctgaccgccaagcagctggaggccgagaccggctgcaagatcatggtgagaggcaagggcagcatgagagacaagaagaaggaggagcagaacagaggcaagcccaactgggagcacctgaacgaggacctgcacgtgctgatcaccgtggaggacgcccagaacagagccgagatcaagctgaagagagccgtggaggaggtgaagaagctgctggtgcccgccgccgagggcgaggacagcctgaagaagatgcagctgatggagctggccatcctgaacggcacctacagagacgccaacatcaagagccccgccctggccttcagcctggccgccaccgcccaggccgcccccagaatcatcaccggccccgcccccgtgctgccccccgccgccctgagaacccccacccccgccggccccaccatcatgcccctgatcagacagatccagaccgccgtgatgcccaacggcaccccccaccccaccgccgccatcgtgccccccggccccgaggccggcctgatctacaccccctacgagtacccctacaccctggcccccgccaccagcatcctggagtaccccatcgagcccagcggcgtgctgggcatggccttccccaccaagggctag

SEQ ID NO: 264376 - DNA, 960 bp, Artificial Sequence
  derived and/or modified sequence
atggtgggtgaaatggaaactaaagaaaagccaaaaccgacacctgactacctgatgcagctcatgaacgacaagaagctaatgtctagtctgcctaacttttgtgggatctttaaccacttagaacgccttctggacgaggagatctctcgggtcaggaaagacatgtataatgacactctgaatggatccacagagaagaggtctgctgagctccctgacgctgtagggcccattgtgcaactgcaggaaaaactctacgtgcccgtgaaagagtatccagacttcaacttcgtcgggcggatccttggacccagagggctaacagccaagcagctggaagctgagactggctgcaagatcatggtacggggcaaaggttctatgagggacaaaaagaaggaggaacagaatagaggcaagccgaattgggagcacctgaacgaggacctccatgtccttatcacagtcgaggatgcccagaacagagccgaaatcaaactgaaaagagccgtcgaggaagtgaagaagctgctggtacctgctgccgaaggtgaagactccctgaaaaaaatgcagctcatggagcttgcaatcctcaatggaacctacagagatgctaatatcaaaagccccgccttggcattctcacttgccgctaccgcgcaggcagccccacgaatcatcacaggtccagcccccgtcctcccaccggccgcactccgcacacctacacctgcgggtcctacaatcatgccgctcattagacagatccaaacagccgtcatgccgaacggcactccccatcccaccgccgctatcgttcctcccggccccgaggccggcctgatatatacgccatacgagtatccctacaccctagccccagccacttccattctggaatatcccatcgagccctcaggagtgctcggcatggccttcccaacaaagggttag

SEQ ID NO: 264377 - DNA, 960 bp, Artificial Sequence
  derived and/or modified sequence
atggtgggggagatggagaccaaggagaagcccaagcccaccccagactacctgatgcagctgatgaatgacaagaagctgatgagcagcctgcccaacttctgtggcatcttcaaccacctggagcggctgctggatgaggagatcagccgggtgaggaaggacatgtacaatgacaccctgaatggcagcacagagaagaggtctgctgagctgcctgatgctgtgggccccatcgtgcagctgcaggagaagctgtatgtgcctgtgaaggagtacccagacttcaactttgtgggccgcatcctgggcccccggggcctgacagccaagcagctggaggccgagaccggctgcaagatcatggtgcggggcaagggctccatgagggacaagaagaaggaggagcagaacagaggcaagcccaactgggagcacctgaatgaagacctgcacgtgctgatcaccgtggaggatgcccagaacagagctgagatcaagctgaagagagctgtggaggaggtgaagaagctgctggtgcctgctgctgagggggaggacagcctgaagaagatgcagctgatggagctggccatcctgaatggcacctacagagatgccaacatcaagagccctgccctggccttcagcctggccgccacagcccaggccgccccccgcatcatcaccggccctgcccctgtgctgcccccagctgccctgcggacccccaccccagctggccccaccatcatgcccctcatccggcagatccagacagctgtgatgcccaacggcaccccccaccccacagctgccatcgtgcccccaggccctgaggccggcctcatctacaccccctatgagtacccctacaccctggccccagccaccagcatcctggagtaccccatcgagcccagcggcgtgctgggcatggccttccccaccaagggctag

SEQ ID NO: 264378 - DNA, 960 bp, Artificial Sequence
  derived and/or modified sequence
atggtgggcgagatggagaccaaggagaagcccaagcccacccccgattacttgatgcaactcatgaacgataagaagctgatgtctagcttacccaacttctgtggtatatttaaccacctcgagaggcttctggacgaggagatctctcgggttaggaaggacatgtacaacgacaccctgaacgggtcgacagaaaaaagatcagctgagctcccagatgccgtgggcccaatcgtgcagctgcaggaaaagctatacgtaccagttaaggagtacccagacttcaacttcgtgggccgcatcttgggccctcggggtctgaccgccaagcagctggaagccgaaaccggatgcaaaattatggtgagaggaaagggctccatgcgcgataagaagaaggaggagcagaatcggggtaagccgaattgggagcacttaaatgaggatctgcacgtgttgatcacagtggaagacgctcagaaccgggccgagatcaagcttaagagggccgtggaggaggtgaagaagctgctggtgcccgccgccgagggggaggacagtctgaagaaaatgcagctgatggagcttgcaattctgaatggtacttacagggacgctaacattaagtcccccgctctggccttcagtcttgccgcaaccgctcaggcagcacctcgtatcattacgggaccagcccctgtcctgccgccagccgccctgagaacacccaccccagccgggcctactattatgcccttgatccgccagattcagaccgcagtgatgcccaatggcacaccgcacccaaccgctgctatcgtgcctcctggccccgaagctgggctgatctatacgccttacgagtacccatacacactggcaccagcaacatcaattcttgaatatcccatagaacctagtggagtgctagggatggccttcccgactaaggggtag

SEQ ID NO: 264379 - DNA, 960 bp, Artificial Sequence
  derived and/or modified sequence
atggtgggcgagatggaaactaaagaaaaacctaagcctacacctgattatcttatgcagctgatgaatgacaaaaaactgatgagctccctccctaatttttgcggcatcttcaatcatctggaacggctgttagacgaggagatatctcgggtgagaaaagacatgtataacgatacactgaacggtagtaccgagaaaaggtctgcagagcttccagatgcggttggccctatcgtgcagcttcaggaaaagctatacgtgcccgtgaaggagtaccctgactttaacttcgtgggaagaattttgggcccacgtggactgaccgctaaacagctggaagctgaaaccgggtgcaaaatcatggtgcgtggaaagggctcaatgagggataagaagaaggaggagcagaataggggaaaacccaattgggaacatcttaatgaagacctccacgttttaattaccgtggaagatgcccaaaatcgtgcagaaattaaactaaagcgagcagtagaggaagtgaagaagctgctcgtgcccgcagcagaaggtgaggatagcctaaagaaaatgcagttgatggagctcgccatcctcaacgggacctacagagatgccaatattaaatcccctgccctcgcttttagtctggctgccaccgcccaagcagccccaagaatcatcaccggcccagcaccggttctcccaccagctgcactacggacacctacgccagccggaccgacaatcatgcctctgattcgccagatccagacggctgtgatgccaaacggaaccccacatcctaccgcagccatcgtgccgcctgggcctgaggctggtttgatatacacaccctacgaatatccctacacactcgcccctgccacgtctatcctggagtatcccattgagccctcaggcgtcctgggtatggccttcccaacgaaaggatag

SEQ ID NO: 264380 - DNA, 5685 bp, Artificial Sequence
  derived and/or modified sequence
tgaactgaggcgaactccgccgccaagtgagtgaggaggaggaggaggagaaggaggaggaggaagaggaggagcgcagtcggagcgcggcggcagcggcagaggcgccgcggcggggaccagcccagagagaccccccgagcccgcggcacaggcggcggcggcgctgagcgggctcgaccagccgagcgagcggcggccccggctcctcctcgtccggcgccagcagcccgcgccccgcgcccgcactcggccagccgagacccgcctcccgcccgcccgccggcctcgtgagggacgcgccgagccgggcggccgagagcggcggcggctgggagcgcgtcgggcccgggcggaaagtgcctgcggggggcgggcgagcgcgcggtgccggccgccccggggctcggcgcgggagccagagcgggagccggcgcggagcgggacgccgggtcccgagcggcccgcggccggggctcgcccccgcccctccctcctctccggcggcggcggcggcggcggcgggcggagtgagctgcggagcctggaatatggtcggggaaatggaaacgaaggagaagccgaagcccaccccagattacctgatgcagctgatgaacgacaagaagctcatgagcagcctgcccaacttctgcgggatcttcaaccacctcgagcggctgctggacgaagaaattagcagagtacggaaagacatgtacaatgacacattaaatggcagtacagagaaaaggagtgcagaattgcctgatgctgtgggacctattgttcagttacaagagaaactttatgtgcctgtaaaagaatacccagattttaattttgttgggagaatccttggacctagaggacttacagccaaacaacttgaagcagaaaccggatgtaaaatcatggtccgaggcaaaggctcaatgagggataaaaaaaaggaggagcaaaatagaggcaagcccaattgggagcatctaaatgaagatttacatgtactaatcactgtggaagatgctcagaacagagcagaaatcaaattgaagagagcagttgaagaagtgaagaaattattggtacctgcagcagaaggagaagacagcctgaagaagatgcagctgatggagcttgcgattctgaatggcacctacagagatgccaacattaaatcaccagcccttgccttttctcttgcagcaacagcccaggctgctccaaggatcattactgggcctgcgccggttctcccaccagctgccctgcgtactcctacgccagctggccctaccataatgcctttgatcagacaaatacagaccgctgtcatgccaaacggaactcctcacccaactgctgcaatagttcctccagggcccgaagctggtttaatctatacaccctatgagtacccctacacattggcaccagctacatcaatccttgagtatcctattgaacctagtggtgtattaggtatggctttcccaacgaaaggctaagaattcaagaacggtcttaactgaaccctcatcagatctgaatttaacaaatgcttagtctcagcagcctccgggggaaaaaagcttagcctagcagtcagtgacttacttgcactttttgcacatagatataaagtaaaattatgttattaatttggtttagtctgtaatattacacagtaatggtaatttataaaggagtgtatagtagtatactgactgctaagtgtactatactgtttgctttactaatcacctaattcattgcagttcatacttattgactcagagtttaaaaccacaatctgtaggctttaagaattgcttttaaacctttttaagtgataaactcttgaagtggtcttaaggttagcaaataattgtctgtattaaacatggcgttatttaagtagtcctgctgcaagaaaggcacttcagtgaatatgtgactagtaaagcttaaatatgtttggatctaatagagctcatgaaatactgtaacttggggattgtaaatgaatggatacaataggttaaggcccaagatgtttgaaatgaatgcaatattaatagatgcatatatacatgacatattgtggttaattttaaaactactgtgccttaacgtgtttcttaaacttttgtagtaaatgaacatttgaaatccattttgataaacctgctgttaatgttttttccccccttgtgaatgttttctaactttgtcttggtaattgcaatttaactaggtgcggtggctactaaagttcgaaggcacgatatgcgtgtccatccttaccaaaggattgtgaccgcagaccgaggttagtttagttctgcagttcttgtctataagaaatgcgttgggtgtccataaaatttgcaacaccacacctgatggaaaaatgtaattgcttacctgcacacagttttttttccttttctaaatttgtttgtgatcattgacagatttaagggttgggttttttgttttggtttggttttttctcccttcatattttaacttattaaatcttctattattatgtactatgatttattcctactaaaacataaattagtcaatttggggagctattaaattttgatgttgcctcagttattttcattaataacttttgctaaaatttaccttttaaaagttctgaaatttggggttggtattgcaaaatgaattgaacggatggtgctttaatgagagaagtaaaggaatatatgcctcctgtgtacttttggagaaaactgaagatttagtttccatttttctttataataaaatatttgagccactgtataaacatgagggtgcacatgtcaagtacttagctaaaatcaacaaagtgaggactgtgaagataactttcatgtagttggatttttttatataaattagagcgtcaattcccttttattcttacattctcttgccaaaatggatcctttgatttttgtcatttgctgctaaaatatattatctgaaggtaaactgtctcttgaagttctgtggtggtatgagatccagctgtgtgaatataatttttgactaacctgtgactggaaaataagtcttcatttttctcctttacaacttttataatttgtgtcctgtatatgcccttggacccttttataaattatttttgcttattgaggaatggtattttcggtttattgacattgaattgttttctaagtttttccatcacaagataggaatatcaagcatggtagtaaaaaaggattttttacaagtttctattatggcacatttgtttcctacaaattaaattgatcaaagtctcaaatattagtggaggaaaaagtgctggatttgtacttcaattgtacatcttctatgaatttatgaaggacctacctgctttatgtgattaccttgagtactgatgataaatactagacacagctgttgtccacatcagaaataacatgcctttcccaaagacattgttaatatttgtttagcataatccataaagaacgttgaagacttttaaactaatgtattcatcactaacagtgattgttcagtgaacaaaatagaccccagctccgtggtcgtctatgaggatggtattccttgtaagtgttctgtatgagcacgtctcatagggatggggaagttttttggaaagtcacttgagttttaaagaaactggacaattccatgaataatttgaggttttattcatattgctaatgtctacaattgttctaaagagtattttaaagtagtttttttcccccagctaatctttccctatgtatgcccccttttaggagatttctcaccattttgctttaacacaataattattggcctacttaatactccagtgccttgagatagttggacatattttaggaagattttattgtatttggaaaattacgacacattccatgcatggatcttttgtagttacgtgttttgattagtcctgtcactgtttttatttaaaatgcagtgtcagcaaaccgaaatgctcatttcttttttagtaacagagtactcgtatacttatcactgtatgcactcattgggtctaagggagatgtctgaagtccttcacttaaattattttatgatactactgttttctctatttttgaggttaaaattattttaaaaaaatattttgaagagaagtttattagtataagcattcatttaatgcaaaaaaactcagcccttggacatataaccatgtaattctatatgaacgtttagagtactacatggttgaccaatatctagttctttactaaaagtaaactcacctctttatatatatttcaaaactgaatttgaagcctattagagaccaactgaccttttagttgtaatgaactgtatggtcttgcatggtgacacacctgtgtaggaggccaagacttggcagaggatgtagtctaggtgtcctggtatatataaatggtcactcacttcgtttatatattccacactcagaaaagaagtcagagttttttctgagtaatacaaaaaccatcacttacataatttgtataagaaactttaaacagttttaatcaaaactatgagtaacatcaaaaatgctttaagattctatattttggaatacctgtgaagtagtatgactacatcatgttaaatatttattttcttctatgattttggagcagcaatttttattttaaataaaattccacttttaagaaattcagggaagatttggtcacattgaagatacagtatttttgtagtatttataaactgttctaaatgatagactatagaaaacatttttgtcatatgaaggtaaatcagtccattattttggatcatttaaactgaacattacaccttctgggctttgatttatgaagtggcacagaatctaactttgcactgaatatcttttcattcacatctcctctgccttagtcacaatggcaacagtacagaaaattctatcaaacctcagaatatagtagaaataattaagctgttgaatgagtcttaaaaattatactactgttaagtggaccaagtttggtgaagcagaatgtgacaaaggttgattaaggaaggaacaactcaaggacattgggaatgataacttttccacttgagaactactttatgttttactgtaatttttaaagtttttttgtcctttttgttattttgcaaaagaaaatagtatttacaggtggcttcttttaaaatataaaaatataaagcaggaatgtatatgaaatgtcagattttattgtatttgcagagtattagctttgaaattgaataaagaaagctgtttgtagttttaaaatgccttattggtatcaattagaaatttcttctattttttgatgtacttagagctttttgagtgtagaattttaaatggcaggattttacagtgtttacatgcaagtgcattttataagtgttctatatgtgtaaaatagtattttcaactggaaagtgttggctagtgcaaaaggcctggccattttctggttcccatgatgttgcctacactgctagactacagtttagtatcgctttgtatcatgaggccaagaaattccatgttgtttgtaaatagaataattgaaaaagcaataaacatttattgaacaaaagaaa

SEQ ID NO: 264381 - protein, 325 aa, Artificial Sequence
  derived and/or modified sequence
MVGEMETKEKPKPTPDYLMQLMNDKKLMSSLPNFCGIFNHLERLLDEEISRVRKDMYNDTLNGSTEKRSAELPDAVGPIVQLQEKLYVPVKEYPDFNFVGRILGPRGLTAKQLEAETGCKIMVRGKGSMRDKKKEEQNRGKPNWEHLNEDLHVLITVEDAQNRAEIKLKRAVEEVKKLLVPAAEGEDSLKKMQLMELAILNGTYRDANIKSPALAFSLAATAQAAPRIITGPAPVLPPAALRTPTPAGPTIMPLIRQIQTAVMPNGTPHPTAAIVPPGPEAGLIYTPYEYPYTLAPATSILEYPIEPSGVLEWIEMPVMPDISAH

SEQ ID NO: 264382 - DNA, 978 bp, Artificial Sequence
  derived and/or modified sequence
atggtgggcgagatggagaccaaggagaagcccaagcccacccccgactacctgatgcagctgatgaacgacaagaagctgatgagcagcctgcccaacttctgcggcatcttcaaccacctggagagactgctggacgaggagatcagcagagtgagaaaggacatgtacaacgacaccctgaacggcagcaccgagaagagaagcgccgagctgcccgacgccgtgggccccatcgtgcagctgcaggagaagctgtacgtgcccgtgaaggagtaccccgacttcaacttcgtgggcagaatcctgggccccagaggcctgaccgccaagcagctggaggccgagaccggctgcaagatcatggtgagaggcaagggcagcatgagagacaagaagaaggaggagcagaacagaggcaagcccaactgggagcacctgaacgaggacctgcacgtgctgatcaccgtggaggacgcccagaacagagccgagatcaagctgaagagagccgtggaggaggtgaagaagctgctggtgcccgccgccgagggcgaggacagcctgaagaagatgcagctgatggagctggccatcctgaacggcacctacagagacgccaacatcaagagccccgccctggccttcagcctggccgccaccgcccaggccgcccccagaatcatcaccggccccgcccccgtgctgccccccgccgccctgagaacccccacccccgccggccccaccatcatgcccctgatcagacagatccagaccgccgtgatgcccaacggcaccccccaccccaccgccgccatcgtgccccccggccccgaggccggcctgatctacaccccctacgagtacccctacaccctggcccccgccaccagcatcctggagtaccccatcgagcccagcggcgtgctggagtggatcgagatgcccgtgatgcccgacatcagcgcccactag

SEQ ID NO: 264383 - DNA, 978 bp, Artificial Sequence
  derived and/or modified sequence
atggtgggggagatggagacaaaagaaaagccaaagcccaccccagattacctcatgcaactgatgaacgataagaagctgatgagctccttaccaaacttctgcggcatcttcaatcacctcgaacggctgctggacgaggagatctctcgagttcgtaaggatatgtacaacgatacactgaacgggtctaccgaaaaacggtctgcagagttgcccgacgccgtggggcctatagtgcagctgcaggaaaaactgtatgtcccagtgaaagaataccctgatttcaactttgtaggaaggattctgggtcctcgaggactgaccgccaaacagctggaagcggaaaccggttgcaaaatcatggttaggggtaagggcagcatgagagataagaaaaaagaggaacagaaccgaggcaagcctaattgggaacacctcaatgaggatctacatgtgcttatcaccgtagaggatgcacagaatagagcagagatcaagctgaaacgggccgtcgaagaggtgaaaaagctcctcgtcccggctgctgagggggaggattctctaaagaaaatgcagctgatggaacttgcgattctaaacggcacgtaccgcgatgcgaacattaaaagccctgcgctggcgtttagcctggctgccacggcacaggctgcacctaggatcatcacgggccccgcacctgtgctaccccccgccgccctacgcacaccgaccccagccggtcctactatcatgcccctgatccggcagatccaaactgcggttatgcctaatggaacgccccaccctaccgccgcaatcgttccacctggccctgaggccggccttatttacaccccatatgaatatccgtataccctagccccagccacttccattctggagtaccctattgaacctagcggtgtccttgagtggatcgaaatgcccgtcatgcccgacatctctgcccactag

SEQ ID NO: 264384 - DNA, 978 bp, Artificial Sequence
  derived and/or modified sequence
atggtgggggagatggagaccaaggagaagcccaagcccaccccagactacctgatgcagctgatgaatgacaagaagctgatgagcagcctgcccaacttctgtggcatcttcaaccacctggagcggctgctggatgaggagatcagccgggtgaggaaggacatgtacaatgacaccctgaatggcagcacagagaagaggtctgctgagctgcctgatgctgtgggccccatcgtgcagctgcaggagaagctgtatgtgcctgtgaaggagtacccagacttcaactttgtgggccgcatcctgggcccccggggcctgacagccaagcagctggaggccgagaccggctgcaagatcatggtgcggggcaagggctccatgagggacaagaagaaggaggagcagaacagaggcaagcccaactgggagcacctgaatgaagacctgcacgtgctgatcaccgtggaggatgcccagaacagagctgagatcaagctgaagagagctgtggaggaggtgaagaagctgctggtgcctgctgctgagggggaggacagcctgaagaagatgcagctgatggagctggccatcctgaatggcacctacagagatgccaacatcaagagccctgccctggccttcagcctggccgccacagcccaggccgccccccgcatcatcaccggccctgcccctgtgctgcccccagctgccctgcggacccccaccccagctggccccaccatcatgcccctcatccggcagatccagacagctgtgatgcccaacggcaccccccaccccacagctgccatcgtgcccccaggccctgaggccggcctcatctacaccccctatgagtacccctacaccctggccccagccaccagcatcctggagtaccccatcgagcccagcggcgtgctggagtggattgagatgcctgtgatgccagacatcagcgcccactag

SEQ ID NO: 264385 - DNA, 978 bp, Artificial Sequence
  derived and/or modified sequence
atggtgggcgagatggagaccaaggagaagcccaagcccacccccgattacctgatgcagctcatgaacgataagaaactaatgagctcgctccccaatttttgcgggattttcaatcaccttgaaaggcttttagacgaggagatttccagggtgcgcaaggatatgtacaacgacaccctgaatgggtccaccgaaaaaagatcagccgaactgcctgacgcggtaggccctattgtccaactacaggagaaactgtacgtccccgtgaaggagtacccagacttcaattttgtcggcaggatactgggacccagaggactaacggcaaagcagttagaagccgaaactgggtgcaaaatcatggtgcgaggaaaaggtagcatgcgagataaaaagaaggaagagcagaatcgcgggaagccaaactgggagcatttaaacgaggacctccatgtcctgatcactgtcgaagacgcacagaaccgggccgagattaagctcaagagggctgtcgaggaagtgaaaaaactgctggtacctgccgcagagggcgaggatagcttgaagaaaatgcaactgatggagttagcaatcctgaacggcacataccgagacgcaaatattaagtccccagctttagctttttcattggctgcgactgcacaggccgccccccgcatcataacgggccctgcccctgttctcccgcctgccgctctgcgaacacctacgcctgctggccccaccatcatgcccctgattaggcagatccagaccgccgtgatgccaaacggcaccccacaccctactgcggcaatcgttccacctggcccagaggccggtctgatttacactccatatgaatatccatacacacttgcccccgccacatctatcctcgaatatcctatcgaaccctcgggcgtcctggagtggattgaaatgcctgtgatgcctgacatctcagcgcattag

SEQ ID NO: 264386 - DNA, 978 bp, Artificial Sequence
  derived and/or modified sequence
atggtgggtgagatggagacaaaagagaagcccaagcctacccccgattatttgatgcagctgatgaacgacaaaaagctgatgtccagtctacctaacttctgcgggatctttaaccacttagagaggctactcgacgaagaaatttcaagagtaaggaaagatatgtacaacgatacgctgaacgggtcaaccgagaagagatcagcggagctaccggatgccgtgggccctattgtgcaactacaggaaaaactgtacgttcctgtgaaggaatacccagactttaattttgtgggccgtatcctcggcccacggggattgaccgcaaagcagttagaggcagaaacaggttgtaagatcatggtgagaggcaaaggaagtatgagagataagaagaaagaggagcagaatagagggaagccaaactgggagcatctaaacgaagatctccacgtgctgataaccgtcgaggacgctcagaaccgggctgagataaaactcaagcgggctgtcgaagaagtgaaaaaactcctggtccctgccgctgaaggggaggattcccttaaaaagatgcagttaatggaactcgccatcctgaatggaacttatcgcgacgccaatattaagagcccagccttggcattctccctggcagctacagcacaagccgcacctcgcattatcaccgggccagccccagtactgcctcctgcggctctcaggacacctacgccagcaggtcccaccatcatgcccctcattcggcagatccagactgcagttatgccaaatggaacaccccacccaaccgctgcaattgtgccgccaggcccagaggccggtttgatctatactccatatgagtatccttatacactcgctcctgctactagtatcctcgagtatccgatcgaaccttctggggtgctagagtggattgagatgcctgttatgccagatatatctgctcactag

SEQ ID NO: 264387 - DNA, 6964 bp, Artificial Sequence
  derived and/or modified sequence
tgaactgaggcgaactccgccgccaagtgagtgaggaggaggaggaggagaaggaggaggaggaagaggaggagcgcagtcggagcgcggcggcagcggcagaggcgccgcggcggggaccagcccagagagaccccccgagcccgcggcacaggcggcggcggcgctgagcgggctcgaccagccgagcgagcggcggccccggctcctcctcgtccggcgccagcagcccgcgccccgcgcccgcactcggccagccgagacccgcctcccgcccgcccgccggcctcgtgagggacgcgccgagccgggcggccgagagcggcggcggctgggagcgcgtcgggcccgggcggaaagtgcctgcggggggcgggcgagcgcgcggtgccggccgccccggggctcggcgcgggagccagagcgggagccggcgcggagcgggacgccgggtcccgagcggcccgcggccggggctcgcccccgcccctccctcctctccggcggcggcggcggcggcggcgggcggagtgagctgcggagcctggaatatggtcggggaaatggaaacgaaggagaagccgaagcccaccccagattacctgatgcagctgatgaacgacaagaagctcatgagcagcctgcccaacttctgcgggatcttcaaccacctcgagcggctgctggacgaagaaattagcagagtacggaaagacatgtacaatgacacattaaatggcagtacagagaaaaggagtgcagaattgcctgatgctgtgggacctattgttcagttacaagagaaactttatgtgcctgtaaaagaatacccagattttaattttgttgggagaatccttggacctagaggacttacagccaaacaacttgaagcagaaaccggatgtaaaatcatggtccgaggcaaaggctcaatgagggataaaaaaaaggaggagcaaaatagaggcaagcccaattgggagcatctaaatgaagatttacatgtactaatcactgtggaagatgctcagaacagagcagaaatcaaattgaagagagcagttgaagaagtgaagaaattattggtacctgcagcagaaggagaagacagcctgaagaagatgcagctgatggagcttgcgattctgaatggcacctacagagatgccaacattaaatcaccagcccttgccttttctcttgcagcaacagcccaggctgctccaaggatcattactgggcctgcgccggttctcccaccagctgccctgcgtactcctacgccagctggccctaccataatgcctttgatcagacaaatacagaccgctgtcatgccaaacggaactcctcacccaactgctgcaatagttcctccagggcccgaagctggtttaatctatacaccctatgagtacccctacacattggcaccagctacatcaatccttgagtatcctattgaacctagtggtgtattagagtggattgaaatgccagtcatgcctgatatttcagcccattgacttgctggatgaaggactagaatacagcagctgttataacacgaccagtcaatgtggaacaaactgtttctgtgcaacccctttgttttaccagacaaaatttgaatactttttttcctgaattgtatatgaccttggtgctgcatgcatgctgttgacttttaggactttgatcttttaaggttttttttccccagcattaatattgatttataaagatttgaaaatctttaatgaactggagaacactaagatttaaactcgaaaattcgttgttcaagtaaagaaagccatgatgctctgtatgttatctgtgtgtgtgcatgcactcaggtgccctttgtttcatgaacaaatacatttcattgtacatgttttctgtttaaatcattgtataaagtaattgcaggtcagaattataccacagaactgtttatgagaggcttgtgtctgttgcacatttcttgaagcatttttaaaataacatgtaacctgtaaccttgttgtttaagttttcttttctattaatactctgtcctgtggtcccgtgcatgctccttttcccagaactcctctctgctgcacccacagcatctgttcccgaggagttatgactcttgacttcctgcagggctggggctcttagccaccagctgctgttccagcactttcagcgcaagatctccctgattttgccacgtggaattgtacttgtatatgattaccttatctaaaatgaataagaggtgatggaccagtttactgcttagaaatagcaagaggcactgcagtaaaacttgtttctcattgtaaagcttcatgtcttttgtttgttggaaaatttttacttatagaaacttaattattagactggtaaaataaagaccaaaatatgcagatttctaattggcattcataaggtgaataataataagtgcccaatgaaaaaatctattatggttaatttcatttcttgctttgccacctaagcagtaaaacatgatattgaccacttggagaactcagaaaattattttaaatttctaagttataataaatttgcacacagataacatgcatgctatttatgtcacatctcacattaaattattttaaaataagcagtgcccttcaaaacagatgcagacatgtgtgttggtagtagtgaggagattggtattagcatcaagtcttcattgatgactaatttttaattcccttccttttatctttaggtatggctttcccaacgaaaggctaagaattcaagaacggtcttaactgaaccctcatcagatctgaatttaacaaatgcttagtctcagcagcctccgggggaaaaaagcttagcctagcagtcagtgacttacttgcactttttgcacatagatataaagtaaaattatgttattaatttggtttagtctgtaatattacacagtaatggtaatttataaaggagtgtatagtagtatactgactgctaagtgtactatactgtttgctttactaatcacctaattcattgcagttcatacttattgactcagagtttaaaaccacaatctgtaggctttaagaattgcttttaaacctttttaagtgataaactcttgaagtggtcttaaggttagcaaataattgtctgtattaaacatggcgttatttaagtagtcctgctgcaagaaaggcacttcagtgaatatgtgactagtaaagcttaaatatgtttggatctaatagagctcatgaaatactgtaacttggggattgtaaatgaatggatacaataggttaaggcccaagatgtttgaaatgaatgcaatattaatagatgcatatatacatgacatattgtggttaattttaaaactactgtgccttaacgtgtttcttaaacttttgtagtaaatgaacatttgaaatccattttgataaacctgctgttaatgttttttccccccttgtgaatgttttctaactttgtcttggtaattgcaatttaactaggtgcggtggctactaaagttcgaaggcacgatatgcgtgtccatccttaccaaaggattgtgaccgcagaccgaggttagtttagttctgcagttcttgtctataagaaatgcgttgggtgtccataaaatttgcaacaccacacctgatggaaaaatgtaattgcttacctgcacacagttttttttccttttctaaatttgtttgtgatcattgacagatttaagggttgggttttttgttttggtttggttttttctcccttcatattttaacttattaaatcttctattattatgtactatgatttattcctactaaaacataaattagtcaatttggggagctattaaattttgatgttgcctcagttattttcattaataacttttgctaaaatttaccttttaaaagttctgaaatttggggttggtattgcaaaatgaattgaacggatggtgctttaatgagagaagtaaaggaatatatgcctcctgtgtacttttggagaaaactgaagatttagtttccatttttctttataataaaatatttgagccactgtataaacatgagggtgcacatgtcaagtacttagctaaaatcaacaaagtgaggactgtgaagataactttcatgtagttggatttttttatataaattagagcgtcaattcccttttattcttacattctcttgccaaaatggatcctttgatttttgtcatttgctgctaaaatatattatctgaaggtaaactgtctcttgaagttctgtggtggtatgagatccagctgtgtgaatataatttttgactaacctgtgactggaaaataagtcttcatttttctcctttacaacttttataatttgtgtcctgtatatgcccttggacccttttataaattatttttgcttattgaggaatggtattttcggtttattgacattgaattgttttctaagtttttccatcacaagataggaatatcaagcatggtagtaaaaaaggattttttacaagtttctattatggcacatttgtttcctacaaattaaattgatcaaagtctcaaatattagtggaggaaaaagtgctggatttgtacttcaattgtacatcttctatgaatttatgaaggacctacctgctttatgtgattaccttgagtactgatgataaatactagacacagctgttgtccacatcagaaataacatgcctttcccaaagacattgttaatatttgtttagcataatccataaagaacgttgaagacttttaaactaatgtattcatcactaacagtgattgttcagtgaacaaaatagaccccagctccgtggtcgtctatgaggatggtattccttgtaagtgttctgtatgagcacgtctcatagggatggggaagttttttggaaagtcacttgagttttaaagaaactggacaattccatgaataatttgaggttttattcatattgctaatgtctacaattgttctaaagagtattttaaagtagtttttttcccccagctaatctttccctatgtatgcccccttttaggagatttctcaccattttgctttaacacaataattattggcctacttaatactccagtgccttgagatagttggacatattttaggaagattttattgtatttggaaaattacgacacattccatgcatggatcttttgtagttacgtgttttgattagtcctgtcactgtttttatttaaaatgcagtgtcagcaaaccgaaatgctcatttcttttttagtaacagagtactcgtatacttatcactgtatgcactcattgggtctaagggagatgtctgaagtccttcacttaaattattttatgatactactgttttctctatttttgaggttaaaattattttaaaaaaatattttgaagagaagtttattagtataagcattcatttaatgcaaaaaaactcagcccttggacatataaccatgtaattctatatgaacgtttagagtactacatggttgaccaatatctagttctttactaaaagtaaactcacctctttatatatatttcaaaactgaatttgaagcctattagagaccaactgaccttttagttgtaatgaactgtatggtcttgcatggtgacacacctgtgtaggaggccaagacttggcagaggatgtagtctaggtgtcctggtatatataaatggtcactcacttcgtttatatattccacactcagaaaagaagtcagagttttttctgagtaatacaaaaaccatcacttacataatttgtataagaaactttaaacagttttaatcaaaactatgagtaacatcaaaaatgctttaagattctatattttggaatacctgtgaagtagtatgactacatcatgttaaatatttattttcttctatgattttggagcagcaatttttattttaaataaaattccacttttaagaaattcagggaagatttggtcacattgaagatacagtatttttgtagtatttataaactgttctaaatgatagactatagaaaacatttttgtcatatgaaggtaaatcagtccattattttggatcatttaaactgaacattacaccttctgggctttgatttatgaagtggcacagaatctaactttgcactgaatatcttttcattcacatctcctctgccttagtcacaatggcaacagtacagaaaattctatcaaacctcagaatatagtagaaataattaagctgttgaatgagtcttaaaaattatactactgttaagtggaccaagtttggtgaagcagaatgtgacaaaggttgattaaggaaggaacaactcaaggacattgggaatgataacttttccacttgagaactactttatgttttactgtaatttttaaagtttttttgtcctttttgttattttgcaaaagaaaatagtatttacaggtggcttcttttaaaatataaaaatataaagcaggaatgtatatgaaatgtcagattttattgtatttgcagagtattagctttgaaattgaataaagaaagctgtttgtagttttaaaatgccttattggtatcaattagaaatttcttctattttttgatgtacttagagctttttgagtgtagaattttaaatggcaggattttacagtgtttacatgcaagtgcattttataagtgttctatatgtgtaaaatagtattttcaactggaaagtgttggctagtgcaaaaggcctggccattttctggttcccatgatgttgcctacactgctagactacagtttagtatcgctttgtatcatgaggccaagaaattccatgttgtttgtaaatagaataattgaaaaagcaataaacatttattgaacaaaagaaa

SEQ ID NO: 264388 - protein, 319 aa, Artificial Sequence
  derived and/or modified sequence
MVGEMETKEKPKPTPDYLMQLMNDKKLMSSLPNFCGIFNHLERLLDEEISRVRKDMYNDTLNGSTEKRSAELPDAVGPIVQLQEKLYVPVKEYPDFNFVGRILGPRGLTAKQLEAETGCKIMVRGKGSMRDKKKEEQNRGKPNWEHLNEDLHVLITVEDAQNRAEIKLKRAVEEVKKLLVPAAEGEDSLKKMQLMELAILNGTYRDANIKSPALAFSLAATAQAAPRIITGPAPVLPPAALRTPTPAGPTIMPLIRQIQTAVMPNGTPHPTAAIVPPGPEAGLIYTPYEYPYTLAPATSILEYPIEPSGVLGKFFSPWG

SEQ ID NO: 264389 - DNA, 960 bp, Artificial Sequence
  derived and/or modified sequence
atggtgggcgagatggagaccaaggagaagcccaagcccacccccgactacctgatgcagctgatgaacgacaagaagctgatgagcagcctgcccaacttctgcggcatcttcaaccacctggagagactgctggacgaggagatcagcagagtgagaaaggacatgtacaacgacaccctgaacggcagcaccgagaagagaagcgccgagctgcccgacgccgtgggccccatcgtgcagctgcaggagaagctgtacgtgcccgtgaaggagtaccccgacttcaacttcgtgggcagaatcctgggccccagaggcctgaccgccaagcagctggaggccgagaccggctgcaagatcatggtgagaggcaagggcagcatgagagacaagaagaaggaggagcagaacagaggcaagcccaactgggagcacctgaacgaggacctgcacgtgctgatcaccgtggaggacgcccagaacagagccgagatcaagctgaagagagccgtggaggaggtgaagaagctgctggtgcccgccgccgagggcgaggacagcctgaagaagatgcagctgatggagctggccatcctgaacggcacctacagagacgccaacatcaagagccccgccctggccttcagcctggccgccaccgcccaggccgcccccagaatcatcaccggccccgcccccgtgctgccccccgccgccctgagaacccccacccccgccggccccaccatcatgcccctgatcagacagatccagaccgccgtgatgcccaacggcaccccccaccccaccgccgccatcgtgccccccggccccgaggccggcctgatctacaccccctacgagtacccctacaccctggcccccgccaccagcatcctggagtaccccatcgagcccagcggcgtgctgggcaagttcttcagcccctggggctag

SEQ ID NO: 264390 - DNA, 960 bp, Artificial Sequence
  derived and/or modified sequence
atggtaggtgagatggagacaaaggagaagccaaagccaactccagattacctgatgcagttgatgaacgataaaaagttaatgtcatcacttccaaatttctgtggaatttttaatcacctggaacgcttgcttgatgaggaaatctctcgcgtgcgtaaggacatgtacaatgacaccctcaacggctctacagaaaagcgctccgcagaactccctgacgcagtgggccctatagttcagctgcaggaaaaactgtatgtacccgtaaaggaataccccgacttcaatttcgtgggcagaatacttggcccaaggggcctgactgccaagcaattggaggcagaaacgggatgcaaaattatggttagaggcaaagggagcatgcgggacaagaagaaggaagagcaaaaccgaggcaagcccaactgggagcacctaaatgaggacctccacgtgcttattaccgtcgaggatgctcagaatcgcgctgaaatcaagctcaagcgcgcagtggaggaggtgaaaaagttgttggtccctgccgcagaaggtgaggatagccttaagaaaatgcagctgatggagctggcaattctcaacggtacctaccgggacgctaatataaaaagcccggctctggccttctctctggctgctactgcgcaggcggcacccagaatcatcaccggccccgcccccgtcctccctccagccgccctgaggactcctacaccagctggccctactataatgcccctgatcagacaaattcaaacggctgtcatgcccaacgggacgccccatccaaccgcggcgatagttcctcctggtcccgaggcaggcctgatatacacaccctacgagtacccatacaccctggctcccgctacatctattttagaatatcccattgaaccttccggagtcctgggcaaattctttagcccatggggttag

SEQ ID NO: 264391 - DNA, 960 bp, Artificial Sequence
  derived and/or modified sequence
atggtgggggagatggagaccaaggagaagcccaagcccaccccagactacctgatgcagctgatgaatgacaagaagctgatgagcagcctgcccaacttctgtggcatcttcaaccacctggagcggctgctggatgaggagatcagccgggtgaggaaggacatgtacaatgacaccctgaatggcagcacagagaagaggtctgctgagctgcctgatgctgtgggccccatcgtgcagctgcaggagaagctgtatgtgcctgtgaaggagtacccagacttcaactttgtgggccgcatcctgggcccccggggcctgacagccaagcagctggaggccgagaccggctgcaagatcatggtgcggggcaagggctccatgagggacaagaagaaggaggagcagaacagaggcaagcccaactgggagcacctgaatgaagacctgcacgtgctgatcaccgtggaggatgcccagaacagagctgagatcaagctgaagagagctgtggaggaggtgaagaagctgctggtgcctgctgctgagggggaggacagcctgaagaagatgcagctgatggagctggccatcctgaatggcacctacagagatgccaacatcaagagccctgccctggccttcagcctggccgccacagcccaggccgccccccgcatcatcaccggccctgcccctgtgctgcccccagctgccctgcggacccccaccccagctggccccaccatcatgcccctcatccggcagatccagacagctgtgatgcccaacggcaccccccaccccacagctgccatcgtgcccccaggccctgaggccggcctcatctacaccccctatgagtacccctacaccctggccccagccaccagcatcctggagtaccccatcgagcccagcggcgtgctgggcaagttcttcagcccctggggctag

SEQ ID NO: 264392 - DNA, 960 bp, Artificial Sequence
  derived and/or modified sequence
atggtgggcgagatggagaccaaggagaagcccaagcccacccccgattatctgatgcagctgatgaatgacaagaaactgatgagcagtttgcccaacttctgtggtatctttaatcaccttgaacgcctgctggacgaagagatctctcgggtgagaaaggacatgtataatgatacactcaatggctccacagagaagcgcagcgccgagctccctgatgccgtgggcccaattgttcagttgcaagaaaaactctatgtgcccgtgaaggagtatcctgacttcaactttgtggggcgaatccttggacctcgcggcctgactgcaaagcagctcgaggcggagactggatgcaagataatggtgagggggaaaggctcaatgcgagataaaaagaaggaagagcagaatagggggaagccaaattgggagcacctgaacgaagacctgcacgtgttgattacagtagaggatgcccagaatagagcagagatcaagctgaaaagggcagtcgaagaggtcaagaagttgttagtgccagctgctgagggggaggacagcctcaagaagatgcagctgatggagttagccatcctgaatggcacttaccgtgacgctaacatcaaaagccctgctctggcatttagcctagcagccaccgctcaggctgccccgagaataataaccggtcccgccccggtgctcccccccgctgccctccggaccccgacaccggcaggacctacgattatgccccttatcaggcaaattcagacggccgtcatgcctaacggaaccccccatccaaccgctgccatcgttccccctgggccagaagctggcctaatctatactccctatgagtatccctacacactggcccctgcaacatcgatactggagtacccaatcgagccctctggggtgctcggcaagtttttctctccatggggctag

SEQ ID NO: 264393 - DNA, 960 bp, Artificial Sequence
  derived and/or modified sequence
atggtgggagaaatggaaacaaaggaaaagccaaaaccaaccccagattacctcatgcagttgatgaacgacaagaagcttatgagttccctgcctaatttttgcggaatatttaatcacctggaacggctgctggatgaagaaattagccgtgtcagaaaagacatgtataacgacaccctgaacgggtccacggaaaaacgcagcgcagaactcccagacgccgtgggtccaattgtacagttacaggaaaagttgtacgtaccagtgaaggaataccccgacttcaactttgtgggacgcatcctaggcccaaggggcctgaccgccaaacaattggaggccgaaaccggctgtaaaataatggtgcgcggaaaaggctccatgagggacaagaaaaaggaggagcagaacaggggcaaacccaattgggaacatttgaacgaggacctgcacgtactgatcacagtagaggatgctcagaaccgagccgaaatcaaactgaaaagagctgtagaggaggtcaaaaaattgctggtcccagccgcagaaggcgaggatagcctgaaaaagatgcagctgatggagttagctatcctgaatggcacttatagagatgccaacattaagtcaccagccctcgccttcagtttagcagcaactgcacaagccgcacctcgtatcattaccgggcctgccccagtgctgcccccagctgctctgaggacaccaactccagcaggacctaccatcatgccactcattcgccaaatccaaaccgctgtcatgcccaacgggaccccccaccctacagccgctattgtccccccaggtcctgaggcgggactgatctatacaccatacgaatatccttacactctcgcacccgctacctccatcttagagtacccgattgagccatccggggtgctgggaaaatttttcagcccttggggctag

SEQ ID NO: 264394 - DNA, 7911 bp, Artificial Sequence
  derived and/or modified sequence
tgaactgaggcgaactccgccgccaagtgagtgaggaggaggaggaggagaaggaggaggaggaagaggaggagcgcagtcggagcgcggcggcagcggcagaggcgccgcggcggggaccagcccagagagaccccccgagcccgcggcacaggcggcggcggcgctgagcgggctcgaccagccgagcgagcggcggccccggctcctcctcgtccggcgccagcagcccgcgccccgcgcccgcactcggccagccgagacccgcctcccgcccgcccgccggcctcgtgagggacgcgccgagccgggcggccgagagcggcggcggctgggagcgcgtcgggcccgggcggaaagtgcctgcggggggcgggcgagcgcgcggtgccggccgccccggggctcggcgcgggagccagagcgggagccggcgcggagcgggacgccgggtcccgagcggcccgcggccggggctcgcccccgcccctccctcctctccggcggcggcggcggcggcggcgggcggagtgagctgcggagcctggaatatggtcggggaaatggaaacgaaggagaagccgaagcccaccccagattacctgatgcagctgatgaacgacaagaagctcatgagcagcctgcccaacttctgcgggatcttcaaccacctcgagcggctgctggacgaagaaattagcagagtacggaaagacatgtacaatgacacattaaatggcagtacagagaaaaggagtgcagaattgcctgatgctgtgggacctattgttcagttacaagagaaactttatgtgcctgtaaaagaatacccagattttaattttgttgggagaatccttggacctagaggacttacagccaaacaacttgaagcagaaaccggatgtaaaatcatggtccgaggcaaaggctcaatgagggataaaaaaaaggaggagcaaaatagaggcaagcccaattgggagcatctaaatgaagatttacatgtactaatcactgtggaagatgctcagaacagagcagaaatcaaattgaagagagcagttgaagaagtgaagaaattattggtacctgcagcagaaggagaagacagcctgaagaagatgcagctgatggagcttgcgattctgaatggcacctacagagatgccaacattaaatcaccagcccttgccttttctcttgcagcaacagcccaggctgctccaaggatcattactgggcctgcgccggttctcccaccagctgccctgcgtactcctacgccagctggccctaccataatgcctttgatcagacaaatacagaccgctgtcatgccaaacggaactcctcacccaactgctgcaatagttcctccagggcccgaagctggtttaatctatacaccctatgagtacccctacacattggcaccagctacatcaatccttgagtatcctattgaacctagtggtgtattaggtaagttcttctccccatggggttaacaacattctctttataaatatttttgctccctcagattttgaaatgattttatcagttttagagaggcaagacaagtttgcattagggaagaccgaaaactaaattttgttttatttcagcctctcataagggttcccctttgaaataattgcaccttaaatttattcagatccactttggtaactgaggttcagtttggttgggtaaatctgttgtgtacatttcaacaaatacttttacatttgacattactgaggtcattctgagttttaggtcccaccccattggcccgtcacctccatcagctccacttctcaaactttatttgagatttattttatctcacaggtttgtgtaattgttggaaaatttttaaacttctaagtgaaagtagtctgagcgctttataaaattcatattattgtgtgtgttttgtaatatttgcgatcacttaaaatatcagataaatacagtcatgcatcgcttaacaacggggatacagtctaagaattgccttgtctggcagtttcatcatttggtgtacatcatagagtgtacttacacagacatagatgatatcgtttactacacacctaggctgtgtggtatagccattataatcttatgggaccacatagtataagtggtccgttgttgaccaaaatgttgttatgcaggcatgactgtagttgtattcttaagatttttcagttcttgtgttttggagtcctagtcatattaaacatgagagatactcttaatttcagtagtacagtatggaatagttaaataaatagcaaatcactgaattcagaatctcacttaaggcagaaattaaaatcataatataaacgcttggttttacatgaacaaaaagtggtgtgctcgaaaaagacattactgatgccttttttttatagagtggattgaaatgccagtcatgcctgatatttcagcccattgacttgctggatgaaggactagaatacagcagctgttataacacgaccagtcaatgtggaacaaactgtttctgtgcaacccctttgttttaccagacaaaatttgaatactttttttcctgaattgtatatgaccttggtgctgcatgcatgctgttgacttttaggactttgatcttttaaggttttttttccccagcattaatattgatttataaagatttgaaaatctttaatgaactggagaacactaagatttaaactcgaaaattcgttgttcaagtaaagaaagccatgatgctctgtatgttatctgtgtgtgtgcatgcactcaggtgccctttgtttcatgaacaaatacatttcattgtacatgttttctgtttaaatcattgtataaagtaattgcaggtcagaattataccacagaactgtttatgagaggcttgtgtctgttgcacatttcttgaagcatttttaaaataacatgtaacctgtaaccttgttgtttaagttttcttttctattaatactctgtcctgtggtcccgtgcatgctccttttcccagaactcctctctgctgcacccacagcatctgttcccgaggagttatgactcttgacttcctgcagggctggggctcttagccaccagctgctgttccagcactttcagcgcaagatctccctgattttgccacgtggaattgtacttgtatatgattaccttatctaaaatgaataagaggtgatggaccagtttactgcttagaaatagcaagaggcactgcagtaaaacttgtttctcattgtaaagcttcatgtcttttgtttgttggaaaatttttacttatagaaacttaattattagactggtaaaataaagaccaaaatatgcagatttctaattggcattcataaggtgaataataataagtgcccaatgaaaaaatctattatggttaatttcatttcttgctttgccacctaagcagtaaaacatgatattgaccacttggagaactcagaaaattattttaaatttctaagttataataaatttgcacacagataacatgcatgctatttatgtcacatctcacattaaattattttaaaataagcagtgcccttcaaaacagatgcagacatgtgtgttggtagtagtgaggagattggtattagcatcaagtcttcattgatgactaatttttaattcccttccttttatctttaggtatggctttcccaacgaaaggctaagaattcaagaacggtcttaactgaaccctcatcagatctgaatttaacaaatgcttagtctcagcagcctccgggggaaaaaagcttagcctagcagtcagtgacttacttgcactttttgcacatagatataaagtaaaattatgttattaatttggtttagtctgtaatattacacagtaatggtaatttataaaggagtgtatagtagtatactgactgctaagtgtactatactgtttgctttactaatcacctaattcattgcagttcatacttattgactcagagtttaaaaccacaatctgtaggctttaagaattgcttttaaacctttttaagtgataaactcttgaagtggtcttaaggttagcaaataattgtctgtattaaacatggcgttatttaagtagtcctgctgcaagaaaggcacttcagtgaatatgtgactagtaaagcttaaatatgtttggatctaatagagctcatgaaatactgtaacttggggattgtaaatgaatggatacaataggttaaggcccaagatgtttgaaatgaatgcaatattaatagatgcatatatacatgacatattgtggttaattttaaaactactgtgccttaacgtgtttcttaaacttttgtagtaaatgaacatttgaaatccattttgataaacctgctgttaatgttttttccccccttgtgaatgttttctaactttgtcttggtaattgcaatttaactaggtgcggtggctactaaagttcgaaggcacgatatgcgtgtccatccttaccaaaggattgtgaccgcagaccgaggttagtttagttctgcagttcttgtctataagaaatgcgttgggtgtccataaaatttgcaacaccacacctgatggaaaaatgtaattgcttacctgcacacagttttttttccttttctaaatttgtttgtgatcattgacagatttaagggttgggttttttgttttggtttggttttttctcccttcatattttaacttattaaatcttctattattatgtactatgatttattcctactaaaacataaattagtcaatttggggagctattaaattttgatgttgcctcagttattttcattaataacttttgctaaaatttaccttttaaaagttctgaaatttggggttggtattgcaaaatgaattgaacggatggtgctttaatgagagaagtaaaggaatatatgcctcctgtgtacttttggagaaaactgaagatttagtttccatttttctttataataaaatatttgagccactgtataaacatgagggtgcacatgtcaagtacttagctaaaatcaacaaagtgaggactgtgaagataactttcatgtagttggatttttttatataaattagagcgtcaattcccttttattcttacattctcttgccaaaatggatcctttgatttttgtcatttgctgctaaaatatattatctgaaggtaaactgtctcttgaagttctgtggtggtatgagatccagctgtgtgaatataatttttgactaacctgtgactggaaaataagtcttcatttttctcctttacaacttttataatttgtgtcctgtatatgcccttggacccttttataaattatttttgcttattgaggaatggtattttcggtttattgacattgaattgttttctaagtttttccatcacaagataggaatatcaagcatggtagtaaaaaaggattttttacaagtttctattatggcacatttgtttcctacaaattaaattgatcaaagtctcaaatattagtggaggaaaaagtgctggatttgtacttcaattgtacatcttctatgaatttatgaaggacctacctgctttatgtgattaccttgagtactgatgataaatactagacacagctgttgtccacatcagaaataacatgcctttcccaaagacattgttaatatttgtttagcataatccataaagaacgttgaagacttttaaactaatgtattcatcactaacagtgattgttcagtgaacaaaatagaccccagctccgtggtcgtctatgaggatggtattccttgtaagtgttctgtatgagcacgtctcatagggatggggaagttttttggaaagtcacttgagttttaaagaaactggacaattccatgaataatttgaggttttattcatattgctaatgtctacaattgttctaaagagtattttaaagtagtttttttcccccagctaatctttccctatgtatgcccccttttaggagatttctcaccattttgctttaacacaataattattggcctacttaatactccagtgccttgagatagttggacatattttaggaagattttattgtatttggaaaattacgacacattccatgcatggatcttttgtagttacgtgttttgattagtcctgtcactgtttttatttaaaatgcagtgtcagcaaaccgaaatgctcatttcttttttagtaacagagtactcgtatacttatcactgtatgcactcattgggtctaagggagatgtctgaagtccttcacttaaattattttatgatactactgttttctctatttttgaggttaaaattattttaaaaaaatattttgaagagaagtttattagtataagcattcatttaatgcaaaaaaactcagcccttggacatataaccatgtaattctatatgaacgtttagagtactacatggttgaccaatatctagttctttactaaaagtaaactcacctctttatatatatttcaaaactgaatttgaagcctattagagaccaactgaccttttagttgtaatgaactgtatggtcttgcatggtgacacacctgtgtaggaggccaagacttggcagaggatgtagtctaggtgtcctggtatatataaatggtcactcacttcgtttatatattccacactcagaaaagaagtcagagttttttctgagtaatacaaaaaccatcacttacataatttgtataagaaactttaaacagttttaatcaaaactatgagtaacatcaaaaatgctttaagattctatattttggaatacctgtgaagtagtatgactacatcatgttaaatatttattttcttctatgattttggagcagcaatttttattttaaataaaattccacttttaagaaattcagggaagatttggtcacattgaagatacagtatttttgtagtatttataaactgttctaaatgatagactatagaaaacatttttgtcatatgaaggtaaatcagtccattattttggatcatttaaactgaacattacaccttctgggctttgatttatgaagtggcacagaatctaactttgcactgaatatcttttcattcacatctcctctgccttagtcacaatggcaacagtacagaaaattctatcaaacctcagaatatagtagaaataattaagctgttgaatgagtcttaaaaattatactactgttaagtggaccaagtttggtgaagcagaatgtgacaaaggttgattaaggaaggaacaactcaaggacattgggaatgataacttttccacttgagaactactttatgttttactgtaatttttaaagtttttttgtcctttttgttattttgcaaaagaaaatagtatttacaggtggcttcttttaaaatataaaaatataaagcaggaatgtatatgaaatgtcagattttattgtatttgcagagtattagctttgaaattgaataaagaaagctgtttgtagttttaaaatgccttattggtatcaattagaaatttcttctattttttgatgtacttagagctttttgagtgtagaattttaaatggcaggattttacagtgtttacatgcaagtgcattttataagtgttctatatgtgtaaaatagtattttcaactggaaagtgttggctagtgcaaaaggcctggccattttctggttcccatgatgttgcctacactgctagactacagtttagtatcgctttgtatcatgaggccaagaaattccatgttgtttgtaaatagaataattgaaaaagcaataaacatttattgaacaaaagaaa

SEQ ID NO: 264395 - protein, 996 aa, Artificial Sequence
  derived and/or modified sequence
MGGSQSLQPAPASDLNLEASEAMSSDSEEAFETPESTTPVKAPPAPPPPPPEVIPEPEVSTQPPPEEPGCGSETVPVPDGPRSDSVEGSPFRPPSHSFSAVFDEDKPIASSGTYNLDFDNIELVDTFQTLEPRASDAKNQEGKVNTRRKSTDSVPISKSTLSRSLSLQASDFDGASSSGNPEAVALAPDAYSTGSSSASSTLKRTKKPRPPSLKKKQTTKKPTETPPVKETQQEPDEESLVPSGENLASETKTESAKTEGPSPALLEETPLEPAVGPKAACPLDSESAEGVVPPASGGGRVQNSPPVGRKTLPLTTAPEAGEVTPSDSGGQEDSPAKGLSVRLEFDYSEDKSSWDNQQENPPPTKKIGKKPVAKMPLRRPKMKKTPEKLDNTPASPPRSPAEPNDIPIAKGTYTFDIDKWDDPNFNPFSSTSKMQESPKLPQQSYNFDPDTCDESVDPFKTSSKTPSSPSKSPASFEIPASAMEANGVDGDGLNKPAKKKKTPLKTDTFRVKKSPKRSPLSDPPSQDPTPAATPETPPVISAVVHATDEEKLAVTNQKWTCMTVDLEADKQDYPQPSDLSTFVNETKFSSPTEELDYRNSYEIEYMEKIGSSLPQDDDAPKKQALYLMFDTSQESPVKSSPVRMSESPTPCSGSSFEETEALVNTAAKNQHPVPRGLAPNQESHLQVPEKSSQKELEAMGLGTPSEAIEITAPEGSFASADALLSRLAHPVSLCGALDYLEPDLAEKNPPLFAQKLQREAAHPTDVSISKTALYSRIGTAEVEKPAGLLFQQPDLDSALQIARAEIITKEREVSEWKDKYEESRREVMEMRKIVAEYEKTIAQMIEDEQREKSVSHQTVQQLVLEKEQALADLNSVEKSLADLFRRYEKMKEVLEGFRKNEEVLKRCAQEYLSRVKKEEQRYQALKVHAEEKLDRANAEIAQVRGKAQQEQAAHQASLRKEQLRVDALERTLEQKNKEIEELTKICDELIAKMGKS

SEQ ID NO: 264396 - DNA, 2991 bp, Artificial Sequence
  derived and/or modified sequence
atgggcggcagccagagcctgcagcccgcccccgccagcgacctgaacctggaggccagcgaggccatgagcagcgacagcgaggaggccttcgagacccccgagagcaccacccccgtgaaggccccccccgccccccccccccccccccccgaggtgatccccgagcccgaggtgagcacccagcccccccccgaggagcccggctgcggcagcgagaccgtgcccgtgcccgacggccccagaagcgacagcgtggagggcagccccttcagaccccccagccacagcttcagcgccgtgttcgacgaggacaagcccatcgccagcagcggcacctacaacctggacttcgacaacatcgagctggtggacaccttccagaccctggagcccagagccagcgacgccaagaaccaggagggcaaggtgaacaccagaagaaagagcaccgacagcgtgcccatcagcaagagcaccctgagcagaagcctgagcctgcaggccagcgacttcgacggcgccagcagcagcggcaaccccgaggccgtggccctggcccccgacgcctacagcaccggcagcagcagcgccagcagcaccctgaagagaaccaagaagcccagaccccccagcctgaagaagaagcagaccaccaagaagcccaccgagaccccccccgtgaaggagacccagcaggagcccgacgaggagagcctggtgcccagcggcgagaacctggccagcgagaccaagaccgagagcgccaagaccgagggccccagccccgccctgctggaggagacccccctggagcccgccgtgggccccaaggccgcctgccccctggacagcgagagcgccgagggcgtggtgccccccgccagcggcggcggcagagtgcagaacagcccccccgtgggcagaaagaccctgcccctgaccaccgcccccgaggccggcgaggtgacccccagcgacagcggcggccaggaggacagccccgccaagggcctgagcgtgagactggagttcgactacagcgaggacaagagcagctgggacaaccagcaggagaaccccccccccaccaagaagatcggcaagaagcccgtggccaagatgcccctgagaagacccaagatgaagaagacccccgagaagctggacaacacccccgccagcccccccagaagccccgccgagcccaacgacatccccatcgccaagggcacctacaccttcgacatcgacaagtgggacgaccccaacttcaaccccttcagcagcaccagcaagatgcaggagagccccaagctgccccagcagagctacaacttcgaccccgacacctgcgacgagagcgtggaccccttcaagaccagcagcaagacccccagcagccccagcaagagccccgccagcttcgagatccccgccagcgccatggaggccaacggcgtggacggcgacggcctgaacaagcccgccaagaagaagaagacccccctgaagaccgacaccttcagagtgaagaagagccccaagagaagccccctgagcgacccccccagccaggaccccacccccgccgccacccccgagaccccccccgtgatcagcgccgtggtgcacgccaccgacgaggagaagctggccgtgaccaaccagaagtggacctgcatgaccgtggacctggaggccgacaagcaggactacccccagcccagcgacctgagcaccttcgtgaacgagaccaagttcagcagccccaccgaggagctggactacagaaacagctacgagatcgagtacatggagaagatcggcagcagcctgccccaggacgacgacgcccccaagaagcaggccctgtacctgatgttcgacaccagccaggagagccccgtgaagagcagccccgtgagaatgagcgagagccccaccccctgcagcggcagcagcttcgaggagaccgaggccctggtgaacaccgccgccaagaaccagcaccccgtgcccagaggcctggcccccaaccaggagagccacctgcaggtgcccgagaagagcagccagaaggagctggaggccatgggcctgggcacccccagcgaggccatcgagatcaccgcccccgagggcagcttcgccagcgccgacgccctgctgagcagactggcccaccccgtgagcctgtgcggcgccctggactacctggagcccgacctggccgagaagaacccccccctgttcgcccagaagctgcagagagaggccgcccaccccaccgacgtgagcatcagcaagaccgccctgtacagcagaatcggcaccgccgaggtggagaagcccgccggcctgctgttccagcagcccgacctggacagcgccctgcagatcgccagagccgagatcatcaccaaggagagagaggtgagcgagtggaaggacaagtacgaggagagcagaagagaggtgatggagatgagaaagatcgtggccgagtacgagaagaccatcgcccagatgatcgaggacgagcagagagagaagagcgtgagccaccagaccgtgcagcagctggtgctggagaaggagcaggccctggccgacctgaacagcgtggagaagagcctggccgacctgttcagaagatacgagaagatgaaggaggtgctggagggcttcagaaagaacgaggaggtgctgaagagatgcgcccaggagtacctgagcagagtgaagaaggaggagcagagataccaggccctgaaggtgcacgccgaggagaagctggacagagccaacgccgagatcgcccaggtgagaggcaaggcccagcaggagcaggccgcccaccaggccagcctgagaaaggagcagctgagagtggacgccctggagagaaccctggagcagaagaacaaggagatcgaggagctgaccaagatctgcgacgagctgatcgccaagatgggcaagagctag

SEQ ID NO: 264397 - DNA, 2991 bp, Artificial Sequence
  derived and/or modified sequence
atgggcggcagtcagtcactgcagccagccccagccagcgatctaaaccttgaagcctccgaagctatgtccagtgatagcgaagaggcattcgagacgcctgaaagtacaacccccgttaaagctcccccagcaccgcctccacctccccccgaggtcatccctgaacctgaagtatccactcagccccctcctgaggaaccagggtgtgggagtgagaccgtacctgttccggacgggccacgaagcgactcagtggaaggcagcccctttcgcccaccgtcccacagtttctcagctgtctttgatgaagacaagcccattgcgtctagtggcacgtataatcttgattttgacaatattgaactggtggacacattccagacattggagccccgtgcgagcgatgctaaaaatcaggagggcaaggtaaatacacggaggaaaagtactgactcagtgccaatctccaagagcacactgtccaggagcctatctctccaagccagtgacttcgacggcgctagctctagcggaaacccagaggcagttgcgcttgcccccgacgcatatagtaccggctcaagttcagcctctagtaccctcaagcggacgaagaaaccgcgccccccttcgcttaagaaaaagcaaaccactaaaaaaccaaccgaaacccccccagtcaaggaaacacagcaggagcctgacgaggagtcattagtcccctccggggagaacctggcgtcagaaaccaaaacagagtctgccaagacggaggggccaagccccgccttgctggaggaaactcccttggagccagccgtggggccaaaggccgcatgtcccctggattctgaaagtgctgagggagtggtcccccctgcttcaggcggcggccgtgtgcagaacagcccgcctgtgggacggaagactctgcccttgacaactgccccggaggccggcgaggtaactccttctgacagtggcgggcaggaagacagcccagcgaagggacttagcgttcgcttagagtttgattattctgaggacaagtcatcgtgggacaatcagcaggagaaccccccacccaccaagaaaattggaaagaagcctgtagctaagatgccccttcgccgccccaagatgaaaaagacacctgagaagttggataacacaccagcgagcccacctagatctcccgcagaacctaacgacattcccatagcaaagggcacatacaccttcgatatagacaagtgggatgaccccaattttaacccattctcttccaccagcaagatgcaagaatctccaaagctgcctcagcagtcttataacttcgatccagatacctgcgatgaatccgtggatccttttaagaccagcagcaaaactccatctagcccctccaaaagcccagcctcttttgagattcctgcttctgcaatggaggcaaatggcgtggatggggacgggcttaataagcctgccaagaagaagaaaactcccctgaaaacagacactttccgcgttaaaaagtccccgaaaaggtctccactctcagacccaccctcacaggaccccacacctgctgctacccccgaaacccctcccgtgatcagtgccgtggtgcacgccaccgacgaggaaaaattggccgtgactaaccaaaaatggacttgtatgaccgtggacctcgaagccgataagcaggattatcctcagccgagcgatctaagcacatttgtaaacgagaccaagttcagcagtcctacagaggagttggattacagaaacagctacgagatcgaatacatggaaaagataggtagcagcctcccccaggatgatgacgcaccaaaaaagcaggccctgtacctgatgtttgacactagccaagaatctcccgtgaagtcctccccagtgcggatgtctgaaagtcccactccgtgctccggttcctcgtttgaagaaacagaggctctagtcaataccgcggccaaaaatcagcacccggtacctcgcggactcgcacctaaccaagagtcccacctacaagtaccggagaagagttcgcagaaagaactcgaagcaatgggacttggtacaccttccgaagccatcgaaataacagcacccgaaggctcatttgccagcgcagatgccctcttgagccggctggcccatcccgtgagtctgtgcggcgctttagactacttggagcccgacctcgcggaaaaaaacccgcctctgttcgcacagaaactacagcgggaagccgcccaccctactgatgtgtccatcagcaagaccgccctctacagccgcatcggtaccgcggaagttgagaagcccgctggtttgttgtttcagcaacctgatctcgactcagccctgcaaatcgctagggcagagataattactaaagaacgcgaagttagtgagtggaaagataaatacgaagaaagccgtcgcgaggtaatggagatgcgaaaaatagttgctgagtatgagaagacaatcgctcagatgatagaggacgagcagcgtgaaaaatccgtaagccatcaaacagtgcaacaattggtactggaaaaggagcaggctctggcagatctgaactctgtggagaagagtctggctgatctcttccggaggtacgagaaaatgaaagaagtgcttgaggggtttcgaaagaacgaggaagtgctcaagagatgtgcccaggaatacctttcgcgcgtgaaaaaagaggaacagcggtaccaagccttgaaggtgcacgctgaagagaagctcgacagagccaatgcagagattgctcaggtgagaggcaaggctcagcaggaacaggctgcccaccaggcaagtctccggaaagaacagctcagagttgacgccctcgaaaggactttggagcagaaaaataaggaaatcgaggagctaactaaaatctgcgacgaacttatcgctaagatgggaaaatcgtag

SEQ ID NO: 264398 - DNA, 2991 bp, Artificial Sequence
  derived and/or modified sequence
atgggcggcagccagagcctgcagcctgccccagccagtgacctgaacctggaggccagcgaggccatgagcagtgacagcgaggaggcctttgagaccccagagagcaccacccctgtgaaggcccccccagcccctcctcctcctcctcctgaggtgattcctgagcctgaggtgtccacccagcccccacctgaggagcccggctgcggcagcgagaccgtgcctgtgcctgatggccccaggagtgacagcgtggagggcagccccttccggccccccagccacagcttctctgctgtgtttgatgaggacaagcccatcgccagcagcggcacctacaacctggactttgacaacatcgagctggtggacaccttccagaccctggagccccgggccagtgatgccaagaaccaggagggcaaggtgaacaccaggaggaagagcacagattctgtgcccatcagcaagagcaccctgagccgcagcctgagcctgcaggccagtgactttgatggagccagcagcagcggcaaccctgaggccgtggccctggccccagatgcctacagcacaggcagcagcagcgccagcagcaccctgaagaggaccaagaagccccggccccccagcctgaagaagaagcagaccaccaagaagcccacagagaccccacctgtgaaggagacccagcaggagccagatgaggagagcctggtgcccagcggggagaacctggccagcgagaccaagacagaaagtgccaagacagagggccccagccctgccctgctggaggagacccccctggagcctgctgtgggccccaaggccgcctgccccctggacagcgagagcgctgagggcgtggtgcccccagccagcggcggcggccgggtgcagaacagcccccctgtgggcaggaagaccctgcccctgaccacagcccctgaggccggggaggtgacccccagcgacagcggcggccaggaggacagccctgccaagggcctgtctgtgcggctggagtttgactacagcgaggacaagagctcctgggacaaccagcaggagaaccccccacccaccaagaagattggcaagaagcctgtggccaagatgcccctgcggcggcccaagatgaagaagaccccagagaagctggacaacaccccagccagcccccccaggagccctgctgagcccaatgacatccccatcgccaagggcacctacacctttgatattgacaagtgggatgaccccaacttcaaccccttcagcagcaccagcaagatgcaggagagccccaagctgccccagcagagctacaactttgatcctgacacctgtgatgaatctgtggaccccttcaagaccagcagcaagacccccagcagccccagcaagagccctgccagctttgagatcccagccagcgccatggaggccaacggggtggatggagatggcctgaacaagccagccaagaagaagaagacccccctgaagacagacaccttccgggtgaagaagagccccaagaggagccccctgagtgacccccccagccaggaccccaccccagctgccaccccagagaccccacctgtgatctctgctgtggtgcacgccacagatgaggagaagctggccgtgaccaaccagaagtggacctgcatgacagtggacctggaggccgacaagcaggactacccccagcccagcgacctgagcacctttgtgaatgagaccaagttcagcagccccacagaggagctggactacagaaacagctatgaaattgagtacatggagaagattggcagcagcctgccccaggatgatgatgcccccaagaagcaggccctgtacctgatgtttgacaccagccaggagagccctgtgaagagcagccctgtgaggatgtctgagagccccaccccctgcagcggcagcagctttgaggagacagaggccctggtgaacacagctgccaagaaccagcaccctgtgccccggggcctggcccccaaccaggagagccacctgcaggtgcctgagaagagcagccagaaggagctggaggccatgggcctgggcaccccatctgaggccatcgagatcacagcccctgagggcagctttgccagcgcagatgccctgctgagccggctggcccaccctgtgtccctgtgtggggccctggactacctggagccagacctggccgagaagaacccccccctgtttgcccagaagctgcagcgggaggccgcccaccccacagatgtgtccatcagcaagacagccctgtacagcagaattggaacagctgaggtggagaagccagctggcctgctcttccagcagcctgacctggacagcgccctgcagatcgcccgggcagagatcatcaccaaggagcgggaggtgtctgagtggaaggacaagtatgaggagagccggcgggaggtgatggagatgaggaagatcgtggccgagtatgagaagaccatcgcccagatgattgaagatgagcagcgggagaagtctgtgagccaccagacagtgcagcagctggtgctggagaaggagcaggccctggccgacctgaacagcgtggagaagagcctggccgacctcttcagaagatatgagaagatgaaggaggtgctggagggcttcaggaagaatgaggaggtgctgaagagatgtgcccaggagtacctgagccgggtgaagaaggaggagcagcgctaccaggccctgaaggtgcatgctgaggagaagctggaccgggccaatgctgagatcgcccaggtgcggggcaaggcccagcaggagcaggccgcccaccaggccagcctgaggaaggagcagctgcgggtggatgccctggagaggaccctggagcagaagaacaaggagattgaggagctgaccaagatctgtgatgagctgattgccaagatgggcaagagctag

SEQ ID NO: 264399 - DNA, 2991 bp, Artificial Sequence
  derived and/or modified sequence
atgggcggcagccagagcctgcagcccgcccccgccagcgacctgaatctagaagcaagcgaggcaatgtcttccgatagtgaggaagcattcgagacccccgagagcaccacaccagtgaaagccccacctgcaccgccccctcccccacccgaggttatcccggagcccgaagttagcacacagcccccccccgaggaacccggatgtggaagcgagactgtcccagtcccagatggccccagatccgatagcgtagaagggagtccctttcgccccccctcccacagtttcagtgccgtcttcgatgaagacaagccgattgccagctcaggcacttacaatcttgactttgataacatcgaacttgtggacacatttcagacactcgagccccgggcatccgacgcaaaaaaccaagagggtaaagtgaatacacggagaaagagcaccgattccgtgccaatctctaagagcacactgtctcgaagtttaagtctgcaagcatctgacttcgacggcgccagcagctcgggcaaccctgaggccgtggccctcgcaccagacgcctactccactggatcttccagcgctagttcgactctgaaaaggactaaaaaaccacgacctcccagtctgaagaagaagcagactactaagaagccaaccgaaacaccccctgtgaaggagacgcagcaggagccagacgaagaatcccttgtgcctagcggagagaatctagcctctgaaaccaagacggagtccgccaaaaccgaaggaccttcgcctgcactattagaagaaaccccactggagcctgccgtcggtcccaaggcagcctgccctctggattcagaaagtgctgagggagtggtacctcccgcctcgggcggcggacgcgttcagaactccccaccggtcgggcggaaaaccctccccctgacgactgcacccgaggccggcgaggtcaccccaagtgactcggggggacaggaagattcccccgctaaagggctctccgtcagactggagtttgattactctgaagacaaatcatcttgggacaaccaacaggagaatccacccccaacgaagaaaataggtaagaaacccgtggccaagatgcctctccggagacccaaaatgaagaaaacacctgagaaactggataacaccccggcctcccccccaagatcccctgctgaacctaatgatatccccattgctaagggcacctacaccttcgacatcgacaagtgggacgaccccaactttaaccctttcagttccacttctaaaatgcaggaaagccccaagctcccgcagcaaagctacaattttgaccctgatacatgtgacgagagcgtggacccttttaaaacctcgtcaaagactccttcatcgcctagtaaaagtcctgcgagcttcgagatccctgctagcgccatggaagcaaatggtgtggacggagacggtttgaataagccagcaaagaaaaaaaagaccccactcaaaaccgacacttttcgggttaagaagtcccctaagaggagtcccctctccgacccccctagtcaggaccccactcctgccgctaccccagaaacaccccctgtgatatccgctgtggtacacgctactgacgaagagaaactggcagttacaaaccagaagtggacttgtatgacagtagatctagaggctgacaagcaggactatccgcagcctagcgacttgtcaacattcgtgaacgaaacgaagttttcatcaccaactgaggaactcgattatcggaactcttatgagatagagtacatggaaaagatcgggtcttccctgccacaagacgatgacgcacctaaaaagcaggcactgtacctgatgtttgatacaagccaggagtccccagtaaaaagctctcccgttaggatgtcagaatcgcctactccctgttccggctccagcttcgaagaaactgaagcactggttaacacagcagccaagaatcagcaccctgtcccacgtggacttgccccaaatcaagagtctcacctgcaggttccggagaaatccagtcagaaagaattagaggcaatgggtttagggacgccaagcgaagcgattgagataaccgctccagagggctcattcgcctcagctgacgcccttctgtcccggctggctcacccagtgtccctgtgcggcgccctcgactatctagagcctgacttggccgagaagaatcctccactgtttgctcagaagctacagcgcgaggccgcacaccccacagacgtgagtatttctaaaactgccctctatagtcgaatcggcacagccgaggtggagaagccagcaggactgctgttccaacagcccgacctggattccgctctccagattgcaagagctgaaatcattactaaagaaagggaagtttcggagtggaaagacaaatatgaagaatctcgccgagaggtgatggaaatgcgcaaaatcgtggcggaatatgagaagacaatcgctcagatgattgaggacgagcaacgcgaaaaatcggtgtctcatcagacagtgcaacagttagttttggaaaaggagcaagctctggctgacctgaacagcgtggaaaagtcactggccgatctgttcaggcggtacgagaaaatgaaagaagttcttgagggattccgcaaaaacgaggaggtcctcaagcggtgcgcccaggaatatctgagtagagttaagaaggaggagcagcgctaccaggccctcaaagtgcacgcggaggagaaactggaccgcgctaatgctgagattgcacaggtcagaggcaaagcacagcaggagcaggctgctcatcaagcctctctgcgcaaagaacagcttagagtagacgcactagagcgcacccttgaacagaaaaataaggagatcgaggagcttaccaaaatttgcgacgaactcattgctaagatgggtaagtcctag

SEQ ID NO: 264400 - DNA, 2991 bp, Artificial Sequence
  derived and/or modified sequence
atgggcggaagtcagagcctgcagccggcaccagcttctgacctgaatctggaggccagcgaggcgatgagtagcgactcagaggaggcattcgagacaccagagagcactaccccagtcaaggcacccccagcccctccacccccaccacccgaagtgatcccggagcccgaggtgagtacacaaccgccaccagaggagcccggatgcggctccgaaactgtccctgttccagacggtcccaggagtgacagtgtggaggggagccctttccgccctccgtcccattctttctccgccgtgttcgacgaggacaagcctatcgcaagctcgggaacctataacctggacttcgacaacatcgaattggtggacacgttccagacccttgagcccagagcatctgacgcaaagaaccaagaaggaaaggtgaacacccgcagaaagtcaaccgactcggtgccaatctcgaagagcactctgtcccgatctctgagtctccaagcctcagactttgacggggcttcctcttctggcaaccccgaggccgtcgctctcgcccctgacgcctactctactggctcaagctcagcctcgagtacccttaaacggaccaagaagccacgacctccgtcattgaagaaaaagcaaacaaccaagaaacccacggagactccccctgtgaaagagactcagcaggaacccgatgaggagtccctggtgccatccggagaaaacctagcaagcgagacgaaaactgaatccgcgaagactgagggcccttcccctgcattacttgaggaaacccctctagaacctgccgttgggccaaaagccgcttgtcctcttgacagcgagagcgcagaaggggtggtgcccccagcttcaggcggaggtcgagtgcagaattcgcctccagtgggaagaaagacgttacctctgaccactgcacctgaagctggcgaggtaacacctagcgactccggtggtcaggaggatagtccagcgaagggcctgtctgtccggctcgagttcgactatagcgaggataagtccagctgggataatcagcaggaaaatccaccacctacaaaaaaaattggcaaaaaacctgtggctaagatgcccctgcggagaccaaagatgaaaaaaactcctgagaagctagataacacacctgcatctccccctcgctctcctgccgaaccaaacgacattccaattgccaagggaacttacacctttgatatcgataagtgggatgacccaaactttaatcccttctcttcaacttcgaaaatgcaagagtccccaaagctcccgcagcagagctacaacttcgacccagacacctgtgacgagagcgtggacccatttaagacctcttcaaagacccccagcagtccttcaaagtcccctgccagcttcgaaatcccagcatctgcaatggaagccaatggcgtggatggcgatggcctcaataaacccgctaaaaagaagaagacacctctgaaaaccgacacatttcgcgtgaagaaatcccccaagcgcagccccttgtctgatccacccagtcaagacccaacacctgccgcaacgccggaaacaccaccagtgatcagcgccgtcgtccatgccaccgatgaggaaaaactggcagtgacgaatcagaaatggacctgcatgacagtcgatctcgaagcggataagcaggactacccacagccatccgacctgtcaacttttgtaaacgagactaaattttcttcgccaacagaggaactggactatcgcaattcatatgagatcgagtatatggaaaagataggctcatccttaccacaagatgacgatgcacctaagaagcaggccctttatttaatgtttgacacaagccaagaaagccccgtaaaatccagtccagttcgcatgtcagagagccccacaccgtgctccgggtcctccttcgaggagaccgaagccctggtaaataccgccgcaaagaaccagcatcctgtgcctcgcggactcgccccaaatcaagagagccatctgcaggtccccgaaaaatcctcacaaaaggagctcgaggcaatgggtttgggtactccgtccgaagctattgaaatcaccgctcctgaaggaagtttcgcttcagccgatgccctgttgagtaggctcgctcatcctgtcagcctatgcggggctctcgactatttagaaccagatctggcggagaagaatcctccactgttcgcccagaagctgcagcgggaagccgctcatccaacagacgtaagcatctccaagaccgcactgtacagcaggataggcactgccgaggtggaaaagcctgcaggactgctctttcaacagccagacctggattctgccctacagattgctagggccgaaatcattacaaaggaaagggaagtatcggagtggaaagataaatacgaagaatcgcggcgagaggttatggaaatgcgaaagattgttgcagagtacgagaaaacaatagctcaaatgatcgaagacgagcaaagggagaagtctgttagccatcagaccgtacagcaacttgtcctggaaaaggagcaggcgctcgccgatcttaatagtgtggaaaaaagcctggcagacttatttcgcagatatgaaaaaatgaaggaagtactcgaaggattccgcaagaatgaagaggtcctgaagaggtgtgcccaggaatatttatctcgggttaagaaagaggagcagagatatcaagctttgaaggttcacgccgaagaaaagcttgatagggctaacgcggagatagcccaggtgaggggtaaggcacagcaggagcaagccgcacaccaggcctctctacgaaaagagcagctgagagtcgatgcactcgagcgcacgctagaacagaagaataaggaaatagaggagctgacaaaaatctgcgacgagctgatagcaaagatgggtaaatcttag

SEQ ID NO: 264401 - DNA, 3979 bp, Artificial Sequence
  derived and/or modified sequence
gcgggcggtcccggcgaggcgggaggggccggggcagagggagggtcttcgcctccccacccccagccccgtttccggagcccgcgatggagctttgtgaagatgcaggcgttggggctgctcggcgatgatgacatcatcgtgtcacacacaggagccggctgccggggggtttaagagaagagcctttcggaccacaccggcgctcacgctcatacccgcacgccccgggcagagccgcgcacgccggccacactcgggcgcgcgccggccacactcgcgcgcacacatacgcggcgctcgccccccggcccccggctcgggccgcgagtcgcagctccctgccgccgctcccgccgccacggatgcccgcagctgctcccctctgcagtgcagcaaccccggccgccggccggctcgccccggctcccggctgcaggaatcgcgccaggacgctggccccgctcgcggctagcttgcacgccagggcacagcgaggatgggagggtcgcagtccctgcagccagccccagccagcgacctgaacctggaggcttccgaggcaatgagttccgattctgaagaggcatttgagaccccggagtcaacgacccctgtcaaagctccgccagctccacccccaccaccccccgaagtcatcccagaacccgaggtcagcacacagccacccccggaagaaccaggatgtggttctgagacagtccctgtccctgatggcccacggagcgactcggtggaaggaagtcccttccgtcccccgtcacactccttctctgccgtcttcgatgaagacaagccgatagccagcagtgggacttacaacttggactttgacaacattgagcttgtggatacctttcagaccttggagcctcgtgcctcagacgctaagaatcaggagggcaaagtgaacacacggaggaagtccacggattccgtccccatctctaagtctacactgtcccggtcgctcagcctgcaagccagtgactttgatggtgcttcttcctcaggcaatcccgaggccgtggcccttgccccagatgcatatagcacgggttccagcagtgcttctagtacccttaagcgaactaaaaaaccgaggccgccttccttaaaaaagaaacagaccaccaagaaacccacagagacccccccagtgaaggagacgcaacaggagccagatgaagagagccttgtccccagtggggagaatctagcatctgagacgaaaacggaatctgccaagacggaaggtcctagcccagccttattggaggagacgccccttgagcccgctgtggggcccaaagctgcctgccctctggactcagagagtgcagaaggggttgtccccccggcttctggaggtggcagagtgcagaactcaccccctgtcgggaggaaaacgctgcctcttaccacggccccggaggcaggggaggtaaccccatcggatagcggggggcaagaggactctccagccaaagggctctccgtaaggctggagtttgactattctgaggacaagagtagttgggacaaccagcaggaaaacccccctcctaccaaaaagataggcaaaaagccagttgccaaaatgcccctgaggaggccaaagatgaaaaagacacccgagaaacttgacaacactcctgcctcacctcccagatcccctgctgaacccaatgacatccccattgctaaaggtacttacacctttgatattgacaagtgggatgaccccaattttaaccctttttcttccacctcaaaaatgcaggagtctcccaaactgccccaacaatcatacaactttgacccagacacctgtgatgagtccgttgacccctttaagacatcctctaagacccccagctcaccttctaaatccccagcctcctttgagatcccagccagtgctatggaagccaatggagtggacggggatgggctaaacaagcccgccaagaagaagaagacgcccctaaagactgacacatttagggtgaaaaagtcgccaaaacggtctcctctctctgatccaccttcccaggaccccaccccagctgctacaccagaaacaccaccagtgatctctgcggtggtccacgccacagatgaggaaaagctggcggtcaccaaccagaagtggacgtgcatgacagtggacctagaggctgacaaacaggactacccgcagccctcggacctgtccacctttgtaaacgagaccaaattcagttcacccactgaggagttggattacagaaactcctatgaaattgaatatatggagaaaattggctcctccttacctcaggacgacgatgccccgaagaagcaggccttgtaccttatgtttgacacttctcaggagagccctgtcaagtcatctcccgtccgcatgtcagagtccccgacgccgtgttcagggtcaagttttgaagagactgaagcccttgtgaacactgctgcgaaaaaccagcatcctgtcccacgaggactggcccctaaccaagagtcacacttgcaggtgccagagaaatcctcccagaaggagctggaggccatgggcttgggcaccccttcagaagcgattgaaattacagctcccgagggctcctttgcctctgctgacgccctcctcagcaggctagctcaccccgtctctctctgtggtgcacttgactatctggagcccgacttagcagaaaagaaccccccactattcgctcagaaactccagagagaggctgctcacccaacagacgtctccatctccaaaacagccttgtactcccgcatcgggaccgctgaggtggagaaacctgcaggccttctgttccagcagcccgacctggactctgccctccagatcgccagagcagagatcataaccaaggagagagaggtctcagaatggaaagataaatatgaagaaagcaggcgggaagtgatggaaatgaggaaaatagtggccgagtatgagaagaccatcgctcagatgatagaggacgaacagagagagaagtcagtctcccaccagacggtgcagcagctggttctggagaaggagcaagccctggccgacctgaactccgtggagaagtctctggccgacctcttcagaagatatgagaagatgaaggaggtcctagaaggcttccgcaagaatgaagaggtgttgaagagatgtgcgcaggagtacctgtcccgggtgaagaaggaggagcagaggtaccaggccctgaaggtgcacgcggaggagaaactggacagggccaatgctgagattgctcaggttcgaggcaaggcccagcaggagcaagccgcccaccaggccagcctgcggaaggagcagctgcgagtggacgccctggaaaggacgctggagcagaagaataaagaaatagaagaactcaccaagatttgtgacgaactgattgccaaaatggggaaaagctaactctgaaccgaatgttttggacttaactgttgcgtgcaatatgaccgtcggcacactgctgttcctccagttccatggacaggttctgttttcactttttcgtatgcactactgtatttcctttctaaataaaattgatttgattgtatgcagtactaaggagactatcagaatttcttgctattggtttgcattttcctagtataattcatagcaagttgacctcagagttcctgtatcagggagattgtctgattctctaataaaagacacattgctgaccttggccttgccctttgtacacaagttcccagggtgagcagcttttggatttaatatgaacatgtacagcgtgcatagggactcttgccttaaggagtgtaaacttgatctgcatttgctgatttgtttttaaaaaaacaagaaatgcatgtttcaaataaaattctctattgtaaataaaattttttctttggatcttggcaataa

SEQ ID NO: 264402 - protein, 1094 aa, Artificial Sequence
  derived and/or modified sequence
MGNENSTSDNQRTLSAQTPRSAQPPGNSQNIKRKQQDTPGSPDHRDASSSPVADDIIQPAAPADLESPTLAASSYHGDVVGQVSTDLIAQRSSDSEEAFETPESTTPVKAPPAPPPPPPEVIPEPEVSTQPPPEEPGCGSETVPVPDGPRSDSVEGSPFRPPSHSFSAVFDEDKPIASSGTYNLDFDNIELVDTFQTLEPRASDAKNQEGKVNTRRKSTDSVPISKSTLSRSLSLQASDFDGASSSGNPEAVALAPDAYSTGSSSASSTLKRTKKPRPPSLKKKQTTKKPTETPPVKETQQEPDEESLVPSGENLASETKTESAKTEGPSPALLEETPLEPAVGPKAACPLDSESAEGVVPPASGGGRVQNSPPVGRKTLPLTTAPEAGEVTPSDSGGQEDSPAKGLSVRLEFDYSEDKSSWDNQQENPPPTKKIGKKPVAKMPLRRPKMKKTPEKLDNTPASPPRSPAEPNDIPIAKGTYTFDIDKWDDPNFNPFSSTSKMQESPKLPQQSYNFDPDTCDESVDPFKTSSKTPSSPSKSPASFEIPASAMEANGVDGDGLNKPAKKKKTPLKTDTFRVKKSPKRSPLSDPPSQDPTPAATPETPPVISAVVHATDEEKLAVTNQKWTCMTVDLEADKQDYPQPSDLSTFVNETKFSSPTEELDYRNSYEIEYMEKIGSSLPQDDDAPKKQALYLMFDTSQESPVKSSPVRMSESPTPCSGSSFEETEALVNTAAKNQHPVPRGLAPNQESHLQVPEKSSQKELEAMGLGTPSEAIEITAPEGSFASADALLSRLAHPVSLCGALDYLEPDLAEKNPPLFAQKLQEELEFAIMRIEALKLARQIALASRSHQDAKREAAHPTDVSISKTALYSRIGTAEVEKPAGLLFQQPDLDSALQIARAEIITKEREVSEWKDKYEESRREVMEMRKIVAEYEKTIAQMIEDEQREKSVSHQTVQQLVLEKEQALADLNSVEKSLADLFRRYEKMKEVLEGFRKNEEVLKRCAQEYLSRVKKEEQRYQALKVHAEEKLDRANAEIAQVRGKAQQEQAAHQASLRKEQLRVDALERTLEQKNKEIEELTKICDELIAKMGKS

SEQ ID NO: 264403 - DNA, 3285 bp, Artificial Sequence
  derived and/or modified sequence
atgggcaacgagaacagcaccagcgacaaccagagaaccctgagcgcccagacccccagaagcgcccagccccccggcaacagccagaacatcaagagaaagcagcaggacacccccggcagccccgaccacagagacgccagcagcagccccgtggccgacgacatcatccagcccgccgcccccgccgacctggagagccccaccctggccgccagcagctaccacggcgacgtggtgggccaggtgagcaccgacctgatcgcccagagaagcagcgacagcgaggaggccttcgagacccccgagagcaccacccccgtgaaggccccccccgccccccccccccccccccccgaggtgatccccgagcccgaggtgagcacccagcccccccccgaggagcccggctgcggcagcgagaccgtgcccgtgcccgacggccccagaagcgacagcgtggagggcagccccttcagaccccccagccacagcttcagcgccgtgttcgacgaggacaagcccatcgccagcagcggcacctacaacctggacttcgacaacatcgagctggtggacaccttccagaccctggagcccagagccagcgacgccaagaaccaggagggcaaggtgaacaccagaagaaagagcaccgacagcgtgcccatcagcaagagcaccctgagcagaagcctgagcctgcaggccagcgacttcgacggcgccagcagcagcggcaaccccgaggccgtggccctggcccccgacgcctacagcaccggcagcagcagcgccagcagcaccctgaagagaaccaagaagcccagaccccccagcctgaagaagaagcagaccaccaagaagcccaccgagaccccccccgtgaaggagacccagcaggagcccgacgaggagagcctggtgcccagcggcgagaacctggccagcgagaccaagaccgagagcgccaagaccgagggccccagccccgccctgctggaggagacccccctggagcccgccgtgggccccaaggccgcctgccccctggacagcgagagcgccgagggcgtggtgccccccgccagcggcggcggcagagtgcagaacagcccccccgtgggcagaaagaccctgcccctgaccaccgcccccgaggccggcgaggtgacccccagcgacagcggcggccaggaggacagccccgccaagggcctgagcgtgagactggagttcgactacagcgaggacaagagcagctgggacaaccagcaggagaaccccccccccaccaagaagatcggcaagaagcccgtggccaagatgcccctgagaagacccaagatgaagaagacccccgagaagctggacaacacccccgccagcccccccagaagccccgccgagcccaacgacatccccatcgccaagggcacctacaccttcgacatcgacaagtgggacgaccccaacttcaaccccttcagcagcaccagcaagatgcaggagagccccaagctgccccagcagagctacaacttcgaccccgacacctgcgacgagagcgtggaccccttcaagaccagcagcaagacccccagcagccccagcaagagccccgccagcttcgagatccccgccagcgccatggaggccaacggcgtggacggcgacggcctgaacaagcccgccaagaagaagaagacccccctgaagaccgacaccttcagagtgaagaagagccccaagagaagccccctgagcgacccccccagccaggaccccacccccgccgccacccccgagaccccccccgtgatcagcgccgtggtgcacgccaccgacgaggagaagctggccgtgaccaaccagaagtggacctgcatgaccgtggacctggaggccgacaagcaggactacccccagcccagcgacctgagcaccttcgtgaacgagaccaagttcagcagccccaccgaggagctggactacagaaacagctacgagatcgagtacatggagaagatcggcagcagcctgccccaggacgacgacgcccccaagaagcaggccctgtacctgatgttcgacaccagccaggagagccccgtgaagagcagccccgtgagaatgagcgagagccccaccccctgcagcggcagcagcttcgaggagaccgaggccctggtgaacaccgccgccaagaaccagcaccccgtgcccagaggcctggcccccaaccaggagagccacctgcaggtgcccgagaagagcagccagaaggagctggaggccatgggcctgggcacccccagcgaggccatcgagatcaccgcccccgagggcagcttcgccagcgccgacgccctgctgagcagactggcccaccccgtgagcctgtgcggcgccctggactacctggagcccgacctggccgagaagaacccccccctgttcgcccagaagctgcaggaggagctggagttcgccatcatgagaatcgaggccctgaagctggccagacagatcgccctggccagcagaagccaccaggacgccaagagagaggccgcccaccccaccgacgtgagcatcagcaagaccgccctgtacagcagaatcggcaccgccgaggtggagaagcccgccggcctgctgttccagcagcccgacctggacagcgccctgcagatcgccagagccgagatcatcaccaaggagagagaggtgagcgagtggaaggacaagtacgaggagagcagaagagaggtgatggagatgagaaagatcgtggccgagtacgagaagaccatcgcccagatgatcgaggacgagcagagagagaagagcgtgagccaccagaccgtgcagcagctggtgctggagaaggagcaggccctggccgacctgaacagcgtggagaagagcctggccgacctgttcagaagatacgagaagatgaaggaggtgctggagggcttcagaaagaacgaggaggtgctgaagagatgcgcccaggagtacctgagcagagtgaagaaggaggagcagagataccaggccctgaaggtgcacgccgaggagaagctggacagagccaacgccgagatcgcccaggtgagaggcaaggcccagcaggagcaggccgcccaccaggccagcctgagaaaggagcagctgagagtggacgccctggagagaaccctggagcagaagaacaaggagatcgaggagctgaccaagatctgcgacgagctgatcgccaagatgggcaagagctag

SEQ ID NO: 264404 - DNA, 3285 bp, Artificial Sequence
  derived and/or modified sequence
atggggaacgagaattccaccagcgacaatcagcgcacactcagtgctcaaacacctcgcagtgcacagcctccgggcaatagccagaatataaagaggaaacaacaagataccccaggctcgcctgatcaccgggatgcctccagtagtcccgtggcagatgatattatccagcctgcagctccggcggatttggagtcaccgactctcgccgcttcttcttatcacggagacgttgtaggccaggtgagcacagacctgatcgcgcaacggtcgtcagattcggaggaggcttttgagacccctgaaagcaccacgcctgttaaggccccccctgctcctccgcccccaccacccgaagtcattccagagcccgaggtttcaacacagccaccaccagaagaaccgggctgtggcagtgaaaccgtcccagtgccggatggacctcggagtgacagcgtcgagggctccccttttagacccccttcacactccttttctgccgtgttcgacgaagataagcctatcgcttcaagcggcacctacaatctggatttcgataacattgagctggtcgatactttccagaccctggaacctcgagcctctgatgccaaaaaccaagaagggaaggtgaatacccggagaaaaagtactgactccgtgcctatttcaaagagcacactaagtaggtccctctctttgcaagcttcggactttgatggcgcaagttcgtctggcaacccagaagcggtggcgttagcccctgatgcgtacagcaccggctcttccagcgcttctagcaccttaaagcgcactaaaaagccccgcccgcccagcctgaagaagaagcagaccactaagaagccaaccgagacaccaccagtcaaagaaacccagcaagaacccgatgaagaaagcttagtcccttctggtgaaaatctcgctagcgaaactaaaacagaatcagctaagacagaggggccctcacccgcattacttgaggaaactcccttagagccagcagtagggccaaaagccgcatgcccccttgatagcgagagcgctgagggagtagttccacccgcatcaggcgggggccgagtgcagaactctcctcccgtgggcagaaagactctgccactgacaactgctcccgaggcaggtgaagttacgccaagcgatagcgggggacaggaggactctcccgccaaagggctgtcagttagacttgagtttgattattctgaagataagtcttcatgggacaaccagcaggagaaccccccgccaacaaaaaagatcggcaagaaacccgtagctaaaatgcctctcaggagacccaagatgaaaaagacgcctgaaaaactggacaacacacccgcctctccacctcgctctcccgccgagcctaacgacattcctatcgccaaaggcacttatacctttgatatcgataagtgggacgatcctaatttcaatccattttcaagtacatccaagatgcaagagtccccaaaactgccacagcagagctataactttgaccccgatacctgcgatgagtcagttgaccctttcaaaacaagcagcaaaacaccgtcgtcaccatctaaatcccccgccagcttcgaaatccctgccagcgctatggaagcaaacggtgtggacggtgatgggttgaacaagccggccaaaaaaaagaagaccccgctgaagacagacacattcagggttaagaaatcaccgaaaaggtcccctctaagcgaccccccgtcacaagatcccacccccgctgcaaccccggaaactccaccagtaataagtgcagtcgtgcatgccacagacgaggagaagctggctgtgaccaaccagaagtggacatgcatgacggtggacctggaagcagacaagcaggattacccacagccctccgatttgtccacttttgtgaatgagactaagttctcctctccaacagaagagctggattaccggaatagctatgaaatcgagtacatggaaaagatcggtagctccctgccacaagacgatgacgcccccaagaaacaggcactgtacctgatgttcgataccagtcaggagtcacccgtcaaaagttcccccgtacggatgtccgagagtcctacgccctgcagtggtagttccttcgaagaaactgaggccctggtgaacaccgctgccaagaatcagcatcccgtcccccgggggctcgctccaaaccaggaatcccacttgcaggtgcctgaaaaatcatctcagaaggaactagaagcaatgggtcttggcaccccctccgaggccatcgaaataaccgctccggaaggatccttcgcttcggctgacgcacttctgagcaggttggcgcatcccgttagtttatgtggagccctggattatctcgaacccgacctggccgaaaagaacccccccctgttcgcgcaaaaactccaagaggaactcgaatttgcaattatgcggatcgaggctctgaagcttgcccgccagattgccctggccagtcggagtcaccaagatgcgaagagagaggctgctcatcctaccgacgtcagtatctccaagaccgccctttatagtcggatcggaacagccgaagtggagaagccggccggcctgctgttccaacagcctgatttggactctgcccttcaaattgcccgggccgagatcattactaaggaaagggaagtatccgagtggaaggataagtacgaagagtcccgacgggaagttatggagatgcgtaagattgtggctgaatatgaaaaaacaatagctcagatgatcgaggatgaacaaagagagaagtccgtaagccaccagacagtgcaacaactggtacttgaaaaggagcaggccctggccgatctcaattcagttgagaagtccctggctgatctgttcagacggtatgagaagatgaaagaggtgcttgaagggttccggaagaacgaggaagtactaaagaggtgtgcgcaggagtacctgagtcgggtgaagaaggaggagcagcgctaccaagctttgaaagtgcacgcagaagagaagctggacagggccaatgccgagatcgcacaggtgcgcggcaaagcccaacaggagcaggcagcccaccaggctagcttgagaaaggagcagctgcgggtggacgctctggagcgaaccttggagcaaaagaacaaggagatcgaggagctgactaaaatctgtgacgaactgatcgctaaaatgggcaagagctag

SEQ ID NO: 264405 - DNA, 3285 bp, Artificial Sequence
  derived and/or modified sequence
atgggtaacgaaaactctacttccgataatcagaggaccctgagcgcgcagactcccagaagcgctcagccccctggcaattcacagaacattaagaggaagcagcaagataccccaggatcccccgatcacagggatgcgagctccagcccagttgccgatgatatcatccaacccgcagcccctgcggacttggagtctccaacactcgcagcttcttcctaccacggcgacgtcgtggggcaagtcagtaccgacctgatcgcccagcggtcttcagactctgaagaagccttcgaaactcccgaatctactaccccagtaaaggcccctccagcaccacccccacctccccctgaggtaatcccggaacctgaggtttctacccaacccccaccagaggaaccgggctgcggttctgagaccgtgccagttccggacgggcctagatctgacagtgtggagggctccccgtttcggcccccaagccattccttctctgctgtgtttgatgaggataagcccatagctagttccgggacctacaatctggatttcgacaatatcgagctggtcgacacgtttcagactctggaaccgagagcgagcgatgccaaaaaccaggagggtaaagtcaacactcgccggaagtccacagattctgtgccaataagcaaaagcactctgtcccgctcgctgtccctgcaggccagcgacttcgatggagcttctagttccggaaatcccgaagccgtggcccttgcgccagatgcatatagtacaggttcctcttcagcctcatctacactgaagcgaactaaaaagccaagacctccgagtcttaagaagaaacagactaccaaaaaacctaccgagacccctcctgtaaaggaaacccagcaggagcctgacgaggagtcattagtgccatccggagagaacctggctagtgagactaaaacagagtcagcaaagacggaagggcccagccccgctctgcttgaagaaaccccactggaaccggccgtgggtcccaaagcagcctgtccactcgactcggaatccgcagaaggagtcgtgcctccagctagcggcggcggccgcgtccagaatagtcctcccgtcggaagaaagacactgccccttaccacggctccagaggccggggaggtgacaccatcagattccggggggcaggaagattcgcctgccaagggcctgtctgtgagactggagttcgattatagcgaggataagtcttcgtgggacaaccagcaggagaaccccccccctaccaaaaagatcgggaagaagccagtggctaaaatgcctctcaggagacctaaaatgaaaaagaccccagaaaagttagacaatacaccggcgagcccaccacgctctcccgcggaaccaaatgatattcccattgctaagggaacgtacaccttcgatattgataaatgggacgatccgaattttaacccattcagttctactagcaaaatgcaggaatcacctaaactgccccaacagtcttacaacttcgatcctgacacttgcgatgagtccgtggatcccttcaaaacttcttccaagacacctagctctccttcaaaatcccccgcgagcttcgaaattcccgcatcagccatggaggccaacggcgtggacggggatggcctgaataagcccgcaaaaaaaaagaaaacccctttaaaaaccgacacttttcgagtgaagaagagtcccaagcgctcccctttatctgatcccccttctcaggaccctacacccgcagccacccccgagactccgcccgtgatttctgctgtggtgcacgctacggatgaggagaaactcgcagtgaccaaccaaaaatggacttgcatgactgtggacctggaggcggacaaacaggactatccgcagccgtcagatctcagcacttttgttaatgagacaaagtttagctctccgacagaagaactggactatcgaaatagttatgagattgagtatatggaaaaaatcggctcgtctctgccccaggatgatgacgcccctaagaaacaggccttatatctcatgtttgacactagtcaggagagtccggttaaatcatcacccgttaggatgtcagaatcaccaacaccctgcagcggaagcagctttgaagagacagaggcactggtgaacactgctgctaaaaatcaacatcccgtgccaaggggacttgcccccaatcaggaaagtcacttgcaggtgccagaaaaaagctctcagaaggaattggaagcaatgggtctcggaactccatcagaggctattgagatcacggctcctgagggctcgttcgcgagcgcagatgctctgctcagcagacttgcgcacccagtgtccctatgtggtgctctggattacctcgagcctgatctcgctgaaaagaaccctccattgttcgctcaaaagctacaggaggagcttgagttcgccatcatgaggattgaagccctgaagctcgcccggcagatcgcgctcgctagtcggtcccaccaggacgcaaaacgggaagcagcccatccaacagacgtgtctatttctaagacggcactctacagcagaattggcacagccgaagtggaaaaacccgctggactacttttccagcagccggacctagattctgcactgcagattgctagggctgagataatcacaaaagagagggaagtcagcgagtggaaggataaatacgaagagtctagacgtgaggtgatggagatgagaaaaattgtggctgagtacgaaaagacaattgcccaaatgatcgaagacgaacaacgggagaaaagcgtatctcatcaaaccgtgcagcagctcgtgctcgagaaagaacaggcgttagctgatcttaactccgtcgagaagtcgttggccgatttgtttagaaggtacgaaaaaatgaaggaagtcctggaggggtttcgcaagaatgaggaggtgctgaagcgatgcgctcaggagtatctgtctcgggtgaagaaggaggagcagcggtaccaggccctcaaggtccacgccgaggaaaagctggaccgtgccaacgctgaaatcgcccaagttagggggaaggcacaacaagaacaggccgcgcaccaggcctcccttcggaaagagcagctccgcgtggatgctctcgagcggaccctggagcaaaaaaacaaagaaattgaggagctcactaagatttgtgacgagctcattgcaaagatggggaagagttag

SEQ ID NO: 264406 - DNA, 3285 bp, Artificial Sequence
  derived and/or modified sequence
atgggaaatgaaaacagcaccagtgacaaccagaggaccctgagcgcccagacccccaggtctgcccagcccccaggcaacagccagaacatcaagaggaagcagcaggacaccccaggcagcccagaccacagagatgccagcagcagccctgtggctgatgacatcatccagcctgctgccccagctgacctggagagccccaccctggccgccagcagctaccatggagatgtggtgggccaggtgtccacagacctgattgcccagaggagcagtgacagcgaggaggcctttgagaccccagagagcaccacccctgtgaaggcccccccagcccctcctcctcctcctcctgaggtgattcctgagcctgaggtgtccacccagcccccacctgaggagcccggctgcggcagcgagaccgtgcctgtgcctgatggccccaggagtgacagcgtggagggcagccccttccggccccccagccacagcttctctgctgtgtttgatgaggacaagcccatcgccagcagcggcacctacaacctggactttgacaacatcgagctggtggacaccttccagaccctggagccccgggccagtgatgccaagaaccaggagggcaaggtgaacaccaggaggaagagcacagattctgtgcccatcagcaagagcaccctgagccgcagcctgagcctgcaggccagtgactttgatggagccagcagcagcggcaaccctgaggccgtggccctggccccagatgcctacagcacaggcagcagcagcgccagcagcaccctgaagaggaccaagaagccccggccccccagcctgaagaagaagcagaccaccaagaagcccacagagaccccacctgtgaaggagacccagcaggagccagatgaggagagcctggtgcccagcggggagaacctggccagcgagaccaagacagaaagtgccaagacagagggccccagccctgccctgctggaggagacccccctggagcctgctgtgggccccaaggccgcctgccccctggacagcgagagcgctgagggcgtggtgcccccagccagcggcggcggccgggtgcagaacagcccccctgtgggcaggaagaccctgcccctgaccacagcccctgaggccggggaggtgacccccagcgacagcggcggccaggaggacagccctgccaagggcctgtctgtgcggctggagtttgactacagcgaggacaagagctcctgggacaaccagcaggagaaccccccacccaccaagaagattggcaagaagcctgtggccaagatgcccctgcggcggcccaagatgaagaagaccccagagaagctggacaacaccccagccagcccccccaggagccctgctgagcccaatgacatccccatcgccaagggcacctacacctttgatattgacaagtgggatgaccccaacttcaaccccttcagcagcaccagcaagatgcaggagagccccaagctgccccagcagagctacaactttgatcctgacacctgtgatgaatctgtggaccccttcaagaccagcagcaagacccccagcagccccagcaagagccctgccagctttgagatcccagccagcgccatggaggccaacggggtggatggagatggcctgaacaagccagccaagaagaagaagacccccctgaagacagacaccttccgggtgaagaagagccccaagaggagccccctgagtgacccccccagccaggaccccaccccagctgccaccccagagaccccacctgtgatctctgctgtggtgcacgccacagatgaggagaagctggccgtgaccaaccagaagtggacctgcatgacagtggacctggaggccgacaagcaggactacccccagcccagcgacctgagcacctttgtgaatgagaccaagttcagcagccccacagaggagctggactacagaaacagctatgaaattgagtacatggagaagattggcagcagcctgccccaggatgatgatgcccccaagaagcaggccctgtacctgatgtttgacaccagccaggagagccctgtgaagagcagccctgtgaggatgtctgagagccccaccccctgcagcggcagcagctttgaggagacagaggccctggtgaacacagctgccaagaaccagcaccctgtgccccggggcctggcccccaaccaggagagccacctgcaggtgcctgagaagagcagccagaaggagctggaggccatgggcctgggcaccccatctgaggccatcgagatcacagcccctgagggcagctttgccagcgcagatgccctgctgagccggctggcccaccctgtgtccctgtgtggggccctggactacctggagccagacctggccgagaagaacccccccctgtttgcccagaagctgcaggaggagctggagtttgccatcatgagaattgaggccctgaagctggcccggcagatcgccctggccagccgcagccaccaggatgccaagcgggaggccgcccaccccacagatgtgtccatcagcaagacagccctgtacagcagaattggaacagctgaggtggagaagccagctggcctgctcttccagcagcctgacctggacagcgccctgcagatcgcccgggcagagatcatcaccaaggagcgggaggtgtctgagtggaaggacaagtatgaggagagccggcgggaggtgatggagatgaggaagatcgtggccgagtatgagaagaccatcgcccagatgattgaagatgagcagcgggagaagtctgtgagccaccagacagtgcagcagctggtgctggagaaggagcaggccctggccgacctgaacagcgtggagaagagcctggccgacctcttcagaagatatgagaagatgaaggaggtgctggagggcttcaggaagaatgaggaggtgctgaagagatgtgcccaggagtacctgagccgggtgaagaaggaggagcagcgctaccaggccctgaaggtgcatgctgaggagaagctggaccgggccaatgctgagatcgcccaggtgcggggcaaggcccagcaggagcaggccgcccaccaggccagcctgaggaaggagcagctgcgggtggatgccctggagaggaccctggagcagaagaacaaggagattgaggagctgaccaagatctgtgatgagctgattgccaagatgggcaagagctag

SEQ ID NO: 264407 - DNA, 3285 bp, Artificial Sequence
  derived and/or modified sequence
atgggcaacgagaacagcaccagcgacaaccagcggaccctgagcgcccaaacccctaggagcgcccaaccacctgggaatagtcagaatataaagcggaagcagcaggatacgcccgggtccccagatcacagagatgccagcagctcgcctgtggccgacgatatcattcagcccgcagctcccgccgaccttgaatcgcctactcttgcggcaagctcgtaccacggagacgtggtgggccaagtctctactgatctcatcgcacagaggtctagtgactctgaagaggcatttgaaacacccgaatcaacaacacccgtcaaggcccccccagcaccacctcccccacccccagaggtaattcccgaaccagaggtatcaacccagccacctcctgaagaaccaggttgcggttctgagacggtcccggttcctgacggcccgcgttctgactctgtggagggctcgccttttagacctcctagccactcattcagcgcagtgttcgatgaggataaacctattgcaagttccggcacctacaatctggattttgataacattgaactggtggatacgtttcaaacactagagcctcgggcctctgatgctaagaatcaggagggcaaagtcaacaccagacgaaagagtacagactctgtgcccatcagcaagagcacacttagccggtctctgagtctgcaggctagcgacttcgatggtgcatcatcctcaggcaaccctgaagcagtcgccctcgcccccgatgcctactctactggcagctcctccgcctctagtacactcaagagaactaaaaaaccccgccccccctcactaaagaaaaagcagacaaccaaaaaacctacggaaacaccgcctgtgaaggaaacacaacaggaacctgacgaggagtcactggttccttccggggagaacctcgcctccgaaaccaagacagagtccgccaaaacagaagggccatctccagcacttttggaagagacacctctggaaccagccgtggggcctaaagccgcctgtcctctggatagcgagagcgcagagggggtggtgccacctgcctccgggggtgggcgcgtccagaatagcccccctgtggggcgcaaaaccttgccccttactaccgcccctgaggccggggaggtgactcccagcgacagtggaggacaggaggattcccctgccaaggggctcagtgtacggttagagtttgactatagtgaggataaatccagctgggataaccaacaggagaacccgccccctactaaaaagatcgggaagaaacccgtggccaaaatgccattgcgccgccccaagatgaaaaaaacccctgaaaaactggataatacacccgcatccccccctaggtcaccagccgaaccgaacgatatacctatagccaaagggacatacacttttgacatcgataagtgggatgaccctaatttcaaccccttctcaagcacatcaaaaatgcaggaaagtccgaaactgccccagcaatcctataatttcgaccctgatacctgtgacgaaagtgtcgatcccttcaagaccagctctaagactccttcttcaccctctaagtcacctgcaagctttgaaattccagcctccgcaatggaggcaaacggggtggacggcgatgggctgaataaaccagccaaaaagaaaaaaacccccctgaagacagatacatttagagtgaagaagagtccaaaaaggtcaccattgtcagatcccccctcccaagacccaacccctgccgccacaccagaaacccctcctgtcatttcagctgtggtgcacgccactgacgaggagaaactggctgtgactaatcagaagtggacgtgtatgacagtcgacctggaagccgataaacaggactatcctcagccttctgacctgtccacctttgtgaatgaaacaaaattttcatcaccgactgaggagctggattacagaaattcttacgaaatagagtacatggagaagataggtagctcactgccccaagatgatgatgcaccaaagaagcaagccctgtacctcatgttcgatacctcacaggaatcccccgtcaaatcgagccccgtacgtatgtcagaaagtcctactccttgttccgggtcctcttttgaagagaccgaggcattggtgaataccgcagcgaaaaaccagcatccagtgcctcgcggtctggctccaaatcaggagtcccatctacaggtccccgagaagagtagtcagaaggaactggaggctatgggtcttggcaccccctctgaggccattgaaatcacggctcctgaaggcagctttgcttctgccgacgccctgttatctagactggcccatccagtgtctttatgtggcgcgctagattatctggagccggatttagccgagaagaatccacccctttttgcccagaaactgcaggaagaacttgaattcgctatcatgcggattgaggctcttaagcttgccagacagattgctttggctagcagatcgcaccaggacgctaagcgggaggccgctcaccctacggacgtgtcaatcagcaagacggccctgtacagccgcattggaactgccgaagtggaaaaaccagcaggcctgctgtttcagcagccggacttagattcagccctacagatcgccagagctgagatcattaccaaagagcgagaagtttctgaatggaaggacaagtatgaggaatcccgtagagaggtaatggaaatgaggaagatcgtcgctgagtacgaaaaaacaatagcccagatgattgaggatgagcagagggaaaaaagtgtttctcatcagaccgttcaacagctagtcctcgagaaagagcaggcgctggccgacctgaactctgttgaaaaaagcctggcagatctttttcgacgctatgagaaaatgaaggaagtcctggaagggttccgcaagaacgaggaggtgctgaaacggtgtgcccaggagtatctgagccgtgtcaaaaaagaagaacagcgttaccaggccctgaaagtgcacgctgaagaaaagctagaccgagccaatgcggagatcgcccaagtccgcgggaaggctcagcaggagcaagctgcccaccaggcatcactccgaaaggagcagcttcgcgtcgacgccctggagagaacattggagcagaagaacaaggaaatagaggaactcactaagatctgcgatgagctaattgctaaaatgggtaagagctag

SEQ ID NO: 264408 - DNA, 3285 bp, Artificial Sequence
  derived and/or modified sequence
atgggcaacgagaacagcaccagcgacaaccagcggaccctgagcgctcagaccccaagatcagctcaaccccctggaaatagtcagaacattaaaagaaagcagcaggataccccaggctctcccgatcatcgtgacgcctctagcagccctgtcgccgacgatatcatccaacccgccgcaccggccgacctggaatctccaaccctcgcagccagctcttaccatggagacgtggtggggcaagtgagtactgatttaatcgcacagaggagctcagacagtgaagaggcattcgagacccctgagtccaccacaccggtaaaggctccccctgcaccccccccacccccccctgaagtcattccagaaccggaggtgagcacccagccccctcccgaggaacctgggtgcggatccgagacagtacccgtgccggacggcccaagatccgactcggtggagggttcgccatttcgaccaccatcacactccttttctgctgtcttcgacgaggacaagcccattgcttcttccggaacctacaatttggattttgacaacattgaactggtcgacactttccagaccctggagccaagggccagtgacgccaagaaccaggagggcaaggttaatacacggaggaaaagcaccgacagtgtcccgataagtaagagtacactatctagatcgttaagcctacaggcttccgacttcgatggggcctcctcttctgggaatcccgaagcagttgcccttgcgcctgatgcttactcaacgggaagctcaagcgctagcagtaccttgaagagaaccaaaaagccccgacccccctctctgaagaagaagcaaacaaccaagaagccgactgaaaccccccctgtgaaagagacacagcaggaacccgatgaggaatctcttgtgccttccggggaaaatctcgcatctgaaactaaaacggagtcagccaagaccgaggggccatcacctgccctgttggaggagaccccccttgagcctgcagtgggtccaaaggcagcgtgtccattggatagcgaaagtgctgaaggcgtggttcctccggcttctgggggcggaagggtccagaatagcccccctgtggggcgcaagaccttgccgcttaccacggcaccagaggcaggcgaggtgacaccatccgacagcggcggccaggaggattcgcctgcgaaaggactgagtgtgaggttagagttcgactactcagaggacaagagtagctgggataaccagcaggagaacccaccacctaccaagaaaattggcaaaaagcccgttgctaaaatgccactcaggaggcctaagatgaaaaagacaccagaaaagctggacaatacccctgcaagtccgccacgctcacctgctgaaccaaatgatattccaattgctaaagggacctatacgttcgatatagataaatgggatgaccccaactttaatcctttctcaagcacctcaaagatgcaagagagtcccaagctgccccagcagagttataatttcgacccagacacatgcgacgagtctgtggaccctttcaagacatcttctaaaactccaagctcacctagtaagagccctgcttccttcgaaattcccgccagcgccatggaggcaaatggcgtggatggagacggactgaataaacccgcaaagaaaaagaaaacacccttaaaaaccgacactttccgcgttaaaaaatccccaaaacggtcccccctgagcgaccccccctcccaggatcctacgccagcagccacaccagagactccaccagtcatctctgccgttgtccacgcaacagatgaggagaagctggcggtgaccaaccagaagtggacttgtatgacagttgatctggaggcggataaacaggactacccacagccctcagacttgtccactttcgtgaacgagacgaaattttcgtcccccacagaagaactggactacagaaatagttatgagatcgaatacatggagaagattgggtctagtttacctcaagacgacgatgcaccaaagaaacaagctctgtacttgatgtttgacaccagtcaagagagtcctgtgaaaagttcccccgtccgcatgagcgaatcgccaaccccatgcagtggcagcagtttcgaagaaaccgaagcactcgtgaacaccgccgcgaaaaaccaacatccagtgccacgcgggttggccccaaaccaggagtcacacctacaggtaccagagaaaagtagtcagaaagaattggaagcaatgggactaggcactccatccgaagccatcgaaatcaccgcccctgaggggtcgtttgcgagtgccgacgctctactatctcggctggctcatcccgtctctctgtgcggcgcactggactacctggagccggatctggctgaaaaaaacccccccctgttcgcgcagaaactgcaggaggagctggaattcgcaataatgaggatcgaggccctcaagctcgcacggcaaatcgctttggctagccgaagccaccaagacgccaaacgggaggccgcccaccccacagatgtatctatcagcaagacagccctgtatagtcggattgggacggccgaagtggaaaagccagcgggcctcttgtttcaacaacctgaccttgatagcgccctgcagatcgctcgggccgaaatcatcacgaaggagcgcgaggtaagcgaatggaaggacaagtacgaggagtcccgccgggaggtcatggaaatgcggaaaattgttgccgaatatgaaaaaaccattgcacagatgatcgaagacgagcagagggaaaaatcagtgagccaccagacagtccagcagttggttctagagaaagaacaggcactggctgatctgaattctgtggaaaagtcactggcggacctatttcggaggtacgagaaaatgaaagaggtgctcgaaggctttagaaagaacgaagaagttctcaagcggtgtgcacaggaatatctctccagggtaaaaaaagaggaacagcggtatcaggcacttaaggttcacgccgaagaaaagctcgacagagccaacgccgaaatcgcacaagttagagggaaagcccagcaggagcaggcagcacatcaggcaagtcttcgcaaggaacagctgagggtggacgccctcgaaaggactcttgagcagaaaaataaggagattgaggagctgacgaagatctgtgatgaactgattgcaaaaatgggcaagtcctag

SEQ ID NO: 264409 - DNA, 3285 bp, Artificial Sequence
  derived and/or modified sequence
atgggcaacgaaaattcaacttccgacaatcagaggacattaagcgcacagactcctaggagtgcgcagccgccaggaaattcccagaacatcaaaagaaagcagcaggacacccctgggtcccctgatcacagggatgcttcctcctcaccagtcgctgatgatataatccaacctgcagctcccgcagaccttgagtctccaaccctggcagcttcatcataccacggcgatgtggtcggacaggtctccacagacttgatcgctcagcggtccagcgactcagaggaagcattcgagactcctgaatcaacaactccagtgaaagcccctccagctcccccaccccctcctcctgaggtgattcctgagccagaggtctctactcagcctccccctgaggaacccggatgtggtagcgaaacagtccctgtgcccgacggcccacggtccgacagcgttgaaggctctccctttcgaccgccttctcatagctttagcgctgtttttgacgaggacaaacccatcgcctcttcagggacctacaaccttgactttgataacattgagctggtggataccttccagactctcgaaccaagggcctctgacgccaaaaatcaggaaggaaaggtgaatactcgcagaaaaagtactgactcagtgccgatctccaaaagtacactatcgcgtagcctgtccctgcaggcatccgatttcgacggtgcaagcagtagtgggaatccagaggctgtggcccttgcccctgacgcctattctaccggtagtagctctgcctctagcacccttaaacggacaaagaaacctagaccaccatcgctgaagaagaaacagaccacgaaaaaacccactgaaacgcctccagtaaaagagacacagcaagagccagatgaggagtctctggtcccatctggagagaatctcgcttcagagaccaaaacagagtctgcaaaaacagaaggaccctcccctgccctgctagaggagacccctctggagcccgcagtgggccctaaggccgcttgccccttggacagcgagagcgccgagggcgtggttccacccgcttcagggggtggcagagtgcaaaattctccacctgtgggtcggaaaactctgccacttactaccgcccctgaggcaggtgaggtaacacctagtgattccggaggccaggaggattcaccagctaaggggctatctgtccggctggagttcgactattcggaggataagtcctcgtgggataatcagcaggagaatcctccccctactaaaaagattgggaaaaagcccgtggccaagatgcctctgagaagaccgaagatgaagaaaacacccgaaaaattggataataccccggctagccctcccagatcccccgcagaaccgaatgatatcccaattgctaaaggcacatatacgttcgacatcgacaagtgggatgaccctaattttaaccctttctccagcacttctaagatgcaggaatcaccaaagctgccccagcagtcatacaatttcgacccagatacgtgcgatgaatcggtggatccctttaagaccagttctaagacgcctagctctccgtctaaatcccccgcttccttcgagatccccgcaagcgccatggaggccaatggggtagacggcgacggcctgaataaacccgctaagaagaaaaagacgccactgaagactgatacatttagggtgaagaagtcccctaaacgcagtcctctgtctgatcctcctagccaggaccccacgcccgcagccaccccagagacccccccagtcatctcggccgtagttcatgcaacagatgaggagaagttagcggtgactaaccaaaagtggacctgtatgacagtggacttagaggcagataagcaagattacccccaaccatccgatctcagtacattcgtgaatgaaactaagttctcctccccaaccgaagaactagattacaggaatagctatgagatcgaatacatggagaaaatcggaagttctctgccacaggatgacgacgctccgaaaaaacaggcattgtatcttatgttcgatacctctcaagaatctcctgtgaaaagcagccccgtgcgaatgtctgagagtccaaccccctgctctggcagctctttcgaggagactgaggccctggtcaacacagccgcaaaaaatcaacaccccgtcccccgtggcttggccccaaatcaggagagccacttacaagttcctgagaagtcgtcccagaaagaactcgaggcaatgggcctggggactccatccgaggctatcgagattacagcgcctgagggctctttcgcctctgccgacgctcttctatccagactcgctcaccctgtgagcctctgcggggcactcgactatctggagcctgacttggctgaaaagaacccccctctgttcgcccaaaagctccaggaagagcttgaattcgctataatgcggatcgaagctttaaagttagcgcgacaaatagcactggcctcccggtcccaccaggacgcgaagagggaggccgcacacccaactgacgtgagcatcagcaaaactgctttgtactcacggatcggcacagctgaggtagagaaacccgcaggtctgctgtttcagcagccagatctggactccgccttgcaaatagcacgagctgaaattatcacaaaggagcgggaggtgtcagagtggaaggataagtatgaagaatctcgcagggaggtcatggaaatgagaaaaattgtggctgagtatgagaagaccatcgcccagatgattgaggacgaacagcgcgagaagagtgtgagccatcaaaccgttcagcagctggttctcgagaaagagcaggccctggccgacttgaactctgtggagaagagcctggccgacctttttcgccgatacgaaaaaatgaaagaggtcctcgagggctttagaaagaatgaagaggttctgaagagatgcgcccaggaatatctttctagggtaaaaaaagaagaacagcgataccaagcgctgaaagtacatgctgaggagaagctcgacagagccaacgccgaaatagctcaggtgcgcggtaaagcccagcaggaacaggccgctcatcaagcatcgctgcggaaagaacagctccgcgtagacgccttggagcgcacactggaacaaaaaaacaaggaaatcgaggagttgaccaagatctgcgacgagctgatcgcaaaaatgggaaagtcatag

SEQ ID NO: 264410 - DNA, 3285 bp, Artificial Sequence
  derived and/or modified sequence
atgggaaacgaaaattccactagtgacaaccagcgtaccctctccgcacagacccctaggtcagcacaaccccctggaaacagtcagaacattaagcgcaaacaacaagatacccccggatcacctgatcatcgggacgcatcttcctcacctgtggctgatgatatcatccagcctgccgctccagcagatctggaaagccccacactggcagccagtagctaccacggggatgtcgtaggccaggtctccacggacctgatagcccaaaggagctccgacagcgaggaggccttcgaaactcctgagtcgaccacccccgttaaagctcctcccgctcctcctcctccccctcctgaggtcattccagagccagaggtgtctacgcagcctccaccagaggagccagggtgcggcagtgagactgtccccgttcccgacggccctaggtcagatagcgttgaagggagcccttttaggcccccttcccacagtttttcggccgtgttcgacgaggataagccaatcgcttctagtggaacctacaatctggatttcgataatatcgagctggtggataccttccagaccctggaacctagggcttccgatgccaagaatcaagaagggaaagtgaacacacgtagaaagagtacagatagtgttccaataagcaaatccacgctgagcagatctctaagcctccaggcgtccgacttcgacggcgcatcaagttccgggaatcccgaagccgtcgccctggcgcctgatgcctacagtactggtagcagctctgcatcaagtacactgaaacggaccaagaaacccagaccaccctccctgaagaagaaacagacgacaaaaaaaccaactgagacaccaccggtcaaagaaactcagcaggaaccagacgaggaaagtctggtgccctccggcgagaacctagcgagcgaaaccaagaccgaaagcgcaaaaaccgagggacctagtcctgctctgctggaggaaacgccccttgaacctgctgtggggcctaaggcagcctgtcccctggatagtgaatcagctgaaggcgtcgtgccccctgcctctggaggtgggagagttcagaactcacccccagtggggcgtaagaccctgcctctgaccaccgcaccagaggccggtgaggtaactcctagtgacagcggtgggcaggaagactccccagccaaaggattgtccgttcggctggagtttgactattccgaagacaaaagctcatgggataaccagcaggaaaacccgcctcccaccaaaaagatcggcaagaaacctgtggccaagatgcccctgagacgacctaaaatgaagaagacccccgagaaactagataacacgcctgcctcccccccaagatcacctgctgagccaaatgatatcccaattgccaagggaacgtacaccttcgatatcgacaaatgggacgacccaaatttcaatcctttttccagcacgagcaagatgcaagagagcccaaaactgccacaacagtcctataacttcgaccctgacacttgcgacgagagtgtggatccctttaaaacctcctcaaagacccccagctctccctccaagtctcccgcttcatttgagatacctgctagtgccatggaggccaatggagttgacggagatgggctcaacaagccagctaagaagaaaaagacacccttaaagacagacacatttcgggtgaaaaaaagtcctaaaagaagccccctgtcagatcccccttcccaggacccaacgccagcagcgacaccagagaccccacccgtgatctccgctgtcgtgcacgccacagacgaggagaagctggcggtgacaaaccagaagtggacttgcatgacagtggacctggaagcagataagcaggactatcctcaaccgtccgacctcagcacatttgttaacgagacaaagttttcctctcctaccgaagagctggactatcgcaatagctacgagattgaatatatggagaaaatcgggtcttcactccctcaggatgacgatgcccctaagaaacaggcgttataccttatgttcgatacatctcaggagagcccagtcaagtccagtccagtgcggatgtctgaatcgccaactccctgcagtggctccagtttcgaagagacggaggcgttggtgaatactgccgcaaaaaatcaacacccggttccaaggggcctggcccctaaccaggaaagccacctacaggttccagagaagagctcccagaaggagctcgaggctatggggctgggtactccttctgaagccattgaaattacggccccagagggaagtttcgcttcagccgatgccctactgtcacgtctggctcatccggtcagtctctgcggcgctctggactacttggagccggatctcgcggagaagaatccaccattgtttgcccagaagctccaggaagagctcgaatttgccattatgcgaatcgaagcactcaaacttgctagacagattgccctggccagccgttctcatcaggacgccaaacgggaggccgcacaccccacagatgtgagtatcagtaagacagctctctacagcagaataggcaccgctgaagttgagaagccagcgggtctcctgttccagcagcctgacctggactcagctctccagattgctagagccgagatcataacaaaagagagggaagtgagcgaatggaaagacaaatatgaggaatcaaggcgtgaagtgatggaaatgcggaaaatcgtcgcagagtatgagaaaaccatcgcccagatgatcgaggacgagcagcgcgaaaagtcagtctcgcatcagactgtccagcagctggtcctggagaaagagcaagctctggctgatctgaactctgtggaaaagagcctagcggacttgtttagaagatacgaaaagatgaaggaggttttggaaggtttccgcaaaaacgaagaagtgctcaagagatgtgcccaagaatacctgtcacgggtgaagaaggaggagcagcgctatcaggccttaaaagtccatgccgaggagaagctagatagggcaaacgctgagatcgcccaggtccgtgggaaagctcagcaggaacaagctgcccatcaggcatccctgcggaaagaacaactgagggtcgacgctctagagcggacactggaacagaagaataaggagatcgaggaactgacgaagatctgcgacgagctgatcgccaagatgggtaaaagctag

SEQ ID NO: 264411 - DNA, 3815 bp, Artificial Sequence
  derived and/or modified sequence
gtcacctctgacaaaattctggggacgctgggaacactgaatcaacatgggcaatgagaacagcacctcggacaaccagaggactttatcagctcagactccaaggtccgcgcagccacccgggaacagtcagaatataaaaaggaagcagcaggacacgcccggaagccctgaccacagagacgcgtccagttcacctgtggcagatgatatcatccagcccgctgcccccgcagacctggaaagcccaaccttagctgcctcttcctaccacggtgatgttgttggccaggtctctacggatctgatagcccagaggagttccgattctgaagaggcatttgagaccccggagtcaacgacccctgtcaaagctccgccagctccacccccaccaccccccgaagtcatcccagaacccgaggtcagcacacagccacccccggaagaaccaggatgtggttctgagacagtccctgtccctgatggcccacggagcgactcggtggaaggaagtcccttccgtcccccgtcacactccttctctgccgtcttcgatgaagacaagccgatagccagcagtgggacttacaacttggactttgacaacattgagcttgtggatacctttcagaccttggagcctcgtgcctcagacgctaagaatcaggagggcaaagtgaacacacggaggaagtccacggattccgtccccatctctaagtctacactgtcccggtcgctcagcctgcaagccagtgactttgatggtgcttcttcctcaggcaatcccgaggccgtggcccttgccccagatgcatatagcacgggttccagcagtgcttctagtacccttaagcgaactaaaaaaccgaggccgccttccttaaaaaagaaacagaccaccaagaaacccacagagacccccccagtgaaggagacgcaacaggagccagatgaagagagccttgtccccagtggggagaatctagcatctgagacgaaaacggaatctgccaagacggaaggtcctagcccagccttattggaggagacgccccttgagcccgctgtggggcccaaagctgcctgccctctggactcagagagtgcagaaggggttgtccccccggcttctggaggtggcagagtgcagaactcaccccctgtcgggaggaaaacgctgcctcttaccacggccccggaggcaggggaggtaaccccatcggatagcggggggcaagaggactctccagccaaagggctctccgtaaggctggagtttgactattctgaggacaagagtagttgggacaaccagcaggaaaacccccctcctaccaaaaagataggcaaaaagccagttgccaaaatgcccctgaggaggccaaagatgaaaaagacacccgagaaacttgacaacactcctgcctcacctcccagatcccctgctgaacccaatgacatccccattgctaaaggtacttacacctttgatattgacaagtgggatgaccccaattttaaccctttttcttccacctcaaaaatgcaggagtctcccaaactgccccaacaatcatacaactttgacccagacacctgtgatgagtccgttgacccctttaagacatcctctaagacccccagctcaccttctaaatccccagcctcctttgagatcccagccagtgctatggaagccaatggagtggacggggatgggctaaacaagcccgccaagaagaagaagacgcccctaaagactgacacatttagggtgaaaaagtcgccaaaacggtctcctctctctgatccaccttcccaggaccccaccccagctgctacaccagaaacaccaccagtgatctctgcggtggtccacgccacagatgaggaaaagctggcggtcaccaaccagaagtggacgtgcatgacagtggacctagaggctgacaaacaggactacccgcagccctcggacctgtccacctttgtaaacgagaccaaattcagttcacccactgaggagttggattacagaaactcctatgaaattgaatatatggagaaaattggctcctccttacctcaggacgacgatgccccgaagaagcaggccttgtaccttatgtttgacacttctcaggagagccctgtcaagtcatctcccgtccgcatgtcagagtccccgacgccgtgttcagggtcaagttttgaagagactgaagcccttgtgaacactgctgcgaaaaaccagcatcctgtcccacgaggactggcccctaaccaagagtcacacttgcaggtgccagagaaatcctcccagaaggagctggaggccatgggcttgggcaccccttcagaagcgattgaaattacagctcccgagggctcctttgcctctgctgacgccctcctcagcaggctagctcaccccgtctctctctgtggtgcacttgactatctggagcccgacttagcagaaaagaaccccccactattcgctcagaaactccaggaggagttagagtttgccatcatgcggatagaagccctgaagctggccaggcagattgctttggcttcccgcagccaccaggatgccaagagagaggctgctcacccaacagacgtctccatctccaaaacagccttgtactcccgcatcgggaccgctgaggtggagaaacctgcaggccttctgttccagcagcccgacctggactctgccctccagatcgccagagcagagatcataaccaaggagagagaggtctcagaatggaaagataaatatgaagaaagcaggcgggaagtgatggaaatgaggaaaatagtggccgagtatgagaagaccatcgctcagatgatagaggacgaacagagagagaagtcagtctcccaccagacggtgcagcagctggttctggagaaggagcaagccctggccgacctgaactccgtggagaagtctctggccgacctcttcagaagatatgagaagatgaaggaggtcctagaaggcttccgcaagaatgaagaggtgttgaagagatgtgcgcaggagtacctgtcccgggtgaagaaggaggagcagaggtaccaggccctgaaggtgcacgcggaggagaaactggacagggccaatgctgagattgctcaggttcgaggcaaggcccagcaggagcaagccgcccaccaggccagcctgcggaaggagcagctgcgagtggacgccctggaaaggacgctggagcagaagaataaagaaatagaagaactcaccaagatttgtgacgaactgattgccaaaatggggaaaagctaactctgaaccgaatgttttggacttaactgttgcgtgcaatatgaccgtcggcacactgctgttcctccagttccatggacaggttctgttttcactttttcgtatgcactactgtatttcctttctaaataaaattgatttgattgtatgcagtactaaggagactatcagaatttcttgctattggtttgcattttcctagtataattcatagcaagttgacctcagagttcctgtatcagggagattgtctgattctctaataaaagacacattgctgaccttggccttgccctttgtacacaagttcccagggtgagcagcttttggatttaatatgaacatgtacagcgtgcatagggactcttgccttaaggagtgtaaacttgatctgcatttgctgatttgtttttaaaaaaacaagaaatgcatgtttcaaataaaattctctattgtaaataaaattttttctttggatcttggc

SEQ ID NO: 264412 - DNA, 4114 bp, Artificial Sequence
  derived and/or modified sequence
caggagagaagaaacgcaaatcccagaaccgtgccaacatataaaaccccacattaagggttgtacagtgcactgggatttctcaagtcacccgcttggtcctcttccaagtatactttacttcctttcattcctctctaaaacttttttaaaaactttcactcctgctctaaaagttatcttggtttcttactctaccttatgccccttgggcgaattttttcctctgaggagggaagaatagagttgctgctgcagacacatcagattccctactggtaacagctggagtgcgtcacctctgacaaaattctggggacgctgggaacactgaatcaacatgggcaatgagaacagcacctcggacaaccagaggactttatcagctcagactccaaggtccgcgcagccacccgggaacagtcagaatataaaaaggaagcagcaggacacgcccggaagccctgaccacagagacgcgtccagttcacctgtggcagatgatatcatccagcccgctgcccccgcagacctggaaagcccaaccttagctgcctcttcctaccacggtgatgttgttggccaggtctctacggatctgatagcccagaggagttccgattctgaagaggcatttgagaccccggagtcaacgacccctgtcaaagctccgccagctccacccccaccaccccccgaagtcatcccagaacccgaggtcagcacacagccacccccggaagaaccaggatgtggttctgagacagtccctgtccctgatggcccacggagcgactcggtggaaggaagtcccttccgtcccccgtcacactccttctctgccgtcttcgatgaagacaagccgatagccagcagtgggacttacaacttggactttgacaacattgagcttgtggatacctttcagaccttggagcctcgtgcctcagacgctaagaatcaggagggcaaagtgaacacacggaggaagtccacggattccgtccccatctctaagtctacactgtcccggtcgctcagcctgcaagccagtgactttgatggtgcttcttcctcaggcaatcccgaggccgtggcccttgccccagatgcatatagcacgggttccagcagtgcttctagtacccttaagcgaactaaaaaaccgaggccgccttccttaaaaaagaaacagaccaccaagaaacccacagagacccccccagtgaaggagacgcaacaggagccagatgaagagagccttgtccccagtggggagaatctagcatctgagacgaaaacggaatctgccaagacggaaggtcctagcccagccttattggaggagacgccccttgagcccgctgtggggcccaaagctgcctgccctctggactcagagagtgcagaaggggttgtccccccggcttctggaggtggcagagtgcagaactcaccccctgtcgggaggaaaacgctgcctcttaccacggccccggaggcaggggaggtaaccccatcggatagcggggggcaagaggactctccagccaaagggctctccgtaaggctggagtttgactattctgaggacaagagtagttgggacaaccagcaggaaaacccccctcctaccaaaaagataggcaaaaagccagttgccaaaatgcccctgaggaggccaaagatgaaaaagacacccgagaaacttgacaacactcctgcctcacctcccagatcccctgctgaacccaatgacatccccattgctaaaggtacttacacctttgatattgacaagtgggatgaccccaattttaaccctttttcttccacctcaaaaatgcaggagtctcccaaactgccccaacaatcatacaactttgacccagacacctgtgatgagtccgttgacccctttaagacatcctctaagacccccagctcaccttctaaatccccagcctcctttgagatcccagccagtgctatggaagccaatggagtggacggggatgggctaaacaagcccgccaagaagaagaagacgcccctaaagactgacacatttagggtgaaaaagtcgccaaaacggtctcctctctctgatccaccttcccaggaccccaccccagctgctacaccagaaacaccaccagtgatctctgcggtggtccacgccacagatgaggaaaagctggcggtcaccaaccagaagtggacgtgcatgacagtggacctagaggctgacaaacaggactacccgcagccctcggacctgtccacctttgtaaacgagaccaaattcagttcacccactgaggagttggattacagaaactcctatgaaattgaatatatggagaaaattggctcctccttacctcaggacgacgatgccccgaagaagcaggccttgtaccttatgtttgacacttctcaggagagccctgtcaagtcatctcccgtccgcatgtcagagtccccgacgccgtgttcagggtcaagttttgaagagactgaagcccttgtgaacactgctgcgaaaaaccagcatcctgtcccacgaggactggcccctaaccaagagtcacacttgcaggtgccagagaaatcctcccagaaggagctggaggccatgggcttgggcaccccttcagaagcgattgaaattacagctcccgagggctcctttgcctctgctgacgccctcctcagcaggctagctcaccccgtctctctctgtggtgcacttgactatctggagcccgacttagcagaaaagaaccccccactattcgctcagaaactccaggaggagttagagtttgccatcatgcggatagaagccctgaagctggccaggcagattgctttggcttcccgcagccaccaggatgccaagagagaggctgctcacccaacagacgtctccatctccaaaacagccttgtactcccgcatcgggaccgctgaggtggagaaacctgcaggccttctgttccagcagcccgacctggactctgccctccagatcgccagagcagagatcataaccaaggagagagaggtctcagaatggaaagataaatatgaagaaagcaggcgggaagtgatggaaatgaggaaaatagtggccgagtatgagaagaccatcgctcagatgatagaggacgaacagagagagaagtcagtctcccaccagacggtgcagcagctggttctggagaaggagcaagccctggccgacctgaactccgtggagaagtctctggccgacctcttcagaagatatgagaagatgaaggaggtcctagaaggcttccgcaagaatgaagaggtgttgaagagatgtgcgcaggagtacctgtcccgggtgaagaaggaggagcagaggtaccaggccctgaaggtgcacgcggaggagaaactggacagggccaatgctgagattgctcaggttcgaggcaaggcccagcaggagcaagccgcccaccaggccagcctgcggaaggagcagctgcgagtggacgccctggaaaggacgctggagcagaagaataaagaaatagaagaactcaccaagatttgtgacgaactgattgccaaaatggggaaaagctaactctgaaccgaatgttttggacttaactgttgcgtgcaatatgaccgtcggcacactgctgttcctccagttccatggacaggttctgttttcactttttcgtatgcactactgtatttcctttctaaataaaattgatttgattgtatgcagtactaaggagactatcagaatttcttgctattggtttgcattttcctagtataattcatagcaagttgacctcagagttcctgtatcagggagattgtctgattctctaataaaagacacattgctgaccttggccttgccctttgtacacaagttcccagggtgagcagcttttggatttaatatgaacatgtacagcgtgcatagggactcttgccttaaggagtgtaaacttgatctgcatttgctgatttgtttttaaaaaaacaagaaatgcatgtttcaaataaaattctctattgtaaataaaattttttctttggatcttggcaataa

SEQ ID NO: 264413 - protein, 2948 aa, Artificial Sequence
  derived and/or modified sequence
MGNENSTSDNQRTLSAQTPRSAQPPGNSQNIKRKQQDTPGSPDHRDASSIGSVGLGGFCTASESSASLDPCLVSPEVTEPRKDPQGARGPEGSLLPSPPPSQEREHPSSSMPFAECPPEGCLASPAAAPEDGPQTQSPRREPAPNAPGDIAAAFPAERDSSTPYQEIAAVPSAGRERQPKEEGQKSSFSFSSGIDQSPGMSPVPLREPMKAPLCGEGDQPGGFESQEKEAAGGFPPAESRQGVASVQVTPEAPAAAQQGTESSAVLEKSPLKPMAPIPQDPAPRASDRERGQGEAPPQYLTDDLEFLRACHLPRSNSGAAPEAEVNAASQESCQQPVGAYLPHAELPWGLPSPALVPEAGGSGKEALDTIDVQGHPQTGMRGTKPNQVVCVAAGGQPEGGLPVSPEPSLLTPTEEAHPASSLASFPAAQIPIAVEEPGSSSRESVSKAGMPVSADAAKEVVDAGLVGLERQVSDLGSKGEHPEGDPGEVPAPSPQERGEHLNTEQSHEVQPGVPPPPLPKEQSHEVQPGAPPPPLPKAPSESARGPPGPTDGAKVHEDSTSPAVAKEGSRSPGDSPGGKEEAPEPPDGGDPGNLQGEDSQAFSSKRDPEVGKDELSKPSSDAESRDHPSSHSAQPPRKGGAGHTDGPHSQTAEADASGLPHKLGEEDPVLPPVPDGAGEPTVPEGAIWEGSGLQPKCPDTLQSREGLGRMESFLTLESEKSDFPPTPVAEVAPKAQEGESTLEIRKMGSCDGEGLLTSPDQPRGPACDASRQEFHAGVPHPPQGENLAADLGLTALILDQDQQGIPSCPGEGWIRGAASEWPLLSSEKHLQPSQAQPETSIFDVLKEQAQPPENGKETSPSHPGFKDQGADSSQIHVPVEPQEDNNLPTHGGQEQALGSELQSQLPKGTLSDTPTSSPTDMVWESSLTEESELSAPTRQKLPALGEKRPEGACGDGQSSRVSPPAADVLKDFSLAGNFSRKETCCTGQGPNKSQQALADALEEGSQHEEACQRHPGASEAADGCSPLWGLSKREMASGNTGEAPPCQPDSVALLDAVPCLPALAPASPGVTPTQDAPETEACDETQEGRQQPVPAPQQKMECWATSDAESPKLLASFPSAGEQGGEAGAAETGGSAGAGDPGKQQAPEKPGEATLSCGLLQTEHCLTSGEEASTSALRESCQAEHPMASCQDALLPARELGGIPRSTMDFSTHQAVPDPKELLLSGPPEVAAPDTPYLHVDSAAQRGAEDSGVKAVSSADPRAPGESPCPVGEPPLALENAASLKLFAGSLAPLLQPGAAGGEIPAVQASSGSPKARTTEGPVDSMPCLDRMPLLAKGKQATGEEKAATAPGAGAKASGEGMAGDAAGETEGSMERMGEPSQDPKQGTSGGVDTSSEQIATLTGFPDFREHIAKIFEKPVLGALATPGEKAGAGRSAVGKDLTRPLGPEKLLDGPPGVDVTLLPAPPARLQVEKKQQLAGEAEISHLALQDPASDKLLGPAGLTWERNLPGAGVGKEMAGVPPTLREDERPEGPGAAWPGLEGQAYSQLERSRQELASGLPSPAATQELPVERAAAFQVAPHSHGEEAVAQDRIPSGKQHQETSACDSPHGEDGPGDFAHTGVPGHVPRSTCAPSPQREVLTVPEANSEPWTLDTLGGERRPGVTAGILEMRNALGNQSTPAPPTGEVADTPLEPGKVAGAAGEAEGDITLSTAETQACASGDLPEAGTTRTFSVVAGDLVLPGSCQDPACSDKAPGMEGTAALHGDSPARPQQAKEQPGPERPIPAGDGKVCVSSPPEPDETHDPKLQHLAPEELHTDRESPRPGPSMLPSVPKKDAPRVMDKVTSDETRGAEGTESSPVADDIIQPAAPADLESPTLAASSYHGDVVGQVSTDLIAQSISPAAAHAGLPPSAAEHIVSPSAPAGDRVEASTPSCPDPAKDLSRSSDSEEAFETPESTTPVKAPPAPPPPPPEVIPEPEVSTQPPPEEPGCGSETVPVPDGPRSDSVEGSPFRPPSHSFSAVFDEDKPIASSGTYNLDFDNIELVDTFQTLEPRASDAKNQEGKVNTRRKSTDSVPISKSTLSRSLSLQASDFDGASSSGNPEAVALAPDAYSTGSSSASSTLKRTKKPRPPSLKKKQTTKKPTETPPVKETQQEPDEESLVPSGENLASETKTESAKTEGPSPALLEETPLEPAVGPKAACPLDSESAEGVVPPASGGGRVQNSPPVGRKTLPLTTAPEAGEVTPSDSGGQEDSPAKGLSVRLEFDYSEDKSSWDNQQENPPPTKKIGKKPVAKMPLRRPKMKKTPEKLDNTPASPPRSPAEPNDIPIAKGTYTFDIDKWDDPNFNPFSSTSKMQESPKLPQQSYNFDPDTCDESVDPFKTSSKTPSSPSKSPASFEIPASAMEANGVDGDGLNKPAKKKKTPLKTDTFRVKKSPKRSPLSDPPSQDPTPAATPETPPVISAVVHATDEEKLAVTNQKWTCMTVDLEADKQDYPQPSDLSTFVNETKFSSPTEELDYRNSYEIEYMEKIGSSLPQDDDAPKKQALYLMFDTSQESPVKSSPVRMSESPTPCSGSSFEETEALVNTAAKNQHPVPRGLAPNQESHLQVPEKSSQKELEAMGLGTPSEAIEITAPEGSFASADALLSRLAHPVSLCGALDYLEPDLAEKNPPLFAQKLQEELEFAIMRIEALKLARQIALASRSHQDAKREAAHPTDVSISKTALYSRIGTAEVEKPAGLLFQQPDLDSALQIARAEIITKEREVSEWKDKYEESRREVMEMRKIVAEYEKTIAQMIEDEQREKSVSHQTVQQLVLEKEQALADLNSVEKSLADLFRRYEKMKEVLEGFRKNEEVLKRCAQEYLSRVKKEEQRYQALKVHAEEKLDRANAEIAQVRGKAQQEQAAHQASLRKEQLRVDALERTLEQKNKEIEELTKICDELIAKMGKS

SEQ ID NO: 264414 - DNA, 8847 bp, Artificial Sequence
  derived and/or modified sequence
atgggcaacgagaacagcaccagcgacaaccagagaaccctgagcgcccagacccccagaagcgcccagccccccggcaacagccagaacatcaagagaaagcagcaggacacccccggcagccccgaccacagagacgccagcagcatcggcagcgtgggcctgggcggcttctgcaccgccagcgagagcagcgccagcctggacccctgcctggtgagccccgaggtgaccgagcccagaaaggacccccagggcgccagaggccccgagggcagcctgctgcccagccccccccccagccaggagagagagcaccccagcagcagcatgcccttcgccgagtgcccccccgagggctgcctggccagccccgccgccgcccccgaggacggcccccagacccagagccccagaagagagcccgcccccaacgcccccggcgacatcgccgccgccttccccgccgagagagacagcagcaccccctaccaggagatcgccgccgtgcccagcgccggcagagagagacagcccaaggaggagggccagaagagcagcttcagcttcagcagcggcatcgaccagagccccggcatgagccccgtgcccctgagagagcccatgaaggcccccctgtgcggcgagggcgaccagcccggcggcttcgagagccaggagaaggaggccgccggcggcttcccccccgccgagagcagacagggcgtggccagcgtgcaggtgacccccgaggcccccgccgccgcccagcagggcaccgagagcagcgccgtgctggagaagagccccctgaagcccatggcccccatcccccaggaccccgcccccagagccagcgacagagagagaggccagggcgaggcccccccccagtacctgaccgacgacctggagttcctgagagcctgccacctgcccagaagcaacagcggcgccgcccccgaggccgaggtgaacgccgccagccaggagagctgccagcagcccgtgggcgcctacctgccccacgccgagctgccctggggcctgcccagccccgccctggtgcccgaggccggcggcagcggcaaggaggccctggacaccatcgacgtgcagggccacccccagaccggcatgagaggcaccaagcccaaccaggtggtgtgcgtggccgccggcggccagcccgagggcggcctgcccgtgagccccgagcccagcctgctgacccccaccgaggaggcccaccccgccagcagcctggccagcttccccgccgcccagatccccatcgccgtggaggagcccggcagcagcagcagagagagcgtgagcaaggccggcatgcccgtgagcgccgacgccgccaaggaggtggtggacgccggcctggtgggcctggagagacaggtgagcgacctgggcagcaagggcgagcaccccgagggcgaccccggcgaggtgcccgcccccagcccccaggagagaggcgagcacctgaacaccgagcagagccacgaggtgcagcccggcgtgccccccccccccctgcccaaggagcagagccacgaggtgcagcccggcgccccccccccccccctgcccaaggcccccagcgagagcgccagaggcccccccggccccaccgacggcgccaaggtgcacgaggacagcaccagccccgccgtggccaaggagggcagcagaagccccggcgacagccccggcggcaaggaggaggcccccgagccccccgacggcggcgaccccggcaacctgcagggcgaggacagccaggccttcagcagcaagagagaccccgaggtgggcaaggacgagctgagcaagcccagcagcgacgccgagagcagagaccaccccagcagccacagcgcccagccccccagaaagggcggcgccggccacaccgacggcccccacagccagaccgccgaggccgacgccagcggcctgccccacaagctgggcgaggaggaccccgtgctgccccccgtgcccgacggcgccggcgagcccaccgtgcccgagggcgccatctgggagggcagcggcctgcagcccaagtgccccgacaccctgcagagcagagagggcctgggcagaatggagagcttcctgaccctggagagcgagaagagcgacttcccccccacccccgtggccgaggtggcccccaaggcccaggagggcgagagcaccctggagatcagaaagatgggcagctgcgacggcgagggcctgctgaccagccccgaccagcccagaggccccgcctgcgacgccagcagacaggagttccacgccggcgtgccccaccccccccagggcgagaacctggccgccgacctgggcctgaccgccctgatcctggaccaggaccagcagggcatccccagctgccccggcgagggctggatcagaggcgccgccagcgagtggcccctgctgagcagcgagaagcacctgcagcccagccaggcccagcccgagaccagcatcttcgacgtgctgaaggagcaggcccagccccccgagaacggcaaggagaccagccccagccaccccggcttcaaggaccagggcgccgacagcagccagatccacgtgcccgtggagccccaggaggacaacaacctgcccacccacggcggccaggagcaggccctgggcagcgagctgcagagccagctgcccaagggcaccctgagcgacacccccaccagcagccccaccgacatggtgtgggagagcagcctgaccgaggagagcgagctgagcgcccccaccagacagaagctgcccgccctgggcgagaagagacccgagggcgcctgcggcgacggccagagcagcagagtgagcccccccgccgccgacgtgctgaaggacttcagcctggccggcaacttcagcagaaaggagacctgctgcaccggccagggccccaacaagagccagcaggccctggccgacgccctggaggagggcagccagcacgaggaggcctgccagagacaccccggcgccagcgaggccgccgacggctgcagccccctgtggggcctgagcaagagagagatggccagcggcaacaccggcgaggcccccccctgccagcccgacagcgtggccctgctggacgccgtgccctgcctgcccgccctggcccccgccagccccggcgtgacccccacccaggacgcccccgagaccgaggcctgcgacgagacccaggagggcagacagcagcccgtgcccgccccccagcagaagatggagtgctgggccaccagcgacgccgagagccccaagctgctggccagcttccccagcgccggcgagcagggcggcgaggccggcgccgccgagaccggcggcagcgccggcgccggcgaccccggcaagcagcaggcccccgagaagcccggcgaggccaccctgagctgcggcctgctgcagaccgagcactgcctgaccagcggcgaggaggccagcaccagcgccctgagagagagctgccaggccgagcaccccatggccagctgccaggacgccctgctgcccgccagagagctgggcggcatccccagaagcaccatggacttcagcacccaccaggccgtgcccgaccccaaggagctgctgctgagcggcccccccgaggtggccgcccccgacaccccctacctgcacgtggacagcgccgcccagagaggcgccgaggacagcggcgtgaaggccgtgagcagcgccgaccccagagcccccggcgagagcccctgccccgtgggcgagccccccctggccctggagaacgccgccagcctgaagctgttcgccggcagcctggcccccctgctgcagcccggcgccgccggcggcgagatccccgccgtgcaggccagcagcggcagccccaaggccagaaccaccgagggccccgtggacagcatgccctgcctggacagaatgcccctgctggccaagggcaagcaggccaccggcgaggagaaggccgccaccgcccccggcgccggcgccaaggccagcggcgagggcatggccggcgacgccgccggcgagaccgagggcagcatggagagaatgggcgagcccagccaggaccccaagcagggcaccagcggcggcgtggacaccagcagcgagcagatcgccaccctgaccggcttccccgacttcagagagcacatcgccaagatcttcgagaagcccgtgctgggcgccctggccacccccggcgagaaggccggcgccggcagaagcgccgtgggcaaggacctgaccagacccctgggccccgagaagctgctggacggcccccccggcgtggacgtgaccctgctgcccgccccccccgccagactgcaggtggagaagaagcagcagctggccggcgaggccgagatcagccacctggccctgcaggaccccgccagcgacaagctgctgggccccgccggcctgacctgggagagaaacctgcccggcgccggcgtgggcaaggagatggccggcgtgccccccaccctgagagaggacgagagacccgagggccccggcgccgcctggcccggcctggagggccaggcctacagccagctggagagaagcagacaggagctggccagcggcctgcccagccccgccgccacccaggagctgcccgtggagagagccgccgccttccaggtggccccccacagccacggcgaggaggccgtggcccaggacagaatccccagcggcaagcagcaccaggagaccagcgcctgcgacagcccccacggcgaggacggccccggcgacttcgcccacaccggcgtgcccggccacgtgcccagaagcacctgcgcccccagcccccagagagaggtgctgaccgtgcccgaggccaacagcgagccctggaccctggacaccctgggcggcgagagaagacccggcgtgaccgccggcatcctggagatgagaaacgccctgggcaaccagagcacccccgccccccccaccggcgaggtggccgacacccccctggagcccggcaaggtggccggcgccgccggcgaggccgagggcgacatcaccctgagcaccgccgagacccaggcctgcgccagcggcgacctgcccgaggccggcaccaccagaaccttcagcgtggtggccggcgacctggtgctgcccggcagctgccaggaccccgcctgcagcgacaaggcccccggcatggagggcaccgccgccctgcacggcgacagccccgccagaccccagcaggccaaggagcagcccggccccgagagacccatccccgccggcgacggcaaggtgtgcgtgagcagcccccccgagcccgacgagacccacgaccccaagctgcagcacctggcccccgaggagctgcacaccgacagagagagccccagacccggccccagcatgctgcccagcgtgcccaagaaggacgcccccagagtgatggacaaggtgaccagcgacgagaccagaggcgccgagggcaccgagagcagccccgtggccgacgacatcatccagcccgccgcccccgccgacctggagagccccaccctggccgccagcagctaccacggcgacgtggtgggccaggtgagcaccgacctgatcgcccagagcatcagccccgccgccgcccacgccggcctgccccccagcgccgccgagcacatcgtgagccccagcgcccccgccggcgacagagtggaggccagcacccccagctgccccgaccccgccaaggacctgagcagaagcagcgacagcgaggaggccttcgagacccccgagagcaccacccccgtgaaggccccccccgccccccccccccccccccccgaggtgatccccgagcccgaggtgagcacccagcccccccccgaggagcccggctgcggcagcgagaccgtgcccgtgcccgacggccccagaagcgacagcgtggagggcagccccttcagaccccccagccacagcttcagcgccgtgttcgacgaggacaagcccatcgccagcagcggcacctacaacctggacttcgacaacatcgagctggtggacaccttccagaccctggagcccagagccagcgacgccaagaaccaggagggcaaggtgaacaccagaagaaagagcaccgacagcgtgcccatcagcaagagcaccctgagcagaagcctgagcctgcaggccagcgacttcgacggcgccagcagcagcggcaaccccgaggccgtggccctggcccccgacgcctacagcaccggcagcagcagcgccagcagcaccctgaagagaaccaagaagcccagaccccccagcctgaagaagaagcagaccaccaagaagcccaccgagaccccccccgtgaaggagacccagcaggagcccgacgaggagagcctggtgcccagcggcgagaacctggccagcgagaccaagaccgagagcgccaagaccgagggccccagccccgccctgctggaggagacccccctggagcccgccgtgggccccaaggccgcctgccccctggacagcgagagcgccgagggcgtggtgccccccgccagcggcggcggcagagtgcagaacagcccccccgtgggcagaaagaccctgcccctgaccaccgcccccgaggccggcgaggtgacccccagcgacagcggcggccaggaggacagccccgccaagggcctgagcgtgagactggagttcgactacagcgaggacaagagcagctgggacaaccagcaggagaaccccccccccaccaagaagatcggcaagaagcccgtggccaagatgcccctgagaagacccaagatgaagaagacccccgagaagctggacaacacccccgccagcccccccagaagccccgccgagcccaacgacatccccatcgccaagggcacctacaccttcgacatcgacaagtgggacgaccccaacttcaaccccttcagcagcaccagcaagatgcaggagagccccaagctgccccagcagagctacaacttcgaccccgacacctgcgacgagagcgtggaccccttcaagaccagcagcaagacccccagcagccccagcaagagccccgccagcttcgagatccccgccagcgccatggaggccaacggcgtggacggcgacggcctgaacaagcccgccaagaagaagaagacccccctgaagaccgacaccttcagagtgaagaagagccccaagagaagccccctgagcgacccccccagccaggaccccacccccgccgccacccccgagaccccccccgtgatcagcgccgtggtgcacgccaccgacgaggagaagctggccgtgaccaaccagaagtggacctgcatgaccgtggacctggaggccgacaagcaggactacccccagcccagcgacctgagcaccttcgtgaacgagaccaagttcagcagccccaccgaggagctggactacagaaacagctacgagatcgagtacatggagaagatcggcagcagcctgccccaggacgacgacgcccccaagaagcaggccctgtacctgatgttcgacaccagccaggagagccccgtgaagagcagccccgtgagaatgagcgagagccccaccccctgcagcggcagcagcttcgaggagaccgaggccctggtgaacaccgccgccaagaaccagcaccccgtgcccagaggcctggcccccaaccaggagagccacctgcaggtgcccgagaagagcagccagaaggagctggaggccatgggcctgggcacccccagcgaggccatcgagatcaccgcccccgagggcagcttcgccagcgccgacgccctgctgagcagactggcccaccccgtgagcctgtgcggcgccctggactacctggagcccgacctggccgagaagaacccccccctgttcgcccagaagctgcaggaggagctggagttcgccatcatgagaatcgaggccctgaagctggccagacagatcgccctggccagcagaagccaccaggacgccaagagagaggccgcccaccccaccgacgtgagcatcagcaagaccgccctgtacagcagaatcggcaccgccgaggtggagaagcccgccggcctgctgttccagcagcccgacctggacagcgccctgcagatcgccagagccgagatcatcaccaaggagagagaggtgagcgagtggaaggacaagtacgaggagagcagaagagaggtgatggagatgagaaagatcgtggccgagtacgagaagaccatcgcccagatgatcgaggacgagcagagagagaagagcgtgagccaccagaccgtgcagcagctggtgctggagaaggagcaggccctggccgacctgaacagcgtggagaagagcctggccgacctgttcagaagatacgagaagatgaaggaggtgctggagggcttcagaaagaacgaggaggtgctgaagagatgcgcccaggagtacctgagcagagtgaagaaggaggagcagagataccaggccctgaaggtgcacgccgaggagaagctggacagagccaacgccgagatcgcccaggtgagaggcaaggcccagcaggagcaggccgcccaccaggccagcctgagaaaggagcagctgagagtggacgccctggagagaaccctggagcagaagaacaaggagatcgaggagctgaccaagatctgcgacgagctgatcgccaagatgggcaagagctag

SEQ ID NO: 264415 - DNA, 8847 bp, Artificial Sequence
  derived and/or modified sequence
atgggcaacgagaactccacctccgataaccagaggaccctcagtgctcaaaccccccggtcagcacagcccccagggaattcccagaacattaaacgaaagcagcaggatacccccggttcccccgatcatcgagacgcttcatctatcggttcggtggggctgggtgggttttgcactgcctcagagagcagcgcctcacttgatccatgcctggtaagcccagaggtgactgaaccaaggaaggatccacaaggagctagaggacccgagggcagcctcctgcccagccctcctcccagccaggagagagagcacccgtccagttcgatgccgttcgccgaatgtccgccggagggatgtctggccagccctgctgcggcccccgaagacggtccacagacccaaagtccgagaagggagccggcacctaatgcccccggcgatatcgctgctgcgttccctgcagagagagactcctctacaccgtaccaggaaattgcagctgtccctagtgccgggcgcgaacggcagcccaaagaggaaggccagaagtcgagctttagcttttcttccgggattgatcagtcacccggtatgagccccgtgccactgagggagcccatgaaggcccctctgtgcggcgagggcgaccagccgggggggttcgaatcccaagagaaagaggctgccggcggctttccgccagctgagagccgccaaggtgtagccagtgtccaagtgacccctgaggcccctgctgcggcccaacagggaacagaatctagcgccgttctcgagaagtctccattgaaacccatggcccctattcctcaagatcccgcaccaagggcttccgaccgtgaaagaggacaaggagaggctcctccacagtatttaacggacgacctggaatttctccgggcctgccacttgcctagaagtaattccggggccgctccagaggccgaggtcaacgcggcatcacaggagtcatgccaacaaccggttggagcttacttaccacacgccgaacttccatggggcctgccctcccccgcactggtcccagaagctggcggttctggcaaagaggcacttgatacgatcgacgtccaaggtcacccacagactggcatgcggggtaccaagccaaatcaagtcgtgtgcgtggccgctgggggtcagcctgaaggcggactgccagtaagtcccgaaccttccttactgacccctaccgaggaggctcacccagcatcttccttggctagcttccccgctgctcaaatacccattgccgtagaggaacctgggtcatccagtcgagaaagtgtgtcaaaagctggcatgcccgtctcagccgatgccgctaaggaggtggtggatgccggccttgtaggactggagcgtcaggtctccgatttaggaagtaagggagagcatcccgaaggtgacccaggtgaggtgcctgcaccttctccacaggagcgcggcgagcacctaaatacagaacaaagccacgaagtgcagccaggggtgcctccccccccactgccaaaagagcagtcacacgaggtgcagccaggcgctcctcccccccctctgcctaaggcaccttctgagagtgcccgtgggcctcctggacctaccgacggtgctaaggtgcatgaagattccactagtccagcggtggctaaagaggggtcccggtctcccggcgattcacccggcggaaaagaggaggcgcccgagccacctgacgggggagatccgggcaacctacaaggagaagattcccaagcatttagtagtaaacgtgatcccgaagtgggcaaggatgagctgtccaagccgtcatctgacgcagagtccagagaccacccgagctcccactcagcccagcccccaaggaagggaggcgccgggcatactgatggtcctcattcccagaccgcggaagccgacgccagcggactgccccacaagttaggtgaagaagaccctgtgctgccacctgtcccagacggcgctggagaaccaactgtgccagagggtgccatttgggaagggtccggccttcagcccaagtgtcctgataccctgcagagccgcgaggggttagggcggatggaaagctttttgacgttggaatcagaaaagtcagattttccgcccacaccggtggcggaggtggcacctaaagcccaagagggagagtcaaccttggagatcaggaaaatgggctcatgcgacggcgagggcttgcttacaagccctgaccagcccagaggcccagcgtgtgatgccagcagacaggaatttcatgctggggtcccacacccacctcaaggtgagaacctggctgctgatctcggactgaccgctctcattctcgaccaggatcaacagggaataccatcttgcccaggcgaaggctggattaggggggcggcaagcgagtggcctctcttatcatccgagaaacacctgcagccatcccaggcccaaccggaaacatctatctttgacgttctcaaagaacaagcccagcccccggagaatgggaaagagacaagcccaagccaccccggctttaaggatcagggagcagactctagccagatccacgtgcccgtcgaacctcaagaggacaacaatctacctacccatggtggacaggaacaagcactgggctccgagctgcagtcccaactccccaaggggaccctgtctgacaccccgactagtagtcccacagatatggtctgggaaagttccctgactgaagagtcagagctatccgccccaacccggcagaaactaccggccctgggcgagaagaggcccgagggggcatgtggcgacggtcagtccagtcgagtttctccacccgccgccgatgttctgaaggacttttctctcgccggtaacttctctaggaaggagacctgttgtactgggcagggcccaaacaagtcccagcaggctttagctgacgcactcgaggagggttcgcagcatgaggaagcttgccagcgtcaccccggggcatctgaagcagctgatggctgttcaccactgtggggcctcagcaaacgcgagatggcatccggtaacaccggagaggcccctccttgccagccggactccgtcgcgcttttagacgcagtgccatgcctgccggccttggcaccagcatcccccggcgtgacacccacgcaggatgccccggagactgaagcatgcgacgagacacaggaagggaggcagcagcccgtccctgcaccccagcaaaaaatggaatgttgggccacaagcgatgccgagagtccaaagctactggccagcttcccctccgcaggggagcaaggtggggaagccggagccgcagaaaccggaggcagcgcgggagctggtgatcctggtaagcaacaggcgcctgagaagcccggagaggctacattaagctgtggactgcttcagactgaacactgtcttacatccggggaagaggcatcaacctcagccctccgcgaatcatgccaggcagaacaccccatggcctcctgccaggacgctctcctgcctgccagggaactgggaggcataccgcgctcaacaatggacttttctacccatcaggctgtccccgatccgaaggagctcctgttgtctgggcccccagaagtagctgctccagatacaccatacttgcatgttgacagcgcggcacagcgcggagcggaagatagtggcgtgaaggcagtgagcagtgctgatcctcgtgcacccggagagtctccttgtcccgtaggcgagccaccactggcgctcgagaacgctgcttctctgaaactgtttgccggatcacttgcacctctactgcagcctggagccgcaggcggcgagatacctgccgtgcaggcatccagcggcagccccaaggcaagaaccacggagggtccagttgactccatgccttgcctggaccggatgccgctgcttgcaaagggcaaacaggcaaccggagaagaaaaggctgctacagccccgggcgccggcgccaaggcatctggcgaagggatggcaggggatgcagccggtgagaccgagggaagcatggaacgaatgggcgaaccttctcaggaccctaagcagggcaccagtggaggagtcgacacaagttccgaacagattgccacactgacaggattccccgattttcgcgaacacatcgccaaaattttcgaaaagccagtgttgggagccctggcaacaccaggggaaaaggcaggggcgggaaggagcgcggtcggaaaggacctcacaaggccactgggtcccgagaaactgctggatggtccccccggcgttgacgtcacattgctgcccgcccccccagcccgccttcaagtcgagaaaaaacagcagttggcaggagaagctgagatatcacatcttgccctgcaagatcctgcgagcgacaaattgctggggcccgctggcctgacatgggaacggaatctgcctggagctggcgtgggaaaggagatggccggggtgcctcccactttacgagaagatgagagacccgaggggccgggggctgcctggccgggactggagggccaggcttatagccagttagagcgctctagacaggaacttgcgagcgggctgccaagtcctgctgccacacaagagttgcctgtggaaagggcggctgcgttccaggttgcgcctcatagtcacggcgaagaagccgttgcccaggatagaattccaagcggaaaacagcatcaggaaacaagtgcatgtgactccccacatggtgaagatggtcccggcgattttgctcacacaggcgttccggggcacgtgcctaggagtacgtgtgccccatcccctcagcgcgaggtcttgacagttcccgaagccaactcagagccctggaccctggacaccctgggcggagagcggaggcccggtgtaaccgcaggcattctggaaatgcggaacgccctcggaaatcaatctaccccagcgccacccaccggcgaagtagctgatactccacttgaaccaggaaaggtcgccggagcggctggcgaagctgagggtgatattaccctcagtactgcagagacacaggcttgcgcgtcaggtgacttaccagaggctggtactactcgcactttttctgtggttgctggggacctcgttctcccggggtcttgccaggatccagcgtgttcagataaggcgccagggatggaagggacagctgcccttcatggggattctccggcccggccccaacaggccaaagagcagcctgggccagagcggccgatccctgccggtgacgggaaagtttgtgtgagctccccgcccgagcctgatgagactcatgacccaaagcttcagcacttggccccagaagagctccataccgaccgggagtctcccagacctggcccatccatgcttccttccgtgcctaaaaaggacgcgcctcgcgtgatggataaggtgacatctgacgaaacccggggagccgaaggcaccgagagtagtcccgttgccgatgacattattcaacccgcagctcctgccgatctggaaagccctacacttgccgcttcttcttaccacggagacgttgttggacaggtgagcacagatctgatcgcacagagtataagtcctgccgcagcacacgccgggctgccccccagcgccgccgagcacattgtttcaccttctgcccccgccggtgatcgagttgaggccagcactccttcatgcccggaccccgctaaagatttatcaaggtcatcagactccgaagaggcgtttgaaaccccagaatcgacgacacccgtgaaagctccacccgcgccgccccctcctccaccagaggtgatccccgagcctgaagtctccacacagccacctccggaagagcccggctgtggtagtgagacagttcccgtacccgacgggccaaggtcagacagtgtggaaggcagtcccttcagacccccttcccacagtttttccgccgtttttgatgaggacaaacccatagcctcctctggtacctacaaccttgatttcgacaacatcgagcttgtggatacttttcagacactggaaccgcgtgcaagtgatgccaagaaccaggaagggaaagtaaatacacggcgcaagagtaccgatagcgtgcccatctctaaaagcacactgtcacgttcactcagtttacaggcaagtgacttcgatggggctagctccagtggaaatcctgaggccgttgcactggccccagacgcttacagcacgggatccagttccgctagctctaccttaaagcgcacaaagaaaccccgccccccgagtttgaaaaaaaaacagacgacaaagaagcccaccgaaaccccccccgtgaaagaaacccagcaggagcccgatgaagagtccctggtcccttccggagagaatttggccagtgagaccaagactgagtctgccaagaccgaagggccatcccccgccctgctggaagagacacccttggagcccgcggttggacctaaagccgcctgtcccctggacagcgaatccgcagagggtgtcgtgccacccgcaagcgggggcggtagagtacaaaacagccctccagtgggtcgtaagaccctccctttaaccacagctccagaggctggggaagtcactccctccgatagtggggggcaggaagacagcccagccaagggactgagcgtgcgtcttgagttcgattatagcgaggataagtcatcatgggataaccagcaggagaaccctcccccaacaaagaagattggcaagaagccggttgccaagatgccacttagaaggcctaaaatgaagaagacacctgaaaaactggacaatactcctgcatcacccccccggagtcccgctgagcccaacgacatccccattgccaagggcacttatacattcgacatcgataagtgggatgatccaaatttcaatccctttagctcaacttcaaaaatgcaggaatccccaaagttacctcagcagagttacaacttcgaccccgacacatgtgacgaatcagtggatccgttcaaaacatcctctaagacacctagcagtccctccaaatcaccggccagctttgagatcccagcctcggcaatggaagccaatggggtggatggggatgggctcaataaacccgctaagaaaaagaagaccccgctgaagacagatacttttagggtgaaaaagtcaccaaaacggagccccttgtccgaccctccttcgcaggatcccacaccagccgctacccctgaaacacctcctgtgatctcagcagtggtccatgctactgatgaagaaaagctggctgtgaccaatcagaagtggacttgcatgactgtggacctcgaagccgacaaacaggactacccacagcccagcgatctctccacgttcgtgaacgagaccaagtttagttcaccaaccgaggagctcgactaccgcaacagctatgaaatcgagtatatggagaaaatcgggagtagcctgccacaggacgatgatgcgcccaagaaacaagccctttatttgatgttcgacacaagccaggagtccccagtaaagtcatcaccggtgcggatgtctgaaagtccaacaccttgttcgggaagctcattcgaggagactgaagcactggtgaacactgccgcgaagaaccagcacccagtgccccggggccttgcgcctaatcaggaatcccatctgcaggttccagaaaagtctagtcagaaagagctggaggccatgggtctaggtacaccatctgaggccatagaaatcactgcacctgagggttcctttgcctcagccgacgctctattgtcacggttagcacaccccgtcagcctctgtggtgctctggattatttggaacctgacctggccgaaaagaatccacctttatttgctcagaaactgcaagaagagctcgaatttgccatcatgagaattgaggcactgaaattggctagacagatcgctcttgcatctcgatcccaccaggacgcgaagcgggaggctgcacacccaacggacgtttctattagcaaaacagccctgtactctagaatcggcacagctgaagtggaaaaaccagccggcttgctcttccagcaaccagacttggatagtgccctccagattgcacgcgcagagataattacaaaggagagagaggtttccgaatggaaagataagtacgaagagtcccgacgagaggtgatggagatgaggaaaatcgtcgccgaatacgagaaaaccattgctcagatgatcgaagacgaacaaagggagaagagcgtgtcccatcagactgtccagcagcttgtgcttgagaaagagcaggccctggccgacctgaattctgtggagaaatcacttgctgatctctttcggagatatgaaaagatgaaagaagtgctggaagggtttaggaaaaatgaagaggtgctgaaacggtgtgctcaagaatatctgagccgtgtaaagaaggaagagcaacgttaccaggccctgaaggttcatgctgaagaaaagctggatcgcgccaatgcagaaattgcgcaggttcgcgggaaggcccaacaggagcaagccgcccaccaggccagccttcgtaaggagcagctccgagttgatgccttggagagaacactggagcagaaaaataaagagatagaagagctgactaagatttgcgacgagttgatcgctaagatgggcaaatcctag

SEQ ID NO: 264416 - DNA, 8847 bp, Artificial Sequence
  derived and/or modified sequence
atgggtaatgagaactcaacatccgacaatcaacgtactctgagtgctcaaactcctcgcagtgcccagcccccaggtaacagtcagaacattaaaaggaagcagcaggacacgccaggctcccccgatcatcgggacgcttcatctattgggtctgtgggcttgggaggcttctgtacagcttctgaaagcagcgcctcccttgacccatgcttggtcagccctgaggttactgagccacgcaaggatccccaaggcgcccgtggaccagagggcagccttctcccgagcccccctcctagccaggaacgcgaacacccaagtagctctatgcctttcgcggaatgcccgcccgaaggttgtctcgcatcccccgcggccgcaccggaggacggccctcagacacagtccccccgacgtgagccagcccctaacgcccctggagacattgccgcagcattccccgccgaacgcgactcctccacgccttatcaagagatcgctgctgtacccagtgcggggcgcgaacggcagcctaaggaggagggtcagaaaagctcgtttagtttttcatcaggcatcgatcagtctccaggtatgagtcccgtgccccttcgggagccaatgaaagctcccctgtgcggagaaggcgatcagccaggaggtttcgagtcacaggaaaaggaggccgcgggcgggttcccccccgcagagagcagacagggagtggccagcgtgcaggtgacacccgaagccccagccgcagcgcaacagggcactgaatcgagcgctgtgctggagaaaagcccactgaaacctatggctcccattccacaggatcccgcgccccgcgctagcgaccgagaacgtggccagggggaagcccccccacagtatctcaccgacgacctggagttcctgcgcgcttgtcatctgccgagatccaactctggagctgcaccagaggccgaggtgaacgccgcatcgcaagaaagctgtcagcagccggtgggagcgtacctcccacacgcagagttaccatggggacttcctagccctgccctggtgcctgaggccggggggtctggcaaagaggccctggacacgattgacgtacaggggcaccctcaaaccgggatgcgcggaaccaaacctaaccaggtagtgtgtgtggccgccggaggccaaccggaggggggcttgcctgttagccccgaacccagtctgctgacccccactgaggaagcccaccctgcaagttctctggcatcctttcccgctgcgcaaataccaatcgctgtcgaggaacctgggagtagtagtagagagtccgtttctaaagcaggaatgccggtctccgccgacgccgctaaagaagttgttgacgccggtctggtagggctagaacgacaggtgagcgacttagggtccaaaggggagcacccagagggtgaccccggcgaagtgcccgcaccgtcccctcaggagaggggagaacacttaaacactgaacaatcccacgaagtgcagcctggagtgccaccccctccgcttcccaaggaacaatcccacgaggtgcagcctggcgcacctccaccacctcttcccaaggcaccgtcagaaagtgcacgggggccgcctggaccaaccgacggggccaaggtgcacgaggactccacctcacccgccgtcgctaaggagggtagccgctcaccaggagattcgcctggcggaaaggaagaagccccagaaccgcctgatgggggagatccaggcaacctgcaaggtgaagattcccaagcatttagttctaaacgcgacccagaagtagggaaagatgaactgagtaagccttcttccgacgcagaaagtagggaccatccaagcagccatagtgcacagccaccacgaaaaggtggggcagggcataccgacggtccccacagccagacggcggaagcggatgcctctggcttacctcacaagctcggagaggaggaccctgtattgccaccggtgcctgacggcgcaggtgaaccaacagtccccgaaggggccatctgggaggggtccggtctgcagcccaagtgtccggacactttacagagcagagaaggactcggccgaatggagagtttcctgacactcgaatccgagaaatccgattttcccccaacacccgtagctgaagtggcccccaaagcccaggagggagaatcaactctcgagatccgtaagatgggaagctgtgacggtgaagggctgctcacatcgccagaccaaccccgggggccagcctgtgacgcaagcagacaagagtttcacgctggtgtgcctcatccaccccagggggagaacctggcggccgaccttgggttaacggcgttaatccttgaccaggatcagcagggaattccaagctgccctggcgaagggtggattcggggggctgcaagcgaatggccgctgctctcatctgaaaagcacctgcagccttctcaggcacagcccgaaacctctatcttcgatgttctgaaggaacaggcccagccacctgaaaacgggaaagagactagccccagccatccaggctttaaagaccagggagctgattcatcccagatccacgtccctgtcgaacctcaagaagacaataacctgccaacacacgggggccaggaacaggccctgggcagtgaattgcagtcgcaactgcctaaaggtaccctgtccgacactcccacgtcaagtcctactgacatggtgtgggagtcaagtctgaccgaagaatccgagctgagcgcacctacacgccagaaactccccgccttaggagagaaacggcccgagggtgcgtgtggcgacggtcagagctctcgggtcagtcctcccgccgccgatgtgctgaaagacttcagcctcgccggcaatttcagtcgcaaggagacgtgttgcactgggcaaggccctaacaagagccagcaagccctggcggacgcgctcgaagagggcagtcagcatgaggaagcgtgtcagcgacatcccggagcatcggaggccgcggatggctgctcccctctgtggggtctgtcaaagcgcgaaatggcctccggcaacacaggcgaagctccaccctgccaacccgattctgtcgctctactcgacgcagttccctgtttgccagccctagcacccgcttcccccggagttacccccacccaggacgcgcctgaaacggaagcttgtgacgagacccaagaaggccgacagcagcctgttcctgcccctcaacaaaaaatggagtgttgggctaccagcgacgcagagtcccccaagctgctcgcctctttcccatcagccggagaacaaggaggggaagcaggagccgcagagacgggcgggtccgctggagcaggggatccaggaaaacagcaagctcctgaaaagcctggcgaggcaacgctgtcctgcggcctgctgcagacagaacactgcctgacatctggcgaggaagcctcaacatctgccctcagagaaagctgccaggccgaacacccgatggcttcctgtcaggatgccctgctgccagctcgggaacttggaggtattccacggtccacaatggactttagcacacaccaggcggttccggatcccaaagagcttctgctgagcggacctcccgaagtagctgccccagacacaccgtatcttcatgtggatagcgccgcccagcgtggagctgaggattccggagtcaaggccgtatcaagcgccgacccgcgggccccaggcgagagtccgtgccccgtgggagaacctccgctggcattagagaatgccgcgagccttaaactttttgctggcagcctagcaccccttctacaaccaggagccgctggaggagaaattcctgcagtccaggctagtagcgggagcccgaaggcaaggaccaccgaggggcccgttgactcgatgccgtgcctggataggatgcctctgcttgcaaagggtaagcaggctacaggcgaagaaaaggctgctactgcacctggtgctggagctaaggcatccggagagggcatggcaggagatgccgcaggcgagactgaaggaagcatggaacggatgggcgagcctagtcaggatccgaagcaggggacatcgggcggcgttgacacctcctcagaacaaattgctaccctgaccggttttccagactttcgggaacacatagccaagatctttgagaagcccgtgctcggcgcgctggccacccccggcgagaaggctggcgcgggtcggtcagcagtgggaaaggatttaacgaggccgctcggtcccgagaagctgctggacggccctccgggggtggatgtgacacttctgcccgcacccccagcccggctgcaggtggaaaaaaaacagcaattagccggcgaagccgagattagtcacttggcactgcaggacccagcctctgataaactcttaggacctgcagggctgacttgggagcgcaatctgcctggcgctggtgtcggcaaggaaatggccggtgtgcccccaaccctgcgggaggatgagcgtccagagggtcctggggctgcgtggcccggactagaagggcaagcctactctcagctggaacggtcaagacaagagctggcgtctggccttccctcccccgccgcgacccaagagctgcccgtcgagcgtgccgctgcgttccaggtggccccgcacagccacggcgaggaagctgttgcgcaagaccggattccaagtggcaagcaacatcaggaaacatcagcttgcgactctcctcatggtgaggacggccctggcgactttgcgcatacaggcgttccaggacacgtgccaagaagcacgtgtgccccctctcctcagcgagaagtgctcactgtgcctgaggcaaattctgaaccctggacactcgacaccctaggcggtgaacgtagacccggagtgaccgcaggcattctcgaaatgaggaatgccctgggtaaccaaagtacaccagccccccctaccggagaagtggctgatacacccctcgaacctggcaaggttgccggggcagcaggagaggccgagggggatattaccctctctaccgctgaaacgcaggcgtgcgcaagcggcgacttgcctgaggctgggaccacccgaacattctcggtagtggcaggggatcttgttctgcctggttcctgtcaggatccagcctgttcggacaaagctccgggcatggaagggacagccgcactgcacggtgactccccggctaggcctcaacaggcaaaggaacaacctgggcctgaacggccaatccccgcgggcgatggcaaggtgtgtgtcagcagccctccagaaccggacgagacacacgatcccaaactccagcacttggccccagaggagctccacacagatagggagtcgccacgacctggtcccagcatgcttcctagcgtgcccaagaaagacgcacccagagttatggataaggttacctcagacgagacccggggggctgaggggactgaaagcagtcctgttgccgacgacattatacagccggccgccccagccgatctcgagtcccccacactcgccgcttcaagttaccacggcgacgtcgtcgggcaggttagtaccgatctcatcgcccaatcgattagtcctgcggcagcccacgctggacttcctccgtctgccgctgagcacatcgtcagcccctccgcccccgcaggcgacagagttgaagcttctacccccagttgcccggacccagcaaaggacttatcccggagttctgacagtgaagaggcctttgagaccccagaatccactacacccgtaaaggcacctcccgccccacctccacctccgcccgaggttattccggagccagaggtatccactcaacctccgcctgaagaacccggctgcggctcagagacagtgcccgtgccagatggacctcgaagcgatagtgtggagggaagtccgttcagaccaccatctcatagtttcagcgctgttttcgacgaggataaaccaattgcatcatccggaacctataacctggacttcgataacatagagcttgtagacactttccaaacactggaaccacgcgcctctgatgcaaagaatcaggagggaaaggtgaatacgcggcgcaagtcgactgattccgtgcccatctctaaaagcacactctcacgcagcctgagcctgcaggcaagcgattttgatggagcctcttccagcggcaacccagaggcagtggccctggcccctgatgcatattcgactgggagcagttcggccagcagtacactgaaaagaacgaagaagcccaggccccccagtctgaagaagaagcagaccacaaaaaagcccacagagacaccaccagtcaaagagacacagcaggaacctgatgaggagagtctggtgccaagtggggagaatctcgcttcagaaacgaaaactgagtcggccaagaccgaaggcccatcaccagcgttattagaagagactccactggagccagccgtcggacctaaagccgcatgcccgcttgattccgaatccgccgaaggagtagttcctcctgcatctggaggggggagggtccagaactcgccacccgtcgggcgcaaaacgctgcccttaactacagccccagaggctggagaggtaacaccttccgattcgggagggcaagaggacagtcctgccaaaggactgtccgtacggctcgaattcgactattctgaggataaatcttcatgggacaatcagcaagaaaacccacctccaacaaagaagatcggaaaaaaacctgtagccaaaatgccactgcggcggcctaagatgaagaaaacgcctgagaagttggataacactccagcatccccaccccgctctcccgccgagcctaacgatattcccatcgccaaagggacgtataccttcgatattgacaaatgggatgaccctaactttaatccattcagctccacaagcaagatgcaggagagcccaaaactaccacaacagtcctacaacttcgacccagacacttgtgatgagagcgtcgacccatttaagacaagttctaaaaccccatccagccctagtaagagccccgcttcatttgaaatccctgcctctgcaatggaagcaaatggggtggatggcgacgggctgaataagccagccaagaagaaaaaaacgccactgaagactgacacgttccgggtcaaaaaatctcccaagcggagccccctttctgatccccccagccaggacccaacaccggccgctaccccggagacacctccagtgatttctgctgtggtgcacgccacggacgaggaaaagctcgccgtgaccaatcagaagtggacttgtatgacggtggatctggaggccgacaaacaggattatccgcagccatctgacctgtccacattcgtgaacgagacaaagtttagcagtcctaccgaagagctggattacagaaacagctacgaaatcgagtacatggaaaagatcggcagctcccttccacaggatgacgacgctccgaaaaagcaggcactgtaccttatgtttgacactagtcaagaatccccggtgaaatcttccccggttagaatgagtgagtcgcctactccctgctcaggaagtagcttcgaggaaacagaggcgttagtgaacactgcggccaagaatcagcaccccgttcctagaggcctcgcacctaaccaggaaagtcatctgcaggttcccgagaagagctctcaaaaagagctggaagcgatgggcttaggcacaccctcggaagccatagagatcaccgcacctgagggcagcttcgcctcagctgacgcattactgtcaagattagcccaccctgtgtccctctgtggagccctggattacctcgaacccgacctcgccgagaagaaccctcctcttttcgctcagaagctccaagaagaactggaatttgccattatgcggatcgaggcactgaagttggcccgacagattgcgctcgcaagtcgatcacatcaggatgccaaaagggaggccgcccatcctactgatgtaagcattagcaagacagcactttattcaaggattggcactgcagaagttgagaaaccagccggcctactctttcagcaacccgatctcgactccgccctccaaatcgcaagagcggaaatcatcacaaaagagcgcgaagtgtccgagtggaaagacaaatatgaggagtcccgacgcgaagtcatggagatgcggaaaatcgtagccgagtatgagaagactatcgcccagatgatcgaggatgagcagagggaaaaatctgtgagtcatcagaccgtccagcaactcgtgctcgagaaggaacaggccctcgccgatctcaactccgtggagaaaagccttgccgatctctttcgcagatatgaaaaaatgaaggaagtgttggaaggcttccgtaagaacgaggaagtactaaagcgttgcgcccaagagtatctctctcgcgtcaagaaggaagagcagaggtatcaagccttaaaggttcacgccgaagagaagctggatcgcgccaacgcagaaattgctcaggtgagaggaaaggcacaacaagaacaggcagcacatcaggctagcctgaggaaagagcagctgcgcgttgacgctttggagcgcactctggaacagaaaaataaggagattgaagaactcacaaaaatctgtgatgagctgattgccaagatgggcaaatcatag

SEQ ID NO: 264417 - DNA, 8847 bp, Artificial Sequence
  derived and/or modified sequence
atgggaaatgaaaacagcaccagtgacaaccagaggaccctgagcgcccagacccccaggtctgcccagcccccaggcaacagccagaacatcaagaggaagcagcaggacaccccaggcagcccagaccacagagatgccagcagcatcggctctgtgggcctgggcggcttctgcacagccagcgagagcagcgccagcctggacccctgcctggtgtccccagaggtgacagagcccaggaaggacccccagggcgcccggggccctgagggcagcctgctgcccagccccccacccagccaggagcgggagcaccccagcagctccatgccctttgctgaatgtcctcctgagggctgcctggccagccctgctgctgccccagaagatggcccccagacccagagcccccggcgggagcccgccccaaatgcccctggggacattgctgctgccttccctgctgagcgggacagcagcaccccctaccaggagattgctgctgtgcccagcgctggccgggagcggcagcccaaggaggagggccagaagagcagcttctccttcagcagcggcatcgaccagagccctggcatgagccctgtgcccctgcgggagcccatgaaggcccccctgtgtggggagggggaccagcccggcggctttgagagccaggagaaggaggccgccggcggcttccccccagctgagagccggcagggcgtggcctctgtgcaggtgaccccagaggccccagctgctgcccagcagggcacagagagcagcgctgtgctggagaagagccccctgaagcccatggcccccatcccccaggaccctgccccccgggccagtgaccgggagcggggccagggcgaggccccaccccagtacctgacagatgacctggagttcctgcgggcctgccacctgcccaggagcaacagcggggccgcccctgaggccgaggtgaatgctgccagccaggagagctgccagcagcctgtgggcgcctacctgccccacgccgagctgccctggggcctgcccagccctgccctggtgcctgaggccggcggcagcggcaaggaggccctggacaccattgatgtgcagggccacccccagacaggcatgaggggcaccaagcccaaccaggtggtgtgtgtggccgccggcggccagcctgagggcggcctgcctgtgtccccagagcccagcctgctgacccccacagaggaggcccacccagccagcagcctggccagcttccctgctgcccagatccccatcgctgtggaggagcccggcagcagcagccgggagagcgtgtccaaggccggcatgcctgtgtctgcagatgctgccaaggaggtggtggatgctggcctggtgggcctggagcggcaggtgtctgacctgggcagcaagggggagcaccctgagggggaccccggggaggtgcctgcccccagcccccaggagcggggggagcacctgaacacagagcagagccatgaggtgcagcccggggtgcccccaccacccctgcccaaggagcagagccatgaggtgcagcccggggcccctcctccacccctgcccaaggcccccagcgagagcgcccggggccccccaggccccacagatggagccaaggtgcatgaggacagcaccagccctgctgtggccaaggagggcagccgcagccctggggacagccctgggggcaaggaggaggcccctgagcccccagatggaggagaccccggcaacctgcagggcgaggacagccaggccttcagcagcaagagggaccctgaggtgggcaaggatgagctgagcaagcccagcagtgatgctgagagccgggaccaccccagcagccacagcgcccagccccccaggaagggcggggccggccacacagatggcccccacagccagacagctgaggctgatgccagcggcctgccccacaagctgggggaggaggaccctgtgctgccccctgtgcctgatggagctggggagcccaccgtgcctgagggcgccatctgggagggcagcggcctgcagcccaagtgcccagacaccctgcagagccgggagggcctgggccgcatggagagcttcctgaccctggagagcgagaagagtgacttcccccccacccctgtggccgaggtggcccccaaggcccaggagggggagagcaccctggagatcaggaagatgggcagctgtgatggagagggcctgctgaccagcccagaccagccccggggccctgcctgtgatgccagccggcaggagttccacgccggcgtgccccaccccccccagggcgagaacctggccgctgacctgggcctgacagccctgatcctggaccaggaccagcagggcatccccagctgccctggagagggctggatcagaggagctgccagcgagtggcccctgctgagcagcgagaagcacctgcagcccagccaggcccagcctgagaccagcatctttgatgtgctgaaggagcaggcccagcccccagaaaatggcaaggagaccagccccagccaccctggcttcaaggaccagggcgctgacagcagccagatccacgtgcctgtggagccccaggaggacaacaacctgcccacccacggcggccaggagcaggccctgggcagcgagctgcagagccagctgcccaagggcaccctgagtgacacccccaccagcagccccacagacatggtgtgggagagcagcctgacagaggagagcgagctgagcgcccccacccggcagaagctgcctgccctgggggagaagaggcctgagggcgcctgtggagatggccagagcagccgggtgtccccacctgctgctgatgtgctgaaggacttcagcctggccggcaacttcagcaggaaggagacctgctgcaccggccagggccccaacaagagccagcaggccctggctgatgccctggaggagggcagccagcacgaggaggcctgccagaggcaccctggggccagcgaggccgcagatggctgcagccccctgtggggcctgagcaagcgggagatggccagcggcaacacaggagaggccccaccctgccagcctgacagcgtggccctgctggatgctgtgccctgcctgcctgccctggccccagccagccctggggtgacccccacccaggatgcccctgagacagaggcctgtgatgagacccaggagggccggcagcagcctgtgcctgccccccagcagaagatggagtgctgggccaccagtgatgctgagagccccaagctgctggccagcttccccagcgctggggagcagggcggggaggccggggctgctgagaccggcggcagcgctggggccggggaccccgggaagcagcaggcccctgagaagccaggagaggccaccctgagctgtggcctgctgcagacagagcactgcctgaccagcggggaggaggccagcaccagcgccctgcgggagagctgccaggccgagcaccccatggccagctgccaggatgccctgctgcctgcccgggagctgggcggcatccccaggagcaccatggacttcagcacccaccaggccgtgcctgaccccaaggagctgctgctgagcggccccccagaggtggccgccccagacaccccctacctgcacgtggacagcgctgcccagagaggagcagaagattctggagtgaaggctgtgagcagcgctgacccccgggcccctggagagagcccctgccctgtgggggagccccccctggccctggagaatgctgccagcctgaagctgtttgctggcagcctggcccccctgctgcagcctggagctgctggaggagagatcccagctgtgcaggccagcagcggcagccccaaggcccggaccacagagggccctgtggacagcatgccctgcctggacaggatgcccctgctggccaagggcaagcaggccaccggggaggagaaggccgccacagcccctggagctggggccaaggccagcggggagggcatggctggagatgctgctggggagacagagggctccatggagaggatgggagagcccagccaggaccccaagcagggcaccagcggaggagtggacaccagcagcgagcagatcgccaccctgaccggcttcccagacttccgggagcacatcgccaagatctttgagaagcctgtgctgggcgccctggccaccccaggagagaaggccggggccggccgctctgctgtgggcaaggacctgacccggcccctgggccctgagaagctgctggatggccccccaggagtggatgtgaccctgctgcctgcccccccagcccggctgcaggtggagaagaagcagcagctggccggggaggccgagatcagccacctggccctgcaggaccctgccagtgacaagctgctgggccctgctggcctgacctgggagaggaacctgcccggggccggcgtgggcaaggagatggccggcgtgccccccaccctgagagaagatgagaggcctgagggccctggggccgcctggccaggcctggagggccaggcctacagccagctggagaggagccggcaggagctggccagcggcctgcccagccctgctgccacccaggagctgcctgtggagagagctgctgccttccaggtggccccccacagccacggggaggaggccgtggcccaggaccgcatccccagcggcaagcagcaccaggagaccagcgcctgtgacagcccccacggggaggatggccctggggactttgcccacactggagtgcccggccacgtgcccaggagcacctgtgcccccagcccccagcgggaggtgctgactgtgcctgaggccaacagcgagccctggaccctggacaccctgggcggggagcggcggcctggggtgacagctggcatcctggagatgagaaatgccctgggcaaccagagcaccccagcccccccaactggagaggtggccgacacccccctggagcccgggaaggtggccggggccgccggggaggccgagggggacatcaccctgagcacagctgagacccaggcctgtgccagcggggacctgcctgaggccggcaccaccaggaccttctctgtggtggccggggacctggtgctgcccggcagctgccaggaccctgcctgcagcgacaaggcccctggcatggagggcacagctgccctgcatggagacagccctgcccggccccagcaggccaaggagcagcccggccctgagcggcccatcccagctggagatggcaaggtgtgtgtgagcagccccccagagccagatgagacccatgaccccaagctgcagcacctggcccctgaggagctgcacacagaccgggagagccccaggcctggccccagcatgctgcccagcgtgcccaagaaggatgccccccgggtgatggacaaggtgaccagtgatgagaccagaggagctgagggcacagagagcagccctgtggctgatgacatcatccagcctgctgccccagctgacctggagagccccaccctggccgccagcagctaccatggagatgtggtgggccaggtgtccacagacctgattgcccagagcatcagccctgctgctgcccacgccggcctgcccccatctgctgctgagcacatcgtgagccccagcgccccagctggggacagagtggaggccagcacccccagctgcccagaccctgccaaggacctgagccgcagcagtgacagcgaggaggcctttgagaccccagagagcaccacccctgtgaaggcccccccagcccctcctcctcctcctcctgaggtgattcctgagcctgaggtgtccacccagcccccacctgaggagcccggctgcggcagcgagaccgtgcctgtgcctgatggccccaggagtgacagcgtggagggcagccccttccggccccccagccacagcttctctgctgtgtttgatgaggacaagcccatcgccagcagcggcacctacaacctggactttgacaacatcgagctggtggacaccttccagaccctggagccccgggccagtgatgccaagaaccaggagggcaaggtgaacaccaggaggaagagcacagattctgtgcccatcagcaagagcaccctgagccgcagcctgagcctgcaggccagtgactttgatggagccagcagcagcggcaaccctgaggccgtggccctggccccagatgcctacagcacaggcagcagcagcgccagcagcaccctgaagaggaccaagaagccccggccccccagcctgaagaagaagcagaccaccaagaagcccacagagaccccacctgtgaaggagacccagcaggagccagatgaggagagcctggtgcccagcggggagaacctggccagcgagaccaagacagaaagtgccaagacagagggccccagccctgccctgctggaggagacccccctggagcctgctgtgggccccaaggccgcctgccccctggacagcgagagcgctgagggcgtggtgcccccagccagcggcggcggccgggtgcagaacagcccccctgtgggcaggaagaccctgcccctgaccacagcccctgaggccggggaggtgacccccagcgacagcggcggccaggaggacagccctgccaagggcctgtctgtgcggctggagtttgactacagcgaggacaagagctcctgggacaaccagcaggagaaccccccacccaccaagaagattggcaagaagcctgtggccaagatgcccctgcggcggcccaagatgaagaagaccccagagaagctggacaacaccccagccagcccccccaggagccctgctgagcccaatgacatccccatcgccaagggcacctacacctttgatattgacaagtgggatgaccccaacttcaaccccttcagcagcaccagcaagatgcaggagagccccaagctgccccagcagagctacaactttgatcctgacacctgtgatgaatctgtggaccccttcaagaccagcagcaagacccccagcagccccagcaagagccctgccagctttgagatcccagccagcgccatggaggccaacggggtggatggagatggcctgaacaagccagccaagaagaagaagacccccctgaagacagacaccttccgggtgaagaagagccccaagaggagccccctgagtgacccccccagccaggaccccaccccagctgccaccccagagaccccacctgtgatctctgctgtggtgcacgccacagatgaggagaagctggccgtgaccaaccagaagtggacctgcatgacagtggacctggaggccgacaagcaggactacccccagcccagcgacctgagcacctttgtgaatgagaccaagttcagcagccccacagaggagctggactacagaaacagctatgaaattgagtacatggagaagattggcagcagcctgccccaggatgatgatgcccccaagaagcaggccctgtacctgatgtttgacaccagccaggagagccctgtgaagagcagccctgtgaggatgtctgagagccccaccccctgcagcggcagcagctttgaggagacagaggccctggtgaacacagctgccaagaaccagcaccctgtgccccggggcctggcccccaaccaggagagccacctgcaggtgcctgagaagagcagccagaaggagctggaggccatgggcctgggcaccccatctgaggccatcgagatcacagcccctgagggcagctttgccagcgcagatgccctgctgagccggctggcccaccctgtgtccctgtgtggggccctggactacctggagccagacctggccgagaagaacccccccctgtttgcccagaagctgcaggaggagctggagtttgccatcatgagaattgaggccctgaagctggcccggcagatcgccctggccagccgcagccaccaggatgccaagcgggaggccgcccaccccacagatgtgtccatcagcaagacagccctgtacagcagaattggaacagctgaggtggagaagccagctggcctgctcttccagcagcctgacctggacagcgccctgcagatcgcccgggcagagatcatcaccaaggagcgggaggtgtctgagtggaaggacaagtatgaggagagccggcgggaggtgatggagatgaggaagatcgtggccgagtatgagaagaccatcgcccagatgattgaagatgagcagcgggagaagtctgtgagccaccagacagtgcagcagctggtgctggagaaggagcaggccctggccgacctgaacagcgtggagaagagcctggccgacctcttcagaagatatgagaagatgaaggaggtgctggagggcttcaggaagaatgaggaggtgctgaagagatgtgcccaggagtacctgagccgggtgaagaaggaggagcagcgctaccaggccctgaaggtgcatgctgaggagaagctggaccgggccaatgctgagatcgcccaggtgcggggcaaggcccagcaggagcaggccgcccaccaggccagcctgaggaaggagcagctgcgggtggatgccctggagaggaccctggagcagaagaacaaggagattgaggagctgaccaagatctgtgatgagctgattgccaagatgggcaagagctag

SEQ ID NO: 264418 - DNA, 8847 bp, Artificial Sequence
  derived and/or modified sequence
atgggcaacgagaacagcaccagcgacaaccagcggaccctgagcgctcaaacaccaagatcagcgcagccgcctgggaattcgcaaaatataaagcggaagcagcaggatacgcctggatcccccgatcaccgggacgcctccagtataggttccgttggtctcggcggtttctgcaccgcttctgaatcctccgcgtccttggacccatgtctggtaagtcctgaggtgaccgagcctagaaaagatcctcaaggagctcgtggacccgagggttcccttctgcccagcccgccacctagccaggagcgagagcatccgagttcatccatgccttttgctgagtgcccccccgagggctgcctggcaagccctgctgccgccccagaggatgggcctcaaactcagtcccctaggcgcgagccagcacctaacgcgcccggcgacattgccgctgcattccctgctgagagggattcctccacaccctatcaggaaatcgccgcggtcccttcagctggacgcgaaaggcagccaaaagaggagggccagaaatcatccttctcttttagcagcggcattgaccagtcacctgggatgagtccagtccctctgcgagagcctatgaaggcgccactgtgtggcgagggggaccagcctggcgggtttgagtcacaagagaaagaggctgcgggggggtttcctcccgccgagtctaggcagggagtggcttccgtgcaggtcacccctgaagctcctgctgcggctcagcaggggacagagagcagcgctgtgctggagaaaagccctctcaagcccatggcccctattccccaggaccccgccccgagggcttctgaccgcgagcgcggccagggtgaggccccaccccagtacctaactgatgacctagaattcttaagggcctgccacctgccgcgttcaaattccggagcagccccggaagccgaggttaacgcagcatcacaggagagctgccagcagcctgtgggagcctacttaccccatgccgaactgccgtggggcctcccttcccctgcactggtgcctgaggccggagggtccggcaaagaggctcttgacactatcgatgttcaaggccacccccaaacaggcatgagaggcacgaaacctaaccaggtggtctgcgtggctgccggcggacagcccgaaggaggtctgcccgtttcaccagaaccaagcctcttgactcctactgaggaggcccacccagcatcttcacttgccagctttcctgccgctcagatccccatcgctgtagaggagccaggctcctcctccagagagagcgtgtccaaagctgggatgcccgttagcgctgacgccgccaaagaagtggtcgacgcggggcttgtgggcctcgagcgtcaggttagcgatctcgggtcaaagggcgaacacccggagggtgatccaggagaggtgccggcccctagcccgcaggagcgtggtgagcacctcaacaccgagcaaagccacgaggtgcagccgggcgtgccccccccaccacttccgaaggagcagagccatgaggtgcaacccggagccccccctcccccacttcctaaggcccccagcgagagcgcccgggggccacctggacctacagatggcgccaaagttcacgaggattccacgtcgcccgctgtggccaaagaagggtcccggtcacccggcgacagccccggaggcaaagaagaggcacctgaaccccccgatggaggagatccagggaacctccagggggaggactcccaggctttttcaagcaaaagagatcctgaggttggtaaggatgagctctctaaaccaagtagcgacgccgaatctcgggaccacccgtcatcacactcagcacagcccccacggaagggtggtgccgggcacaccgacgggcctcattcacagactgccgaggccgacgcttccgggctgccacataagctgggagaagaggacccagttttgcctccggttcctgacggagccggggaacctaccgtccctgagggcgctatttgggagggctctggactgcagccaaagtgcccagacacactacagtcccgcgaaggcctggggcgaatggaatctttcttaacgctggagagtgagaagtccgatttccctccaacacctgtggcagaggtggcgcccaaggcccaagagggcgagtccaccctagaaatacggaagatgggtagttgtgacggtgaggggctactgacgagcccggatcagccaagaggccccgcctgtgacgcgagcagacaagagttccacgccggcgtgccacatcccccccagggcgagaacttggccgccgacctggggcttacagctctaattctggaccaagaccaacaggggatcccctcttgtccaggggagggatggattcgcggtgccgccagtgaatggcctctcctctcctccgagaagcatctgcaaccctcacaggcccagccagagacaagcatctttgatgttctgaaagagcaggcacagccacctgagaatggtaaagaaacctctccctcccatcccggattcaaagaccagggcgctgactcctcccagatacatgttcctgtggagccacaggaagataacaacttgcccactcatgggggccaggaacaagccctgggctctgagcttcagtcacaactcccaaagggtacactttctgacacacctacatctagtcctacggacatggtgtgggagagctcattaacagaagagtccgaattgtctgccccgacgcgccagaagttgccggcgctcggggagaagagaccggaaggggcttgcggggacggccaatcgtcacgagtgagcccgcccgccgccgatgtactgaaagacttcagcttggctggaaattttagcagaaaagagacctgttgtactggtcagggccccaataagtcccagcaggccctggcagacgcccttgaggagggctcacagcatgaggaggcgtgccaacgccatcctggggcttccgaagctgccgatggctgttccccactctggggcttatctaagcgcgaaatggcatccgggaacaccggcgaggcccccccctgccagccggattccgttgcgctgctagacgccgtgccgtgccttccagctcttgcacctgcgagccccggtgttactcccacacaagatgcccccgaaacggaagcgtgtgatgagacccaggaggggagacaacagcctgtcccagccccccagcagaagatggagtgctgggctacttctgacgccgagtcccccaagctccttgcgtcgttccccagcgccggagagcagggcggggaggcaggagcagctgaaaccggcgggagtgcaggcgctggggacccagggaaacagcaggctccagagaaacccggggaagcgacactctcttgtggcctgctccagactgagcactgtctgacatcaggggaggaagcttctactagcgcacttcgagaaagttgtcaggcagaacaccctatggcttcatgccaggacgctctgttgccggcaagagagctgggtggcataccacggtcgactatggacttctcaacccaccaggccgtgcctgaccccaaggagctgctcctctctggtcctccagaagtggcagctccagacactccttacttacatgtggattcagccgctcagcggggggccgaggattctggagttaaggcggtttccagcgccgacccacgagctccaggggaatccccttgtccagtgggggagcccccattggcactggaaaacgccgcttccctcaaacttttcgccgggagcctcgcgccccttttacagccaggcgctgccggtggtgaaatacctgctgtgcaggctagttcgggcagccctaaggcacgtaccacagagggtcctgtggactctatgccctgtttggacagaatgcccctgctggccaagggcaaacaggcaacaggcgaagaaaaggcagccaccgctcccggggcaggagccaaagcatcaggggaggggatggccggcgacgcggccggcgaaacagagggcagtatggagaggatgggggagcctagccaggaccctaaacaaggaacgtctggcggtgtcgacacaagctcagaacagatagcaacattgacgggatttcccgatttcagagagcatattgccaaaatctttgagaaaccagtgctgggcgcccttgcgacaccaggggagaaggctggcgccgggcgtagtgcggtaggaaaggatctcaccagacccctcggccctgagaagttgttagacggacccccaggggtcgacgtgactctcctccccgcaccccccgcacggttgcaggtggaaaaaaagcagcaattagccggtgaggcagagatctcccacctggctttgcaggatccagcttcggataagctgctgggccctgcaggacttacctgggagaggaatctccccggggctggcgtgggtaaagagatggcgggggttcctcccacacttcgagaagacgagcgtcctgaaggccccggcgccgcatggccgggtttggaagggcaggcatattcacaacttgaacggagccggcaggagttagcttccgggctcccttcacctgcggcaacgcaagaactgccagtggagcgggccgccgcatttcaagtggctccacattcccacggcgaggaggccgtggcccaagatcggataccatcgggaaagcagcatcaagaaaccagtgcctgcgactcaccacacggagaggacggaccaggcgattttgcccacacaggcgtacccggacacgtccctcgttctacctgcgctccaagcccacagcgagaggtcttaacagtgcctgaggccaattcagaaccctggaccctggacacactgggaggtgagagaagacccggtgtgacagctggcatcctagaaatgaggaacgccctgggaaaccagagcacgccagcccctccaacaggggaggtagccgacactcctcttgagcctgggaaggtcgctggtgctgctggcgaagcagagggtgatattaccctgagcacagccgaaacacaagcctgtgctagcggagatctgcctgaggcaggtacaacccgtaccttctctgtcgtggctggggatctggttctgcccgggtcctgccaggaccctgcctgcagcgataaagctcccggaatggaagggacagctgccctgcatggcgattcacctgcacggccgcagcaggccaaagaacaacccgggcccgagcggcccattccagccggcgacggaaaagtgtgtgtctccagcccacctgagccagatgaaacccatgatcccaaacttcagcaccttgcgcctgaagaactgcacaccgatcgagaatctcctcgtcccgggccctcaatgctgccatccgttcctaaaaaggacgccccgagagtcatggacaaagtgacaagtgacgaaaccagaggagcagaagggaccgagagtagccctgttgctgatgatatcatacagcccgctgctccagcggatctggaatctcccacccttgccgcctccagttatcacggggatgtggtgggccaggtgagcactgatttaatcgcccagagtatttctcctgcagcagctcacgcaggattgcctccctcagccgcagagcacattgtaagtccctccgctcctgctggggaccgggtggaagcctccactcctagctgtcctgatccagccaaggacttaagccgatcttcagactccgaggaggcctttgagacccctgagagtacaactccagtaaaggcgcccccagcgcccccacctccaccgcctgaggtgattcccgagcccgaggtctccacacaacctccacctgaggagcctggatgtggttccgagactgtacctgtgccagacggacctaggagtgacagcgtcgaggggtcgccttttaggcctccctctcactccttcagcgcagtcttcgatgaagataagccaattgccagttctggtacgtacaatcttgacttcgataatatcgaattagtggacaccttccaaaccttggaaccacgggcaagcgacgccaagaaccaagagggaaaggtaaacacacgccgcaaatctaccgactccgtgcccataagtaaatccactttgagtcgtagtctgagtctccaagcttcggacttcgatggggccagttcctcgggtaaccccgaagcagtggccctagctcccgacgcctacagcacaggcagcagctccgcttcatctactctcaagagaaccaaaaaacctaggccaccctcattgaagaaaaagcagaccactaaaaagcctactgaaacccccccagttaaggagacccagcaggaaccagacgaggaaagtctggtgcccagtggagaaaatctggcctcagaaaccaagacagagagtgcaaaaacagaagggcctagccccgccttgctggaggaaaccccactagagcccgctgtggggccaaaagcagcctgcccacttgattctgagtccgcggaaggggttgtgccaccggcctctggagggggccgcgttcaaaacagtcctcctgtgggacggaagacattgccactgaccactgcccccgaagcgggcgaggtgacaccttccgacagtggtgggcaggaagattcacccgcaaagggcctcagcgttaggctggagtttgattatagcgaagataaatcttcatgggacaaccagcaggaaaacccccctcctacaaaaaagatcgggaaaaagcccgtggctaaaatgcccctccggagacccaagatgaaaaagacccctgagaaactagataatactccagcttcaccccccaggtctcctgcagaacccaacgatattccaatcgccaaaggaacatacacctttgatattgataaatgggatgaccctaacttcaacccatttagcagtacatctaagatgcaggagtcaccaaaattgcctcagcagtcctataacttcgatccggacacatgtgacgagtccgtagacccctttaagacctcaagtaagacaccctcgagcccatccaagagcccagccagcttcgagatccccgcatccgccatggaggcaaatggcgttgatggagatggactgaataaaccggccaaaaagaagaaaaccccactcaagacagacacgtttagggtgaagaagagccctaaacgttcccccctgtctgaccctccgagtcaggatccgactcctgcagctaccccggagactccgcctgtgatctcagctgtcgttcacgccaccgatgaggagaagttggccgtgacgaaccaaaagtggacatgtatgacagtcgatctggaggcggataaacaggactatccacagccatcagacctttccaccttcgtcaatgaaactaaattcagtagcccgactgaagagctcgactacagaaactcatatgaaatcgaatatatggaaaagatcgggtcgtcgctccctcaggacgacgacgcacccaagaagcaggcactgtatttgatgttcgatacaagtcaggagtcccccgtaaaatcgagtcccgttaggatgagtgagtcccctacgccttgttcgggctcttcctttgaagagacagaggcacttgtcaacactgccgccaaaaaccaacatcccgtgccgcgcggcctggcacctaatcaggagagccacctccaggtgccagaaaagagtagtcagaaagagctggaggcaatgggcctggggacaccgagtgaagcgatcgagattactgcaccagaaggatcatttgcttctgcagacgctctactgtctcgattggcgcatcccgtaagtttatgcggagcacttgattacctcgagccggatctggccgaaaagaaccccccattgtttgcacagaaattgcaggaggaattggagtttgctataatgaggatcgaggcgctaaagctagcaaggcaaattgctctggcaagtcggagccaccaggacgcaaagcgggaagccgcccaccctactgacgtgtctatttctaaaaccgcactttattccagaattggaactgccgaagtggaaaagcctgctggcctgttgtttcagcaacccgacttggactccgctttacagatcgcccgcgcggagatcatcacaaaagagagggaagttagcgagtggaaggacaaatacgaggagagtaggcgggaggtcatggaaatgcgcaagatcgtggccgagtacgaaaaaaccatcgctcagatgattgaagatgaacagagagagaagagcgtctcacaccaaaccgtgcagcagctggtgttagaaaaggaacaggcgctcgcagacctcaactccgtggaaaaaagcctcgctgacctgtttaggcgctacgagaaaatgaaggaggtgctagaagggtttcgaaaaaatgaagaagtgctaaagagatgcgcccaggagtacttgagtagggtgaaaaaagaggagcagcggtatcaggcccttaaggtgcatgctgaggagaagctagacagggccaacgccgagattgcacaagtacgtggcaaggctcagcaggaacaggccgcacatcaagcctccttgaggaaggaacagctgcgggttgatgccctagagagaactctcgagcagaagaacaaagaaatcgaagagctgactaagatctgcgatgagctcatcgcaaaaatggggaagagctag

SEQ ID NO: 264419 - DNA, 8847 bp, Artificial Sequence
  derived and/or modified sequence
atgggcaacgagaacagcaccagcgacaaccagcggaccctgagcgctcaaactccgagatcagcccagcccccaggaaatagccaaaatattaagcgtaagcagcaagacaccccaggttcacccgaccatagagatgcctcgagcattggctcagtggggcttggggggttctgcaccgctagtgaatccagcgcctccctggacccatgcctggtgtctccggaggtcacagagcccaggaaagacccgcagggggctaggggccccgaaggatcccttctgccttcacccccacccagccaggagagggaacacccttcaagcagtatgccctttgctgagtgccccccggagggctgtttagcaagccctgcggcggcccctgaggacggcccccagactcagtccccccggcgcgagccggcccccaacgcacctggggacattgcggcagctttccctgcggaacgcgactccagcactccctaccaagaaatagctgccgtgccatcagccgggcgggagagacagcctaaggaggaagggcaaaagtcatcattctccttctcctcaggtatcgatcaatcacccggcatgtcacccgtgccgctgcgcgaaccaatgaaggctcccctatgtggcgaaggggatcagcctggcggatttgagtcccaagaaaaggaggccgcaggcggctttccccccgcggaatctaggcagggagtagcttccgttcaagtcacaccggaggcacctgcagcggctcagcaaggaacagaatcctcagccgtcctcgagaagagcccgctgaaacctatggcacctatcccccaggaccccgccccgcgcgcctctgaccgcgaaagaggacagggcgaagcgcccccacagtacttgaccgacgacctggaatttctgcgcgcttgccatctgccacgatctaattcaggcgctgcgcccgaagccgaggtcaacgcggcatcccaggaatcttgtcaacagccggtcggcgcatatctgccacacgccgagctcccctggggtctgcccagccccgcactagttccggaggccggcggttccgggaaagaagccctcgacacaattgatgttcagggtcaccctcagacaggcatgcgcgggacaaaaccaaaccaagtggtgtgtgtggccgcaggaggtcaacccgagggcggcttgccagttagccccgagccctccttgcttacgccgaccgaagaggcccaccccgcaagctccctggccagctttccagccgcccagattcccattgccgtggaggagcctggatcttcttcccgggagagtgtctcgaaggcaggaatgcccgtgtctgcagatgccgctaaggaagtggtggacgcaggcttggtgggactggagagacaggtctccgatctgggatccaagggagagcacccggagggcgaccctggcgaagtgcctgcccctagccctcaggaaaggggggagcacctgaacaccgagcagtctcatgaggtccaacccggtgttcccccaccaccactccctaaggagcagtcacacgaagtacaacccggcgccccaccaccacccttaccaaaagctccgtctgagtccgccaggggccccccaggccccacggatggggctaaagtgcacgaggactcgacttcacctgcagtggctaaagaagggtcaagatctcctggagactccccaggggggaaagaagaagcacctgagccccctgatgggggggatccaggcaatcttcagggggaggattcgcaagccttttcctccaaacgggatcccgaggtgggcaaggacgagctcagtaaaccttcaagcgatgccgaatctcgggatcacccttcttctcacagcgcccaaccgccccggaagggaggcgcaggccatacagacggacctcattcccagactgccgaggccgatgcttccggtctgccacacaagcttggagaagaagacccagtattacctcctgtgccagacggggctggggagccaacggtgccggagggcgccatctgggagggctccggactgcagccaaaatgccctgatactttgcagtccagagaaggactgggtagaatggagtcttttcttaccctggaaagcgaaaagtcggatttccctccaacacctgtggccgaggtggctcccaaggcacaagagggagagagcacactggagataagaaagatgggcagctgcgatggtgaaggattgctgactagtcccgaccagccgcgagggccagcttgcgacgcctcccgccaagaattccacgcgggagttcctcacccccctcagggcgaaaatctggcagcggatctgggcctgacggccttgattctggaccaggaccagcagggcatcccctcttgtcccggcgagggctggattcggggcgccgccagcgagtggcctttgttgtccagcgaaaaacacctgcaaccttcccaggcacaaccagagacatctatatttgacgtgctgaaggagcaggctcaaccacccgagaatggcaaggaaacttctccttcacaccctggcttcaaagaccagggagctgattcttctcagatacatgttccggttgaaccacaagaggataacaaccttcctactcacggcggccaggaacaagccctgggatcagaacttcaatcccagctaccaaaaggtacacttagcgacactccaacgtctagtcccacagatatggtgtgggagtcgagcttgacagaggagagcgagctgagtgcccccacacggcagaaactccccgcattgggggaaaagcggcctgagggagcgtgcggcgatggccaatcttcaagggtctccccacctgccgccgatgtgctgaaagatttttcacttgccggtaatttcagcaggaaagagacgtgctgtactggccaggggcctaataaaagccagcaggctttagccgacgctctcgaggagggatcccagcatgaagaagcttgccagagacatcctggagcatcggaggcagcggacggatgctcacccttgtggggcctctctaagcgcgagatggctagcggcaacaccggagaggccccaccctgtcaacccgacagtgtggcactgctggacgccgtgccatgccttccagctcttgcacctgcctcacctggagtaacccctacacaggacgcgcctgagaccgaagcctgcgatgaaacccaggaggggagacagcagcccgtacctgcgcctcagcagaaaatggaatgttgggcaacgtcggacgccgagagtcccaagttgctggccagctttccaagcgccggggagcagggaggcgaagccggggcagccgaaaccggaggcagtgccggagcaggcgacccaggtaaacagcaggcgcctgaaaagccgggcgaagccacgctcagctgcgggttactgcagacagagcattgcttaacgagcggcgaggaagccagcacgagcgcactgcgcgagagttgccaggccgagcaccccatggccagttgtcaggatgcattactgcccgcccgcgaactggggggtattccccgctcaaccatggacttctccacccatcaggccgttccagaccccaaagagttactgctaagcgggcccccagaagtggctgctcctgacacaccttatttgcatgtcgactccgccgcacagcgcggagccgaggattcaggtgttaaggctgtgagctctgcagatcctagagcccctggcgagagtccatgtcccgtgggagaaccacctcttgctctcgagaacgctgcctctcttaaactgttcgctgggagccttgctcccctgctgcagcctggagctgccggaggcgagataccagcagtgcaggctagttccggaagccccaaggcgagaacgacagaggggcctgtcgacagcatgccatgcctagataggatgcccctcctcgctaaaggaaaacaggcaacaggagaggagaaagctgccacagccccaggcgctggcgcaaaagcctcgggcgaaggaatggccggagacgctgccggtgagactgaaggctccatggaacgaatgggcgaaccttctcaggatcctaagcagggcaccagcggcggcgtggatacctcttcagagcagatcgccaccttgacagggtttccagatttcagggaacatatcgccaaaatttttgaaaaacccgtgctgggcgccttggctacacccggcgaaaaggccggggctggtagatcggctgtcggcaaagacttgacacggcctctagggcctgaaaagttgttggacgggcctcccggtgtagatgtgaccttgcttcccgctccccccgcaagactgcaagttgaaaaaaaacagcagctggccggggaggcagagatttcccacctcgctctgcaggaccctgcttcagataagctcttgggcccggccgggctgacctgggaacgaaatctgccaggcgctggagtaggaaaggagatggcgggagtgccacctactctgagagaggacgagagaccagaaggtcctggtgcggcatggcctggcttggaaggccaggcctattctcagttagaaaggagccggcaggagctagcaagcggtctgcccagtcctgctgccacccaggagctgcccgttgaacgggccgccgccttccaggttgccccccattcacacggcgaagaagctgtggcccaggatcggattccatctggcaaacagcaccaggagacatccgcgtgtgatagtccacatggggaagacggccccggcgactttgctcataccggcgtgcctggacatgtgccaagatctacttgtgcaccatcaccccagcgcgaggtattgactgttcccgaggcaaattccgaaccttggactctcgatacactcggaggcgagcggcgtccaggagtcaccgccggcatcctggaaatgagaaacgccctggggaatcagagtactcccgcaccacccacaggcgaagtcgcagacactcccctggagccaggcaaagtcgctggggccgcaggtgaagcagagggggacattacactatctacagcagagacgcaagcttgcgcttcaggggaccttccggaggcggggaccactcggacgttttccgtagtggcgggcgatttggtgctgccaggaagctgccaagaccctgcttgttctgataaagcaccgggcatggagggcactgccgccctgcacggggactcaccagctcggccacagcaggccaaagagcagccaggccctgaaagaccaatcccagccggggacggcaaggtttgcgtgagttcacctcctgagccggatgagacgcacgatccaaaactgcaacacttagcaccagaggaactgcacaccgaccgcgagagcccacggcccggaccctcaatgctgccttcagtaccaaagaaggacgctccccgggttatggataaggtcacctctgacgaaactcgtggtgccgagggaacggagagcagtcccgttgccgacgatataatccaacccgcagcgcccgccgatctcgagtcccctaccctcgcagcatcatcctaccacggcgacgtggtagggcaggtttccaccgacttgatcgcccagtccatcagcccagctgctgcccatgccggcctgcctccatccgcagctgaacacatcgtgtctccctcagccccagcaggtgaccgtgtcgaggcttccacccctagctgtcccgaccccgctaaggatttgtctcgcagcagcgacagtgaggaagcttttgagactcctgagtccactacccctgtgaaggccccccccgctccccctcctccccctcccgaagtgataccagagcccgaggtctccacacagccaccccctgaggaacctggttgcgggtccgaaacggttcccgtcccagatggaccacggagtgattcagtggagggctcccccttccgtccgccttcacatagttttagcgccgtattcgacgaggacaagccgatcgcatctagcgggacatataacctcgattttgataacattgaacttgttgatacgtttcagaccttggagcccagggcaagcgatgccaaaaaccaggaagggaaagttaatacacgccggaaaagtaccgatagcgtccctatttcaaagagcacacttagtcgctctctgagcttgcaggcttcagatttcgacggagcctctagcagcggaaatccagaggctgtggccctggctcccgatgcatactcgaccgggagctcgtccgccagttcaaccctgaaacgtacgaaaaagccaaggcccccatcactcaaaaagaagcagactacaaagaagcctactgagacccccccggtgaaggagacacagcaggaacccgacgaagagagcctcgtcccgtctggagagaacctagcctctgaaacaaaaaccgagtccgctaaaactgaggggccctctcctgctctcttggaggagacccctctcgaaccagctgtagggcctaaggccgcctgtccactagactccgaatctgccgagggtgtcgtgccaccggcatccggcgggggcagagtgcagaattccccaccagtcgggcggaaaaccctccccttgactacagcccccgaggccggcgaggtgacgccaagcgattcaggcgggcaagaggacagtcctgccaaaggactgagcgtgaggcttgagttcgactattcagaagataagagttcctgggacaaccagcaggaaaatccaccccccacaaagaagataggaaagaagcctgttgcaaaaatgcctcttaggagacccaaaatgaagaaaactcctgagaagctggacaacacgcctgcgtctcctcctaggtccccggctgaacctaacgacatccctattgccaagggaacgtacacgtttgatattgacaagtgggatgatccaaattttaatccatttagctctacttctaagatgcaggaatctccaaagctgccacagcagagctataattttgaccccgatacctgcgatgaaagcgtggacccttttaaaaccagttccaagactccatcctcacccagcaagtctcctgcatctttcgagattccagcctcagccatggaggccaatggcgttgatggcgatggactgaacaagccagccaagaagaagaaaactccactgaaaacagatactttcagagtgaagaagtcacccaagcgtagtcctctgagtgacccgccgagtcaggatccaactcccgcagctacgcctgaaacacctccagtgataagcgcggtcgtgcatgctaccgacgaagaaaaactggctgtgaccaatcaaaagtggacttgcatgactgtggacttggaagccgataagcaggattatccacagccttctgatctaagcactttcgttaacgagactaagttctcttcaccaacggaagagcttgattataggaatagctacgaaattgagtacatggaaaaaattgggagcagcctaccacaggacgacgatgcacctaaaaagcaggcactgtatctgatgttcgatacttcacaggagtcacccgtgaagagctcacccgtcaggatgagtgaatcccccaccccatgttccgggagttctttcgaggagacagaggccctggtcaacactgccgcaaagaaccaacaccccgtgcctaggggccttgcgcctaaccaggaaagtcacctgcaagtcccagagaaaagttcacagaaggagctggaagccatgggcctgggcacaccaagcgaggccattgaaattacagctccagagggatcctttgcttcagccgacgccttattatcaaggctagcacatcctgtgtccttatgcggcgccctcgactatttggaaccagacctggccgagaaaaatccccctctcttcgcacaaaaactgcaagaagagttggagtttgcaatcatgcgcattgaagccctgaagctggcacgccaaattgcactggctagcaggagccatcaagacgccaagagggaggcagctcatcctactgacgtgagcatctccaagaccgccctgtactctcgcattggaactgccgaagtcgaaaaacctgcaggactattattccagcaaccagacctggactccgccctgcagatcgctcgggcagaaatcattacgaaagaacgtgaagtaagcgaatggaaggataagtatgaggaaagtcgccgggaagttatggagatgaggaaaatcgtggcagagtatgaaaaaaccatcgcacaaatgattgaggacgaacagagagaaaaaagcgtctcacatcagaccgtgcagcagctcgtgctggaaaaagagcaggctctcgccgatctcaatagtgtggagaaaagtctggctgacctgtttcggcggtatgagaaaatgaaggaggtgctggaagggtttagaaagaacgaggaggtgctgaagcgatgcgcgcaagagtatctttctcgagtgaaaaaggaggagcagcgttatcaggcactgaaggtgcacgccgaagagaagttggatcgggccaacgccgaaatcgcccaggttcgcggaaaggcgcagcaggaacaagccgcccaccaagcctcacttcgtaaggagcagcttcgcgtggacgccctcgagcgaactcttgagcaaaagaataaggaaattgaagagctcactaagatctgtgatgagctcatcgcaaagatgggaaagtcttag

SEQ ID NO: 264420 - DNA, 8846 bp, Artificial Sequence
  derived and/or modified sequence
atggggaatgagaatagcacctccgataatcagcgcactttatcagcacagacaccgaggagcgctcagcctcccggaaacagtcagaatataaagcgcaagcagcaggataccccgggatctccggatcaccgcgacgccagcagcataggcagcgtcggtttgggtggtttctgtactgcctcggagtcgtccgcatccctcgatccttgcctggtgtcccccgaagtgacagagcccagaaaggatcctcagggagcacggggtccagagggatcactactgccgtccccccctcctagccaagaaagggaacatccaagcagcagtatgcctttcgctgagtgcccccctgaggggtgtttggccagtccggctgccgctccagaagatgggcctcagacacagagtcccagacgtgagcccgctcccaacgcacccggagacatcgctgctgcctttcccgctgagcgggacagtagcaccccttaccaggaaatcgccgctgtgccctccgccggacgcgaaaggcagcccaaggaagaagggcagaagtcctccttttcttttagctcgggaattgaccagtccccaggaatgagcccagttcccttgcgcgaacccatgaaggctccgctatgtggtgagggtgatcagccgggaggtttcgagtcccaggagaaggaagcagcgggaggattcccccctgcggagtctagacagggggttgcctcagtacaagtgactcccgaagctccagctgctgcccagcaggggaccgaatcaagcgctgtgctggagaaatcccccctgaagcctatggcccctattccccaggatccagcgcctcgcgcaagcgaccgagagcgaggccagggagaggctccaccccagtatttgactgatgacttggagtttctgcgcgcatgccacctgcccagatctaattccggggcagcacccgaggctgaagttaatgctgccagtcaggaatcatgtcaacagcccgtcggcgcatacctgccgcatgctgaactgccatggggcctgccgagcccagctctcgtgccagaagcgggtggctctgggaaggaagccttggacacaatagatgttcagggacatccacagacaggaatgaggggcactaagccaaaccaggttgtctgcgtggctgctgggggtcagcccgaaggcggtttgcctgtaagcccggagcctagtttgctcactccgaccgaggaagctcacccagctagctccctggcctccttcccggcagcacagatacctattgcagtagaagaacccggttccagctccagagaatccgtctcaaaagccggaatgcctgtcagcgcagacgcagccaaagaggtggtggatgccggacttgtgggactggagagacaggtctcggacttagggagcaagggcgagcacccagaaggcgatcctggggaggtgcccgcaccgtctccgcaagagagaggcgaacatctgaacacggagcaaagccatgaggttcagcccggagtgccaccccctcccctcccaaaggaacaatcccacgaagtgcagcctggcgctccacctcctccgcttcccaaggctccatctgagagtgctcgcggaccccctggcccaaccgatggtgctaaggtgcacgaggatagtacttccccagcggttgcaaaagagggatcccggagtcccggagacagccctgggggtaaggaggaagcgcctgaaccacctgacggcggagatcctgggaatcttcaaggtgaagatagccaagccttctcaagtaaaagggatcctgaggtcggcaaagatgaactcagcaagcctagtagcgatgctgagagtcgagatcaccccagttcacactccgcccaaccacctcgcaaaggcggagcaggacacactgacggccctcattctcagactgctgaggctgatgcctcaggtctgccccacaagctaggtgaagaagacccggtacttcctccggtacctgacggggctggagagcccaccgttcctgaaggagctatttgggaaggatctgggttacagcctaagtgccctgacaccttacagagtcgggaggggctcggacgcatggagtctttcttgacactggagtcagaaaagagcgactttcctcccacccccgtggcagaggtggcacccaaggctcaggaaggcgaatccacccttgaaattagaaaaatgggctcctgcgacggcgagggcctgctgactagtcctgatcagccccgtggacctgcctgcgacgcgagcagacaggaattccacgctggggtgcctcatcccccacaaggtgaaaacttagctgctgatctcggtctaaccgcacttatcctcgatcaggatcagcagggaatcccgagctgtcctggagaaggctggatccgcggagctgcaagcgaatggcctctgctgtcttcagagaagcatcttcagccatcacaggcccaaccagagacttccattttcgacgtgctcaaagagcaggcccaaccacctgagaatggtaaggaaacatctccttcacacccagggttcaaagaccagggtgcagatagctcccaaatccatgtacctgttgagccacaggaggacaataatctgcccactcacggcggacaggagcaggccctaggctccgagctgcagtcccagctcccaaaaggtacactaagcgacactcctacctcctcaccaacggacatggtgtgggaatcctcattaacagaggagagcgaactatcagcgccaactcgtcaaaaactccccgctctcggcgaaaagcgccctgagggggcatgcggtgacggacagtcgagtcgagtgagtccgccagccgctgatgtgctgaaggacttcagcctggcaggcaattttagccgaaaggagacctgttgcaccggccaaggtcccaacaagagtcagcaagccctcgctgatgctctcgaggaggggtcgcagcacgaggaagcatgccagcggcatcctggagcaagcgaagcagccgacggttgtagccccctgtggggcctatcaaaacgcgagatggctagcggcaacacaggagaggccccaccatgccaacccgatagtgttgccttgctcgatgcggtgccctgcctgccagcccttgccccagcctcccctggagtgacaccaacacaagatgctcctgagactgaggcctgtgacgaaacacaggagggccgtcagcagcccgtgcctgctccgcagcagaagatggagtgttgggcaacgtcggacgctgagagtcccaagctgctggcttcatttccaagtgctggggagcagggtggcgaggctggagctgctgaaacaggcggtagtgcaggcgctggcgacccaggcaaacaacaggcacctgaaaaacctggagaggctactctttcctgcggtctcctccagactgagcattgtcttaccagtggagaggaggcctcaaccagtgccctgcgagaaagttgccaggccgagcatcctatggcctcctgccaggatgctttactgcccgcaagagagctgggtgggattccgagatctaccatggatttcagcacacatcaggccgtacctgaccctaaagagctcctgctctcgggaccacccgaagtagccgcacctgacacaccatatctgcatgttgatagtgccgcacaacggggtgcagaggattctggggtgaaagcggtgagcagtgctgacccgagagctcctggggagagcccctgtcctgtaggagaaccccctctggcactcgagaacgcagcgtcactaaaactgttcgccggatctctcgcgcctctgctccagcccggagctgccggaggcgaaattccagctgttcaggcctcttctggatcaccaaaggctcgcacgacggaaggccctgtcgattccatgccatgtttagacaggatgcctttgttggccaaaggcaagcaggctaccggagaggaaaaggccgcaacagctccgggagcaggtgctaaggcaagcggcgaaggtatggcaggtgacgccgcaggcgaaaccgagggctccatggagaggatgggcgagccatctcaagatcctaagcaaggtacaagtgggggagtagatactagctcagagcagatcgcaacgctaaccggcttccctgactttcgagagcacatagccaagatttttgaaaaacccgtgctgggtgcgctcgcaactcccggtgaaaaggcaggcgctggcagatcagccgtggggaaggatctgacacggcctctcggccctgaaaagctgttggacggccctccaggagttgatgtgaccctccttccagcgcctcctgctaggcttcaggtagagaaaaaacagcagttggcaggggaggctgagatctcccatctggccttgcaggacccagccagcgataaattgctgggtcccgctggactcacttgggaacgcaacctgccaggcgctggggtgggaaaagagatggcaggcgtgcccccaacgttgcgcgaagatgaaagacctgaaggccctggggcagcatggcctgggctggaaggccaggcttattcgcagctcgaacgaagccggcaggaactggcctcgggtctcccttcaccggctgctacacaagagctccctgttgagcgggcagcggcatttcaggttgccccacactcacatggtgaagaagccgtcgctcaggaccgaattcctagcggtaaacagcaccaggagaccagcgcatgtgacagcccgcacggcgaggatgggcctggcgattttgcacacaccggagtgcctgggcatgtgcctcggtcaacgtgcgccccttctcctcagcgagaagttttaacggtgccagaagccaactctgaaccctggaccctggatacactgggcggtgagcgacggcctggcgttacagccggaattctggaaatgcgcaacgctctggggaatcagagcacccctgcccctcccaccggcgaagtggctgatacacctctggagccaggcaaggtcgccggagcagccggtgaagcagagggtgacatcaccctctcaactgccgagactcaggcatgtgcaagcggggacctcccagaagcgggaacgacgaggaccttcagcgttgtggctggcgatcttgttctacccggttcgtgccaggatcccgcttgctccgataaagctcctggcatggaaggcactgcagccctccacggcgattcgccagctcgccctcagcaagccaaagagcagcctgggccagaacgacccatacccgctggagatggcaaggtttgtgtgagctcaccccctgaacccgatgaaacccacgatcctaagcttcaacatctggcacccgaagagcttcataccgaccgggagtcccccagacctggaccatccatgctcccaagtgtgccaaaaaaggatgcccctcgcgtgatggataaagtcacctccgatgagactagaggggctgaaggaactgaatctagccccgtagcagatgacatcatacagcccgcagctcctgctgatcttgagagcccgactctcgcagcgagctcctatcacggcgacgtggttggccaggtgagcactgacctcatcgctcagagcatcagtcccgctgctgcacatgcgggactgccaccctctgctgcagagcacattgtttccccctcagcccctgctggtgaccgggtcgaggcatctaccccatcctgtccagatccggctaaggaccttagcaggagcagcgactctgaagaggccttcgaaactcctgagagcactacacccgttaaagcacctcctgctcctccccctcccccaccagaagtaattcccgagcctgaagtctcaacacagcccccacctgaagaacctggatgcgggtcagaaacagttcctgtgcctgatggacccagatccgattctgtagaaggaagtccatttcggcctccctctcactcctttagtgcagtctttgatgaggacaaaccgatagcttcttctggcacttacaacctggacttcgataatattgagctggtggatacattccagacccttgaaccgagagccagtgatgcaaagaatcaggaagggaaggtgaatacaaggcgtaaatctacagactcagttcctattagtaaatcaacactgtctaggtctttatcactgcaggcctccgacttcgacggggcatctagttccgggaaccctgaggcggtggccctcgccccagatgcttattctaccggatcttcaagcgcaagctccacgctgaagcgcacgaaaaaaccgagaccgccatccctaaagaaaaaacagaccaccaagaaacctacggaaaccccccctgtgaaggagacccagcaggaacccgatgaggagtccttggttccaagtggagaaaacctagccagtgaaaccaaaacagagtccgcgaaaaccgagggacccagcccagcattgttggaggagacgcctttggaacccgctgttggacccaaagccgcatgcccacttgacagtgagtctgccgaaggggtagtccctccggctagcggtgggggtagagtgcagaatagcccccctgtgggcaggaagacacttccattaacaaccgcacctgaagcgggagaggtgacaccctcagattcgggtggacaggaagactctcctgcgaaaggtctcagtgtacgtttggaattcgattatagcgaggataagagctcttgggataaccaacaagaaaacccccctcccacgaagaagattggtaaaaagccggtggccaaaatgccattgcgcagacctaagatgaaaaagactcccgagaaactcgacaacactccagccagcccaccgcgaagccccgcagagcctaatgatattccaatcgccaaggggacttatacctttgacatcgataagtgggacgacccaaacttcaatccattttctagcacaagtaagatgcaggaatcccccaagctgccgcagcagtcttacaactttgatccagacacctgcgacgagtccgtagaccccttcaagaccagcagtaaaaccccctcctcacctagtaagtcccccgcatcatttgaaatcccagcttccgccatggaggccaatggggtggatggcgatggcttgaacaaacctgcaaaaaagaaaaaaacacccctgaagactgacacatttagggttaagaagtctccgaaacgtagcccattgagtgatccccctagccaggaccctacacctgctgccaccccagagactcccccagtgatttctgctgtcgttcatgctaccgacgaagagaagttggcggtcaccaaccagaagtggacctgcatgactgttgatcttgaggcagataagcaggattaccctcagccaagtgaccttagtactttcgtgaatgagactaaattctcttcacctaccgaagagctggactatagaaactcctacgagatcgaatacatggaaaagatcggaagttctttgccccaggatgatgatgcccctaagaagcaggcactgtatttaatgtttgatacttcacaggagtctcccgtgaagtcttcaccggttagaatgtctgagtccccgacaccttgcagcgggtcctctttcgaagaaaccgaggccctagtgaatactgccgctaaaaatcagcaccctgtccccagaggccttgctccgaaccaggagtcacacctgcaggtacccgaaaagagcagccagaaagagctggaggcaatgggcctaggcaccccatctgaagccatcgaaattaccgcacctgaaggatcattcgcctccgctgacgccctgctgtcccgattggcacaccccgtctccctctgtggcgctttggactatctcgagcctgacttagccgaaaagaatccacccctgtttgcgcagaagctccaggaggaattggagttcgcgatcatgcgtatcgaagctctgaagctcgcgcgacagattgccctagccagcaggtcacatcaagacgccaaaagagaggccgcacatcctacagatgtctccatcagtaaaacagcactgtacagtagaatcgggacagccgaagttgaaaaacctgccggtttgctgttccagcaaccagatctcgattcggcactacagatcgcgagggctgagatcattaccaaagagcgcgaagtctcagaatggaaggataagtatgaggaatctcgacgcgaagtgatggagatgagaaaaattgtcgcagaatacgagaaaaccattgcccaaatgatcgaagacgaacaacgcgaaaagagtgtctcccatcaaactgtgcagcagctcgtattagaaaaagagcaggcactggctgatctaaattcagtggagaagtccttggctgacctttttcgcagatacgagaagatgaaagaagtattggagggctttagaaaaaacgaggaggtccttaagcggtgcgcgcaagagtatctgtctcgggtgaagaaagaagaacaaaggtaccaggccctgaaggtccacgctgaagagaaactggatcgggcaaatgcagaaatcgcccaggtcagagggaaggcccagcaggagcaggccgcacatcaagcttccctccggaaggagcaactgagggtggacgccctggaacgcacgctagagcaaaagaataaggagattgaggagctcactaaaatttgcgacgaattaattgccaagatggggaagtctta

SEQ ID NO: 264421 - DNA, 8846 bp, Artificial Sequence
  derived and/or modified sequence
atgggcaacgagaacagcaccagtgacaaccagcgtacgttgtccgcacagacccctcggtctgcacagccccctgggaactcccagaatattaagaggaagcagcaagacactccaggctctccagaccaccgggatgcatctagtattggtagcgttggactggggggattttgcaccgcctcagagtccagcgctagtttggatccttgcctagtgtctccagaagttaccgaaccaagaaaagaccctcaaggggcacggggaccagagggctccctgcttccatcccccccaccaagtcaggagcgcgaacaccccagcagcagcatgccttttgcagaatgccccccagaagggtgcctagcgagtcctgccgctgcccctgaggatggcccacagactcagtcccccagacgcgagcctgctcccaatgcccctggggacatcgccgctgccttcccagctgagcgggacagcagcactccatatcaggaaatcgccgcagtgccttcggcgggtcgggagcggcagcccaaagaggagggtcagaagtccagcttctctttcagctctggcatcgaccagagccccggtatgagtccagtgcccctgagggagcccatgaaggcccctctttgtggggaaggggaccagcccggtggattcgagagccaggagaaggaggccgctggcggtttccctcctgccgagtcccgccagggggtcgcctccgtgcaggtgacgcctgaagcaccagccgcagctcagcagggcactgagtcttcggccgtcctcgagaagtctccccttaagcccatggcccctataccacaggatcccgcacccagagccagcgatagggagcgaggtcagggcgaggcccctcctcaatacctaacagatgatctagaattcctgcgtgcctgccacctccctcggtcgaatagtggcgcagcaccagaggctgaggtgaacgcggctagtcaggaatcatgtcagcaaccagtgggggcttatctgcctcacgccgagcttccatgggggctcccaagccctgccctggtgccagaagcgggaggatcaggtaaggaagccctggacacgatcgacgtgcaggggcatccccagacgggaatgagaggcactaagccaaatcaggtggtgtgcgtcgcagctggcggacaacctgaggggggattacccgtcagcccggagcccagcctgctgacaccaaccgaagaagcccacccagctagctcgttagcgagtttccccgcagcacagatccctatagctgttgaagagcccggttcatcctccagagagagcgtgtcgaaggccggtatgccggtctccgccgacgccgcaaaggaggtcgtggatgccggattagttggattggagaggcaggtaagcgatctcggctctaagggagagcatccagagggggatcccggagaagtgcccgctccctcccctcaagaaaggggcgagcatcttaacacagaacaatcgcatgaggttcagccaggggtgccacccccaccactgccaaaagagcagagccacgaggttcagcccggtgctccgccacctccactgccgaaagcgccttctgagagcgccagaggaccccctgggcctacagacggggcaaaggtccacgaagattctacatcgcctgcagtggccaaagaaggaagtagatctcccggagacagccctggcggaaaggaagaggcccctgaacccccagatggaggagacccaggtaacttgcagggagaggattcccaagccttttcctctaagagagatcctgaggtgggcaaggacgaactctctaagccatcctctgatgccgagtccagagaccacccctcctcacattccgcccagcctcccaggaaagggggagccggacatacggacgggcctcacagtcagacagcagaggccgatgcctccggactgccacacaagctgggcgaggaggatccagttctgcctccagtccctgatggcgctggagaacccactgtgcctgaaggcgcaatctgggaaggatcggggctccaacctaaatgcccagatacgctgcagtcaagagaagggttaggtagaatggagtcatttctcacactggagtccgagaagtcagattttccccctacacctgtcgcagaggtcgcccctaaggctcaagagggggagagcactttggagatccgtaaaatgggaagctgcgatggagagggattgctcacgagccccgaccagcccaggggtcccgcatgcgacgcaagcagacaagaattccatgccggtgtgccgcaccccccacagggcgaaaacctggctgccgatctgggtttaaccgcccttatactagatcaagatcagcaggggatcccgtcttgccctggggaaggctggatccggggtgcggcaagtgagtggccgctgctctcttctgaaaaacacctgcagccttctcaggcccaacctgaaacctcgatcttcgatgttttgaaggaacaggcccagcctccagaaaatggcaaagaaacttctcccagccaccctggtttcaaggatcagggagctgacagctcacagattcacgttcccgtggaaccgcaggaggacaacaatctgcctacacatggcggacaggagcaggccctgggaagtgagctgcagagccagctccctaagggaacactgtccgacacccccacgagctcacctactgacatggtgtgggaatctagtcttaccgaggagtcagagctgagcgcccctactaggcagaaactacctgctttgggcgagaagaggcccgaaggagcttgcggtgatggacaatcctcacgcgtgtccccgccagcggctgacgtgttgaaagacttttcccttgccggtaatttttcgaggaaagagacatgctgtaccggacagggacctaacaaatcccagcaggccttggcagacgcccttgaagaaggttcccagcacgaagaggcgtgccagcgccatccaggcgcatcggaggcggctgatggctgctctcccctttggggtctctccaaacgcgagatggcatcagggaacactggtgaggcccctccttgtcagcccgattcagtggctctcctggacgcagtaccttgcctccccgctctagctcccgctagtcccggagtgaccccaacacaggatgcccctgaaactgaagcttgcgacgaaacccaggagggccgacagcagcctgttcccgctccacagcaaaagatggaatgctgggcaacatccgacgctgagagcccaaagctgttggcatcctttccaagtgctggagagcaggggggagaagccggagccgcagaaaccggcggatcagccggtgccggagaccccggtaaacaacaggctccggagaagccaggggaagcaaccctgtcatgcggactcctgcagactgagcactgccttacgagtggcgaggaggcttccacctccgctctccgggaaagctgtcaggccgaacatcctatggctagctgccaggatgccctgctccctgcaagggaactgggaggaataccacggtcaacaatggacttcagcacccatcaagccgttcccgaccctaaggagcttctcctgtcagggcctcccgaagtggctgcgccagatacaccgtatctccacgtggacagcgcggctcagagaggcgcagaggactcaggcgtgaaagcagtgagctcagctgatcccagggcccctggcgaatcgccctgtccggtcggtgagccaccgctcgccttggagaacgccgcttctcttaagctgttcgctggatcactcgctccactactgcaaccaggcgcagcagggggtgagattcctgcagtgcaagccagttccggctcgcccaaagcccgtaccaccgaggggccagtggactcgatgccttgtcttgaccgtatgccccttctggccaagggcaaacaagccaccggagaggagaaagccgcaacggcgccaggcgctggcgcaaaggcgagtggcgaaggaatggctggagatgctgcgggagaaaccgagggcagcatggaacgtatgggagagccatcccaggaccccaagcagggcacctcgggcggtgtggacacgtcctcggagcagatagcaaccctcacaggattcccagattttcgggagcacatcgctaagattttcgagaagcctgtcctgggggctcttgccacgccaggcgaaaaggccggagcaggcaggagcgcagtgggtaaggaccttacccgcccattgggacccgaaaaattactggatggcccacctggcgtggatgttactctgttacccgcaccaccagctcgactgcaagttgagaaaaagcagcagcttgcaggggaggccgagatcagccaccttgctctgcaggacccggcaagcgacaaactgcttgggccagctggacttacctgggaacggaatttgcctggagctggtgtcggcaaagagatggccggtgtgccacccacccttagggaggacgaacgtcctgaaggcccaggcgcagcttggccaggcctcgagggtcaggcctacagccagctggaacggagcaggcaggagctcgccagcggactccctagtcctgctgcgacccaggaactccccgtggagcgtgccgctgcattccaggtcgcgccacacagccatggggaggaggccgtggcccaggatagaataccttctgggaagcagcaccaggagacgtcagcgtgcgactctccacacggggaggatgggccaggtgactttgcccataccggtgttcctggtcatgtcccacgatccacgtgtgctccaagtccacagcgggaggtgctgacagtgcccgaggctaactccgaaccctggactctggatactctggggggagaacgaaggccaggcgttacggccggtatactcgagatgagaaatgccctgggcaaccaaagtacacccgcacctccaaccggtgaggtggccgacaccccattagagccaggcaaagtggcaggggcagctggcgaggctgaaggagacattaccctttctactgccgaaacacaggcttgcgcaagcggcgacctcccagaggctgggaccacccgtacattctcagtcgttgctggcgatctggtgttgcctggatcttgccaggaccctgcctgttctgacaaggccccaggaatggagggaacagctgctctgcacggcgattcccctgctaggccacaacaggctaaagagcagcccggtccggagaggcccatcccagccggtgacggtaaggtgtgcgtttcctctcctccagagcctgatgaaacgcacgatcccaagttgcagcacctagcccctgaagagcttcacacggaccgtgaatcccccaggccaggacccagcatgctgccaagcgtgccaaagaaagatgcccctagagttatggacaaggtgaccagtgatgagacgcgcggtgcagaggggaccgagtcatctcccgtcgccgacgatatcatacaaccggctgcaccggcagatctggaatcccctaccctggcggcaagcagctatcatggagacgtggtcggacaagtatctacagacctcattgcacagtccatttctccagccgcagcccacgcaggcctgcccccttctgcagcagagcatattgtgagcccaagcgcaccagcaggggaccgagtggaggcaagcacccccagctgccctgatcccgctaaagatttgtcaagatcctccgacagcgaggaggcattcgagacacctgaatccacaacgccagtcaaggcccctccagccccaccccctcctcctcccgaagtgattcccgaaccagaggtctcgacccagcccccaccagaagagccaggatgcggatcggaaacagtgccggtgcctgacggcccaaggagcgactctgtggaaggctcccccttccggccaccttcacattcattttccgctgtgtttgacgaagacaagcctatcgcttcgtccggaacctacaacttagatttcgacaatatcgagcttgtggataccttccagacactggagcccagagcttctgatgcaaagaaccaagaaggtaaggttaacacaaggagaaagtctaccgattcggtgccaattagcaagtctacactgagccgctcactcagtttgcaagctagcgatttcgatggcgcttcttcttcgggcaatccggaagcagtggccctcgctcccgatgcctactcaacgggttctagcagcgcttcgtcaactctgaaaaggaccaaaaaacccaggccaccctctctgaagaaaaaacagaccaccaagaagccaactgagacaccacccgtgaaagagacacaacaagaaccggacgaggaatctctcgttccgagcggagaaaatctcgctagtgagaccaagacagagtccgctaaaactgaaggcccttctccagctctgctggaggagacaccgctcgagcccgctgtcgggcctaaggccgcatgcccgctggacagtgaatccgctgaaggggtggtgccaccggcatcgggagggggtcgcgtgcaaaactcccccccagttggcaggaaaacacttccgttgacaacagcgcctgaggctggcgaggttactcctagtgacagcggtgggcaggaggacagtcccgcaaaaggtttgtcagttcggctcgagtttgattattctgaagacaaatcctcctgggacaaccagcaggagaaccccccaccaacaaagaaaatcggcaaaaagcctgtcgcaaaaatgcctctccgacgacctaagatgaagaagacccctgagaagctcgacaacacaccagcctcccccccacgctctcctgctgagcccaatgatattcctattgcaaaaggaacctatacattcgatattgacaaatgggatgacccaaacttcaatcctttttcatccaccagtaaaatgcaagaaagtcctaaactgcctcagcagagctataatttcgaccctgatacatgcgatgagagtgttgatccatttaagactagtagcaaaacgccatcatcaccttcaaagagtcccgcaagcttcgaaattcctgcaagcgcaatggaggccaacggcgtggacggagatgggctgaacaagcctgcaaaaaaaaagaaaactcctctgaagacagatacctttcgggtgaaaaagtctcccaagagaagtcctttgagcgatcctccctctcaggatccgacgccagccgcaacccccgagacacctcccgtaatctcggccgttgtgcatgcgacagacgaggagaagctggccgtgacgaaccagaagtggacttgtatgaccgtggatcttgaagcagacaaacaggactatccccaaccgagcgacctgtccacatttgttaatgaaacaaagttttccagtccaacagaggaactagattaccgcaactcatacgagattgaatatatggaaaaaattggttcctcccttccacaggatgacgatgccccaaagaaacaggccctttacttgatgttcgacacctctcaagagtcgcccgtcaaaagctcacctgtgcgtatgagcgagagcccaaccccctgtagtggtagttcattcgaagagacagaagctctcgtgaatacggcggctaaaaatcagcaccctgtacccagagggctagccccaaaccaggaatctcacttacaggtgccggagaagtcgtcgcagaaagagctggaggcgatggggctaggaacccccagtgaagctatagaaataactgcccctgaaggatcatttgctagtgccgacgcgctgttgtcacgcttagcccaccctgtctccctctgtggcgctctggactacctagaaccagacttagctgagaaaaaccctccgctgtttgcacagaagctccaggaggaactcgagttcgcgatcatgaggatcgaagccctgaagctggccaggcaaattgcactcgcctctcgctcacatcaagacgccaagcgggaagcagcgcacccaaccgacgttagcatctcgaagaccgctctctatagtagaatcggcaccgccgaggtggagaaaccggctggcctgctcttccagcagccggatctggattctgccttgcagattgcaagagcagagataatcactaaagagagggaagtgagtgagtggaaagacaaatacgaggagagccggagggaggtcatggagatgagaaagatagtcgccgaatatgagaaaacaattgcccagatgattgaggatgagcaaagagagaagtccgtgtctcaccagaccgtgcagcagttagtgctggagaaggaacaagcgctggcagacctaaactcagtagagaaatccctggccgatctgttccggcgttacgagaagatgaaagaagttttagaaggcttcaggaagaacgaggaggtgttgaagaggtgtgctcaagagtatctgtcccgcgtaaaaaaagaagagcagaggtatcaggcactgaaggtgcatgccgaggagaagctggatagggccaacgccgagatcgcacaggtcagaggcaaagcccagcaggagcaggctgcccaccaggccagtctgagaaaagagcagctgcgagtcgacgcgctggagagaacactggagcaaaaaaataaagaaatcgaggagctgacaaagatatgtgacgagcttatcgctaagatggggaaatctta

SEQ ID NO: 264422 - DNA, 9377 bp, Artificial Sequence
  derived and/or modified sequence
gtcacctctgacaaaattctggggacgctgggaacactgaatcaacatgggcaatgagaacagcacctcggacaaccagaggactttatcagctcagactccaaggtccgcgcagccacccgggaacagtcagaatataaaaaggaagcagcaggacacgcccggaagccctgaccacagagacgcgtccagcattggcagcgttgggcttggaggcttctgcaccgcttctgagagttctgccagcctggatccatgccttgtgtccccagaggtgactgagccaaggaaggacccacagggagccagggggccagaaggttctttgctgcccagcccaccaccgtcccaggagcgagagcacccctcgtcctccatgccctttgccgagtgtcccccggaaggttgcttggcaagtccagcagcggcacctgaagatggtcctcagactcagtctcccaggagggaacctgccccaaatgccccaggagacatcgcggcggcatttcccgctgagagggacagctctactccataccaagagattgctgccgtccccagtgctggaagagagagacagccgaaggaagaaggacagaagtcctccttctccttctccagtggcatcgaccagtcacctggaatgtcgccagtacccctcagagagccaatgaaggcaccgctgtgtggagagggggaccagcctggtggttttgagtcccaagagaaagaggctgcaggtggctttccccctgcagagtccaggcagggggtggcttctgtgcaagtgacccctgaggcccctgctgcagcccagcagggcacagaaagctcagcggtcttggagaagtcccccctaaaacccatggccccgatcccacaagatccagccccaagagcctcagacagagaaagaggccaaggggaggcgccgcctcagtatttaacagatgacttggaattcctcagggcctgccatctccctaggagcaattcaggggctgccccagaagcagaagtgaatgccgcttcccaggagagctgccagcagccagtgggagcatatctgccgcacgcagagctgccctggggcttgccaagtcctgccctggtgccagaggctgggggctctgggaaggaggctctggacaccattgatgttcagggtcacccacagacagggatgcgaggaaccaagcccaatcaagttgtctgtgtggcagcaggcggccagcccgaagggggtttgcctgtgagccctgaaccttccctgctcactccgactgaggaagcacatccagcttcaagcctcgcttcattcccagctgctcagattcctattgctgtagaagaacctggatcatcatccagggaatcagtttccaaggctgggatgccagtttctgcagatgcagccaaagaggtggtggatgcagggttggtgggactggagaggcaggtgtcagatcttggaagcaagggagagcatccagaaggggaccctggagaggttcctgccccatcaccccaggagaggggagagcacttgaacacggagcaaagccatgaggtccaaccaggagtaccaccccctcctcttcccaaggagcaaagccatgaggtccaaccaggagcaccaccccctcctcttcccaaggcaccaagtgaaagtgccagagggccaccggggccaacggatggagccaaggtccatgaagattccacaagcccagccgtggctaaagaaggaagcagatcacctggtgacagccctggaggaaaggaggaagccccagagccacctgatggtggagacccagggaacctgcaaggagaggactctcaggctttcagcagcaagcgtgatccagaagtaggcaaagatgagctttcaaagccaagcagtgatgcagagagcagagaccatcccagctcacactcagcacagccacccagaaaggggggtgctgggcacacggacgggccccactctcagacagcagaggctgatgcatctggcctaccacacaagctgggtgaggaggaccccgtcctgccccctgtgccagatggagctggtgagcccactgttcccgaaggagccatctgggaggggtcaggattgcagcccaaatgtcctgacacccttcagagcagggaaggattgggaagaatggagtctttcctgactttagaatcagagaaatcagattttccaccaactcctgttgcagaggttgcacccaaagcccaggaaggtgagagcacattggaaataaggaagatgggcagctgtgatggggagggcttgctgacgtccccagatcaaccccgcgggccggcgtgtgatgcgtcgagacaggaatttcatgctggggtgccacatcccccccagggggagaacttggcagcagacctggggctcacggcactcatcctggaccaagatcagcagggaatcccatcctgcccaggggaaggctggataagaggagctgcatccgagtggcccctactatcttctgagaagcatctccagccatcccaggcacaaccagagacatccatctttgacgtgctcaaggagcaggcccagccacctgaaaatgggaaagagacttctccaagccatccaggttttaaggaccagggagcagattcttcccaaatccatgtacctgtggaacctcaggaagataacaacttgcccactcatggaggacaggagcaggctttgggatcagaacttcaaagtcagctccccaaaggcaccctgtctgatactccaacttcatctcccactgacatggtttgggagagttctctgacagaagagtcagaattgtcagcaccaacgagacagaagttgcctgcactaggggagaagcggccagagggagcatgcggtgatggtcagtcctcgagggtctcgcctccagcagcagatgtcttaaaagacttttctcttgcagggaacttcagcagaaaggaaacttgctgcactgggcaggggccaaacaagtctcaacaggcattggctgatgccttggaagaaggcagccagcatgaagaagcatgtcaaaggcatccaggagcttctgaagcagctgatggttgttccccactctggggcttgagtaagagggagatggcaagtggaaacacaggggaggccccaccttgtcagcctgactcagtagctctcctggatgcagttccctgcctgccagccctggcgcccgccagccccggagtcacacccacccaggatgccccagagacagaggcatgtgatgaaacccaggaaggcaggcagcaaccagtgccggccccgcagcagaaaatggagtgctgggccacttcggatgcagagtccccaaagcttcttgcaagtttcccatcagctggggagcaaggtggtgaagccggggctgctgagactggtggcagcgctggtgcaggagacccaggaaagcagcaggctccggagaaacctggagaagctactttgagttgtggcctccttcagactgagcactgccttacctccggggaggaagcttctacctctgccctacgtgagtcctgccaagctgagcaccccatggccagctgccaggatgccttgctgccagccagagagctgggtgggattcccaggagcaccatggatttttctacacaccaggctgtcccagacccaaaggagctcctgctgtctgggccaccagaagtggctgctcctgacaccccttacctgcatgtcgacagtgctgcccagagaggagcagaagacagtggagtgaaagctgtttcctctgcagaccccagagctcctggcgaaagcccctgtcctgtaggggagcccccacttgccttggaaaatgctgcctccttgaagctgtttgctggctccctcgcccccctgttgcaaccaggagctgcaggtggggaaatccctgcagtgcaagccagcagtggtagtcccaaagccagaaccactgagggaccagtggactccatgccatgcctggaccggatgccacttctggccaagggcaagcaggcaacaggggaagagaaagcagcaacagctccaggtgcaggtgccaaggccagtggggagggcatggcaggtgatgcagcaggagagacagagggcagcatggagaggatgggagagccttcccaggacccaaagcagggcacatcaggtggtgtggacacaagctctgagcaaatcgccaccctcactggcttcccagacttcagggagcacatcgccaagatcttcgagaagcctgtgctcggagccctggccacacctggagaaaaggcaggagctgggaggagtgcagtgggtaaagacctcaccaggccattgggcccagagaagcttctagatgggcctccaggagtggatgtcacccttctccctgcacctcctgctcgactccaggtggagaagaagcaacagttggctggagaggctgagatttcccatctggctctgcaagatccagcttcagacaagcttctgggtccagcagggctgacctgggagcggaacttgccaggtgccggtgtggggaaggagatggcaggtgtcccacccacactgagggaagacgagaggccagaggggcctggggcagcctggccaggcctggaaggccaggcttactcacagctggagaggagcaggcaggaattagcttcaggtcttccttcaccagcagctactcaggagctccctgtggagagagctgctgccttccaggtggctccccatagccatggagaagaggccgtggcccaagacagaattccttctggaaagcagcaccaggaaacatctgcctgcgacagtccacatggagaagatggtcccggggactttgctcacacaggggttccaggacatgtgccaaggtccacgtgtgccccttctcctcagagggaggttttgactgtgcctgaggccaacagtgagccctggacccttgacacgcttgggggtgaaaggagacccggagtcactgctggcatcttggaaatgcgaaatgccctgggcaaccagagcacccctgcaccaccaactggagaagtggcagacactcccctggagcctggcaaggtggcaggcgctgctggggaagcagagggtgacatcaccctgagcacagctgagacacaggcatgtgcgtccggtgatctgcctgaagcaggtactacgaggacattctccgttgtggcaggtgacttggtgctgccaggaagctgtcaggacccagcctgctctgacaaggctccggggatggagggtacagctgcccttcatggggacagcccagccaggccccagcaggctaaggagcagccagggcctgagcgccccattccagctggggatgggaaggtgtgcgtctcctcacctccagagcctgacgaaactcacgacccgaagctgcaacatttggctccagaagagctccacactgacagagagagccccaggcctggcccatccatgttaccttcggttcctaagaaggatgctccaagagtcatggataaagtcacttcagatgagaccagaggtgcggaaggaacagaaagttcacctgtggcagatgatatcatccagcccgctgcccccgcagacctggaaagcccaaccttagctgcctcttcctaccacggtgatgttgttggccaggtctctacggatctgatagcccagagcatctccccagctgctgcccatgcgggtcttcctccctcggctgcagaacacatagtttcgccatctgccccagctggtgacagagtagaagcttccactccctcctgcccagatccggccaaggacctcagcaggagttccgattctgaagaggcatttgagaccccggagtcaacgacccctgtcaaagctccgccagctccacccccaccaccccccgaagtcatcccagaacccgaggtcagcacacagccacccccggaagaaccaggatgtggttctgagacagtccctgtccctgatggcccacggagcgactcggtggaaggaagtcccttccgtcccccgtcacactccttctctgccgtcttcgatgaagacaagccgatagccagcagtgggacttacaacttggactttgacaacattgagcttgtggatacctttcagaccttggagcctcgtgcctcagacgctaagaatcaggagggcaaagtgaacacacggaggaagtccacggattccgtccccatctctaagtctacactgtcccggtcgctcagcctgcaagccagtgactttgatggtgcttcttcctcaggcaatcccgaggccgtggcccttgccccagatgcatatagcacgggttccagcagtgcttctagtacccttaagcgaactaaaaaaccgaggccgccttccttaaaaaagaaacagaccaccaagaaacccacagagacccccccagtgaaggagacgcaacaggagccagatgaagagagccttgtccccagtggggagaatctagcatctgagacgaaaacggaatctgccaagacggaaggtcctagcccagccttattggaggagacgccccttgagcccgctgtggggcccaaagctgcctgccctctggactcagagagtgcagaaggggttgtccccccggcttctggaggtggcagagtgcagaactcaccccctgtcgggaggaaaacgctgcctcttaccacggccccggaggcaggggaggtaaccccatcggatagcggggggcaagaggactctccagccaaagggctctccgtaaggctggagtttgactattctgaggacaagagtagttgggacaaccagcaggaaaacccccctcctaccaaaaagataggcaaaaagccagttgccaaaatgcccctgaggaggccaaagatgaaaaagacacccgagaaacttgacaacactcctgcctcacctcccagatcccctgctgaacccaatgacatccccattgctaaaggtacttacacctttgatattgacaagtgggatgaccccaattttaaccctttttcttccacctcaaaaatgcaggagtctcccaaactgccccaacaatcatacaactttgacccagacacctgtgatgagtccgttgacccctttaagacatcctctaagacccccagctcaccttctaaatccccagcctcctttgagatcccagccagtgctatggaagccaatggagtggacggggatgggctaaacaagcccgccaagaagaagaagacgcccctaaagactgacacatttagggtgaaaaagtcgccaaaacggtctcctctctctgatccaccttcccaggaccccaccccagctgctacaccagaaacaccaccagtgatctctgcggtggtccacgccacagatgaggaaaagctggcggtcaccaaccagaagtggacgtgcatgacagtggacctagaggctgacaaacaggactacccgcagccctcggacctgtccacctttgtaaacgagaccaaattcagttcacccactgaggagttggattacagaaactcctatgaaattgaatatatggagaaaattggctcctccttacctcaggacgacgatgccccgaagaagcaggccttgtaccttatgtttgacacttctcaggagagccctgtcaagtcatctcccgtccgcatgtcagagtccccgacgccgtgttcagggtcaagttttgaagagactgaagcccttgtgaacactgctgcgaaaaaccagcatcctgtcccacgaggactggcccctaaccaagagtcacacttgcaggtgccagagaaatcctcccagaaggagctggaggccatgggcttgggcaccccttcagaagcgattgaaattacagctcccgagggctcctttgcctctgctgacgccctcctcagcaggctagctcaccccgtctctctctgtggtgcacttgactatctggagcccgacttagcagaaaagaaccccccactattcgctcagaaactccaggaggagttagagtttgccatcatgcggatagaagccctgaagctggccaggcagattgctttggcttcccgcagccaccaggatgccaagagagaggctgctcacccaacagacgtctccatctccaaaacagccttgtactcccgcatcgggaccgctgaggtggagaaacctgcaggccttctgttccagcagcccgacctggactctgccctccagatcgccagagcagagatcataaccaaggagagagaggtctcagaatggaaagataaatatgaagaaagcaggcgggaagtgatggaaatgaggaaaatagtggccgagtatgagaagaccatcgctcagatgatagaggacgaacagagagagaagtcagtctcccaccagacggtgcagcagctggttctggagaaggagcaagccctggccgacctgaactccgtggagaagtctctggccgacctcttcagaagatatgagaagatgaaggaggtcctagaaggcttccgcaagaatgaagaggtgttgaagagatgtgcgcaggagtacctgtcccgggtgaagaaggaggagcagaggtaccaggccctgaaggtgcacgcggaggagaaactggacagggccaatgctgagattgctcaggttcgaggcaaggcccagcaggagcaagccgcccaccaggccagcctgcggaaggagcagctgcgagtggacgccctggaaaggacgctggagcagaagaataaagaaatagaagaactcaccaagatttgtgacgaactgattgccaaaatggggaaaagctaactctgaaccgaatgttttggacttaactgttgcgtgcaatatgaccgtcggcacactgctgttcctccagttccatggacaggttctgttttcactttttcgtatgcactactgtatttcctttctaaataaaattgatttgattgtatgcagtactaaggagactatcagaatttcttgctattggtttgcattttcctagtataattcatagcaagttgacctcagagttcctgtatcagggagattgtctgattctctaataaaagacacattgctgaccttggccttgccctttgtacacaagttcccagggtgagcagcttttggatttaatatgaacatgtacagcgtgcatagggactcttgccttaaggagtgtaaacttgatctgcatttgctgatttgtttttaaaaaaacaagaaatgcatgtttcaaataaaattctctattgtaaataaaattttttctttggatcttggc

SEQ ID NO: 264423 - DNA, 9673 bp, Artificial Sequence
  derived and/or modified sequence
caggagagaagaaacgcaaatcccagaaccgtgccaacatataaaaccccacattaagggttgtacagtgcactgggatttctcaagtcacccgcttggtcctcttccaagtatactttacttcctttcattcctctctaaaacttttttaaaaactttcactcctgctctaaaagttatcttggtttcttactctaccttatgccccttgggcgaattttttcctctgaggagggaagaatagagttgctgctgcagacacatcagattccctactggtaacagctggagtgcgtcacctctgacaaaattctggggacgctgggaacactgaatcaacatgggcaatgagaacagcacctcggacaaccagaggactttatcagctcagactccaaggtccgcgcagccacccgggaacagtcagaatataaaaaggaagcagcaggacacgcccggaagccctgaccacagagacgcgtccagcattggcagcgttgggcttggaggcttctgcaccgcttctgagagttctgccagcctggatccatgccttgtgtccccagaggtgactgagccaaggaaggacccacagggagccagggggccagaaggttctttgctgcccagcccaccaccgtcccaggagcgagagcacccctcgtcctccatgccctttgccgagtgtcccccggaaggttgcttggcaagtccagcagcggcacctgaagatggtcctcagactcagtctcccaggagggaacctgccccaaatgccccaggagacatcgcggcggcatttcccgctgagagggacagctctactccataccaagagattgctgccgtccccagtgctggaagagagagacagccgaaggaagaaggacagaagtcctccttctccttctccagtggcatcgaccagtcacctggaatgtcgccagtacccctcagagagccaatgaaggcaccgctgtgtggagagggggaccagcctggtggttttgagtcccaagagaaagaggctgcaggtggctttccccctgcagagtccaggcagggggtggcttctgtgcaagtgacccctgaggcccctgctgcagcccagcagggcacagaaagctcagcggtcttggagaagtcccccctaaaacccatggccccgatcccacaagatccagccccaagagcctcagacagagaaagaggccaaggggaggcgccgcctcagtatttaacagatgacttggaattcctcagggcctgccatctccctaggagcaattcaggggctgccccagaagcagaagtgaatgccgcttcccaggagagctgccagcagccagtgggagcatatctgccgcacgcagagctgccctggggcttgccaagtcctgccctggtgccagaggctgggggctctgggaaggaggctctggacaccattgatgttcagggtcacccacagacagggatgcgaggaaccaagcccaatcaagttgtctgtgtggcagcaggcggccagcccgaagggggtttgcctgtgagccctgaaccttccctgctcactccgactgaggaagcacatccagcttcaagcctcgcttcattcccagctgctcagattcctattgctgtagaagaacctggatcatcatccagggaatcagtttccaaggctgggatgccagtttctgcagatgcagccaaagaggtggtggatgcagggttggtgggactggagaggcaggtgtcagatcttggaagcaagggagagcatccagaaggggaccctggagaggttcctgccccatcaccccaggagaggggagagcacttgaacacggagcaaagccatgaggtccaaccaggagtaccaccccctcctcttcccaaggagcaaagccatgaggtccaaccaggagcaccaccccctcctcttcccaaggcaccaagtgaaagtgccagagggccaccggggccaacggatggagccaaggtccatgaagattccacaagcccagccgtggctaaagaaggaagcagatcacctggtgacagccctggaggaaaggaggaagccccagagccacctgatggtggagacccagggaacctgcaaggagaggactctcaggctttcagcagcaagcgtgatccagaagtaggcaaagatgagctttcaaagccaagcagtgatgcagagagcagagaccatcccagctcacactcagcacagccacccagaaaggggggtgctgggcacacggacgggccccactctcagacagcagaggctgatgcatctggcctaccacacaagctgggtgaggaggaccccgtcctgccccctgtgccagatggagctggtgagcccactgttcccgaaggagccatctgggaggggtcaggattgcagcccaaatgtcctgacacccttcagagcagggaaggattgggaagaatggagtctttcctgactttagaatcagagaaatcagattttccaccaactcctgttgcagaggttgcacccaaagcccaggaaggtgagagcacattggaaataaggaagatgggcagctgtgatggggagggcttgctgacgtccccagatcaaccccgcgggccggcgtgtgatgcgtcgagacaggaatttcatgctggggtgccacatcccccccagggggagaacttggcagcagacctggggctcacggcactcatcctggaccaagatcagcagggaatcccatcctgcccaggggaaggctggataagaggagctgcatccgagtggcccctactatcttctgagaagcatctccagccatcccaggcacaaccagagacatccatctttgacgtgctcaaggagcaggcccagccacctgaaaatgggaaagagacttctccaagccatccaggttttaaggaccagggagcagattcttcccaaatccatgtacctgtggaacctcaggaagataacaacttgcccactcatggaggacaggagcaggctttgggatcagaacttcaaagtcagctccccaaaggcaccctgtctgatactccaacttcatctcccactgacatggtttgggagagttctctgacagaagagtcagaattgtcagcaccaacgagacagaagttgcctgcactaggggagaagcggccagagggagcatgcggtgatggtcagtcctcgagggtctcgcctccagcagcagatgtcttaaaagacttttctcttgcagggaacttcagcagaaaggaaacttgctgcactgggcaggggccaaacaagtctcaacaggcattggctgatgccttggaagaaggcagccagcatgaagaagcatgtcaaaggcatccaggagcttctgaagcagctgatggttgttccccactctggggcttgagtaagagggagatggcaagtggaaacacaggggaggccccaccttgtcagcctgactcagtagctctcctggatgcagttccctgcctgccagccctggcgcccgccagccccggagtcacacccacccaggatgccccagagacagaggcatgtgatgaaacccaggaaggcaggcagcaaccagtgccggccccgcagcagaaaatggagtgctgggccacttcggatgcagagtccccaaagcttcttgcaagtttcccatcagctggggagcaaggtggtgaagccggggctgctgagactggtggcagcgctggtgcaggagacccaggaaagcagcaggctccggagaaacctggagaagctactttgagttgtggcctccttcagactgagcactgccttacctccggggaggaagcttctacctctgccctacgtgagtcctgccaagctgagcaccccatggccagctgccaggatgccttgctgccagccagagagctgggtgggattcccaggagcaccatggatttttctacacaccaggctgtcccagacccaaaggagctcctgctgtctgggccaccagaagtggctgctcctgacaccccttacctgcatgtcgacagtgctgcccagagaggagcagaagacagtggagtgaaagctgtttcctctgcagaccccagagctcctggcgaaagcccctgtcctgtaggggagcccccacttgccttggaaaatgctgcctccttgaagctgtttgctggctccctcgcccccctgttgcaaccaggagctgcaggtggggaaatccctgcagtgcaagccagcagtggtagtcccaaagccagaaccactgagggaccagtggactccatgccatgcctggaccggatgccacttctggccaagggcaagcaggcaacaggggaagagaaagcagcaacagctccaggtgcaggtgccaaggccagtggggagggcatggcaggtgatgcagcaggagagacagagggcagcatggagaggatgggagagccttcccaggacccaaagcagggcacatcaggtggtgtggacacaagctctgagcaaatcgccaccctcactggcttcccagacttcagggagcacatcgccaagatcttcgagaagcctgtgctcggagccctggccacacctggagaaaaggcaggagctgggaggagtgcagtgggtaaagacctcaccaggccattgggcccagagaagcttctagatgggcctccaggagtggatgtcacccttctccctgcacctcctgctcgactccaggtggagaagaagcaacagttggctggagaggctgagatttcccatctggctctgcaagatccagcttcagacaagcttctgggtccagcagggctgacctgggagcggaacttgccaggtgccggtgtggggaaggagatggcaggtgtcccacccacactgagggaagacgagaggccagaggggcctggggcagcctggccaggcctggaaggccaggcttactcacagctggagaggagcaggcaggaattagcttcaggtcttccttcaccagcagctactcaggagctccctgtggagagagctgctgccttccaggtggctccccatagccatggagaagaggccgtggcccaagacagaattccttctggaaagcagcaccaggaaacatctgcctgcgacagtccacatggagaagatggtcccggggactttgctcacacaggggttccaggacatgtgccaaggtccacgtgtgccccttctcctcagagggaggttttgactgtgcctgaggccaacagtgagccctggacccttgacacgcttgggggtgaaaggagacccggagtcactgctggcatcttggaaatgcgaaatgccctgggcaaccagagcacccctgcaccaccaactggagaagtggcagacactcccctggagcctggcaaggtggcaggcgctgctggggaagcagagggtgacatcaccctgagcacagctgagacacaggcatgtgcgtccggtgatctgcctgaagcaggtactacgaggacattctccgttgtggcaggtgacttggtgctgccaggaagctgtcaggacccagcctgctctgacaaggctccggggatggagggtacagctgcccttcatggggacagcccagccaggccccagcaggctaaggagcagccagggcctgagcgccccattccagctggggatgggaaggtgtgcgtctcctcacctccagagcctgacgaaactcacgacccgaagctgcaacatttggctccagaagagctccacactgacagagagagccccaggcctggcccatccatgttaccttcggttcctaagaaggatgctccaagagtcatggataaagtcacttcagatgagaccagaggtgcggaaggaacagaaagttcacctgtggcagatgatatcatccagcccgctgcccccgcagacctggaaagcccaaccttagctgcctcttcctaccacggtgatgttgttggccaggtctctacggatctgatagcccagagcatctccccagctgctgcccatgcgggtcttcctccctcggctgcagaacacatagtttcgccatctgccccagctggtgacagagtagaagcttccactccctcctgcccagatccggccaaggacctcagcaggagttccgattctgaagaggcatttgagaccccggagtcaacgacccctgtcaaagctccgccagctccacccccaccaccccccgaagtcatcccagaacccgaggtcagcacacagccacccccggaagaaccaggatgtggttctgagacagtccctgtccctgatggcccacggagcgactcggtggaaggaagtcccttccgtcccccgtcacactccttctctgccgtcttcgatgaagacaagccgatagccagcagtgggacttacaacttggactttgacaacattgagcttgtggatacctttcagaccttggagcctcgtgcctcagacgctaagaatcaggagggcaaagtgaacacacggaggaagtccacggattccgtccccatctctaagtctacactgtcccggtcgctcagcctgcaagccagtgactttgatggtgcttcttcctcaggcaatcccgaggccgtggcccttgccccagatgcatatagcacgggttccagcagtgcttctagtacccttaagcgaactaaaaaaccgaggccgccttccttaaaaaagaaacagaccaccaagaaacccacagagacccccccagtgaaggagacgcaacaggagccagatgaagagagccttgtccccagtggggagaatctagcatctgagacgaaaacggaatctgccaagacggaaggtcctagcccagccttattggaggagacgccccttgagcccgctgtggggcccaaagctgcctgccctctggactcagagagtgcagaaggggttgtccccccggcttctggaggtggcagagtgcagaactcaccccctgtcgggaggaaaacgctgcctcttaccacggccccggaggcaggggaggtaaccccatcggatagcggggggcaagaggactctccagccaaagggctctccgtaaggctggagtttgactattctgaggacaagagtagttgggacaaccagcaggaaaacccccctcctaccaaaaagataggcaaaaagccagttgccaaaatgcccctgaggaggccaaagatgaaaaagacacccgagaaacttgacaacactcctgcctcacctcccagatcccctgctgaacccaatgacatccccattgctaaaggtacttacacctttgatattgacaagtgggatgaccccaattttaaccctttttcttccacctcaaaaatgcaggagtctcccaaactgccccaacaatcatacaactttgacccagacacctgtgatgagtccgttgacccctttaagacatcctctaagacccccagctcaccttctaaatccccagcctcctttgagatcccagccagtgctatggaagccaatggagtggacggggatgggctaaacaagcccgccaagaagaagaagacgcccctaaagactgacacatttagggtgaaaaagtcgccaaaacggtctcctctctctgatccaccttcccaggaccccaccccagctgctacaccagaaacaccaccagtgatctctgcggtggtccacgccacagatgaggaaaagctggcggtcaccaaccagaagtggacgtgcatgacagtggacctagaggctgacaaacaggactacccgcagccctcggacctgtccacctttgtaaacgagaccaaattcagttcacccactgaggagttggattacagaaactcctatgaaattgaatatatggagaaaattggctcctccttacctcaggacgacgatgccccgaagaagcaggccttgtaccttatgtttgacacttctcaggagagccctgtcaagtcatctcccgtccgcatgtcagagtccccgacgccgtgttcagggtcaagttttgaagagactgaagcccttgtgaacactgctgcgaaaaaccagcatcctgtcccacgaggactggcccctaaccaagagtcacacttgcaggtgccagagaaatcctcccagaaggagctggaggccatgggcttgggcaccccttcagaagcgattgaaattacagctcccgagggctcctttgcctctgctgacgccctcctcagcaggctagctcaccccgtctctctctgtggtgcacttgactatctggagcccgacttagcagaaaagaaccccccactattcgctcagaaactccaggaggagttagagtttgccatcatgcggatagaagccctgaagctggccaggcagattgctttggcttcccgcagccaccaggatgccaagagagaggctgctcacccaacagacgtctccatctccaaaacagccttgtactcccgcatcgggaccgctgaggtggagaaacctgcaggccttctgttccagcagcccgacctggactctgccctccagatcgccagagcagagatcataaccaaggagagagaggtctcagaatggaaagataaatatgaagaaagcaggcgggaagtgatggaaatgaggaaaatagtggccgagtatgagaagaccatcgctcagatgatagaggacgaacagagagagaagtcagtctcccaccagacggtgcagcagctggttctggagaaggagcaagccctggccgacctgaactccgtggagaagtctctggccgacctcttcagaagatatgagaagatgaaggaggtcctagaaggcttccgcaagaatgaagaggtgttgaagagatgtgcgcaggagtacctgtcccgggtgaagaaggaggagcagaggtaccaggccctgaaggtgcacgcggaggagaaactggacagggccaatgctgagattgctcaggttcgaggcaaggcccagcaggagcaagccgcccaccaggccagcctgcggaaggagcagctgcgagtggacgccctggaaaggacgctggagcagaagaataaagaaatagaagaactcaccaagatttgtgacgaactgattgccaaaatggggaaaagctaactctgaaccgaatgttttggacttaactgttgcgtgcaatatgaccgtcggcacactgctgttcctccagttccatggacaggttctgttttcactttttcgtatgcactactgtatttcctttctaaataaaattgatttgattgtatgcagtactaaggagactatcagaatttcttgctattggtttgcattttcctagtataattcatagcaagttgacctcagagttcctgtatcagggagattgtctgattctctaataaaagacacattgctgaccttggccttgccctttgtacacaagttcccagggtgagcagcttttggatttaatatgaacatgtacagcgtgcatagggactcttgccttaaggagtgtaaacttgatctgcatttgctgatttgtttttaaaaaaacaagaaatgcatgtttcaaataaaattctctattgtaaataaaattttttctttggatcttggcaa

SEQ ID NO: 264424 - protein, 736 aa, Artificial Sequence
  derived and/or modified sequence
MSLSENSVFAYESSVHSTNVLLSLNDQRKKDVLCDVTIFVEGQRFRAHRSVLAACSSYFHSRIVGQADGELNITLPEEVTVKGFEPLIQFAYTAKLILSKENVDEVCKCVEFLSVHNIEESCFQFLKFKFLDSTADQQECPRKKCFSSHCQKTDLKLSLLDQRDLETDEVEEFLENKNVQTPQCKLRRYQGNAKASPPLQDSASQTYESMCLEKDAALALPSLCPKYRKFQKAFGTDRVRTGESSVKDIHASVQPNERSENECLGGVPECRDLQVMLKCDESKLAMEPEETKKDPASQCPTEKSEVTPFPHNSSIDPHGLYSLSLLHTYDQYGDLNFAGMQNTTVLTEKPLSGTDVQEKTFGESQDLPLKSDLGTREDSSVASSDRSSVEREVAEHLAKGFWSDICSTDTPCQMQLSPAVAKDGSEQISQKRSECPWLGIRISESPEPGQRTFTTLSSVNCPFISTLSTEGCSSNLEIGNDDYVSEPQQEPCPYACVISLGDDSETDTEGDSESCSAREQECEVKLPFNAQRIISLSRNDFQSLLKMHKLTPEQLDCIHDIRRRSKNRIAAQRCRKRKLDCIQNLESEIEKLQSEKESLLKERDHILSTLGETKQNLTGLCQKVCKEAALSQEQIQILAKYSAADCPLSFLISEKDKSTPDGELALPSIFSLSDRPPAVLPPCARGNSEPGYARGQESQQMSTATSEQAGPAEQCRQSGGISDFCQQMTDKCTTDE

SEQ ID NO: 264425 - protein, 170 aa, Artificial Sequence
  derived and/or modified sequence
MSLSENSVFAYESSVHSTNVLLSLNDQRKKDVLCDVTIFVEGQRFRAHRSVLAACSSYFHSRIVGQADGELNITLPEEVTVKGFEPLIQFAYTAKLILSKENVDEVCKCVEFLSVHNIEESCFQFLKFKFLDSTADQQECPRKKCFSSHCQKTDLKLSLLDQRDLETDEV

SEQ ID NO: 264426 - protein, 220 aa, Artificial Sequence
  derived and/or modified sequence
MSLSENSVFAYESSVHSTNVLLSLNDQRKKDVLCDVTIFVEGQRFRAHRSVLAACSSYFHSRIVGQADGELNITLPEEVTVKGFEPLIQFAYTAKLILSKENVDEVCKCVEFLSVHNIEESCFQFLKFKFLDSTADQQECPRKKCFSSHCQKTDLKLSLLDQRDLETDEVEEFLENKNVQTPQCKLRRYQGNAKASPPLQDSASQTYESMCLEKDAALAL

SEQ ID NO: 264427 - protein, 225 aa, Artificial Sequence
  derived and/or modified sequence
MSLSENSVFAYESSVHSTNVLLSLNDQRKKDVLCDVTIFVEGQRFRAHRSVLAACSSYFHSRIVGQADGELNITLPEEVTVKGFEPLIQFAYTAKLILSKENVDEVCKCVEFLSVHNIEESCFQFLKFKFLDSTADQQECPRKKCFSSHCQKTDLKLSLLDQRDLETDEVEEFLENKNVQTPQCKLRRYQGNAKASPPLQDSASQTYESMCLEKDAALALPSLCP

SEQ ID NO: 264428 - protein, 25 aa, Artificial Sequence
  derived and/or modified sequence
MSLSENSVFAYESSVHSTNVLLSLN

SEQ ID NO: 264429 - DNA, 5642 bp, Artificial Sequence
  derived and/or modified sequence
cgcccgccgggcgctctcgcttcagtcagtcgggccgcgccgcgcctcagctctggttgatgataattagaagcatgctttccactgaacttcccgacaacatttgttatgcagaatgtctctgagtgagaactcggtttttgcctatgaatcttctgtgcatagcaccaatgttttactcagccttaatgaccagcggaagaaagatgtgctgtgcgatgtcaccatctttgtggagggacagcggttccgcgctcaccggtccgtgctggcggcatgcagcagttacttccactcaagaatcgtaggccaggctgatggagagctgaacattactcttccagaagaggtgacagttaaaggatttgaacctttaattcagtttgcctacactgctaaactgattttaagtaaagagaatgtggatgaagtgtgcaaatgtgtggagtttttaagtgtacataatattgaggaatcctgctttcagtttctgaaatttaagtttttggactccactgcagaccagcaagaatgcccaagaaaaaaatgcttttcatcacactgtcagaaaacagaccttaaactttcacttttggaccagagggatctagaaactgatgaagtggaggaatttctggaaaataaaaatgttcagactcctcagtgtaaactccgcaggtatcaaggaaatgcaaaagcctcacctcctctacaagacagtgccagtcagacatatgagtccatgtgcttagagaaggatgctgctctggccttgccttctttatgccccaaatacagaaaattccaaaaagcatttggaactgacagagtccgtactggggaatctagtgtcaaagacattcatgcttctgttcagccaaatgaaaggtctgaaaatgaatgcctgggaggagtcccggagtgtagagatttgcaggtgatgttaaaatgtgacgaaagtaaattagcaatggaacctgaagaaacgaagaaagatcctgcttctcagtgcccaactgaaaaatcagaagtgactcctttcccccacaattcttccatagaccctcatggactttattctttgtctcttttacacacatatgaccaatatggtgacttgaattttgctggtatgcaaaacacaacagtgttaacagaaaagcctttgtcaggtacagacgtccaagaaaaaacatttggtgaaagtcaggatttacctttgaaatccgacttgggcaccagggaagatagtagtgttgcatctagtgataggagtagtgtggagcgagaagtggcagaacacctagcaaaaggcttctggagtgacatttgcagcacggacactccttgccaaatgcagttatcacctgctgtggccaaagatggctcagaacagatctcacagaaacggtctgagtgtccgtggttaggtatcaggattagtgagagcccagaaccaggtcaaaggactttcacaacattaagttctgtcaactgcccttttataagtactctgagtactgaaggctgttcaagcaatttggaaattggaaacgatgattatgtttcagaaccccagcaagaaccttgcccatatgcttgtgtcattagcttgggagacgactctgagacggacaccgaaggagacagtgaatcctgttcagccagagaacaagaatgtgaggtaaaactgccattcaatgcacaacggataatttcactgtctcgaaatgattttcagtccttgttgaaaatgcacaagcttactccagaacagctggattgtatccatgatattcgaagaagaagtaaaaacagaattgctgcacagcgctgtcgcaagagaaaacttgactgtatacagaatcttgaatcagaaattgagaagctgcaaagtgaaaaggagagcttgttgaaggaaagagatcacattttgtcaactctgggtgagacaaagcagaacctaactggactttgccagaaagtttgtaaagaagcagctctgagtcaagaacaaatacagatactcgccaagtactcagctgcagattgcccactttcatttttaatttctgaaaaagataaaagtactcctgatggtgaactggcgttaccatcaattttcagtttatctgaccggcctccagcagtgctgcctccctgtgccagaggaaacagtgagcctggctacgcgcgagggcaggagtcccagcagatgtccacagccacctctgagcaagctgggcctgcggaacagtgtcgtcagagtggtgggatctcagatttctgtcagcagatgactgataaatgtactactgatgagtaaacttgcattcacttccttcaaaccatctaattttctcctgaagttttggcagcgtcttgaaagcctaatatgaccatctgttgctcaacaatactgtttttttcctttagtagtttaccataagggaatttcctttaagtcaaccatgatttctccttgatttctacaagagacaaagaaatgattttgcctcctggatatcagaaaaatccatgtgaaaatgtagtaaacctttaaaactcatgttttaaagaataataactctagtaataactcttcctgctattcagaataagtaggagaatgaaaactgcagcatatcagacagcaatttaacagcttgaaacatctacagatagttcctactaaaagaagtggcctgcagaagtttaataatttgacttttttctaatattttagtttgaaagaaaatttcttcccaagcaatgctaatagagttctattcttagaagcagggtgtcagctactgggaatatttttgtagagctgcattgtgaaaaaaagatggtcttacctgaatcttagggctttgttcttcggctcctaaaatcaggctttaagctacattgggaagatttagtaaataggcaagtggttggcctaagacgggggctgcttctcctcttcagtatggactctagaaagtctggctacatgaatagatttaagtgtcactttccctccctgccccccgcttcagtctctaccatatctggtcccatcatggacttcctatttcctggcatttttgtccctttggaagaagaaataggactcagaatacagtggcatgagtgattacactggcagcattatctcaggctccctagaatctggagagcttaccaacatgtaaagctgttcatttttccaccgtgggtcaccaatgccagaaaaccagacatcacggggaaagaatgttgcttactttttaccaggagtgcagttcatttttttcaccctgtttttgaagtcgtattattcacttgtaaaaatgattgtaacagataaaaaatgtatctgcagcaactctgcaggtttgtgaaataggatgaaactcaatctttttctattgtgggtttgcatttgaaaagcaggttgaatccttgctctcttctccaaatttggtgtggtataaagacacacaaatcattttaacttggacatttaaagatcagtcttagtgtttgttcagtcctgttacaaaatagataactgagcacctatcgcataacattttgcggtggcttttagccatgctggggttagatgtgtttgagagtcaaatgaaagctatggatcttctcagcaattaaaaaaaatgcatatattcacattcacagaaacattggcagaacccagttttaatggtacagaggagtagtttatagtgttgatttcaccaaaatcagagggctgaaagagacacttctatagactgcatcctgagcctagtgcagggcttgtctagctaatgtgggcagccaccacccactgtgtatgaacaagtctgaagcaagttggccttgcccttgagagtatatggggaccagtcttcatgtcttggagtaatttgtcaaatgttaccctttttgatcagggtgtagggggaggatattgctagtatattttcagtggtttgtatgttctctctgtcactgacttatttgtaagagaaaattagttggacttgtttattttctagtagcttttataagtacactcaagaatttgtcagggagaataattctgatagtgcatcccatactgcaaaagaatttgtgtgtgtgtgtgtgtgtgtgtgtgtgtgtgtgtatgtgtatgtatacatatatatctctccatataggtatttctttgatacttgtaattttaaatttcagcttcacgatataaaataatataagaacttctggtttacaaaatgtaaaatcttaagccaatggaacccttgatttcctacctcagtgtacacccaactattggttgtatcagtttgtgtatgtgcaaatgtcaaataatcttttgctttaattgctactgtacttgctttgaaagattacctactattttatgataaaatgtagttgtctccagagcttaaatataatttgtaaagcacttggtttaaatttctctctacctataaacagtttagcattaagggtttctattaatgacacagaattattggccaagtgtaatttcttaaaatttagcattactttaaatagccagcatgtaatacaagtaactacactacctcatatctacatgattttcaagttgtaatgcagatggacagataaaaaagattttacgtttgtcttttggccataagtgggaaagttttctgtatattgcatagcattacacatttatgcctattttaacattaacttctaaagaagttttttctaagaaaatgtttcaaggcaatattttttttgaggctgccgaagacaaatgacaggattatgagtatacagtgtatgccttttccttcatgcagaattttgaaatgttttcagtttgtatattgcatattcacatgatcattgttcactattttatgaactggccttctcaatgtttgatgattttttaaaagctgttatgttgaattcagtaaaataacattaccttattttttttcttattcaaattctggaactatagcaaataattcgttaaattgtcatattcaaaacaaatgtggatacagtcttggttctccatctgtaattttttttaacagtttgctatagcttactgcttaactaattttaaataaggaaataagtatgttagatgcagtagacgatacaggttgcatgtggacactcagtcacattaacaacttgggaaaaaaatggcaatgttacggtgaattctcaggtgaacttttttcagttataaaacatctattttgaatctgtaaatattttaaatgttttattaaggcatgtaataaactattctttgaaacttgttgggtagaatgaaaattaaagccataatggtagaagatggcatactgattataaaagaagcagaaaaacattgatttttttatatctttcataatataattttctaacaatgcaataaaaccactaaacttttgtgtccatattttactgagaccatgtttcattaaaagcatagtttcatagtatttaatttacatttctccctaatgttcttacccaaatgtacctgaactaaaaaatgttagatgttggtgataagttgacagttaaataaaattctctaaaattgcttctaattgaaa

SEQ ID NO: 264430 - DNA, 2211 bp, Artificial Sequence
  derived and/or modified sequence
atgtctttatcagagaactccgtgtttgcctacgagtccagcgtacattccacaaatgtgcttctgtcacttaacgaccagcgcaagaaggacgtgctgtgtgacgtgaccatttttgtggaaggacagcggttccgggcgcatcgcagtgtgctcgccgcatgctctagttatttccactcacggattgtgggccaggctgatggagagctcaacattactcttccagaggaggtgacagtcaaagggttcgaacctctgattcagtttgcctatactgccaagctcatcttatccaaagagaacgtagacgaggtgtgtaagtgcgtagaatttcttagcgtccataatatcgaggagtcttgctttcagtttttgaaatttaaattcctagatagtaccgccgaccagcaggagtgtcctagaaagaaatgtttctcttcgcactgccaaaaaacagatctcaagctttccctattagaccaaagggacctagagaccgatgaagttgaagaattcttggagaataagaatgtccagacaccccagtgcaagctccgacggtatcagggaaacgcgaaggcttcccctcccctacaggacagtgcgtctcagacgtatgagagcatgtgtttagagaaggacgcagctctggccctgccgtccctctgcccaaaataccgaaagttccagaaggccttcggcactgaccgcgtgcgtacaggtgaaagtagcgtgaaagatatccacgcatcagtccaacctaatgaacgtagcgagaacgaatgtctgggcggagtaccggagtgcagagacttacaggtgatgctcaagtgcgacgagagtaagctcgccatggagccagaagaaactaagaaggaccctgctagtcagtgtccaacagaaaaatctgaggttactccattcccccacaattcttctatcgacccccacggattatattctctgtctctcctccacacatacgaccagtatggagatctcaatttcgccggcatgcaaaacacaactgtgctaactgagaagccgctgtccggaaccgatgttcaagagaagacctttggcgagtctcaagacctccccttgaaaagcgaccttggcacccgggaggacagttctgtcgcctcaagcgaccgaagttcagtggagcgcgaagtagccgagcaccttgccaagggattttggtccgatatatgtagcacggacaccccatgtcagatgcagctgtcccctgcggtagcaaaggatgggtctgagcagatctcccaaaaaaggagtgagtgtccctggttgggcatccggatctccgagtcacccgaaccgggtcagaggaccttcacaacactctcatccgtcaactgtccctttatttctacactaagcactgaagggtgctcgtccaatctggagataggcaatgacgactatgtgtccgaacctcagcaagaaccgtgtccttacgcctgcgtaatatctctgggggacgactcagaaacagacacggaaggcgatagcgaaagctgcagtgctcgggagcaggagtgcgaagtgaaacttccatttaacgcccagagaataatctccttgtcacggaacgactttcagtcacttctgaagatgcacaaattaactccagagcaattggattgcattcatgatattcggagacggtctaagaatcggattgctgctcaacgatgtcgcaagcgcaagctggattgtattcagaacttagaatccgagatcgaaaagctgcagagtgagaaagagagcctcctcaaggagagggaccacatcctttcaaccctcggggaaacaaagcagaatctgactggtctgtgccaaaaagtgtgtaaggaagccgcgctgtctcaggagcagatacagatcctggcaaagtattctgccgccgattgtcctttgtcattcctaatctcagaaaaggacaaaagcacgcccgacggagagctcgctctgccaagcatcttcagcttaagcgaccgaccacctgccgtgctgcccccatgtgcccgggggaatagcgaaccaggctatgcccgggggcaggagtcccagcagatgtccacggccactagtgagcaggccggacccgctgaacaatgtcgccagagcggcgggatcagcgatttttgtcagcaaatgaccgacaaatgtacgacggacgagtag

SEQ ID NO: 264431 - DNA, 2211 bp, Artificial Sequence
  derived and/or modified sequence
atgtcgctgagtgaaaactctgtgttcgcgtatgagagctctgtccattcaaccaatgtgctcttatcccttaacgaccaacggaaaaaggacgtgttgtgcgacgtgactatctttgttgagggacagcgcttccgggcgcacagatcagttcttgctgcctgctcctcttattttcactcccgaatcgtgggccaggctgatggtgaactcaatattacgctccccgaggaagtgaccgttaaaggattcgagcccctcatccaatttgcctacacggcaaagctgattttaagcaaagagaatgtggacgaggtctgcaaatgtgtggagtttctgtctgttcataacattgaagagagttgttttcaatttcttaagttcaagtttttggattctacagccgatcagcaggaatgccctaggaagaaatgtttctcttcccattgtcaaaagacagacctgaagctcagtctgcttgaccagcgcgatctggagactgacgaagtcgaagagtttctcgaaaacaagaatgtgcaaactccacaatgtaagctgcgccggtaccagggcaatgccaaggccagccctccacttcaggattctgccagccagacatatgagtccatgtgtctcgaaaaggatgccgcgctggctctgccatcgctctgccccaaatatcggaagttccagaaggccttcggcaccgacagggttcgcacaggagagtcgtccgtaaaggacatccatgccagcgtacaacccaatgagcggtccgaaaatgaatgtttagggggcgtcccagaatgcagagatctccaagtgatgttgaagtgcgacgagagtaaattggctatggagccagaagaaacaaagaaggatccggcttcccagtgccccaccgaaaagtctgaggttaccccttttccacacaacagcagcatcgacccacatggattatattctctctctctgcttcacacctacgaccagtatggcgatctgaacttcgccggaatgcaaaacaccaccgtgctgactgaaaagcctctatccggaacagacgtgcaggagaagacgttcggagaaagccaagatctgccattgaaaagtgacttgggaacccgcgaagactctagtgtcgccagctcagaccgatcttcagtggagagagaggtggcggagcacctcgctaagggattctggtcggatatatgttccaccgatacgccatgtcagatgcaactgtctcctgccgttgccaaggacggcagcgaacagattagccagaaacgcagcgagtgtccctggctggggattaggataagcgagtctccagaacccggtcagagaacctttacgacgctttccagcgttaattgccccttcatctctaccctgtctacggaggggtgctcctccaacctggagattggaaacgatgactacgtgagcgagccacagcaggaaccgtgcccctacgcatgcgtgatctctctcggtgacgatagcgagactgacaccgaaggggatagcgagtcctgttccgcacgagaacaggagtgtgaagttaagttgccatttaacgcacaacgcattatttcactgtctcgcaacgactttcagtccttgctgaaaatgcacaaactcacccctgaacagctcgattgcatccacgacattagaagacgttccaaaaaccgtattgccgcacagcggtgcaggaagcgaaagttagattgtattcagaatctggaatcagagatcgaaaaactgcaatctgagaaggaatctctgctcaaggaaagggaccatatcctctctactttaggagaaacaaaacagaatcttacgggcctctgccagaaggtgtgcaaagaagctgcactgtcccaagagcagatacagattctggctaagtactctgcagccgactgtcccctgtcttttctcatttctgagaaagataagtccacacctgacggggagctggcgctacctagcatcttctctctctccgaccgcccccctgctgtgttacctccatgcgcacggggaaattccgaaccggggtacgcaagggggcaggagagccagcagatgagcactgccacctcagagcaggcagggcccgctgaacagtgtagacagtcaggcgggatatctgatttctgccagcagatgaccgataaatgtactacggatgaatag

SEQ ID NO: 264432 - DNA, 513 bp, Artificial Sequence
  derived and/or modified sequence
atgagtctctctgagaactctgtgttcgcctatgaatcatctgttcactcaactaacgtcctgctgtcactcaatgaccagcggaagaaggacgtgttgtgtgacgtgacaatcttcgtggaggggcagcggttcagggcccatcggtctgtgctcgcagcctgtagcagctattttcactcacgcatcgtcggacaagcagatggggaactaaatattacgctgcccgaggaagtgacagtaaaaggcttcgagcctctgatccaatttgcatacacggccaaactgatcctgtctaaggagaacgtggatgaggtgtgcaagtgtgtagagttcctgtcagttcacaacattgaggaatcctgcttccaattcctgaaattcaaattcctggacagtactgcggaccagcaggaatgtcctcggaaaaaatgtttttcttcccactgccagaagaccgatttaaaattgagcctattggatcagcgagacttggaaactgacgaagtgtag

SEQ ID NO: 264433 - DNA, 663 bp, Artificial Sequence
  derived and/or modified sequence
atgtccctgtcagaaaattctgtatttgcatacgaatccagtgttcactctactaatgtcctcctgtcacttaatgaccagaggaagaaggatgtgttatgcgatgtgaccatcttcgtcgagggccagcgctttcgggctcacaggagtgtcctggctgcgtgcagctcttattttcattcccgaatcgttgggcaggctgacggagaactaaatattaccctccctgaagaggtcaccgtgaagggcttcgagcccctgatccagtttgcatatacagctaagctgatcctgtccaaagagaatgtggatgaggtgtgcaaatgcgttgaatttttgagcgtgcacaacattgaagaaagctgcttccagtttttgaaattcaagtttctcgacagcactgcagaccagcaggagtgcccccgaaagaagtgcttctcatctcactgtcaaaagacagacctcaagctctcccttctggaccagcgagaccttgagactgatgaggtggaggaattcctggagaataaaaatgtccaaacacctcagtgtaagcttcggcgctatcagggtaatgctaaggccagcccacctctgcaagactccgcaagccaaacttacgagagcatgtgtctggaaaaggatgctgcattggctctgtag

SEQ ID NO: 264434 - DNA, 678 bp, Artificial Sequence
  derived and/or modified sequence
atgtctctctccgaaaattctgttttcgcctatgaaagctcagtacactccaccaacgtgctcctatcactgaacgatcagagaaagaaggacgtgctttgtgatgtcacgattttcgtagagggccagcgctttcgcgctcatcggagcgtgctcgctgcatgcagctcttatttccactcccgcatcgttggacaggctgacggcgaactcaatattacattaccagaggaggtgaccgtgaagggtttcgaaccattaatacagttcgcatacaccgccaagctcatcctgtcgaaggagaacgtggatgaggtttgcaagtgtgtggagttcctgtcggtccacaacattgaagagtcctgttttcagttcctcaaattcaaattcctcgacagtacagccgatcagcaggagtgccctagaaagaagtgcttttccagtcactgccagaaaaccgatctgaaactgtcattgctggaccagcgggacctagaaaccgacgaggtggaagagttccttgaaaataagaacgtgcaaacccctcagtgcaagctgcggcgataccaggggaatgctaaggccagccccccactccaggactctgctagccagacttatgagagcatgtgcctggagaaggacgcagctctagcccttccatcactgtgcccctag

SEQ ID NO: 264435 - DNA, 78 bp, Artificial Sequence
  derived and/or modified sequence
atgagcctttctgagaattcagtgttcgcctacgagtcatctgtccactcaaccaacgtgctcctgtcactgaattag

SEQ ID NO: 264436 - DNA, 78 bp, Artificial Sequence
  derived and/or modified sequence
atgagtctgagcgaaaactcggtgtttgcttacgaaagtagcgtgcattccactaacgtgttgttgtcactgaactag

SEQ ID NO: 264437 - DNA, 78 bp, Artificial Sequence
  derived and/or modified sequence
atgtccctgagcgagaacagcgtgtttgcctacgagtcttccgtacatagtacgaatgtcctactgagtttaaactag

SEQ ID NO: 264438 - DNA, 78 bp, Artificial Sequence
  derived and/or modified sequence
atgtcacttagcgagaactctgtcttcgcgtatgagtcctctgtacattccaccaacgtcttgctttccttaaattag

SEQ ID NO: 264439 - DNA, 78 bp, Artificial Sequence
  derived and/or modified sequence
atgtcactatcagaaaactcagtcttcgcttacgagagttcagtccatagcacaaatgtccttctcagcctcaactag

SEQ ID NO: 264440 - DNA, 2211 bp, Artificial Sequence
  derived and/or modified sequence
atgagcctgtctgaaaattctgtgtttgcctatgagagctctgtgcacagcaccaacgtgctgctgagcctgaatgaccagaggaagaaggatgtgctgtgtgatgtgaccatctttgtggagggccagcgcttccgggcccacaggtctgtgctggccgcctgcagcagctacttccacagcagaattgtgggccaggctgatggagagctgaacatcaccctgcctgaggaggtgacagtgaagggctttgagcccctcatccagtttgcctacacagccaagctgatcctgagcaaagaaaatgtggatgaggtgtgcaagtgtgtggagttcctgtctgtgcacaacatcgaggagagctgcttccagttcctgaagttcaagttcctggacagcacagctgaccagcaggagtgccccaggaagaagtgcttcagcagccactgccagaagacagacctgaagctgagcctgctggaccagagggacctggagacagatgaggtggaggagttcctggagaacaagaatgtgcagaccccccagtgcaagctgcggcgctaccagggcaatgccaaggccagcccccccctgcaggacagcgccagccagacctatgaatccatgtgcctggagaaggatgctgccctggccctgcccagcctgtgccccaagtacaggaagttccagaaggccttcggcacagacagagtgaggactggagagagctctgtgaaggacatccacgcctctgtgcagcccaatgaaagaagtgaaaatgaatgtctgggcggcgtgcctgaatgtcgggacctgcaggtgatgctgaagtgtgatgagagcaagctggccatggagcctgaggagaccaagaaggaccctgccagccagtgccccacagagaagtctgaggtgacccccttcccccacaacagcagcattgacccccacggcctgtacagcctgagcctgctgcacacctatgaccagtacggggacctgaactttgctggcatgcagaacaccaccgtgctgacagagaagcccctgagcggcacagatgtgcaggagaagacctttggagagagccaggacctgcccctgaagagtgacctgggcacccgggaggacagctctgtggccagcagtgacaggagctctgtggagcgggaggtggccgagcacctggccaagggcttctggagcgacatctgcagcacagacaccccctgccagatgcagctgagccctgctgtggccaaggatggcagcgagcagatcagccagaagaggtctgagtgcccctggctgggcatccgcatcagcgagagccctgagcccggccagaggaccttcaccaccctgagctctgtgaactgccccttcatcagcaccctgagcacagagggctgcagcagcaacctggagattggaaatgatgattatgtgtctgagccccagcaggagccctgcccctatgcctgcgtcatcagcctgggagatgacagcgagacagacacagaaggagacagcgagagctgcagcgcccgggagcaggagtgtgaggtgaagctgcccttcaatgcccagaggatcatcagcctgagcagaaatgacttccagagcctgctgaagatgcacaagctgaccccagagcagctggactgcatccatgacatcagaagaagaagcaagaacagaattgctgcccagcgctgcaggaagaggaagctggactgcatccagaacctggagagcgagattgagaagctgcagagcgagaaggagagcctgctgaaggagcgggaccacatcctgagcaccctgggggagaccaagcagaacctgaccggcctgtgccagaaggtgtgcaaggaggccgccctgagccaggagcagatccagatcctggccaagtacagcgctgctgactgccccctgtccttcctgatcagcgagaaggacaagagcaccccagatggagagctggccctgcccagcatcttcagcctgagtgaccggcccccagctgtgctgcccccctgtgcccggggcaacagcgagcccggctacgcccggggccaggagagccagcagatgagcacagccaccagcgagcaggccggccctgctgagcagtgccggcagagcggcggcatcagtgacttctgccagcagatgacagacaagtgcaccacagatgaatag

SEQ ID NO: 264441 - DNA, 513 bp, Artificial Sequence
  derived and/or modified sequence
atgagcctgtctgaaaattctgtgtttgcctatgagagctctgtgcacagcaccaacgtgctgctgagcctgaatgaccagaggaagaaggatgtgctgtgtgatgtgaccatctttgtggagggccagcgcttccgggcccacaggtctgtgctggccgcctgcagcagctacttccacagcagaattgtgggccaggctgatggagagctgaacatcaccctgcctgaggaggtgacagtgaagggctttgagcccctcatccagtttgcctacacagccaagctgatcctgagcaaagaaaatgtggatgaggtgtgcaagtgtgtggagttcctgtctgtgcacaacatcgaggagagctgcttccagttcctgaagttcaagttcctggacagcacagctgaccagcaggagtgccccaggaagaagtgcttcagcagccactgccagaagacagacctgaagctgagcctgctggaccagagggacctggagacagatgaggtgtag

SEQ ID NO: 264442 - DNA, 663 bp, Artificial Sequence
  derived and/or modified sequence
atgagcctgtctgaaaattctgtgtttgcctatgagagctctgtgcacagcaccaacgtgctgctgagcctgaatgaccagaggaagaaggatgtgctgtgtgatgtgaccatctttgtggagggccagcgcttccgggcccacaggtctgtgctggccgcctgcagcagctacttccacagcagaattgtgggccaggctgatggagagctgaacatcaccctgcctgaggaggtgacagtgaagggctttgagcccctcatccagtttgcctacacagccaagctgatcctgagcaaagaaaatgtggatgaggtgtgcaagtgtgtggagttcctgtctgtgcacaacatcgaggagagctgcttccagttcctgaagttcaagttcctggacagcacagctgaccagcaggagtgccccaggaagaagtgcttcagcagccactgccagaagacagacctgaagctgagcctgctggaccagagggacctggagacagatgaggtggaggagttcctggagaacaagaatgtgcagaccccccagtgcaagctgcggcgctaccagggcaatgccaaggccagcccccccctgcaggacagcgccagccagacctatgaatccatgtgcctggagaaggatgctgccctggccctgtag

SEQ ID NO: 264443 - DNA, 678 bp, Artificial Sequence
  derived and/or modified sequence
atgagcctgtctgaaaattctgtgtttgcctatgagagctctgtgcacagcaccaacgtgctgctgagcctgaatgaccagaggaagaaggatgtgctgtgtgatgtgaccatctttgtggagggccagcgcttccgggcccacaggtctgtgctggccgcctgcagcagctacttccacagcagaattgtgggccaggctgatggagagctgaacatcaccctgcctgaggaggtgacagtgaagggctttgagcccctcatccagtttgcctacacagccaagctgatcctgagcaaagaaaatgtggatgaggtgtgcaagtgtgtggagttcctgtctgtgcacaacatcgaggagagctgcttccagttcctgaagttcaagttcctggacagcacagctgaccagcaggagtgccccaggaagaagtgcttcagcagccactgccagaagacagacctgaagctgagcctgctggaccagagggacctggagacagatgaggtggaggagttcctggagaacaagaatgtgcagaccccccagtgcaagctgcggcgctaccagggcaatgccaaggccagcccccccctgcaggacagcgccagccagacctatgaatccatgtgcctggagaaggatgctgccctggccctgcccagcctgtgcccctag

SEQ ID NO: 264444 - DNA, 78 bp, Artificial Sequence
  derived and/or modified sequence
atgagcctgtctgaaaattctgtgtttgcctatgagagctctgtgcacagcaccaacgtgctgctgagcctgaactag

SEQ ID NO: 264445 - DNA, 2211 bp, Artificial Sequence
  derived and/or modified sequence
atgagcctgagcgagaacagcgtgttcgcctacgagagcagcgtgcacagtaccaacgtactattaagcctgaatgatcagcggaagaaagacgtgttgtgcgacgtcactatcttcgttgagggccagagattccgtgcacataggagcgtgctagccgcttgctcaagttacttccactcgaggattgtgggacaagccgacggtgagctcaacataactctgcccgaggaggtaaccgtgaaaggatttgagcctctgatccagttcgcctacacggcaaaactgatcctgagtaaagaaaacgtggacgaggtgtgtaagtgcgtcgaatttctgtctgtccataacattgaagagtcatgcttccagttccttaaatttaagtttcttgacagcacagctgatcaacaggagtgtccaaggaaaaaatgtttttcctcccactgtcagaaaacagacttgaaactatccctcttggatcagcgcgaccttgagaccgacgaggttgaagaattcttagaaaataaaaatgtccagactccacagtgtaaattgcggcggtaccagggtaatgctaaggctagcccccccttacaggactccgcgtctcagacttacgaatcaatgtgccttgagaaagatgccgctctcgccctccccagcctgtgtcccaaatatagaaaattccagaaagcgttcggaaccgatagggtccgcacaggcgagtcctccgtcaaggatattcacgccagtgtccagcctaatgagagatctgaaaacgaatgtctgggcggcgttccagagtgccgcgacctgcaggtaatgctgaaatgcgatgagtcaaagctggccatggagccagaggagactaagaaggacccagcttctcaatgtcctaccgagaaaagcgaggttactcctttcccccacaacagcagtatcgacccacacggactctacagccttagcctactacacacctacgaccaatacggcgacttgaactttgcagggatgcaaaatacaaccgtgctgactgagaaaccactgagcggcactgacgtccaggaaaaaactttcggtgaaagccaagatttgcctctcaagtctgatctgggtacaagagaagattcctcagtggcgagcagcgaccgctcatccgtcgaacgggaagttgctgagcacttggctaaaggtttctggtcagacatttgctctactgataccccatgtcagatgcaactaagccctgctgtagccaaggatgggtcagagcagatcagccagaagaggagcgagtgtccatggctagggattagaattagcgaatcacctgaacccggccaaagaacatttacaaccttaagctctgtgaactgcccgttcatctccacactaagtacagaggggtgttcgtcaaatctggaaattggcaatgacgactacgtcagcgaaccacagcaggagccatgtccatatgcctgcgtgatttctttgggagatgacagcgaaaccgataccgaaggggattcggaatcctgcagtgcacgcgaacaggagtgtgaggtaaaacttccgtttaatgcgcagcgcatcataagcctgtcccgcaacgactttcagtcactgctgaagatgcacaagctgacgcctgaacagcttgattgcatacacgacattagacggcggagtaaaaacagaatcgctgcacagcggtgtcggaaacggaagttagactgtattcaaaatctcgagtcggaaatcgaaaagttgcagagcgagaaagagtctctgctcaaagagcgagaccacattctgtccactctgggcgagaccaaacaaaacttgaccggactatgccaaaaggtgtgcaaagaggcagcgctctcccaggaacaaatccagatcctggctaagtatagtgctgccgactgccccttaagttttctgatctctgagaaggacaagagtacgccagacggggaactggctctcccgtcaatttttagtctgtcagacagaccaccggccgtgctgcctccatgtgctaggggaaattctgagcccggctacgctcgggggcaagagagtcagcagatgagcaccgcaacttcagaacaggctggacctgctgagcaatgtcggcaatccgggggaatctccgatttttgtcagcaaatgactgacaaatgtaccacagacgaatag

SEQ ID NO: 264446 - DNA, 2211 bp, Artificial Sequence
  derived and/or modified sequence
atgagcctgagcgagaacagcgtgttcgcctacgagagcagcgtgcattctaccaacgtacttctttccttgaacgaccagagaaagaaggatgtgttgtgcgacgtgactattttcgtggaaggccagagattccgcgcccacagaagtgtgctggccgcttgctctagctattttcattctagaatagtgggtcaggcagatggagagctcaacatcacgctgccggaagaagtcactgtgaaggggtttgagccattgattcagttcgcctataccgctaagttgatactgagcaaggagaacgttgatgaagtctgtaagtgtgtggaattcttatcagttcacaatatagaggaaagctgttttcagtttctgaagttcaagttcctagacagcacagcagaccaacaagaatgtcccaggaaaaagtgcttcagctctcactgtcagaagaccgacctcaaactttcactgttagatcaacgcgatctcgagactgacgaagtggaggagttcttggagaacaagaatgttcagacaccgcaatgtaagcttcggcggtaccaagggaacgctaaggcttcccctcctctgcaggatagcgccagccaaacatacgagtcaatgtgtctcgagaaagacgccgccctggcccttccctcactatgcccaaagtatcggaaatttcaaaaggcgtttggcaccgatcgagtccgtactggagagtcatccgtgaaagatatccacgccagcgtgcaacccaatgaacgcagtgagaacgagtgtctgggcggggtacctgagtgcagggatctgcaggtgatgctcaagtgcgacgagagcaagctggccatggagccggaggaaaccaagaaagatcccgcttctcagtgccccacagagaagagcgaggtcactcccttcccgcataactccagtatcgatccgcacgggttatatagcttgagcctgcttcatacatacgaccaatatggcgatttgaattttgccgggatgcagaacacaacagtacttacggagaagcccctgtctggcacagatgtccaagaaaaaacctttggagaaagccaggacctgcccctgaagtccgaccttgggaccagggaggactcctctgttgcatccagcgatcgttcatccgtagagagagaggtggccgaacatctcgctaagggtttctggtccgatatctgttcaacggataccccgtgccaaatgcagctatctcctgccgtggctaaggacgggtccgaacagatttcccagaaacgctctgagtgcccatggctaggaattcggatttctgagtcgcccgagcccggtcagcggacgttcactactctgtcatccgtgaattgtcctttcataagcacactgagcacagagggctgctcaagtaatctcgagattggtaacgacgattatgtatccgagccccagcaggagccctgcccctacgcgtgtgtgatcagtctaggcgatgactctgagaccgacaccgaaggcgattctgagtcgtgctctgcccgggagcaggagtgtgaggttaaactgccttttaacgctcagcgaatcattagccttagccgtaacgattttcaaagtctgctgaagatgcataaattgaccccagaacagctggactgtatacacgatatccgaaggcgatcaaagaataggattgcagcgcagcggtgccgcaagaggaaactggactgcattcagaaccttgagtcagagatagagaagctgcagagcgaaaaggaatcactactcaaagagcgggatcatatcctatctaccttgggcgaaaccaagcaaaacctgacggggctgtgtcagaaggtctgtaaggaagccgctctgagccaagagcagatccagatcttagcaaaatactcggcagccgactgccccctatccttcctcatctctgagaaggataagtccactcccgacggcgaacttgcattaccctccatcttctcgttgtctgatagacccccagccgttctgccgccctgtgccagggggaattcagaacccggttacgcacgggggcaggagagtcaacagatgtcaacagctacaagtgagcaggcaggaccagctgaacagtgtcgccaaagtggggggatcagtgacttttgccagcagatgaccgataaatgcacaaccgatgaatag

SEQ ID NO: 264447 - DNA, 513 bp, Artificial Sequence
  derived and/or modified sequence
atgagcctgagcgagaacagcgtgttcgcctacgagagcagcgtgcacagtaccaatgtgctccttagtttgaacgatcagcgcaagaaggacgtgctctgcgacgtcacaattttcgttgaaggccagaggttcagggcccaccgctcagtgttggccgcttgttcttcttacttccacagtcgaattgttggccaagccgatggtgaactgaatatcactttaccagaggaggttaccgtcaagggctttgaaccactaatccagtttgcttacactgctaaactcattcttagtaaggagaacgttgacgaagtttgtaaatgtgtcgaatttctgagtgtccacaacattgaggaatcatgcttccagttcctgaagttcaagttcctcgactcaaccgcagatcaacaggaatgcccccggaaaaaatgcttctctagtcattgtcaaaaaactgatctgaagctgtctctgctggaccagagagatctggagacagatgaggtgtag

SEQ ID NO: 264448 - DNA, 663 bp, Artificial Sequence
  derived and/or modified sequence
atgagcctgagcgagaacagcgtgttcgcctacgagagcagcgtgcactctactaacgtgctgctttctcttaacgaccaacggaagaaggatgtcttatgcgatgtcacaatttttgttgagggacagcgcttccgggcccacagaagcgtgttagccgcttgctccagttacttccatagcagaattgttgggcaggcggacggggagctgaatattactcttccagaagaggtaaccgtgaagggatttgagcccctgatacagttcgcttacacggccaaactgatcttgtctaaggagaacgtggatgaagtgtgcaaatgtgtggagttcctgtctgttcataacatcgaggaaagttgtttccaattcttgaagtttaaattcctagactcaacagcggatcaacaggaatgtccaagaaaaaagtgttttagttcccactgtcagaaaacagacttgaaattgtcactcctggatcaaagagacttggaaactgacgaagtggaggagtttttagaaaacaaaaacgtgcagacaccccagtgcaagctccgtcgctatcaggggaatgccaaggcttccccccccctgcaggactctgcgtcacagacctacgaatctatgtgtctggagaaggacgctgctctggcactctag

SEQ ID NO: 264449 - DNA, 678 bp, Artificial Sequence
  derived and/or modified sequence
atgagcctgagcgagaacagcgtgttcgcctacgagagcagcgtgcatagtaccaatgtgctgctcagcctgaatgatcagaggaagaaagatgtcctttgtgacgttacaatcttcgtggaagggcagagatttcgcgcacatcgatccgtgttggctgcctgcagctcttattttcactccagaatagtcggccaggctgacggggaactgaacattacactgcctgaggaggtgaccgttaagggatttgaaccattgatccaatttgcatacaccgcaaaactgatcctgagtaaagaaaacgtggatgaggtttgtaagtgtgtggagtttctgagtgttcataatatcgaggagtcatgctttcagtttctgaaattcaagttccttgacagcacagcagatcagcaggagtgcccgcgcaagaaatgcttctcttcacactgtcagaagacagatctgaaacttagcctgctggaccaaagagacctggagacggatgaggtggaggagtttctcgagaacaagaacgtgcagacaccccaatgcaagcttcgacgatatcaaggaaacgcaaaggccagtcctccgttacaggatagcgcttcccagacttacgaatccatgtgtctggagaaagacgccgctctggcgctgccgagcctctgcccctag

SEQ ID NO: 264450 - DNA, 78 bp, Artificial Sequence
  derived and/or modified sequence
atgagcctgagcgagaacagcgtgttcgcctacgagagcagcgtgcatagcacaaacgtgctcctgagtctcaattag

SEQ ID NO: 264451 - DNA, 78 bp, Artificial Sequence
  derived and/or modified sequence
atgagcctgagcgagaacagcgtgttcgcctacgagagcagcgtgcactcaaccaatgttctactgtccctgaactag

SEQ ID NO: 264452 - DNA, 78 bp, Artificial Sequence
  derived and/or modified sequence
atgagcctgagcgagaacagcgtgttcgcctacgagagcagcgtgcacagtaccaatgtccttctgtccctgaattag

SEQ ID NO: 264453 - DNA, 78 bp, Artificial Sequence
  derived and/or modified sequence
atgagcctgagcgagaacagcgtgttcgcctacgagagcagcgtgcatagcactaacgtactgttatccctgaattag

SEQ ID NO: 264454 - DNA, 78 bp, Artificial Sequence
  derived and/or modified sequence
atgagcctgagcgagaacagcgtgttcgcctacgagagcagcgtgcactcaacgaacgtactcctctctttgaattag

SEQ ID NO: 264455 - DNA, 2211 bp, Artificial Sequence
  derived and/or modified sequence
atgagtctgagcgaaaatagtgtattcgcctatgaatcaagcgtccattctacgaacgttttgctgtctcttaatgatcagcgcaagaaggacgttctgtgcgatgtaaccatcttcgtagaggggcagagattcagggctcataggtccgtactggccgcttgctcgagttacttccactcccggatagtgggacaggccgacggcgagctgaatattactctgcccgaggaggtgacagtcaaaggcttcgagccccttatacagttcgcttacacggccaagctcattcttagcaaggaaaatgtcgacgaggtctgcaagtgcgttgaattcctctcagtgcacaacatagaggagtcatgctttcagtttctcaaattcaagttccttgacagcactgccgaccagcaagaatgcccaagaaaaaaatgcttttcctcacattgtcagaagactgatctcaaattgtccctcctggaccagagggatttggaaacggatgaggtggaggagtttctagagaacaaaaatgttcagacaccgcagtgcaaacttaggagataccagggaaacgctaaagccagtcctcctttacaagactcagcctctcagacctacgaaagcatgtgtttagaaaaggatgccgcactggcattgccaagcctctgccccaagtacagaaaattccaaaaagccttcggtactgatcgggtgagaactggcgagagctctgtaaaggatattcatgccagcgtgcagcccaacgaaaggtctgagaacgagtgtcttggcggagtgcccgagtgcagggatctacaggtgatgctgaagtgcgacgagtccaagctagccatggagcccgaggaaacgaagaaggaccccgctagccagtgcccgacagagaagtctgaagtcacccccttcccacacaactcctccatcgatccccacggactgtattcgttgagccttttacatacctacgatcagtacggagacctgaactttgcaggcatgcagaacaccacagtactcacagagaagcccctttctggcacggatgtgcaggagaaaacatttggagagtctcaggacctccctttgaagtctgatctgggcacccgtgaagatagctccgttgcgtcctctgatagatcctcagttgagcgcgaggttgctgagcatttagcaaaaggcttttggagcgatatctgctcaacggacacaccatgtcagatgcagctgtcccctgctgtcgctaaggacgggtcggaacagattagccagaagcgcagcgagtgtccttggctgggaatacgaattagcgaaagtcctgaacccggtcagcggacattcacgacactgtcaagcgtgaactgccccttcatcagtactttgagcacagagggctgcagctctaacttggaaatagggaacgatgattatgtgtcagagccacagcaggagccgtgtccctatgcctgcgtaatttcgcttggtgacgacagtgagacggatactgaaggcgacagtgaaagttgctccgctcgcgaacaagagtgcgaagttaaactgccattcaacgctcagagaataatctctctttctagaaatgactttcaaagcctgctgaagatgcataaattgacccccgagcagttggattgcatacacgatatccgaaggcgctctaaaaacagaatagcagcccaacggtgtagaaagcgcaagctcgattgcattcaaaacctggaaagtgagatcgagaaactgcagtctgagaaagaaagcttgctcaaggagagagatcacatcttgtctacacttggcgagaccaagcagaacctgacggggctatgccagaaggtctgcaaagaagctgccctcagtcaggagcagatacagatcctggctaagtattctgctgccgactgccctctgagttttcttatcagcgagaaagataaaagcacacccgatggagagctggcgttaccatccatcttcagcctgtcagacaggccaccggctgtcctgcccccatgcgctagagggaactcggagccaggatatgcccgaggtcaggaatcacaacaaatgtcaaccgcgacaagtgagcaagctggacctgccgagcagtgccgtcagtccggcggaattagtgacttctgccagcaaatgactgacaagtgtaccacagacgagtag

SEQ ID NO: 264456 - DNA, 2211 bp, Artificial Sequence
  derived and/or modified sequence
atgagcctctcagagaacagcgtcttcgcatacgagtctagtgtgcacagtactaacgtgttgctctctctgaatgaccaaagaaagaaggatgtcctctgcgatgtgactatatttgtggagggtcagagatttagggcacatagatcggtactggcagcctgcagcagctactttcattctcgcatagtgggtcaggcggacggggaactaaacatcacgctcccggaggaggtcacagtcaagggtttcgaacccttaatccaatttgcgtacactgccaagctgatcctgtccaaggaaaacgttgatgaggtttgtaagtgtgtggagttcttgtcggtgcacaatatcgaggaaagctgttttcagttcctaaagttcaagttcttggactctacagctgatcagcaggaatgcccacggaagaagtgcttctcgagtcattgtcagaaaaccgacctgaaactctctcttttggatcagcgcgatctggagaccgacgaagtggaggagttcttagagaacaaaaacgtacagactccacagtgcaaactgcgcagataccaagggaatgctaaagctagcccccctctccaagattctgcatctcagacatacgagtccatgtgtctcgaaaaggatgccgctcttgctttgccttccctatgcccaaaatataggaaattccagaaggcttttgggacagacagggtgcgcaccggtgagtcgtctgtcaaagatattcacgcttctgtgcagcccaacgagcggtctgagaatgagtgtctcgggggagttcctgaatgtcgggacttacaagtgatgctaaaatgcgatgagtccaagctggccatggagccagaggagacaaaaaaagatccagcctcccagtgtccaacagagaaatcagaagtcacaccattcccacataacagctcaatcgacccacatggcttgtattccctgtccttgctgcacacctacgatcagtatggagatctcaacttcgcagggatgcagaacacgactgtgctgacagagaagcccctgtcagggaccgatgtgcaggaaaaaacttttggcgagtcccaggacttacctctgaaatcggatcttggtacccgggaggatagttccgtagcctcttccgaccgatcttccgtagaacgggaggtcgcagagcatctcgcaaagggcttttggtccgacatttgttccaccgacactccttgtcagatgcagctatcccccgctgtggccaaggacggtagtgagcagatctctcagaagcggagcgaatgtccctggctgggcattcgaatcagcgagtcccccgaacccggacagcgcactttcactaccctcagtagtgtcaactgtcctttcataagtacactgtctaccgaaggttgcagcagtaatctagaaataggcaacgacgattacgtgagtgagccacagcaagaaccctgtccatacgcatgcgtgatcagtctgggcgacgacagcgagactgacactgagggagattccgaaagttgttcagcccgagaacaagagtgcgaggtcaaactgccctttaatgctcagcgcatcatcagcttatcccggaatgacttccagagtctgctcaagatgcacaaactgacgccggagcagctggattgtatccacgacatacgccgtcgcagcaaaaataggatcgccgcacaacgctgccggaagagaaaactggattgtattcaaaatctggaaagtgagatcgaaaagctgcaatccgagaaggagagcctgttgaaggaacgcgaccatattctatcgaccctcggggagacaaagcagaatttaacagggctctgtcagaaagtctgtaaagaggcagcccttagtcaggagcagatacaaatcctggctaaatacagtgcagccgattgtcccctaagctttcttatttccgagaaagataaaagcacccccgatggggagctggctctgccatcaatcttctctctatcagatcgtccccctgctgtgctgcccccttgtgccagggggaattccgagccgggatacgctagaggccaagagtcacagcaaatgtcaaccgccaccagcgaacaagctggcccagccgagcagtgccggcaatctggcggtattagcgacttctgccagcagatgaccgacaaatgcactacagacgagtag

SEQ ID NO: 264457 - DNA, 513 bp, Artificial Sequence
  derived and/or modified sequence
atgagtctaagtgaaaactcagtgttcgcctacgagtctagcgtccacagcaccaatgtactgctctcgctcaacgaccagagaaagaaagatgtcctctgcgatgtgaccatcttcgtggaaggccaacgattccgagcccaccgctccgtgctcgctgcctgctcaagttactttcattcccggatcgttggccaggcagacggggaactcaacatcaccttgccagaagaagtgacagtcaaggggtttgaacctctgatccagttcgcttacacggcaaagctgatcctgtccaaagagaacgtggacgaggtgtgtaaatgtgtcgagttcctgtccgtgcacaatatcgaagaaagttgttttcaattcttgaagttcaagtttctggactctacagccgaccagcaggagtgtccaagaaagaaatgtttttcttcccactgtcagaaaaccgatctaaaactgtcgcttctggaccagcgggacctcgagactgacgaggtgtag

SEQ ID NO: 264458 - DNA, 663 bp, Artificial Sequence
  derived and/or modified sequence
atgagcctttccgaaaactccgtttttgcttatgaatcctccgtgcacagcacaaatgtcctgctttctctcaatgaccagcgcaagaaagacgtgctgtgcgacgtgactatttttgtcgaaggacagaggttcagagcacacagatccgtgctggctgcctgtagctcctactttcactctcgcatagtgggccaggcagatggagagcttaacatcactctgcccgaagaagttactgtaaagggatttgaacccttaatacagtttgcctacacggctaaacttattctgtctaaagaaaatgtggacgaggtgtgcaagtgcgtggagtttctgtcggtacacaacattgaagagtcatgtttccaatttctcaagttcaagttcctagactctacagcagatcagcaagagtgtccgagaaaaaagtgtttctcatcccactgccaaaagaccgacctgaagctctctctcttagaccaacgcgacctggaaactgatgaagtggaggagttcctcgaaaacaagaacgtacaaacaccacaatgcaaacttaggcggtatcagggaaacgctaaggcatccccacccctccaggattcagcctcacagacttacgaatccatgtgtctggaaaaggatgctgctctggccctgtag

SEQ ID NO: 264459 - DNA, 678 bp, Artificial Sequence
  derived and/or modified sequence
atgtccttgagtgagaattccgtgtttgcctacgaatcttccgtgcactccacaaacgtccttctctcgctgaatgatcaaagaaaaaaagacgtgctctgcgacgtgacaatcttcgtggaggggcagcgcttcagggctcatcgctctgtcttagcggcttgcagcagctatttccactcacggatagtgggccaggcagacggcgagcttaacatcacactcccggaagaggtgactgtcaagggttttgagccattaattcagtttgcttacactgccaagctgattctctcgaaggagaacgtggacgaagtgtgtaaatgcgtcgagttcctctcagttcacaacatcgaggaaagctgttttcaatttctgaagttcaaatttctggattccacagccgaccaacaagagtgccctcggaagaaatgtttctcctcccactgtcagaagacagatctaaagctatctctgctcgaccaaagggatctggagactgatgaggttgaggagttcttggaaaacaagaacgtgcaaacacctcagtgtaaactgcgtaggtaccagggaaacgccaaagcgtctcctcccctccaagactctgcatcccagacatacgaatccatgtgtcttgagaaagacgcagccctagccctgcctagcttatgcccttag

SEQ ID NO: 264460 - DNA, 78 bp, Artificial Sequence
  derived and/or modified sequence
atgagcctgagcgagaactcggtatttgcctacgagagttccgtgcattctactaacgtgcttctcagtttaaactag

SEQ ID NO: 264461 - DNA, 78 bp, Artificial Sequence
  derived and/or modified sequence
atgtcgctatccgagaactcggtgtttgcctacgagtctagcgttcattccactaacgttttactgtccctgaattag

SEQ ID NO: 264462 - DNA, 78 bp, Artificial Sequence
  derived and/or modified sequence
atgtcgctgtctgagaatagcgtgttcgcttacgaatcaagcgtgcattccactaacgtgttgcttagtcttaattag

SEQ ID NO: 264463 - DNA, 78 bp, Artificial Sequence
  derived and/or modified sequence
atgagcctctcagaaaattcggtcttcgcgtacgagagcagcgtgcactcaaccaacgtactcctgtctttaaactag

SEQ ID NO: 264464 - DNA, 78 bp, Artificial Sequence
  derived and/or modified sequence
atgagcttatccgaaaattccgtcttcgcctacgaatcctccgtgcactctactaatgtgcttctgtctttgaactag

SEQ ID NO: 264465 - DNA, 5669 bp, Artificial Sequence
  derived and/or modified sequence
gagtgagtcacctgaccgctgccctcgccgcccgccgggcgctctcgcttcagtcagtcgggccgcgccgcgcctcagctctggttgatgataattagaagcatgctttccactgaacttcccgacaacatttgttatgcagaatgtctctgagtgagaactcggtttttgcctatgaatcttctgtgcatagcaccaatgttttactcagccttaatgaccagcggaagaaagatgtgctgtgcgatgtcaccatctttgtggagggacagcggttccgcgctcaccggtccgtgctggcggcatgcagcagttacttccactcaagaatcgtaggccaggctgatggagagctgaacattactcttccagaagaggtgacagttaaaggatttgaacctttaattcagtttgcctacactgctaaactgattttaagtaaagagaatgtggatgaagtgtgcaaatgtgtggagtttttaagtgtacataatattgaggaatcctgctttcagtttctgaaatttaagtttttggactccactgcagaccagcaagaatgcccaagaaaaaaatgcttttcatcacactgtcagaaaacagaccttaaactttcacttttggaccagagggatctagaaactgatgaagtggaggaatttctggaaaataaaaatgttcagactcctcagtgtaaactccgcaggtatcaaggaaatgcaaaagcctcacctcctctacaagacagtgccagtcagacatatgagtccatgtgcttagagaaggatgctgctctggccttgccttctttatgccccaaatacagaaaattccaaaaagcatttggaactgacagagtccgtactggggaatctagtgtcaaagacattcatgcttctgttcagccaaatgaaaggtctgaaaatgaatgcctgggaggagtcccggagtgtagagatttgcaggtgatgttaaaatgtgacgaaagtaaattagcaatggaacctgaagaaacgaagaaagatcctgcttctcagtgcccaactgaaaaatcagaagtgactcctttcccccacaattcttccatagaccctcatggactttattctttgtctcttttacacacatatgaccaatatggtgacttgaattttgctggtatgcaaaacacaacagtgttaacagaaaagcctttgtcaggtacagacgtccaagaaaaaacatttggtgaaagtcaggatttacctttgaaatccgacttgggcaccagggaagatagtagtgttgcatctagtgataggagtagtgtggagcgagaagtggcagaacacctagcaaaaggcttctggagtgacatttgcagcacggacactccttgccaaatgcagttatcacctgctgtggccaaagatggctcagaacagatctcacagaaacggtctgagtgtccgtggttaggtatcaggattagtgagagcccagaaccaggtcaaaggactttcacaacattaagttctgtcaactgcccttttataagtactctgagtactgaaggctgttcaagcaatttggaaattggaaacgatgattatgtttcagaaccccagcaagaaccttgcccatatgcttgtgtcattagcttgggagacgactctgagacggacaccgaaggagacagtgaatcctgttcagccagagaacaagaatgtgaggtaaaactgccattcaatgcacaacggataatttcactgtctcgaaatgattttcagtccttgttgaaaatgcacaagcttactccagaacagctggattgtatccatgatattcgaagaagaagtaaaaacagaattgctgcacagcgctgtcgcaagagaaaacttgactgtatacagaatcttgaatcagaaattgagaagctgcaaagtgaaaaggagagcttgttgaaggaaagagatcacattttgtcaactctgggtgagacaaagcagaacctaactggactttgccagaaagtttgtaaagaagcagctctgagtcaagaacaaatacagatactcgccaagtactcagctgcagattgcccactttcatttttaatttctgaaaaagataaaagtactcctgatggtgaactggcgttaccatcaattttcagtttatctgaccggcctccagcagtgctgcctccctgtgccagaggaaacagtgagcctggctacgcgcgagggcaggagtcccagcagatgtccacagccacctctgagcaagctgggcctgcggaacagtgtcgtcagagtggtgggatctcagatttctgtcagcagatgactgataaatgtactactgatgagtaaacttgcattcacttccttcaaaccatctaattttctcctgaagttttggcagcgtcttgaaagcctaatatgaccatctgttgctcaacaatactgtttttttcctttagtagtttaccataagggaatttcctttaagtcaaccatgatttctccttgatttctacaagagacaaagaaatgattttgcctcctggatatcagaaaaatccatgtgaaaatgtagtaaacctttaaaactcatgttttaaagaataataactctagtaataactcttcctgctattcagaataagtaggagaatgaaaactgcagcatatcagacagcaatttaacagcttgaaacatctacagatagttcctactaaaagaagtggcctgcagaagtttaataatttgacttttttctaatattttagtttgaaagaaaatttcttcccaagcaatgctaatagagttctattcttagaagcagggtgtcagctactgggaatatttttgtagagctgcattgtgaaaaaaagatggtcttacctgaatcttagggctttgttcttcggctcctaaaatcaggctttaagctacattgggaagatttagtaaataggcaagtggttggcctaagacgggggctgcttctcctcttcagtatggactctagaaagtctggctacatgaatagatttaagtgtcactttccctccctgccccccgcttcagtctctaccatatctggtcccatcatggacttcctatttcctggcatttttgtccctttggaagaagaaataggactcagaatacagtggcatgagtgattacactggcagcattatctcaggctccctagaatctggagagcttaccaacatgtaaagctgttcatttttccaccgtgggtcaccaatgccagaaaaccagacatcacggggaaagaatgttgcttactttttaccaggagtgcagttcatttttttcaccctgtttttgaagtcgtattattcacttgtaaaaatgattgtaacagataaaaaatgtatctgcagcaactctgcaggtttgtgaaataggatgaaactcaatctttttctattgtgggtttgcatttgaaaagcaggttgaatccttgctctcttctccaaatttggtgtggtataaagacacacaaatcattttaacttggacatttaaagatcagtcttagtgtttgttcagtcctgttacaaaatagataactgagcacctatcgcataacattttgcggtggcttttagccatgctggggttagatgtgtttgagagtcaaatgaaagctatggatcttctcagcaattaaaaaaaatgcatatattcacattcacagaaacattggcagaacccagttttaatggtacagaggagtagtttatagtgttgatttcaccaaaatcagagggctgaaagagacacttctatagactgcatcctgagcctagtgcagggcttgtctagctaatgtgggcagccaccacccactgtgtatgaacaagtctgaagcaagttggccttgcccttgagagtatatggggaccagtcttcatgtcttggagtaatttgtcaaatgttaccctttttgatcagggtgtagggggaggatattgctagtatattttcagtggtttgtatgttctctctgtcactgacttatttgtaagagaaaattagttggacttgtttattttctagtagcttttataagtacactcaagaatttgtcagggagaataattctgatagtgcatcccatactgcaaaagaatttgtgtgtgtgtgtgtgtgtgtgtgtgtgtgtgtgtatgtgtatgtatacatatatatctctccatataggtatttctttgatacttgtaattttaaatttcagcttcacgatataaaataatataagaacttctggtttacaaaatgtaaaatcttaagccaatggaacccttgatttcctacctcagtgtacacccaactattggttgtatcagtttgtgtatgtgcaaatgtcaaataatcttttgctttaattgctactgtacttgctttgaaagattacctactattttatgataaaatgtagttgtctccagagcttaaatataatttgtaaagcacttggtttaaatttctctctacctataaacagtttagcattaagggtttctattaatgacacagaattattggccaagtgtaatttcttaaaatttagcattactttaaatagccagcatgtaatacaagtaactacactacctcatatctacatgattttcaagttgtaatgcagatggacagataaaaaagattttacgtttgtcttttggccataagtgggaaagttttctgtatattgcatagcattacacatttatgcctattttaacattaacttctaaagaagttttttctaagaaaatgtttcaaggcaatattttttttgaggctgccgaagacaaatgacaggattatgagtatacagtgtatgccttttccttcatgcagaattttgaaatgttttcagtttgtatattgcatattcacatgatcattgttcactattttatgaactggccttctcaatgtttgatgattttttaaaagctgttatgttgaattcagtaaaataacattaccttattttttttcttattcaaattctggaactatagcaaataattcgttaaattgtcatattcaaaacaaatgtggatacagtcttggttctccatctgtaattttttttaacagtttgctatagcttactgcttaactaattttaaataaggaaataagtatgttagatgcagtagacgatacaggttgcatgtggacactcagtcacattaacaacttgggaaaaaaatggcaatgttacggtgaattctcaggtgaacttttttcagttataaaacatctattttgaatctgtaaatattttaaatgttttattaaggcatgtaataaactattctttgaaacttgttgggtagaatgaaaattaaagccataatggtagaagatggcatactgattataaaagaagcagaaaaacattgatttttttatatctttcataatataattttctaacaatgcaataaaaccactaaacttttgtgtccatattttactgagaccatgtttcattaaaagcatagtttcatagtatttaatttacatttctccctaatgttcttacccaaatgtacctgaactaaaaaatgttagatgttggtgataagttgacagttaaataaaattctctaaaattgcttctaattgaa

SEQ ID NO: 264466 - DNA, 5769 bp, Artificial Sequence
  derived and/or modified sequence
gtctactcagcccggtggctgtcgcgcgtggaatcgcgtaagaaaagccgagtttgtggctggggagagaaggccaccgtgctgagctggatttagcgaagactggttttggggaccggagagcccaggactccctttgttggagttttgcccacgcgttgtaattaagcctcgcacaatatggttgatgataattagaagcatgctttccactgaacttcccgacaacatttgttatgcagaatgtctctgagtgagaactcggtttttgcctatgaatcttctgtgcatagcaccaatgttttactcagccttaatgaccagcggaagaaagatgtgctgtgcgatgtcaccatctttgtggagggacagcggttccgcgctcaccggtccgtgctggcggcatgcagcagttacttccactcaagaatcgtaggccaggctgatggagagctgaacattactcttccagaagaggtgacagttaaaggatttgaacctttaattcagtttgcctacactgctaaactgattttaagtaaagagaatgtggatgaagtgtgcaaatgtgtggagtttttaagtgtacataatattgaggaatcctgctttcagtttctgaaatttaagtttttggactccactgcagaccagcaagaatgcccaagaaaaaaatgcttttcatcacactgtcagaaaacagaccttaaactttcacttttggaccagagggatctagaaactgatgaagtggaggaatttctggaaaataaaaatgttcagactcctcagtgtaaactccgcaggtatcaaggaaatgcaaaagcctcacctcctctacaagacagtgccagtcagacatatgagtccatgtgcttagagaaggatgctgctctggccttgccttctttatgccccaaatacagaaaattccaaaaagcatttggaactgacagagtccgtactggggaatctagtgtcaaagacattcatgcttctgttcagccaaatgaaaggtctgaaaatgaatgcctgggaggagtcccggagtgtagagatttgcaggtgatgttaaaatgtgacgaaagtaaattagcaatggaacctgaagaaacgaagaaagatcctgcttctcagtgcccaactgaaaaatcagaagtgactcctttcccccacaattcttccatagaccctcatggactttattctttgtctcttttacacacatatgaccaatatggtgacttgaattttgctggtatgcaaaacacaacagtgttaacagaaaagcctttgtcaggtacagacgtccaagaaaaaacatttggtgaaagtcaggatttacctttgaaatccgacttgggcaccagggaagatagtagtgttgcatctagtgataggagtagtgtggagcgagaagtggcagaacacctagcaaaaggcttctggagtgacatttgcagcacggacactccttgccaaatgcagttatcacctgctgtggccaaagatggctcagaacagatctcacagaaacggtctgagtgtccgtggttaggtatcaggattagtgagagcccagaaccaggtcaaaggactttcacaacattaagttctgtcaactgcccttttataagtactctgagtactgaaggctgttcaagcaatttggaaattggaaacgatgattatgtttcagaaccccagcaagaaccttgcccatatgcttgtgtcattagcttgggagacgactctgagacggacaccgaaggagacagtgaatcctgttcagccagagaacaagaatgtgaggtaaaactgccattcaatgcacaacggataatttcactgtctcgaaatgattttcagtccttgttgaaaatgcacaagcttactccagaacagctggattgtatccatgatattcgaagaagaagtaaaaacagaattgctgcacagcgctgtcgcaagagaaaacttgactgtatacagaatcttgaatcagaaattgagaagctgcaaagtgaaaaggagagcttgttgaaggaaagagatcacattttgtcaactctgggtgagacaaagcagaacctaactggactttgccagaaagtttgtaaagaagcagctctgagtcaagaacaaatacagatactcgccaagtactcagctgcagattgcccactttcatttttaatttctgaaaaagataaaagtactcctgatggtgaactggcgttaccatcaattttcagtttatctgaccggcctccagcagtgctgcctccctgtgccagaggaaacagtgagcctggctacgcgcgagggcaggagtcccagcagatgtccacagccacctctgagcaagctgggcctgcggaacagtgtcgtcagagtggtgggatctcagatttctgtcagcagatgactgataaatgtactactgatgagtaaacttgcattcacttccttcaaaccatctaattttctcctgaagttttggcagcgtcttgaaagcctaatatgaccatctgttgctcaacaatactgtttttttcctttagtagtttaccataagggaatttcctttaagtcaaccatgatttctccttgatttctacaagagacaaagaaatgattttgcctcctggatatcagaaaaatccatgtgaaaatgtagtaaacctttaaaactcatgttttaaagaataataactctagtaataactcttcctgctattcagaataagtaggagaatgaaaactgcagcatatcagacagcaatttaacagcttgaaacatctacagatagttcctactaaaagaagtggcctgcagaagtttaataatttgacttttttctaatattttagtttgaaagaaaatttcttcccaagcaatgctaatagagttctattcttagaagcagggtgtcagctactgggaatatttttgtagagctgcattgtgaaaaaaagatggtcttacctgaatcttagggctttgttcttcggctcctaaaatcaggctttaagctacattgggaagatttagtaaataggcaagtggttggcctaagacgggggctgcttctcctcttcagtatggactctagaaagtctggctacatgaatagatttaagtgtcactttccctccctgccccccgcttcagtctctaccatatctggtcccatcatggacttcctatttcctggcatttttgtccctttggaagaagaaataggactcagaatacagtggcatgagtgattacactggcagcattatctcaggctccctagaatctggagagcttaccaacatgtaaagctgttcatttttccaccgtgggtcaccaatgccagaaaaccagacatcacggggaaagaatgttgcttactttttaccaggagtgcagttcatttttttcaccctgtttttgaagtcgtattattcacttgtaaaaatgattgtaacagataaaaaatgtatctgcagcaactctgcaggtttgtgaaataggatgaaactcaatctttttctattgtgggtttgcatttgaaaagcaggttgaatccttgctctcttctccaaatttggtgtggtataaagacacacaaatcattttaacttggacatttaaagatcagtcttagtgtttgttcagtcctgttacaaaatagataactgagcacctatcgcataacattttgcggtggcttttagccatgctggggttagatgtgtttgagagtcaaatgaaagctatggatcttctcagcaattaaaaaaaatgcatatattcacattcacagaaacattggcagaacccagttttaatggtacagaggagtagtttatagtgttgatttcaccaaaatcagagggctgaaagagacacttctatagactgcatcctgagcctagtgcagggcttgtctagctaatgtgggcagccaccacccactgtgtatgaacaagtctgaagcaagttggccttgcccttgagagtatatggggaccagtcttcatgtcttggagtaatttgtcaaatgttaccctttttgatcagggtgtagggggaggatattgctagtatattttcagtggtttgtatgttctctctgtcactgacttatttgtaagagaaaattagttggacttgtttattttctagtagcttttataagtacactcaagaatttgtcagggagaataattctgatagtgcatcccatactgcaaaagaatttgtgtgtgtgtgtgtgtgtgtgtgtgtgtgtgtgtatgtgtatgtatacatatatatctctccatataggtatttctttgatacttgtaattttaaatttcagcttcacgatataaaataatataagaacttctggtttacaaaatgtaaaatcttaagccaatggaacccttgatttcctacctcagtgtacacccaactattggttgtatcagtttgtgtatgtgcaaatgtcaaataatcttttgctttaattgctactgtacttgctttgaaagattacctactattttatgataaaatgtagttgtctccagagcttaaatataatttgtaaagcacttggtttaaatttctctctacctataaacagtttagcattaagggtttctattaatgacacagaattattggccaagtgtaatttcttaaaatttagcattactttaaatagccagcatgtaatacaagtaactacactacctcatatctacatgattttcaagttgtaatgcagatggacagataaaaaagattttacgtttgtcttttggccataagtgggaaagttttctgtatattgcatagcattacacatttatgcctattttaacattaacttctaaagaagttttttctaagaaaatgtttcaaggcaatattttttttgaggctgccgaagacaaatgacaggattatgagtatacagtgtatgccttttccttcatgcagaattttgaaatgttttcagtttgtatattgcatattcacatgatcattgttcactattttatgaactggccttctcaatgtttgatgattttttaaaagctgttatgttgaattcagtaaaataacattaccttattttttttcttattcaaattctggaactatagcaaataattcgttaaattgtcatattcaaaacaaatgtggatacagtcttggttctccatctgtaattttttttaacagtttgctatagcttactgcttaactaattttaaataaggaaataagtatgttagatgcagtagacgatacaggttgcatgtggacactcagtcacattaacaacttgggaaaaaaatggcaatgttacggtgaattctcaggtgaacttttttcagttataaaacatctattttgaatctgtaaatattttaaatgttttattaaggcatgtaataaactattctttgaaacttgttgggtagaatgaaaattaaagccataatggtagaagatggcatactgattataaaagaagcagaaaaacattgatttttttatatctttcataatataattttctaacaatgcaataaaaccactaaacttttgtgtccatattttactgagaccatgtttcattaaaagcatagtttcatagtatttaatttacatttctccctaatgttcttacccaaatgtacctgaactaaaaaatgttagatgttggtgataagttgacagttaaataaaattctctaaaattgcttctaattgaa

SEQ ID NO: 264467 - DNA, 692 bp, Artificial Sequence
  derived and/or modified sequence
gcaaaagactgttgaagtagagagcattttgcccagctcactcggattctttgctggcatgccttcagtttcagttgtcatccagagaagtcaaaggaaatgctgcttggggatgagcatgttgatgataattagaagcatgctttccactgaacttcccgacaacatttgttatgcagaatgtctctgagtgagaactcggtttttgcctatgaatcttctgtgcatagcaccaatgttttactcagccttaatgaccagcggaagaaagatgtgctgtgcgatgtcaccatctttgtggagggacagcggttccgcgctcaccggtccgtgctggcggcatgcagcagttacttccactcaagaatcgtaggccaggctgatggagagctgaacattactcttccagaagaggtgacagttaaaggatttgaacctttaattcagtttgcctacactgctaaactgattttaagtaaagagaatgtggatgaagtgtgcaaatgtgtggagtttttaagtgtacataatattgaggaatcctgctttcagtttctgaaatttaagtttttggactccactgcagaccagcaagaatgcccaagaaaaaaatgcttttcatcacactgtcagaaaacagaccttaaactttcacttttggaccagagggatctagaaactgatgaagtgga

SEQ ID NO: 264468 - DNA, 751 bp, Artificial Sequence
  derived and/or modified sequence
atacacaagaagtttcaggagtcagaggagggttgatgataattagaagcatgctttccactgaacttcccgacaacatttgttatgcagaatgtctctgagtgagaactcggtttttgcctatgaatcttctgtgcatagcaccaatgttttactcagccttaatgaccagcggaagaaagatgtgctgtgcgatgtcaccatctttgtggagggacagcggttccgcgctcaccggtccgtgctggcggcatgcagcagttacttccactcaagaatcgtaggccaggctgatggagagctgaacattactcttccagaagaggtgacagttaaaggatttgaacctttaattcagtttgcctacactgctaaactgattttaagtaaagagaatgtggatgaagtgtgcaaatgtgtggagtttttaagtgtacataatattgaggaatcctgctttcagtttctgaaatttaagtttttggactccactgcagaccagcaagaatgcccaagaaaaaaatgcttttcatcacactgtcagaaaacagaccttaaactttcacttttggaccagagggatctagaaactgatgaagtggaggaatttctggaaaataaaaatgttcagactcctcagtgtaaactccgcaggtatcaaggaaatgcaaaagcctcacctcctctacaagacagtgccagtcagacatatgagtccatgtgcttagagaaggatgctgctctggccttg

SEQ ID NO: 264469 - DNA, 777 bp, Artificial Sequence
  derived and/or modified sequence
gcctttggacatcttgaagaagcttagggaagaaaggctcccggttgatgataattagaagcatgctttccactgaacttcccgacaacatttgttatgcagaatgtctctgagtgagaactcggtttttgcctatgaatcttctgtgcatagcaccaatgttttactcagccttaatgaccagcggaagaaagatgtgctgtgcgatgtcaccatctttgtggagggacagcggttccgcgctcaccggtccgtgctggcggcatgcagcagttacttccactcaagaatcgtaggccaggctgatggagagctgaacattactcttccagaagaggtgacagttaaaggatttgaacctttaattcagtttgcctacactgctaaactgattttaagtaaagagaatgtggatgaagtgtgcaaatgtgtggagtttttaagtgtacataatattgaggaatcctgctttcagtttctgaaatttaagtttttggactccactgcagaccagcaagaatgcccaagaaaaaaatgcttttcatcacactgtcagaaaacagaccttaaactttcacttttggaccagagggatctagaaactgatgaagtggaggaatttctggaaaataaaaatgttcagactcctcagtgtaaactccgcaggtatcaaggaaatgcaaaagcctcacctcctctacaagacagtgccagtcagacatatgagtccatgtgcttagagaaggatgctgctctggccttgccttctttatgccc

SEQ ID NO: 264470 - DNA, 485 bp, Artificial Sequence
  derived and/or modified sequence
tctttgacaatgactatctggatgacacaggaaggatgcaattctggccttggagagaaaacttgcaaggaaaggaacatgtttgaatttcagatgtgttcctcaatgaatcacgatcttcagggaatgtttcaggtggaggaaggggctcttggtcaatgagcctgaagactgcatggcaacctttgccagcttttggcctgaaaactcaacttcttcatttgagattagcaaaagactgttgaagtagagagcattttgcccagctcactcggattctttgctggcatgccttcagtttcagttgtcatccagagaagtcaaaggaaatgctgcttggggatgagcatgttgatgataattagaagcatgctttccactgaacttcccgacaacatttgttatgcagaatgtctctgagtgagaactcggtttttgcctatgaatcttctgtgcatagcaccaatgttttactcagccttaat

SEQ ID NO: 264471 - DNA, 315 bp, Artificial Sequence
  derived and/or modified sequence
tctttgacaatgactatctggatgacacaggaaggatgcaattctggccttggagagaaaacttgcaaggaaaggaacatgtttgaatttcagatgtgttcctcaatgaatcacacttgttacatttactgactctcatggtggtggagatggattttttcctagtgtgcctgtgtgtgggttgatgataattagaagcatgctttccactgaacttcccgacaacatttgttatgcagaatgtctctgagtgagaactcggtttttgcctatgaatcttctgtgcatagcaccaatgttttactcagccttaat

SEQ ID NO: 264472 - DNA, 325 bp, Artificial Sequence
  derived and/or modified sequence
gaagaagctattcaaaaatgtccaggactctgttatttattcagcaagcttacaaagccatctttgattgactgattctttgacaatgactatctggatgacacaggaaggatgcaattctggccttggagagaaaacttgcaaggaaaggaacatgtttgaatttcagatgtgttcctcaatgaatcacgttgatgataattagaagcatgctttccactgaacttcccgacaacatttgttatgcagaatgtctctgagtgagaactcggtttttgcctatgaatcttctgtgcatagcaccaatgttttactcagccttaat

SEQ ID NO: 264473 - DNA, 217 bp, Artificial Sequence
  derived and/or modified sequence
ggcagtttcatgtcattgagtagaattgtgcggaatgcttttatggagtgaggcttctgcgttaaacttgtgctgattccaggttgatgataattagaagcatgctttccactgaacttcccgacaacatttgttatgcagaatgtctctgagtgagaactcggtttttgcctatgaatcttctgtgcatagcaccaatgttttactcagccttaat

SEQ ID NO: 264474 - DNA, 349 bp, Artificial Sequence
  derived and/or modified sequence
tctttgacaatgactatctggatgacacaggaaggatgcaattctggccttggagagaaaacttgcaaggaaaggaacatgtttgaatttcagatgtgttcctcaatgaatcaccacgtctccttcctgccatcttgtgaagaagtgccttgcttccctttcaccttctgccatgattgtaagtttcctgaggcctctccagccatcctgaactgttgatgataattagaagcatgctttccactgaacttcccgacaacatttgttatgcagaatgtctctgagtgagaactcggtttttgcctatgaatcttctgtgcatagcaccaatgttttactcagccttaat

SEQ ID NO: 264475 - DNA, 2211 bp, Artificial Sequence
  derived and/or modified sequence
atgagcctgagcgagaacagcgtgttcgcctacgagagcagcgtgcacagcaccaacgtgctgctgagcctgaacgaccagagaaagaaggacgtgctgtgcgacgtgaccatcttcgtggagggccagagattcagagcccacagaagcgtgctggccgcctgcagcagctacttccacagcagaatcgtgggccaggccgacggcgagctgaacatcaccctgcccgaggaggtgaccgtgaagggcttcgagcccctgatccagttcgcctacaccgccaagctgatcctgagcaaggagaacgtggacgaggtgtgcaagtgcgtggagttcctgagcgtgcacaacatcgaggagagctgcttccagttcctgaagttcaagttcctggacagcaccgccgaccagcaggagtgccccagaaagaagtgcttcagcagccactgccagaagaccgacctgaagctgagcctgctggaccagagagacctggagaccgacgaggtggaggagttcctggagaacaagaacgtgcagaccccccagtgcaagctgagaagataccagggcaacgccaaggccagcccccccctgcaggacagcgccagccagacctacgagagcatgtgcctggagaaggacgccgccctggccctgcccagcctgtgccccaagtacagaaagttccagaaggccttcggcaccgacagagtgagaaccggcgagagcagcgtgaaggacatccacgccagcgtgcagcccaacgagagaagcgagaacgagtgcctgggcggcgtgcccgagtgcagagacctgcaggtgatgctgaagtgcgacgagagcaagctggccatggagcccgaggagaccaagaaggaccccgccagccagtgccccaccgagaagagcgaggtgacccccttcccccacaacagcagcatcgacccccacggcctgtacagcctgagcctgctgcacacctacgaccagtacggcgacctgaacttcgccggcatgcagaacaccaccgtgctgaccgagaagcccctgagcggcaccgacgtgcaggagaagaccttcggcgagagccaggacctgcccctgaagagcgacctgggcaccagagaggacagcagcgtggccagcagcgacagaagcagcgtggagagagaggtggccgagcacctggccaagggcttctggagcgacatctgcagcaccgacaccccctgccagatgcagctgagccccgccgtggccaaggacggcagcgagcagatcagccagaagagaagcgagtgcccctggctgggcatcagaatcagcgagagccccgagcccggccagagaaccttcaccaccctgagcagcgtgaactgccccttcatcagcaccctgagcaccgagggctgcagcagcaacctggagatcggcaacgacgactacgtgagcgagccccagcaggagccctgcccctacgcctgcgtgatcagcctgggcgacgacagcgagaccgacaccgagggcgacagcgagagctgcagcgccagagagcaggagtgcgaggtgaagctgcccttcaacgcccagagaatcatcagcctgagcagaaacgacttccagagcctgctgaagatgcacaagctgacccccgagcagctggactgcatccacgacatcagaagaagaagcaagaacagaatcgccgcccagagatgcagaaagagaaagctggactgcatccagaacctggagagcgagatcgagaagctgcagagcgagaaggagagcctgctgaaggagagagaccacatcctgagcaccctgggcgagaccaagcagaacctgaccggcctgtgccagaaggtgtgcaaggaggccgccctgagccaggagcagatccagatcctggccaagtacagcgccgccgactgccccctgagcttcctgatcagcgagaaggacaagagcacccccgacggcgagctggccctgcccagcatcttcagcctgagcgacagaccccccgccgtgctgcccccctgcgccagaggcaacagcgagcccggctacgccagaggccaggagagccagcagatgagcaccgccaccagcgagcaggccggccccgccgagcagtgcagacagagcggcggcatcagcgacttctgccagcagatgaccgacaagtgcaccaccgacgagtag

SEQ ID NO: 264476 - DNA, 513 bp, Artificial Sequence
  derived and/or modified sequence
atgagcctgagcgagaacagcgtgttcgcctacgagagcagcgtgcacagcaccaacgtgctgctgagcctgaacgaccagagaaagaaggacgtgctgtgcgacgtgaccatcttcgtggagggccagagattcagagcccacagaagcgtgctggccgcctgcagcagctacttccacagcagaatcgtgggccaggccgacggcgagctgaacatcaccctgcccgaggaggtgaccgtgaagggcttcgagcccctgatccagttcgcctacaccgccaagctgatcctgagcaaggagaacgtggacgaggtgtgcaagtgcgtggagttcctgagcgtgcacaacatcgaggagagctgcttccagttcctgaagttcaagttcctggacagcaccgccgaccagcaggagtgccccagaaagaagtgcttcagcagccactgccagaagaccgacctgaagctgagcctgctggaccagagagacctggagaccgacgaggtgtag

SEQ ID NO: 264477 - DNA, 663 bp, Artificial Sequence
  derived and/or modified sequence
atgagcctgagcgagaacagcgtgttcgcctacgagagcagcgtgcacagcaccaacgtgctgctgagcctgaacgaccagagaaagaaggacgtgctgtgcgacgtgaccatcttcgtggagggccagagattcagagcccacagaagcgtgctggccgcctgcagcagctacttccacagcagaatcgtgggccaggccgacggcgagctgaacatcaccctgcccgaggaggtgaccgtgaagggcttcgagcccctgatccagttcgcctacaccgccaagctgatcctgagcaaggagaacgtggacgaggtgtgcaagtgcgtggagttcctgagcgtgcacaacatcgaggagagctgcttccagttcctgaagttcaagttcctggacagcaccgccgaccagcaggagtgccccagaaagaagtgcttcagcagccactgccagaagaccgacctgaagctgagcctgctggaccagagagacctggagaccgacgaggtggaggagttcctggagaacaagaacgtgcagaccccccagtgcaagctgagaagataccagggcaacgccaaggccagcccccccctgcaggacagcgccagccagacctacgagagcatgtgcctggagaaggacgccgccctggccctgtag

SEQ ID NO: 264478 - DNA, 678 bp, Artificial Sequence
  derived and/or modified sequence
atgagcctgagcgagaacagcgtgttcgcctacgagagcagcgtgcacagcaccaacgtgctgctgagcctgaacgaccagagaaagaaggacgtgctgtgcgacgtgaccatcttcgtggagggccagagattcagagcccacagaagcgtgctggccgcctgcagcagctacttccacagcagaatcgtgggccaggccgacggcgagctgaacatcaccctgcccgaggaggtgaccgtgaagggcttcgagcccctgatccagttcgcctacaccgccaagctgatcctgagcaaggagaacgtggacgaggtgtgcaagtgcgtggagttcctgagcgtgcacaacatcgaggagagctgcttccagttcctgaagttcaagttcctggacagcaccgccgaccagcaggagtgccccagaaagaagtgcttcagcagccactgccagaagaccgacctgaagctgagcctgctggaccagagagacctggagaccgacgaggtggaggagttcctggagaacaagaacgtgcagaccccccagtgcaagctgagaagataccagggcaacgccaaggccagcccccccctgcaggacagcgccagccagacctacgagagcatgtgcctggagaaggacgccgccctggccctgcccagcctgtgcccctag

SEQ ID NO: 264479 - DNA, 78 bp, Artificial Sequence
  derived and/or modified sequence
atgagcctgagcgagaacagcgtgttcgcctacgagagcagcgtgcacagcaccaacgtgctgctgagcctgaactag

SEQ ID NO: 264480 - protein, 286 aa, Artificial Sequence
  derived and/or modified sequence
MSDSEKLNLDSIIGRLLEGDIHGQYYDLLRLFEYGGFPPESNYLFLGDYVDRGKQSLETICLLLAYKIKYPENFFLLRGNHECASINRIYGFYDECKRRYNIKLWKTFTDCFNCLPIAAIVDEKIFCCHGGLSPDLQSMEQIRRIMRPTDVPDQGLLCDLLWSDPDKDVQGWGENDRGVSFTFGAEVVAKFLHKHDLDLICRAHQVVEDGYEFFAKRQLVTLFSAPNYCGEFDNAGAMMSVDETLMCSFQILKPADKNKGKYGQFSGLNPGGRPITPPRNSAKAKK

SEQ ID NO: 264481 - DNA, 861 bp, Artificial Sequence
  derived and/or modified sequence
atgtccgattctgagaagctcaatctcgactcaattatcgggaggctcctcgagggggacatccatgggcagtattacgaccttcttcgccttttcgaatacggcggatttccccccgagagcaattacctcttcttgggcgactatgtcgatcgcgggaagcaatcccttgagactatctgcctgctgctggcctacaagatcaaatacccggagaatttctttctgttgcgcggtaaccatgagtgcgcatccattaaccggatttacggattctacgacgaatgtaaacggagatacaatatcaaactgtggaagaccttcacggactgctttaactgtctcccgattgctgccatcgttgatgaaaaaattttctgttgccacggcggcctcagtccagatctccagtcaatggagcagataaggcgaatcatgagaccaaccgacgtgcctgaccagggacttctttgcgacttattgtggtccgatcctgacaaggacgtgcagggctggggcgaaaatgatcggggtgtctctttcaccttcggagccgaggtggtcgcaaagttccttcataaacacgacttagacttaatttgcagagcccaccaggtggtggaagatggttacgagttctttgcaaagagacagctggttaccctattcagcgcacctaactactgcggcgagtttgacaacgccggcgcgatgatgtcagtggatgaaacccttatgtgcagctttcagattttaaagcccgcagacaagaataagggaaagtacggtcagttttcggggttaaacccgggcggaagaccaataacccccccgcggaactcagccaaagcaaaaaaatag

SEQ ID NO: 264482 - DNA, 861 bp, Artificial Sequence
  derived and/or modified sequence
atgtctgacagcgagaagctgaacctggacagcatcatcggccgcctgctggagggggacatccacggccagtactatgacctgctgcggctgtttgaatatggaggcttccccccagagagcaactacctgttcctgggggactatgtggaccggggcaagcagagcctggagaccatctgcctgctgctggcctacaagatcaagtacccagagaacttcttcctgctgcggggcaaccatgaatgtgccagcatcaaccgcatctacggcttctatgatgagtgcaagaggcgctacaacatcaagctgtggaagaccttcacagactgcttcaactgcctgcccatcgccgccatcgtggatgagaagatcttctgctgccacggcggcctgagcccagacctgcagagcatggagcagatccgccgcatcatgaggcccacagatgtgcctgaccagggcctgctgtgtgacctgctgtggagcgaccctgacaaggatgtgcagggctggggagaaaatgaccggggcgtgtccttcacctttggagctgaggtggtggccaagttcctgcacaagcatgacctggacctgatctgccgggcccaccaggtggtggaggatggctatgagttctttgccaagaggcagctggtgaccctcttcagcgcccccaactactgtggggagtttgacaatgctggggccatgatgtctgtggatgagaccctgatgtgcagcttccagatcctgaagccagctgacaagaacaagggcaagtatggccagttcagcggcctgaaccctgggggccggcccatcaccccaccaagaaattctgccaaggccaagaagtag

SEQ ID NO: 264483 - DNA, 861 bp, Artificial Sequence
  derived and/or modified sequence
atgagcgacagcgagaagctgaacctggacagcatcatcggccggctgcttgagggggacattcacggccaatactacgacctgctgcgcctgttcgagtatgggggcttccctcctgagagcaattatctgttcttgggagactacgttgaccgcggcaagcagagtcttgaaactatctgcctcctgctggcttataaaataaaataccccgaaaacttctttctgctgcgaggaaatcacgagtgcgccagtatcaataggatctacggtttttacgacgaatgtaagcgtcggtacaatattaagctgtggaaaacttttaccgactgttttaactgtctgcccatcgctgccattgtggacgagaagatattctgttgccatggcgggctcagcccagacctgcagagcatggagcagatcagacggatcatgaggccaaccgacgtacccgatcagggcctgctgtgcgacctgctgtggtccgatccggacaaagacgtgcaagggtggggagagaatgatagaggtgtgtcctttactttcggggcagaagtagtggccaagtttctacacaagcacgacctggacctgatctgccgcgcccaccaggttgtggaagacggatatgaattcttcgctaagaggcagctggtaacactcttctcagcaccgaattattgcggggagtttgacaatgccggcgcaatgatgtcagttgacgagacattgatgtgtagctttcagatcctgaagccggccgacaagaataagggtaagtacgggcagttctccggtctaaacccagggggaagaccaattactccaccccgaaacagcgcaaaggctaaaaagtag

SEQ ID NO: 264484 - DNA, 861 bp, Artificial Sequence
  derived and/or modified sequence
atgtctgactccgagaagttaaacctggacagtatcattggcagattgctggaaggggatattcacggccaatactacgatttgctacgcctgtttgaatatggaggctttccacccgaaagcaactatctgttcttgggcgattacgtggaccggggaaaacagagtctggaaacgatctgtcttttactcgcctataagattaaatatccggagaatttttttcttctcaggggaaaccacgagtgcgcctctatcaacaggatctatggtttctatgacgagtgcaagaggaggtataacattaaactgtggaagacctttacggactgctttaattgcctgcctatcgccgctatagtggacgaaaaaattttttgttgtcacggcggactgagccctgatctccagagcatggagcagatccggaggattatgagacccactgacgtacccgaccagggcttgctttgcgacctcttgtggtccgatcccgacaaggatgtgcagggctggggagagaatgataggggagtatcattcacattcggagcagaagtggtggcaaaatttctccacaagcatgatctggacctgatatgccgcgctcaccaggtagtggaagacggctacgaattttttgctaaacggcagctggtcaccctctttagcgcacctaactactgtggggaatttgacaatgccggagccatgatgtctgtggacgaaaccttgatgtgttccttccagatactgaagcctgcggacaagaataagggcaaatacgggcagtttagcggcctgaatcctgggggacggcctataaccccccctagaaactccgcaaaggcaaagaaatag

SEQ ID NO: 264485 - DNA, 1054 bp, Artificial Sequence
  derived and/or modified sequence
cggaaggagagccaggccggaaggaggctgccggagggcgggaggcaggagcgggccaggagctgctgggctggagcggcggcgccgccatgtccgacagcgagaagctcaacctggactcgatcatcgggcgcctgctggaaggtgacatacacggccagtactacgaccttctgcgactatttgagtatggcggtttccctcccgagagcaactacctctttctgggggactatgtggacaggggcaagcagtccttggagaccatctgcctgctgctggcctataagatcaagtaccccgagaacttcttcctgctccgtgggaaccacgagtgtgccagcatcaaccgcatctatggtttctacgatgagtgcaagagacgctacaacatcaaactgtggaaaaccttcactgactgcttcaactgcctgcccatcgcggccatagtggacgaaaagatcttctgctgccacggaggcctgtccccggacctgcagtctatggagcagattcggcggatcatgcggcccacagatgtgcctgaccagggcctgctgtgtgacctgctgtggtctgaccctgacaaggacgtgcagggctggggcgagaacgaccgtggcgtctcttttacctttggagccgaggtggtggccaagttcctccacaagcacgacttggacctcatctgccgagcacaccaggtggtagaagacggctacgagttctttgccaagcggcagctggtgacacttttctcagctcccaactactgtggcgagtttgacaatgctggcgccatgatgagtgtggacgagaccctcatgtgctctttccagatcctcaagcccgccgacaagaacaaggggaagtacgggcagttcagtggcctgaaccctggaggccgacccatcaccccaccccgcaattccgccaaagccaagaaatagcccccgcacaccaccctgtgccccagatgatggattgattgtacagaaatcatgctgccatgctgggggggggtcaccccgacccctcaggcccacctgtcacg

SEQ ID NO: 264486 - DNA, 861 bp, Artificial Sequence
  derived and/or modified sequence
atgagcgacagcgagaagctgaacctggacagcatcatcggcagactgctggagggcgacatccacggccagtactacgacctgctgagactgttcgagtacggcggcttcccccccgagagcaactacctgttcctgggcgactacgtggacagaggcaagcagagcctggagaccatctgcctgctgctggcctacaagatcaagtaccccgagaacttcttcctgctgagaggcaaccacgagtgcgccagcatcaacagaatctacggcttctacgacgagtgcaagagaagatacaacatcaagctgtggaagaccttcaccgactgcttcaactgcctgcccatcgccgccatcgtggacgagaagatcttctgctgccacggcggcctgagccccgacctgcagagcatggagcagatcagaagaatcatgagacccaccgacgtgcccgaccagggcctgctgtgcgacctgctgtggagcgaccccgacaaggacgtgcagggctggggcgagaacgacagaggcgtgagcttcaccttcggcgccgaggtggtggccaagttcctgcacaagcacgacctggacctgatctgcagagcccaccaggtggtggaggacggctacgagttcttcgccaagagacagctggtgaccctgttcagcgcccccaactactgcggcgagttcgacaacgccggcgccatgatgagcgtggacgagaccctgatgtgcagcttccagatcctgaagcccgccgacaagaacaagggcaagtacggccagttcagcggcctgaaccccggcggcagacccatcaccccccccagaaacagcgccaaggccaagaagtag

SEQ ID NO: 264487 - protein, 685 aa, Artificial Sequence
  derived and/or modified sequence
MDHAEENEILAATQRYYVERPIFSHPVLQERLHTKDKVPDSIADKLKQAFTCTPKKIRNIIYMFLPITKWLPAYKFKEYVLGDLVSGISTGVLQLPQGLAFAMLAAVPPIFGLYSSFYPVIMYCFLGTSRHISIGPFAVISLMIGGVAVRLVPDDIVIPGGVNATNGTEARDALRVKVAMSVTLLSGIIQFCLGVCRFGFVAIYLTEPLVRGFTTAAAVHVFTSMLKYLFGVKTKRYSGIFSVVYSTVAVLQNVKNLNVCSLGVGLMVFGLLLGGKEFNERFKEKLPAPIPLEFFAVVMGTGISAGFNLKESYNVDVVGTLPLGLLPPANPDTSLFHLVYVDAIAIAIVGFSVTISMAKTLANKHGYQVDGNQELIALGLCNSIGSLFQTFSISCSLSRSLVQEGTGGKTQLAGCLASLMILLVILATGFLFESLPQAVLSAIVIVNLKGMFMQFSDLPFFWRTSKIELTIWLTTFVSSLFLGLDYGLITAVIIALLTVIYRTQSPSYKVLGKLPETDVYIDIDAYEEVKEIPGIKIFQINAPIYYANSDLYSNALKRKTGVNPAVIMGARRKAMRKYAKEVGNANMANATVVKADAEVDGEDATKPEEEDGEVKYPPIVIKSTFPEEMQRFMPPGDNVHTVILDFTQVNFIDSVGVKTLAGIVKEYGDVGIYVYLAGCSAFIQR

SEQ ID NO: 264488 - DNA, 2058 bp, Artificial Sequence
  derived and/or modified sequence
atggatcacgctgaagagaatgaaattttggccgccacccaacgctattatgtggaacgacccatctttagccaccctgtgctgcaggagcgcctccacaccaaagataaagtacctgactctatcgcggataaactcaaacaggcctttacctgcactcctaagaaaattcgaaatatcatctacatgttcctgcccattactaagtggttgcccgcgtataagttcaaagagtatgtcctgggggatctggtgtctggcataagtaccggagtcttgcagctgccacaggggctagccttcgctatgttagcggccgtgccacctatttttggactttacagcagcttctaccctgtgataatgtattgcttcctcgggacttctcgacacatcagcattggccccttcgccgtgattagtctgatgataggcggcgtggccgtgcgcctggtgccggacgatatcgtgattcctggcggtgttaacgccactaacggtactgaggcgagggatgccctgagagtgaaggtagctatgagtgtgacactgctgtcaggtatcatccagttctgccttggagtgtgccgttttggattcgtggcaatttatcttaccgaacccttggtgaggggttttacgaccgccgcggccgtccacgtgttcactagtatgcttaagtacctctttggggtgaagacaaagcgatatagtggtattttttccgtggtgtactctacagtggctgtgctgcagaatgtcaaaaatcttaacgtgtgctccctgggagtgggcctgatggtgtttggactgcttctgggagggaaagagttcaatgagcggttcaaggagaaactccccgcccctattccccttgaattctttgcagtggtcatggggactggcatctcagccggtttcaacctcaaggaatcctacaatgtggatgttgtgggaacccttcccctgggcttgctcccaccagctaacccagataccagcttgttccatctggtctacgtagacgccatcgccatagctatagtgggattctctgtgactatcagtatggcgaaaacactggccaacaaacacggataccaggtggatggcaatcaagagttgatcgctctgggattgtgtaactccattgggagtctgttccagaccttcagcattagttgtagtctaagcaggtccctcgttcaggaagggactggtgggaagacacagctggctggttgtctggcctctctgatgatcctgctcgtgatcctagcaactggcttcctcttcgaaagcctgcctcaagccgtactctcagcgattgttatcgtgaacttaaaaggaatgttcatgcagtttagcgacttaccttttttttggaggacatctaagatcgaactgacaatctggttgaccaccttcgtgagctcccttttcttagggctggactacggactgattactgctgtgatcattgctctcctgaccgtaatatacaggacacaatctccaagttacaaagtccttgggaagttgccggaaacagacgtctacatcgatatcgatgcctatgaagaggtgaaagagatacccggcatcaaaatttttcagattaacgcgcccatttactacgcaaacagtgacttgtattcgaacgccttaaaaaggaaaacgggggttaatcccgctgtaattatgggagccagacgaaaagccatgagaaagtacgcaaaggaagtaggcaacgcgaacatggccaacgctaccgtagtcaaagccgatgccgaggtcgacggagaggacgctaccaaacccgaggaggaggacggagaagtgaaatatcctcctatcgtcatcaagagcacgtttcctgaggagatgcagcggttcatgccacccggtgataacgttcacactgtcatactcgattttacacaagtgaatttcattgacagcgttggagtaaagacactggccgggattgtcaaagaatacggtgacgtaggcatctacgtttatcttgcagggtgcagtgcattcattcaacgctag

SEQ ID NO: 264489 - DNA, 2058 bp, Artificial Sequence
  derived and/or modified sequence
atggaccacgccgaggagaatgagatcctggccgccacccagcgctactacgtggagcggcccatcttcagccaccctgtgctgcaggagcggctgcacaccaaggacaaggtgcctgacagcattgctgacaagctgaagcaggccttcacctgcacccccaagaagatccggaacatcatctacatgttcctgcccatcaccaagtggctgcctgcctacaagttcaaggagtatgtgctgggggacctggtgtctggcatcagcactggagtgctgcagctgccccagggcctggcctttgccatgctggccgctgtgccccccatcttcggcctgtacagcagcttctaccctgtgatcatgtactgcttcctgggcaccagccgccacatcagcatcggcccctttgctgtgatcagcctgatgattggaggagtggccgtgcggctggtgcctgatgacatcgtcatccctggaggagtgaatgccaccaacggcacagaggccagagatgccctgcgggtgaaggtggccatgtctgtgaccctgctgagcggcatcatccagttctgcctgggcgtgtgccgcttcggctttgtggccatctacctgacagagcccctggtgcggggcttcaccacagctgctgctgtgcacgtgttcacctccatgctgaagtacctgtttggagtgaagaccaagcgctacagcggcatcttctctgtggtgtacagcacagtggccgtgctgcagaatgtgaagaacctgaatgtgtgcagcctgggcgtgggcctgatggtgtttggcctgctgctgggcggcaaggagttcaatgaacgcttcaaggagaagctgcctgcccccatccccctggagttctttgctgtggtgatgggcaccggcatctctgctggcttcaacctgaaggagagctacaacgtggatgtggtgggcaccctgcccctgggcctgctgcccccagccaacccagacaccagcctcttccacctggtgtatgtggatgccatcgccatcgccatcgtgggcttctctgtgaccatctccatggccaagaccctggccaacaagcacggctaccaggtggatggcaaccaggagctgattgccctgggcctgtgcaacagcatcggcagcctcttccagaccttcagcatcagctgcagcctgagccgcagcctggtgcaggagggcaccggcggcaagacccagctggccggctgcctggccagcctgatgatcctgctggtgatcctggccaccggcttcctgtttgagagcctgccccaggccgtgctgagcgccatcgtgattgtgaacctgaagggcatgttcatgcagttcagtgacctgcccttcttctggaggaccagcaagattgagctgaccatctggctgaccacctttgtgagcagcctcttcctgggcctggactatggcctcatcacagctgtgatcatcgccctgctgaccgtcatctaccgcacccagagccccagctacaaggtgctgggcaagctgcctgagacagatgtgtacattgatattgatgcctatgaggaggtgaaggagatccctggcatcaagatcttccagatcaatgcccccatctactatgccaacagcgacctgtacagcaatgccctgaagaggaagacaggagtgaacccagctgtgatcatgggcgcccggaggaaggccatgaggaaatatgccaaggaggtgggcaatgccaacatggccaatgccaccgtggtgaaggcagatgctgaggtggatggagaagatgccaccaagccagaggaggaggatggagaggtgaagtacccacccatcgtcatcaagagcaccttccctgaggagatgcagcgcttcatgcctcctggggacaacgtgcacacagtcatcctggacttcacccaggtgaacttcatcgacagcgtgggcgtgaagaccctggccggcatcgtgaaggagtatggagatgtgggcatctacgtgtacctggccggctgcagcgccttcatccagaggtag

SEQ ID NO: 264490 - DNA, 2058 bp, Artificial Sequence
  derived and/or modified sequence
atggaccacgccgaggagaacgagatcctggccgccacccagcggtattatgttgagcgcccgattttcagccatcctgtgctgcaggaacggctacatacgaaggacaaagttccagattcgatcgccgataagttgaaacaggcgtttacttgtacccccaagaaaatccggaatattatctatatgtttctgccaatcaccaagtggctgcctgcctacaaatttaaggaatatgtgctgggagacttggtgagcgggattagtacgggggtgctccagcttccacagggacttgcttttgccatgcttgccgccgtgcccccaatcttcgggctgtatagtagtttttatcccgtgatcatgtactgcttcctgggcacaagtaggcatatttcgattggtcccttcgcagtgatctcactgatgatcggcggcgttgctgtccggctggtccctgatgacattgtcatcccaggtggagttaatgccaccaatggaaccgaagcccgggatgccctgcgcgtgaaagtggccatgagcgtcaccctcctgagcggtatcatccaattctgcctgggagtgtgtcgatttggcttcgtggcgatctatctaacggaaccactcgttagggggtttacaacagcagcggcggtccatgtcttcacatccatgctgaagtacctcttcggcgtgaagaccaagcgatattctgggatattcagcgtcgtgtatagtaccgtggcagtgctacaaaacgtgaagaatctcaacgtttgctctttaggcgtggggctgatggtgttcggccttttgttaggcggtaaagagttcaatgagcgatttaaagagaagttgccagcgcccattcctctggagttcttcgcagtcgttatgggaaccggcatctctgctggatttaacctcaaagaaagctataatgtggatgttgtgggcaccctgccactcggactgctgccccctgccaatcccgacacttctttgtttcacctggtatacgtcgatgcgatcgccattgctatcgtaggcttttcagtgacgataagcatggctaaaactctcgccaacaagcacggctatcaggtcgatgggaaccaggagttaattgccttgggcttatgcaattccatcggctcactgttccagacgttctctatctcgtgcagcctgagccggtctctggtgcaggaaggcactggtggaaaaacccagctcgcggggtgccttgcgtcactgatgatcctcctggtaatcttggctacaggctttctgttcgagtcactgccacaggctgtgctctccgccatcgtcatcgttaacctgaagggcatgttcatgcagttctctgacttgccatttttttggagaacctcaaaaattgagctgacaatatggctgactactttcgtaagctctctgtttctgggcctggactatggcctgataaccgccgttatcattgctctgctgaccgtgatataccggacacaatccccatcttataaggtcctgggtaaactgcctgagacagatgtctacatagacatcgacgcctatgaagaagtgaaggaaatccctgggattaagatattccagattaatgcccctatctactatgcgaacagcgatctttacagcaacgctttaaagagaaagacaggggtgaatcctgctgtgattatgggcgcccgacgcaaggccatgcgcaagtatgccaaagaagtgggcaacgccaatatggcaaacgctactgtcgttaaagcagatgctgaggttgacggggaggacgccactaaaccggaagaagaggacggggaggtaaagtatccacccatcgtgattaaatcaactttccccgaggaaatgcagaggttcatgccccctggggacaatgtgcataccgtgattctcgacttcacacaggtgaactttattgatagcgttggggtaaaaaccttggctggcatagttaaagagtacggggacgtgggtatatacgtctatctggctgggtgctcggcgttcattcaaaggtag

SEQ ID NO: 264491 - DNA, 2058 bp, Artificial Sequence
  derived and/or modified sequence
atggatcacgccgaggagaacgagatcctggcggcaacccagaggtactacgtggaacggcctatcttttctcaccctgtgctgcaggaaaggctgcatacaaaagacaaggtccctgacagtattgcagataaattgaaacaggctttcacctgcacaccgaaaaagatccggaatatcatctatatgttcctgcccatcacgaaatggcttcctgcctataagtttaaggagtacgtgctgggcgatctggttagcggcatttcgactggcgtgctgcagctccctcagggattggccttcgccatgctcgctgcagtgcccccaatctttggcctttactcgtcattctatcccgtcatcatgtactgcttcctcggtactagcaggcacatcagtatcggtccgttcgctgtcatctctctcatgatcggcggtgtcgctgtgagactcgtcccagacgacatcgtgatcccaggcggagtaaacgcaacaaatggcacagaggctcgcgacgctctgagagtgaaagttgccatgagcgtgactctcctgtcaggaattatccagttctgcctgggtgtgtgccgattcggtttcgtcgcaatttatctcacagagccactggtgcgcggtttcaccaccgctgcggcagtgcatgtgttcacatccatgctgaagtacctttttggggtgaagaccaagcgctacagtggtatattctcggtggtctacagtaccgtcgctgtactccaaaacgtcaagaatctgaacgtgtgcagtttgggggttggcctcatggttttcggcctccttctgggagggaaagagtttaacgagcggtttaaagagaagcttcccgctcccatcccactcgaattctttgccgtagtcatgggcaccggtatctccgctggctttaatctcaaggaatcatataatgtggatgtcgtgggaacgctacctctaggcctgctgcccccagctaatccagatacatcgctcttccacctggtctacgttgatgcaatcgctatagctatcgtggggttttcggtgaccatatcgatggctaaaacactcgctaataaacacggttatcaagtagacggcaatcaagaactaatagctctcggactgtgtaacagtatcggctcactgttccagactttctcaatcagctgcagtctctcccggtctctcgtgcaagagggaactgggggaaagactcaactggccggatgcctcgccagcctgatgatcctgttagtcatattagctacaggtttcctctttgagtcactccctcaggcagtcctgagcgcgatagtcattgtaaacttgaaaggaatgttcatgcagtttagcgacctcccatttttctggaggaccagcaaaattgagctgacgatttggttgacgacatttgtgagttcgctgttcctgggcctggattacggcctcatcactgccgttattatcgcgctcctaactgtgatttaccggactcagtcccccagctacaaggtgctgggaaaacttcctgaaactgacgtgtacatcgatatcgatgcttatgaggaggtgaaagaaattcccggaatcaagatctttcagattaatgcacctatatattacgcaaactcagacctctactcaaacgcccttaagaggaagacaggagtgaatcctgctgtgatcatgggggctcggaggaaggccatgcgcaaatacgcaaaagaagttgggaatgcaaacatggcgaacgcaacagtggtaaaagccgacgcagaagtggacggggaagatgcaacgaagccggaagaggaggacggtgaggtgaagtatccccctattgttatcaagagcacgttccccgaggaaatgcagcgtttcatgcctcccggtgacaatgtgcatacagtgatcctcgatttcacacaggtcaatttcatcgactctgtcggtgtgaagactctcgcagggatcgtgaaagagtacggcgacgtggggatctatgtgtacctggcgggatgctcggcgtttattcaaagatag

SEQ ID NO: 264492 - DNA, 2474 bp, Artificial Sequence
  derived and/or modified sequence
aggcagcggctgtggagcgcggcggggcggctccgcccagggcagcccgggctgggccaaggagcgagctctcccttctcctgctctcagcctcagtgatcaaggcttcagtgaactgcactggagctcccagcgggggatcttgtcccctgtcccgacttttgtgctgcacattggatctggtgacactcaggaaatgcttgtctccggctgttaaggaataatttcagagtactatggatcatgctgaagaaaatgaaatccttgcagcaacccagaggtactatgtggaaaggcctatctttagtcatccggtcctccaggaaagactacacacaaaggacaaggttcctgattccattgcggataagctgaaacaggcattcacatgtactcctaaaaaaataagaaatatcatttatatgttcctacccataactaaatggctgccagcatacaaattcaaggaatatgtgttgggtgacttggtctcaggcataagcacaggggtgcttcagcttcctcaaggcttagcctttgcaatgctggcagctgtgcctccaatatttggcctgtactcttcattttaccctgttatcatgtattgttttcttggaacctccagacacatatccataggtccttttgctgttattagcctgatgattggtggtgtagctgttcgattagtaccagatgatatagtcattccaggaggagtaaatgcaaccaatggcacagaggccagagatgccttgagagtgaaagtcgccatgtctgtgaccttactttcaggaatcattcagttttgcctaggtgtctgtaggtttggatttgtggccatatatctcacagagcctctggtccgtgggtttaccaccgcagcagctgtgcatgtcttcacctccatgttaaaatatctgtttggagttaaaacaaagcggtacagtggaatcttttccgtggtgtatagtacagttgctgtgttgcagaatgttaaaaacctcaacgtgtgttccctaggcgtcgggctgatggtttttggtttgctgttgggtggcaaggagtttaatgagagatttaaagagaaattgccggcgcctattcctttagagttctttgcggtcgtaatgggaactggcatttcagctgggtttaacttgaaagaatcatacaatgtggatgtcgttggaacacttcctctagggctgctacctccagccaatccggacaccagcctcttccaccttgtgtacgtagatgccattgccatagccatcgttggattttcagtgaccatctccatggccaagaccttagcaaataaacatggctaccaggttgacggcaatcaggagctcattgccctgggactgtgcaattccattggctcactcttccagaccttttcaatttcatgctccttgtctcgaagccttgttcaggagggaaccggtgggaagacacagcttgcaggttgtttggcctcattaatgattctgctggtcatattagcaactggattcctctttgaatcattgccccaggctgtgctgtcggccattgtgattgtcaacctgaagggaatgtttatgcagttctcagatctcccctttttctggagaaccagcaaaatagagctgaccatctggcttaccacttttgtgtcctccttgttcctgggattggactatggtttgatcactgctgtgatcattgctctgctgactgtgatttacagaacacagagtccaagctacaaagtccttggaaagcttcctgaaactgatgtgtatattgatatagacgcatatgaggaggtgaaagaaattcctggaataaaaatatttcaaataaatgcaccaatttactatgcaaatagcgacttgtatagcaatgcattaaaacgaaagactggagtgaacccagcagtcatcatgggagcaaggagaaaggccatgcggaagtacgctaaggaagtcggaaatgcaaatatggccaacgcaactgttgtcaaagcagatgcagaagtagatggagaggatgctaccaagcctgaagaagaggatggtgaagtaaaatatcccccaatagtgatcaaaagcacatttcctgaggaaatgcaaagatttatgcccccaggggataacgtccacactgtcattttggatttcactcaagtcaattttattgattctgttggagtgaaaactctggcagggattgtaaaagaatatggagacgtcggtatatatgtatacttagcaggatgcagtgctttcatacagagatgaccagaagatggagaccgtaggggaaatgccgtgtaatccaagcagttcaggctttggggccaggtggacagggtttgaatgccagctctggaatctgttagtggggtgacctcagccaagtcacttaacacttctgaactttgttttctcttttgtgaaataaagaaaaaatgaatctac

SEQ ID NO: 264493 - DNA, 2058 bp, Artificial Sequence
  derived and/or modified sequence
atggaccacgccgaggagaacgagatcctggccgccacccagagatactacgtggagagacccatcttcagccaccccgtgctgcaggagagactgcacaccaaggacaaggtgcccgacagcatcgccgacaagctgaagcaggccttcacctgcacccccaagaagatcagaaacatcatctacatgttcctgcccatcaccaagtggctgcccgcctacaagttcaaggagtacgtgctgggcgacctggtgagcggcatcagcaccggcgtgctgcagctgccccagggcctggccttcgccatgctggccgccgtgccccccatcttcggcctgtacagcagcttctaccccgtgatcatgtactgcttcctgggcaccagcagacacatcagcatcggccccttcgccgtgatcagcctgatgatcggcggcgtggccgtgagactggtgcccgacgacatcgtgatccccggcggcgtgaacgccaccaacggcaccgaggccagagacgccctgagagtgaaggtggccatgagcgtgaccctgctgagcggcatcatccagttctgcctgggcgtgtgcagattcggcttcgtggccatctacctgaccgagcccctggtgagaggcttcaccaccgccgccgccgtgcacgtgttcaccagcatgctgaagtacctgttcggcgtgaagaccaagagatacagcggcatcttcagcgtggtgtacagcaccgtggccgtgctgcagaacgtgaagaacctgaacgtgtgcagcctgggcgtgggcctgatggtgttcggcctgctgctgggcggcaaggagttcaacgagagattcaaggagaagctgcccgcccccatccccctggagttcttcgccgtggtgatgggcaccggcatcagcgccggcttcaacctgaaggagagctacaacgtggacgtggtgggcaccctgcccctgggcctgctgccccccgccaaccccgacaccagcctgttccacctggtgtacgtggacgccatcgccatcgccatcgtgggcttcagcgtgaccatcagcatggccaagaccctggccaacaagcacggctaccaggtggacggcaaccaggagctgatcgccctgggcctgtgcaacagcatcggcagcctgttccagaccttcagcatcagctgcagcctgagcagaagcctggtgcaggagggcaccggcggcaagacccagctggccggctgcctggccagcctgatgatcctgctggtgatcctggccaccggcttcctgttcgagagcctgccccaggccgtgctgagcgccatcgtgatcgtgaacctgaagggcatgttcatgcagttcagcgacctgcccttcttctggagaaccagcaagatcgagctgaccatctggctgaccaccttcgtgagcagcctgttcctgggcctggactacggcctgatcaccgccgtgatcatcgccctgctgaccgtgatctacagaacccagagccccagctacaaggtgctgggcaagctgcccgagaccgacgtgtacatcgacatcgacgcctacgaggaggtgaaggagatccccggcatcaagatcttccagatcaacgcccccatctactacgccaacagcgacctgtacagcaacgccctgaagagaaagaccggcgtgaaccccgccgtgatcatgggcgccagaagaaaggccatgagaaagtacgccaaggaggtgggcaacgccaacatggccaacgccaccgtggtgaaggccgacgccgaggtggacggcgaggacgccaccaagcccgaggaggaggacggcgaggtgaagtacccccccatcgtgatcaagagcaccttccccgaggagatgcagagattcatgccccccggcgacaacgtgcacaccgtgatcctggacttcacccaggtgaacttcatcgacagcgtgggcgtgaagaccctggccggcatcgtgaaggagtacggcgacgtgggcatctacgtgtacctggccggctgcagcgccttcatccagagatag

SEQ ID NO: 264494 - protein, 516 aa, Artificial Sequence
  derived and/or modified sequence
MDHAEENEILAATQRYYVERPIFSHPVLQERLHTKDKVPDSIADKLKQAFTCTPKKIRNIIYMFLPITKWLPAYKFKEYVLGDLVSGISTGVLQLPQGLAFAMLAAVPPIFGLYSSFYPVIMYCFLGTSRHISIGPFAVISLMIGGVAVRLVPDDIVIPGGVNATNGTEARDALRVKVAMSVTLLSGIIQFCLGVCRFGFVAIYLTEPLVRGFTTAAAVHVFTSMLKYLFGVKTKRYSGIFSVVYSTVAVLQNVKNLNVCSLGVGLMVFGLLLGGKEFNERFKEKLPAPIPLEFFAVVMGTGISAGFNLKESYNVDVVGTLPLGLLPPANPDTSLFHLVYVDAIAIAIVGFSVTISMAKTLANKHGYQVDGNQELIALGLCNSIGSLFQTFSISCSLSRSLVQEGTGGKTQLAGCLASLMILLVILATGFLFESLPQAVLSAIVIVNLKGMFMQFSDLPFFWRTSKIELTIWLTTFVSSLFLGLDYGLITAVIIALLTVIYRTQSFHTEMTRRWRP

SEQ ID NO: 264495 - DNA, 1551 bp, Artificial Sequence
  derived and/or modified sequence
atggaccatgcagaggagaacgagattctagccgcgacacagaggtattatgtggaaaggccaatattcagtcatcctgtgctgcaggaacgcctccatactaaggacaaagtccccgactccatcgccgataagctgaaacaggcttttacctgtacgcccaaaaagatccgcaatatcatttatatgtttctgccaatcacaaaatggctgcccgcctataagttcaaggaatatgtcctgggtgacctggtcagcgggatcagtaccggtgtcctgcaactgcctcaagggctggccttcgcaatgttggccgccgtcccgccaatcttcgggctctactctagcttctaccccgtgattatgtactgctttctcggcacctcaaggcacattagtatcggacctttcgccgtcatttctcttatgattggtggagtggctgtaaggctggtccccgatgacatcgttattcctggcggtgtcaatgcaaccaatgggaccgaggcacgcgatgctcttcgtgtcaaggtggcgatgtcggtcacactgctctcagggatcattcagttttgtctgggtgtctgccggtttggattcgtggcgatttatctgaccgaacccctcgtgcgcggcttcaccaccgccgcggcagtgcatgtattcacttctatgctgaaatacttattcggcgtcaaaacgaaaaggtacagcggaatcttttccgtggtgtatagtactgttgcagtgcttcagaacgtgaaaaatctgaatgtgtgttctctgggtgtggggttgatggtgtttggactccttctgggcgggaaggagttcaatgagcgcttcaaagagaagctgcctgcaccgattccccttgaattttttgcggttgtaatgggcacaggcatttcagcagggttcaatctcaaggagagctacaacgtcgacgtcgttggcaccctccctcttggcctcctccctcccgcaaaccctgatacttcactctttcacttggtctacgttgatgcaattgctattgcgatagtgggcttcagcgtgactattagtatggctaaaacattggcaaataagcatggatatcaggtggatgggaaccaagaattgatcgccctaggtctgtgtaactcaatcggcagcttattccaaacctttagcatatcctgtagcctcagtagaagcttggtccaggagggtacaggtggtaaaacgcagctggccgggtgtctagcttcactgatgatcctgcttgttatcctcgcaacaggctttctcttcgaatcgctcccacaggccgtgctgtccgcaattgttatcgtcaatctgaagggcatgttcatgcagtttagtgatctacccttcttctggcggacatccaagattgagctaactatttggctcactacttttgttagctccctctttctgggacttgactacggccttattactgccgtgattatcgccctgctgaccgtgatctaccgcacacaatcttttcacacggagatgactaggaggtggagaccctag

SEQ ID NO: 264496 - DNA, 1551 bp, Artificial Sequence
  derived and/or modified sequence
atggaccacgccgaggagaatgagatcctggccgccacccagcgctactacgtggagcggcccatcttcagccaccctgtgctgcaggagcggctgcacaccaaggacaaggtgcctgacagcattgctgacaagctgaagcaggccttcacctgcacccccaagaagatccggaacatcatctacatgttcctgcccatcaccaagtggctgcctgcctacaagttcaaggagtatgtgctgggggacctggtgtctggcatcagcactggagtgctgcagctgccccagggcctggcctttgccatgctggccgctgtgccccccatcttcggcctgtacagcagcttctaccctgtgatcatgtactgcttcctgggcaccagccgccacatcagcatcggcccctttgctgtgatcagcctgatgattggaggagtggccgtgcggctggtgcctgatgacatcgtcatccctggaggagtgaatgccaccaacggcacagaggccagagatgccctgcgggtgaaggtggccatgtctgtgaccctgctgagcggcatcatccagttctgcctgggcgtgtgccgcttcggctttgtggccatctacctgacagagcccctggtgcggggcttcaccacagctgctgctgtgcacgtgttcacctccatgctgaagtacctgtttggagtgaagaccaagcgctacagcggcatcttctctgtggtgtacagcacagtggccgtgctgcagaatgtgaagaacctgaatgtgtgcagcctgggcgtgggcctgatggtgtttggcctgctgctgggcggcaaggagttcaatgaacgcttcaaggagaagctgcctgcccccatccccctggagttctttgctgtggtgatgggcaccggcatctctgctggcttcaacctgaaggagagctacaacgtggatgtggtgggcaccctgcccctgggcctgctgcccccagccaacccagacaccagcctcttccacctggtgtatgtggatgccatcgccatcgccatcgtgggcttctctgtgaccatctccatggccaagaccctggccaacaagcacggctaccaggtggatggcaaccaggagctgattgccctgggcctgtgcaacagcatcggcagcctcttccagaccttcagcatcagctgcagcctgagccgcagcctggtgcaggagggcaccggcggcaagacccagctggccggctgcctggccagcctgatgatcctgctggtgatcctggccaccggcttcctgtttgagagcctgccccaggccgtgctgagcgccatcgtgattgtgaacctgaagggcatgttcatgcagttcagtgacctgcccttcttctggaggaccagcaagattgagctgaccatctggctgaccacctttgtgagcagcctcttcctgggcctggactatggcctcatcacagctgtgatcatcgccctgctgaccgtcatctaccgcacccagagcttccacacagagatgacccggcgctggaggccctag

SEQ ID NO: 264497 - DNA, 1551 bp, Artificial Sequence
  derived and/or modified sequence
atggaccacgccgaggagaacgagatcctggccgccacccagcggtattatgtggagcgccccattttctcccaccctgtgctacaagagcgactgcacacaaaggacaaggtcccagattccattgcagataaattaaaacaggcgttcacgtgtacacctaaaaaaattcgtaatattatttacatgtttttgccaatcactaaatggctgcccgcctataaatttaaagaatatgtactcggagatttggtgtcgggcatctcaactggcgtcctgcagttacctcagggtcttgcatttgcaatgttggctgcggttcctccgatttttggtctgtacagttccttttaccccgtgatcatgtactgcttcctcggcacttctagacacatctctatcggcccattcgctgttatttccctaatgataggtggagtggcagtgcggctggtccccgacgacatagtcataccaggcggcgtcaacgccacaaacggtaccgaggcaagagacgctctgagagtgaaggtggcaatgtccgtgacattgctgagtggcatcatccaattctgtcttggagtctgcagatttggctttgtagccatttatcttaccgagccgctggtgcgcggttttacaaccgcagccgcagtgcacgtgttcacttctatgctaaaatatctattcggagtcaagactaaacgatactccgggatcttctccgttgtttacagtactgttgcggtgctgcagaacgtgaagaatttgaatgtgtgcagtctcggcgtcggtctgatggtgttcggactgctgctgggtggcaaggagttcaacgagagatttaaagagaagctgccagcccccatacctttagaattcttcgctgtggttatggggaccggcatcagcgcgggttttaaccttaaggagtcttacaatgtagacgtggttggtaccctcccactgggattgctccctcccgccaatcctgacacttctttgtttcacctcgtgtacgtggacgcgattgcgatagccatcgtgggtttttccgtaactatcagcatggccaaaaccttggccaacaaacacggctatcaggtggacggaaaccaggaactaatcgcccttggtctgtgcaattctatcgggtcactgtttcagacattctccatctcatgttccctctctaggtccttggtgcaggagggtacgggcggaaaaacccaactggcggggtgcctggcatccctcatgattttacttgtgatcttggccacagggtttctcttcgagtcccttcctcaggcggtgctgtcagcaattgtgattgtgaatctgaagggcatgtttatgcagttttcagatctccccttcttttggaggacgagcaaaattgaattaacaatctggctgaccacattcgtttcttcactgttcttaggtctagactacggcctgataactgccgtgattatcgccctgctaactgtgatctaccgcactcagtcttttcacaccgaaatgactaggcgctggagaccctag

SEQ ID NO: 264498 - DNA, 1551 bp, Artificial Sequence
  derived and/or modified sequence
atggaccacgccgaggagaacgagatactggccgcaacacagcgctactacgtcgagagacctatcttttcgcatccggtgctccaggagcggctgcataccaaggataaggtccctgacagtattgccgacaagctgaagcaggcgtttacttgtactccaaagaagatccggaatattatctatatgtttctgccaatcacaaaatggctgcctgcttataagtttaaagagtacgttttgggcgacctggtgtccggcatctcaactggcgtgctgcagctcccacagggcttagcgttcgccatgttggccgcagtacctcctatatttggcctatactcttctttctaccctgtcataatgtactgtttccttgggacttcacggcatatttctatcggccctttcgccgtcattagtctgatgatcgggggagtagccgttagactggtacccgacgatattgtgattcctggcggagtgaatgccactaatggcacagaagccagagatgctctgagagtcaaagttgccatgagtgtgactctcctttcgggcattatccagttttgcttgggcgtgtgtagatttggcttcgtggccatctacttgaccgagccactggttcggggtttcaccactgccgcagctgtacatgtgtttacaagtatgctgaagtatctctttggagtgaaaaccaaaaggtattcagggatttttagcgtagtatactcaaccgtggctgtcctgcaaaacgtgaaaaatctcaacgtgtgtagcctaggcgttggcctgatggttttcggtttgcttctgggcggaaaagaattcaacgaaaggttcaaggaaaagctgcccgcaccaattcctcttgaattcttcgccgtggttatggggactgggatctcagctggctttaatctaaaggagtcttacaacgtcgacgtggtgggaaccctgccccttggtctcctgcctcccgcaaatcccgacaccagcctgttccatcttgtttatgtggacgctatcgcaatcgctatcgtgggtttcagcgttactatttccatggccaaaactctggcaaacaaacatggctaccaggtcgatgggaatcaagagctcatcgctctcgggctgtgtaacagtattggcagcctctttcagacattttccataagctgtagcctgtcaaggagcctagttcaggagggaaccgggggtaagacccagttagccggatgcctcgcatcacttatgatcttactcgtgattctggccactggctttttgttcgaaagtctaccacaggctgtgctctctgctatagtcatagtgaatctgaagggtatgttcatgcaatttagtgacctcccattcttctggcgaacctccaagatcgaattgaccatctggctgacaacgttcgtttcgagtctgttcttagggctcgattacggacttatcaccgctgtgattatcgcactgctcaccgtgatctaccggactcagagcttccataccgagatgacaagacgctggaggccgtag

SEQ ID NO: 264499 - DNA, 1947 bp, Artificial Sequence
  derived and/or modified sequence
aggcagcggctgtggagcgcggcggggcggctccgcccagggcagcccgggctgggccaaggagcgagctctcccttctcctgctctcagcctcagtgatcaaggcttcagtgaactgcactggagctcccagcgggggatcttgtcccctgtcccgacttttgtgctgcacattggatctggtgacactcaggaaatgcttgtctccggctgttaaggaataatttcagagtactatggatcatgctgaagaaaatgaaatccttgcagcaacccagaggtactatgtggaaaggcctatctttagtcatccggtcctccaggaaagactacacacaaaggacaaggttcctgattccattgcggataagctgaaacaggcattcacatgtactcctaaaaaaataagaaatatcatttatatgttcctacccataactaaatggctgccagcatacaaattcaaggaatatgtgttgggtgacttggtctcaggcataagcacaggggtgcttcagcttcctcaaggcttagcctttgcaatgctggcagctgtgcctccaatatttggcctgtactcttcattttaccctgttatcatgtattgttttcttggaacctccagacacatatccataggtccttttgctgttattagcctgatgattggtggtgtagctgttcgattagtaccagatgatatagtcattccaggaggagtaaatgcaaccaatggcacagaggccagagatgccttgagagtgaaagtcgccatgtctgtgaccttactttcaggaatcattcagttttgcctaggtgtctgtaggtttggatttgtggccatatatctcacagagcctctggtccgtgggtttaccaccgcagcagctgtgcatgtcttcacctccatgttaaaatatctgtttggagttaaaacaaagcggtacagtggaatcttttccgtggtgtatagtacagttgctgtgttgcagaatgttaaaaacctcaacgtgtgttccctaggcgtcgggctgatggtttttggtttgctgttgggtggcaaggagtttaatgagagatttaaagagaaattgccggcgcctattcctttagagttctttgcggtcgtaatgggaactggcatttcagctgggtttaacttgaaagaatcatacaatgtggatgtcgttggaacacttcctctagggctgctacctccagccaatccggacaccagcctcttccaccttgtgtacgtagatgccattgccatagccatcgttggattttcagtgaccatctccatggccaagaccttagcaaataaacatggctaccaggttgacggcaatcaggagctcattgccctgggactgtgcaattccattggctcactcttccagaccttttcaatttcatgctccttgtctcgaagccttgttcaggagggaaccggtgggaagacacagcttgcaggttgtttggcctcattaatgattctgctggtcatattagcaactggattcctctttgaatcattgccccaggctgtgctgtcggccattgtgattgtcaacctgaagggaatgtttatgcagttctcagatctcccctttttctggagaaccagcaaaatagagctgaccatctggcttaccacttttgtgtcctccttgttcctgggattggactatggtttgatcactgctgtgatcattgctctgctgactgtgatttacagaacacagagctttcatacagagatgaccagaagatggagaccgtaggggaaatgccgtgtaatccaagcagttcaggctttggggccaggtggacagggtttgaatgccagctctggaatctgttagtggggtgacctcagccaagtcacttaacacttctgaactttgttttctcttttgtgaaataaagaaaaaatgaatctac

SEQ ID NO: 264500 - DNA, 1551 bp, Artificial Sequence
  derived and/or modified sequence
atggaccacgccgaggagaacgagatcctggccgccacccagagatactacgtggagagacccatcttcagccaccccgtgctgcaggagagactgcacaccaaggacaaggtgcccgacagcatcgccgacaagctgaagcaggccttcacctgcacccccaagaagatcagaaacatcatctacatgttcctgcccatcaccaagtggctgcccgcctacaagttcaaggagtacgtgctgggcgacctggtgagcggcatcagcaccggcgtgctgcagctgccccagggcctggccttcgccatgctggccgccgtgccccccatcttcggcctgtacagcagcttctaccccgtgatcatgtactgcttcctgggcaccagcagacacatcagcatcggccccttcgccgtgatcagcctgatgatcggcggcgtggccgtgagactggtgcccgacgacatcgtgatccccggcggcgtgaacgccaccaacggcaccgaggccagagacgccctgagagtgaaggtggccatgagcgtgaccctgctgagcggcatcatccagttctgcctgggcgtgtgcagattcggcttcgtggccatctacctgaccgagcccctggtgagaggcttcaccaccgccgccgccgtgcacgtgttcaccagcatgctgaagtacctgttcggcgtgaagaccaagagatacagcggcatcttcagcgtggtgtacagcaccgtggccgtgctgcagaacgtgaagaacctgaacgtgtgcagcctgggcgtgggcctgatggtgttcggcctgctgctgggcggcaaggagttcaacgagagattcaaggagaagctgcccgcccccatccccctggagttcttcgccgtggtgatgggcaccggcatcagcgccggcttcaacctgaaggagagctacaacgtggacgtggtgggcaccctgcccctgggcctgctgccccccgccaaccccgacaccagcctgttccacctggtgtacgtggacgccatcgccatcgccatcgtgggcttcagcgtgaccatcagcatggccaagaccctggccaacaagcacggctaccaggtggacggcaaccaggagctgatcgccctgggcctgtgcaacagcatcggcagcctgttccagaccttcagcatcagctgcagcctgagcagaagcctggtgcaggagggcaccggcggcaagacccagctggccggctgcctggccagcctgatgatcctgctggtgatcctggccaccggcttcctgttcgagagcctgccccaggccgtgctgagcgccatcgtgatcgtgaacctgaagggcatgttcatgcagttcagcgacctgcccttcttctggagaaccagcaagatcgagctgaccatctggctgaccaccttcgtgagcagcctgttcctgggcctggactacggcctgatcaccgccgtgatcatcgccctgctgaccgtgatctacagaacccagagcttccacaccgagatgaccagaagatggagaccctag

SEQ ID NO: 264501 - protein, 335 aa, Artificial Sequence
  derived and/or modified sequence
MDHAEENEILAATQRYYVERPIFSHPVLQERLHTKDKVPDSIADKLKQAFTCTPKKIRNIIYMFLPITKWLPAYKFKEYVLGDLVSGISTGVLQLPQGLAFAMLAAVPPIFGLYSSFYPVIMYCFLGTSRHISIGPFAVISLMIGGVAVRLVPDDIVIPGGVNATNGTEARDALRVKVAMSVTLLSGIIQFCLGVCRFGFVAIYLTEPLVRGFTTAAAVHVFTSMLKYLFGVKTKRYSGIFSVVYSTVAVLQNVKNLNVCSLGVGLMVFGLLLGGKEFNERFKEKLPAPIPLEFFAVVMGTGISAGFNLKESYNVDVVGTLPLGFHTEMTRRWRP

SEQ ID NO: 264502 - DNA, 1008 bp, Artificial Sequence
  derived and/or modified sequence
atggatcatgcagaggagaacgagatactggcagcgactcagcgctattatgttgagcgtccaattttttcccaccctgtcctgcaggaacggctgcacactaaggataaggttcctgactctatcgcggacaagctgaagcaagcatttacttgcacccccaagaaaattcgtaatatcatttacatgttcctgcccatcaccaaatggctacccgcctacaagtttaaagaatatgttctgggcgatttagtctctgggatttccaccggagtgctgcagctgccacaggggctggccttcgctatgctggccgccgtgccgccaatcttcggcctatactcctcattttacccagtcatcatgtactgtttccttggtacgtcacggcatattagcattgggccattcgcggtaatctccttgatgatcggaggagttgcagtccgactggtccctgatgatatcgtcatacccgggggagttaacgcaaccaatggcaccgaagcccgggatgcactgagggtcaaggtcgctatgagcgttaccctcctaagcgggataattcagttctgtctgggcgtgtgtagatttggctttgtcgctatctatcttaccgagccattggtgcggggctttaccaccgcagccgccgtccatgtgtttacatcaatgctgaagtacctgttcggagttaagacaaagagatactccggaattttttcggtggtgtacagcactgtggctgttctgcagaatgttaaaaacctgaatgtctgctcattgggggtgggtctcatggtctttggcctgttgctcggaggcaaagaattcaacgagcgattcaaggaaaagctgcccgcaccaatccccctggagtttttcgcagtcgtgatgggcactggaattagcgccggattcaacctaaaggagtcttacaacgtggacgtagtggggacactgcccctaggcttccatactgaaatgacccgcaggtggagaccctag

SEQ ID NO: 264503 - DNA, 1008 bp, Artificial Sequence
  derived and/or modified sequence
atggaccacgccgaggagaatgagatcctggccgccacccagcgctactacgtggagcggcccatcttcagccaccctgtgctgcaggagcggctgcacaccaaggacaaggtgcctgacagcattgctgacaagctgaagcaggccttcacctgcacccccaagaagatccggaacatcatctacatgttcctgcccatcaccaagtggctgcctgcctacaagttcaaggagtatgtgctgggggacctggtgtctggcatcagcactggagtgctgcagctgccccagggcctggcctttgccatgctggccgctgtgccccccatcttcggcctgtacagcagcttctaccctgtgatcatgtactgcttcctgggcaccagccgccacatcagcatcggcccctttgctgtgatcagcctgatgattggaggagtggccgtgcggctggtgcctgatgacatcgtcatccctggaggagtgaatgccaccaacggcacagaggccagagatgccctgcgggtgaaggtggccatgtctgtgaccctgctgagcggcatcatccagttctgcctgggcgtgtgccgcttcggctttgtggccatctacctgacagagcccctggtgcggggcttcaccacagctgctgctgtgcacgtgttcacctccatgctgaagtacctgtttggagtgaagaccaagcgctacagcggcatcttctctgtggtgtacagcacagtggccgtgctgcagaatgtgaagaacctgaatgtgtgcagcctgggcgtgggcctgatggtgtttggcctgctgctgggcggcaaggagttcaatgaacgcttcaaggagaagctgcctgcccccatccccctggagttctttgctgtggtgatgggcaccggcatctctgctggcttcaacctgaaggagagctacaacgtggatgtggtgggcaccctgcccctgggcttccacacagagatgacccggcgctggaggccctag

SEQ ID NO: 264504 - DNA, 1008 bp, Artificial Sequence
  derived and/or modified sequence
atggaccacgccgaggagaacgagatcctggccgccacccagcggtattacgtggaacgacccatctttagtcacccagtgctgcaagagagactgcataccaaagataaagtgcccgattctatagccgacaaacttaagcaggccttcacatgcacccccaagaagatccgaaatatcatctatatgtttctgccaatcaccaagtggctccccgcatacaaatttaaagagtacgtgctgggcgatctggtctctgggatatcaaccggcgttcttcagttaccacaggggctggcattcgccatgctcgctgctgttccacctattttcgggctctattcatctttctacccggtgataatgtattgctttctcggcacctctaggcatataagcataggacctttcgccgtgataagcctcatgattggcggagtcgctgtgagactggtgccagatgacattgtgatcccagggggagtaaacgcaaccaacggcacagaagcgcgcgatgccctgcgagtcaaggttgccatgagcgtgactctgctaagtggaatcattcagttttgcctgggcgtgtgtcgttttggcttcgtggccatttacctcactgagcctctcgtcagaggcttcactaccgctgcagcggtgcatgtatttacatctatgctgaagtacctatttggagtcaagaccaagagatattcgggaatcttcagcgtcgtgtacagtactgtagccgtcctgcagaatgtgaagaacctgaatgtttgctcccttggggtgggcttgatggtctttggactgcttctggggggcaaggaatttaacgagaggtttaaagaaaagctgccagcccccattccacttgagttcttcgcagtggtgatgggcacgggcatctccgcagggtttaacctcaaagaatcttataacgtggacgtagtgggtactctacctctgggtttccacactgagatgacaaggagatggcgcccttag

SEQ ID NO: 264505 - DNA, 1008 bp, Artificial Sequence
  derived and/or modified sequence
atggaccacgcggaggagaatgaaattttggctgccacccagcgttattatgtcgaacggccaatcttctctcaccccgtcctgcaggagaggctgcacaccaaagataaggtgccagactctatagctgacaagttaaagcaggcttttacgtgcaccccaaagaaaatccgaaacattatctacatgtttttgccaattacaaagtggctacctgcatacaagtttaaggaatatgtcctgggagacctggtgtctggaataagtactggggtgcttcaacttcctcagggcctggcgtttgccatgctcgctgctgtgcctcctatctttggactgtactcgtctttttatccagtaattatgtactgctttctggggaccagcagacatatctccataggcccttttgccgtcatatccttaatgatcggtggtgtcgcggtgagacttgtcccagacgacattgtgattcctggtggagtcaatgcaacgaatggcactgaagccagagatgcactgcgcgtaaaggtggcaatgtccgtgacccttttatctggaattatccagttctgcctcggggtttgtaggtttggtttcgtcgccatatatttgacagaaccactcgtgcggggatttacgaccgcagcagccgtgcacgtcttcacgtccatgcttaaatacctttttggggtgaaaactaaacggtattcaggcatcttcagcgtggtgtattctacggtggcagtgctccagaatgtcaagaacctgaacgtctgttctttgggcgtcggtctgatggtgtttgggctgctgctcggcggaaaggagtttaatgagcgctttaaggaaaagctcccagccccaatccctctggagttctttgccgtggtgatggggaccgggatcagcgctgggttcaacctgaaggaatcctacaacgtggacgtcgttgggactctgccgctggggttccacacagagatgactaggcggtggcgcccatag

SEQ ID NO: 264506 - DNA, 1404 bp, Artificial Sequence
  derived and/or modified sequence
aggcagcggctgtggagcgcggcggggcggctccgcccagggcagcccgggctgggccaaggagcgagctctcccttctcctgctctcagcctcagtgatcaaggcttcagtgaactgcactggagctcccagcgggggatcttgtcccctgtcccgacttttgtgctgcacattggatctggtgacactcaggaaatgcttgtctccggctgttaaggaataatttcagagtactatggatcatgctgaagaaaatgaaatccttgcagcaacccagaggtactatgtggaaaggcctatctttagtcatccggtcctccaggaaagactacacacaaaggacaaggttcctgattccattgcggataagctgaaacaggcattcacatgtactcctaaaaaaataagaaatatcatttatatgttcctacccataactaaatggctgccagcatacaaattcaaggaatatgtgttgggtgacttggtctcaggcataagcacaggggtgcttcagcttcctcaaggcttagcctttgcaatgctggcagctgtgcctccaatatttggcctgtactcttcattttaccctgttatcatgtattgttttcttggaacctccagacacatatccataggtccttttgctgttattagcctgatgattggtggtgtagctgttcgattagtaccagatgatatagtcattccaggaggagtaaatgcaaccaatggcacagaggccagagatgccttgagagtgaaagtcgccatgtctgtgaccttactttcaggaatcattcagttttgcctaggtgtctgtaggtttggatttgtggccatatatctcacagagcctctggtccgtgggtttaccaccgcagcagctgtgcatgtcttcacctccatgttaaaatatctgtttggagttaaaacaaagcggtacagtggaatcttttccgtggtgtatagtacagttgctgtgttgcagaatgttaaaaacctcaacgtgtgttccctaggcgtcgggctgatggtttttggtttgctgttgggtggcaaggagtttaatgagagatttaaagagaaattgccggcgcctattcctttagagttctttgcggtcgtaatgggaactggcatttcagctgggtttaacttgaaagaatcatacaatgtggatgtcgttggaacacttcctctaggctttcatacagagatgaccagaagatggagaccgtaggggaaatgccgtgtaatccaagcagttcaggctttggggccaggtggacagggtttgaatgccagctctggaatctgttagtggggtgacctcagccaagtcacttaacacttctgaactttgttttctcttttgtgaaataaagaaaaaatgaatctac

SEQ ID NO: 264507 - DNA, 1008 bp, Artificial Sequence
  derived and/or modified sequence
atggaccacgccgaggagaacgagatcctggccgccacccagagatactacgtggagagacccatcttcagccaccccgtgctgcaggagagactgcacaccaaggacaaggtgcccgacagcatcgccgacaagctgaagcaggccttcacctgcacccccaagaagatcagaaacatcatctacatgttcctgcccatcaccaagtggctgcccgcctacaagttcaaggagtacgtgctgggcgacctggtgagcggcatcagcaccggcgtgctgcagctgccccagggcctggccttcgccatgctggccgccgtgccccccatcttcggcctgtacagcagcttctaccccgtgatcatgtactgcttcctgggcaccagcagacacatcagcatcggccccttcgccgtgatcagcctgatgatcggcggcgtggccgtgagactggtgcccgacgacatcgtgatccccggcggcgtgaacgccaccaacggcaccgaggccagagacgccctgagagtgaaggtggccatgagcgtgaccctgctgagcggcatcatccagttctgcctgggcgtgtgcagattcggcttcgtggccatctacctgaccgagcccctggtgagaggcttcaccaccgccgccgccgtgcacgtgttcaccagcatgctgaagtacctgttcggcgtgaagaccaagagatacagcggcatcttcagcgtggtgtacagcaccgtggccgtgctgcagaacgtgaagaacctgaacgtgtgcagcctgggcgtgggcctgatggtgttcggcctgctgctgggcggcaaggagttcaacgagagattcaaggagaagctgcccgcccccatccccctggagttcttcgccgtggtgatgggcaccggcatcagcgccggcttcaacctgaaggagagctacaacgtggacgtggtgggcaccctgcccctgggcttccacaccgagatgaccagaagatggagaccctag

SEQ ID NO: 264508 - protein, 889 aa, Artificial Sequence
  derived and/or modified sequence
MADRGCPLEAAPLPAEVRESLAELELELSEGDITQKGYEKKRAKLLARYIPLIQGIDPSLQAENRIPGPSQTTAAAPKQQKSRPTASRDERFRSDVHTEAVQAALAKYKERKMPMPSKRRSVLVHSSVETYTPPDTSSASEDEGSLRRPGRLTSTPLQSHSSVEPWLDRVIQGSSTSSSASSTSSHPGGRPTTAPSAAATPGAAATTALAGLEAHTHIDLHSAPPDVTTGLVEHSYFERPQVASVRSVPRGCSGSMLETADGVPVNSRVSSKIQQLLNTLKRPKRPPLKEFFVDDFEELLEVQQPDPNQPKPEGSETSVLRGEPLTAGVPRPPSLLATLQRWGTTQPKSPCLTALDTTGKAVYTLTYGKLWSRSLKLAYTLLNKLTSKNEPLLKPGDRVALVFPNSDPVMFMVAFYGCLLAELVPVPIEVPLTRKDAGSQQVGFLLGSCGVFLALTTDACQKGLPKAQTGEVAAFKGWPPLSWLVIDGKHLAKPPKDWHPLAQDTGTGTAYIEYKTSKEGSTVGVTVSHASLLAQCRALTQACGYSEAETLTNVLDFKRDAGLWHGVLTSVMNRMHVVSVPYALMKANPLSWIQKVCFYKARAALVKSRDMHWSLLAQRGQRDVSLSSLRMLIVADGANPWSISSCDAFLNVFQSRGLRPEVICPCASSPEALTVAIRRPPDLGGPPPRKAVLSMNGLSYGVIRVDTEEKLSVLTVQDVGQVMPGANVCVVKLEGTPYLCKTDEVGEICVSSSATGTAYYGLLGITKNVFEAVPVTTGGAPIFDRPFTRTGLLGFIGPDNLVFIVGKLDGLMVTGVRRHNADDVVATALAVEPMKFVYRGRIAVFSVTVLHDDRIVLVAEQRPDASEEDSFQWMSRVLQVGAPARPMVR

SEQ ID NO: 264509 - DNA, 2670 bp, Artificial Sequence
  derived and/or modified sequence
atggcagacaggggctgcccactggaagccgctcctttgccggccgaggttagggagtctctcgccgagctggagctggaactttcagaaggcgatattacccagaagggttatgagaagaaacgtgctaagctacttgcccgttatattcccctaatccagggcatcgacccgtctctgcaggccgagaatcgcatccctggcccatctcaaacaaccgccgctgcaccaaaacagcagaagagccgaccgacagcatctagagatgagcgttttagatcggatgtgcacactgaggcagttcaagccgccctagccaagtacaaagagcggaaaatgcccatgccaagcaagcgacggtcagttcttgtgcacagttcggtggagacatatacacctcccgacacatcttccgcctccgaagatgagggaagcctccggcgcccagggagattgaccagtacgccgctgcaatctcacagttcagtggagccttggctcgaccgtgtgatccagggatccagtacatcatcatccgcctcctctacttcaagccacccagggggaaggccaacaactgctcctagtgccgctgccacccctggtgccgccgcaactactgcattggctggcctagaggcacatacacacatcgatctgcatagtgcgcctcctgacgttactacagggctcgtggagcatagctatttcgagcgcccacaggtagcgtccgttaggtccgtaccgcggggctgttcagggagcatgttggaaactgcagacggagttccagtgaattctcgtgtctcttccaagattcagcagctactgaatacccttaagcgtccaaaacggcccccgctgaaagagtttttcgtggacgactttgaggaattgctcgaagttcagcagcctgatccaaaccagcccaaacctgagggttccgagacatctgtgctaagaggggaacctctgaccgccggtgtgccccggccccccagtctgctggctaccctacagcgctggggcacaacccagccgaagagcccatgccttacagctctggacacaacgggaaaggcagtgtatactttaacttatggtaagctttggtctagatcccttaaattagcttacacactcctcaataagctgacgtctaagaacgaacccttattaaagccgggagaccgggttgcactggtctttcccaatagtgatccagtgatgtttatggtggcattttatggctgcctcttggccgaattagtacccgtccctattgaggttccgctaacacggaaggacgctggttcacagcaagttggatttctgctcggcagctgcggggtctttctggcactgacgactgacgcatgtcagaaaggtttgccaaaagctcagacaggagaagtcgctgctttcaaagggtggcctccactgtcctggctggtaattgacggaaagcacctcgccaaaccgccaaaagactggcaccccctggctcaagataccgggaccggcaccgcgtatattgaatacaaaacctccaaggagggctccaccgtgggcgtgacggtctcacacgcttctctcctcgcgcagtgccgagccctcacacaagcctgtggttacagcgaggcagaaacccttactaatgtcctggatttcaaaagggacgccgggttatggcatggggttctgaccagcgtcatgaataggatgcatgtcgtgtctgtgccgtatgccctgatgaaggcaaatcccctgagctggatccaaaaagtttgcttctacaaggctagggcagctctggtcaaatctagagacatgcattggtccctgctcgctcagcgcggacaaagggatgtgagcctgtctagtcttaggatgctcatcgtggctgatggcgcaaatccgtggtcaatcagtagttgcgatgcatttttgaacgtgtttcagagccgaggcctgagacccgaggtcatctgcccatgtgcctcatcccctgaagcgctgaccgtcgccatcaggcgaccaccggaccttggagggccgccaccgagaaaagccgtgttgtcaatgaacggacttagctatggggtcatacgcgtggacacagaagagaagctgtccgtgctgacggtccaggacgtagggcaggtcatgcctggtgctaatgtctgtgtggtcaaacttgagggcacaccatacttgtgcaagaccgatgaggtgggtgaaatttgcgtctccagctccgccacgggcactgcttactacggtctgttgggaataacaaaaaacgttttcgaagctgtgccagtaactactggtggcgcccccatctttgaccggcccttcacaagaacaggattgctcgggttcattggtcctgacaaccttgtgttcattgtcggtaagttagatggactcatggtcaccggcgtgcggcggcacaacgccgacgacgtagtggctactgcccttgctgtggaaccaatgaaatttgtatacagaggcagaattgcagtgttctctgtgaccgtgcttcacgacgatcggatcgtgttggtggccgagcaacgtccggacgctagcgaagaagactccttccagtggatgagtcgcgtgctacaggtcggtgcccctgcaagaccaatggtgagatag

SEQ ID NO: 264510 - DNA, 2670 bp, Artificial Sequence
  derived and/or modified sequence
atggctgaccggggctgccccctggaggccgcccccctgcctgctgaggtgcgggagagcctggccgagctggagctggagctgtctgagggggacatcacccagaagggctatgagaagaagagggccaagctgctggcccgctacatccccctcatccagggcatcgaccccagcctgcaggctgaaaatcgcatccctggccccagccagaccacagctgctgcccccaagcagcagaagagccggcccacagccagcagagatgagcgcttcagaagtgatgtgcacacagaggccgtgcaggccgccctggccaagtacaaggagaggaagatgcccatgcccagcaagagaagatctgtgctggtgcacagctctgtggagacctacaccccaccagacaccagcagcgcctctgaagatgagggcagcctgcggcggcccggccgcctgaccagcacccccctgcagagccacagctctgtggagccctggctggacagagtcatccagggcagcagcaccagcagcagcgccagcagcaccagcagccaccctgggggccggcccaccacagcccccagcgctgctgccaccccaggagctgctgccaccacagccctggccggcctggaggcccacacccacatcgacctgcacagcgcccccccagatgtgaccaccggcctggtggagcacagctactttgagcggccccaggtggcctctgtgcgctctgtgccccggggctgcagcggctccatgctggagacagcagatggagtgcctgtgaacagccgggtgagcagcaagatccagcagctgctgaacaccctgaagaggcccaagaggcctcccctgaaggagttctttgtggatgactttgaggagctgctggaggtgcagcagcctgaccccaaccagcccaagccagagggcagcgagacctctgtgctgcggggggagcccctgacagctggggtgccccggccccccagcctgctggccaccctgcagcgctggggcaccacccagcccaagagcccctgcctgacagccctggacaccaccgggaaggctgtgtacaccctgacctacggcaagctgtggagccgcagcctgaagctggcctacaccctgctgaacaagctgaccagcaagaatgagcccctgctgaagccaggggacagagtggccctggtgttccccaacagcgaccctgtgatgttcatggtggccttctacggctgcctgctggccgagctggtgcctgtgcccatcgaggtgcccctgaccaggaaggatgctggcagccagcaggtgggcttcctgctgggcagctgtggggtcttcctggccctgaccacagatgcctgccagaagggcctgcccaaggcccagacaggagaggtggccgccttcaagggctggccacccctgtcctggctggtgattgatggcaagcacctggccaagccacccaaggactggcaccccctggcccaggacacaggaactggaacagcctacatcgagtacaagaccagcaaggagggcagcacagtgggcgtgacagtgtcccatgccagcctgctggcccagtgccgggccctgacccaggcctgtggctacagcgaggccgagaccctgaccaacgtgctggacttcaagagagatgctggcctgtggcatggagtgctgacctctgtgatgaacaggatgcacgtggtgtctgtgccctatgccctgatgaaggccaaccccctgtcctggatccagaaggtgtgcttctacaaggcccgggccgccctggtgaagagccgggacatgcactggagcctgctggcccagaggggccagagagatgtgtccctgagcagcctgaggatgctgattgtggctgatggagccaacccctggagcatcagcagctgtgatgccttcctgaatgtgttccagagccggggcctgcggcctgaggtgatctgcccctgtgccagcagccctgaggccctgactgtggccatccggcggcccccagacctgggcggccccccacccaggaaggctgtgctgtccatgaatggcctgtcctatggagtcatccgggtggacacagaggagaagctgtctgtgctgactgtgcaggatgtgggccaggtgatgcctggggccaacgtgtgtgtggtgaagctggagggcaccccctacctgtgcaagacagatgaggtgggggagatctgtgtgagcagcagcgccactggaacagcctactacggcctgctgggcatcaccaagaatgtgtttgaggccgtgcctgtgaccactggaggagcccccatctttgaccggcccttcaccaggacaggcctgctgggcttcatcggccctgacaacctggtgttcatcgtgggcaagctggatggcctgatggtgactggagtgagaagacacaatgctgatgatgtggtggccacagccctggccgtggagcccatgaagtttgtgtaccggggcagaattgctgtgttttctgtgacagtgctgcatgatgacagaattgtgctggtggccgagcagaggccagatgccagcgaggaggacagcttccagtggatgagccgggtgctgcaggtgggcgccccagcccggcccatggtgaggtag

SEQ ID NO: 264511 - DNA, 2670 bp, Artificial Sequence
  derived and/or modified sequence
atggccgaccggggctgccccctggaggccgcccccctgcccgccgaagtccgtgagtccctcgcggaactcgaattagaactgtcggagggtgatataacccaaaagggttacgaaaagaagcgagccaaactgcttgcacgctacattcctctaatacaggggatcgatccctccttgcaagcagagaacaggatccccggccctagtcagactacagcagcggcccccaaacagcagaagagccgcccgaccgcttccagagacgagcgattccggtccgacgtccatactgaggcggtacaggctgcactcgcaaagtacaaggagcgcaaaatgcccatgccttcaaaacggcggagtgtgctagtgcattcgtccgtagaaacttatacccctcccgatacatcatcggctagcgaagacgaagggtctttacgaagacccggacgactgacttcaacccccttgcagagtcatagtagtgtcgaaccatggttggatagggttatccagggatccagtactagctcatcagcaagctcaacatcttcccaccccggagggcggcccacaactgcgccttctgccgctgcaacccccggcgctgctgctacaactgctctggccgggttggaggcacatacacatatcgatctccactcggctcccccggatgttactactgggctggtggagcactcctatttcgagcggccacaggtcgcttccgtgcgcagtgtaccccgaggatgcagtggcagcatgctggagacagccgatggcgtgccagtgaattctagggtttcttcgaagatacaacagcttctgaacactctgaagcgccctaagcgaccaccgcttaaggaattttttgtcgacgactttgaagaacttctggaggtccaacagcctgatcctaaccagccaaaaccagagggaagtgaaaccagcgtgctgagaggagaacctctgacagctggcgtccctagaccgccctccctgctcgctacgttgcagagatgggggactacacaacctaaaagtccctgcctgaccgccttagacaccaccggaaaggccgtctacacgctgacttacggtaagttgtggagtcgcagcctgaaattggcctacacgttgcttaataaactaacttccaagaatgaaccactgttgaaacccggcgatcgggtagccctcgtttttcctaattcggaccctgtcatgtttatggtggctttctatggatgtcttctcgcagaactggtcccggtccctatagaggtgccactcacccggaaggatgcaggctcccaacaggttggattcttactgggctcttgtggggtgtttctcgctctgaccaccgatgcgtgccagaagggcctgcccaaggcacagacgggtgaggtggccgccttcaaaggctggccaccattgtcctggctggtgatcgacggcaagcacctggcaaaaccacccaaagactggcaccccctggcacaggataccggcacaggaactgcctatattgagtataaaactagtaaagaaggatccactgtaggcgtaaccgtgtcacatgcttccctcttggcccagtgtcgtgcgcttacccaagcgtgtggatacagtgaggctgagaccttgactaacgtgctcgactttaaacgcgatgccggactctggcatggcgtcctgaccagcgttatgaacaggatgcacgtcgtgtcagtgccatacgccctgatgaaggccaatcctttgtcctggatacaaaaagtatgcttctacaaagcaagagctgccttagtgaagtctcgagatatgcactggtccctcctcgcacagcgcggacagcgcgacgttagtctgagttccttaaggatgctgatagtggctgatggcgctaacccctggagtatttcttcttgcgacgcctttctcaatgtgttccagagcaggggcctgagacctgaagtcatctgtccatgcgctagtagccccgaggctctgacagtagcaattcgacgaccccctgatctggggggacccccgcctcgcaaggccgtactgtcaatgaatggcttgtcatacggtgttatcagggttgacaccgaagaaaagttgagtgtccttacagtgcaggatgtcggccaggtgatgcccggagctaatgtgtgtgtggtcaagctggaggggaccccctatctgtgtaagactgatgaggtcggagagatatgtgtctcgtccagcgctaccggaactgcttactatggcctattgggtataactaaaaacgtgtttgaagcagtgcccgtgactaccggaggggctcctatcttcgaccgcccctttacacggaccgggctgcttggatttataggaccagacaacctcgtgttcatcgtgggcaagcttgatggcctgatggttacgggcgtgagacggcacaacgctgacgatgtagtggcgaccgcacttgctgtggagcctatgaagttcgtgtaccgcggccgaattgcggtgtttagtgtgacagtcctgcacgacgatagaatcgttctggtggctgagcagcggccggacgcctccgaggaagactcatttcagtggatgtctcgcgtactccaggtgggagcacccgcccgcccgatggtacggtag

SEQ ID NO: 264512 - DNA, 2670 bp, Artificial Sequence
  derived and/or modified sequence
atggccgaccgcggatgccccctggaagctgccccactgcccgctgaagttcgagagtccttggccgaactggaactcgagctctcagaaggggacatcactcagaaggggtatgagaagaaacgcgcaaagttgttagctagatatattccattaatccagggtattgacccttctttgcaagcagagaatcggatccctggcccaagtcagaccaccgcagccgctcctaaacagcagaagtctcggccaaccgccagtcgtgatgaaaggtttcggtctgacgtgcacaccgaagctgtgcaggccgctctggcaaaatacaaggagcgtaaaatgcccatgcccagcaagcgcaggagtgtgttggtccattcctccgtggagacctacactcctcctgacacttcatcagcgagcgaggatgaaggcagtctgaggagaccaggtcgccttacaagcacccccctacagtcgcactccagcgtggagccctggcttgatcgcgtaatccaaggctcatcaacaagtagttctgcatcttccactagctcccacccgggtgggagacctaccacagcgcctagcgccgctgcgacacctggcgcagctgccacaacggcactcgcaggtctggaagcacatacacatattgacttgcacagcgctcctccagacgtgactaccgggctcgtcgagcactcctattttgaaagaccccaggttgcttctgtccgcagcgtccctagaggctgttctgggtcaatgttggagaccgcggacggagtcccagttaacagtcgagtaagttctaaaatccagcaactgctgaataccctgaagcgccctaagaggccaccattgaaggagttctttgtggatgacttcgaggaacttctggaggtccaacaacccgaccctaaccagcccaagccggaagggtccgaaacatccgtgctgcgcggagagccactgacagcgggtgtgcccaggcccccttccctcctcgcaactctgcagcggtgggggaccacacaaccaaagagtccctgcctgacagcactggataccacaggaaaggctgtttacaccctcacttacgggaagctatggtcccgatcattaaagctggcttacactttgctgaataagttgaccagcaagaacgagcctcttctaaaaccaggcgacagagtggcccttgtcttccctaacagcgaccctgtgatgttcatggttgctttctacgggtgtctcctggccgaacttgtccccgtccctatcgaggtccccttgacgcgcaaagacgctgggagccagcaggtgggctttctgctcgggagctgcggggttttcttggccctgactacggacgcctgccagaagggcctgcctaaggcgcagacaggggaagttgctgcatttaagggctggccacctttatcatggctggtgattgacggcaagcatcttgccaagccccctaaggactggcaccccttggcgcaggataccggcactggcactgcatacatcgagtacaagacatcaaaagaaggcagtactgtgggagttacagttagccacgccagtctgttggcccagtgcagggcactaacccaggcatgtggctacagtgaagctgaaactctgaccaatgtgctggatttcaagcgggatgctggcttgtggcacggagtgctgacaagtgtcatgaaccgaatgcacgtggtgtcagtcccttacgctctgatgaaggcaaatcccttgagttggatccagaaggtgtgcttctacaaagccagagccgcacttgtcaagtctcgcgatatgcattggagcctgcttgcccagagggggcagagggacgttagcctcagctctttacggatgttaatcgtggctgatggggcaaatccctggtccatttcatcatgcgatgctttcttgaatgtgtttcaatctcgtggcctgaggccggaagtcatctgcccatgcgcctcatccccagaagccctgacggtcgcaatcaggcgcccacccgacttaggcggtccacctcctaggaaggccgtgctatcaatgaatgggctgtcctacggcgtcattcgagtggacaccgaagagaaattgtctgtactcaccgtgcaggacgtcggacaagtcatgccaggcgcaaacgtctgcgtcgttaagttagaaggaaccccgtacctgtgcaaaaccgatgaagtgggtgaaatttgcgtcagtagctctgctacaggtaccgcgtattacgggctcctgggaatcactaagaatgtgtttgaagccgtgcccgtgactaccgggggtgcccctattttcgacagacctttcacccggaccggacttctgggcttcataggcccagacaacctagtgtttatcgtcggcaagctcgacggtctgatggtgacgggggtccggcgtcacaatgcagatgatgtggtggctacagctctagccgttgaaccaatgaaattcgtgtaccgaggcaggatagccgtcttcagtgtcaccgtactccatgatgatcggattgtgcttgtcgcggagcagaggccggacgcgtcggaagaggactccttccagtggatgtcaagggtcctccaagtgggtgcacccgctaggccaatggtgcggtag

SEQ ID NO: 264513 - DNA, 3044 bp, Artificial Sequence
  derived and/or modified sequence
ccgcgctcgtgcccgcgcgggtgcgttgctgtcctggccgcgcccctgtcccgccgcctcccgctcctcgcctggcggatgtaggttgttggcctgaggggagctacgtagccgaggtttgcgctgccgccgccaggcccggtccggttccagcctctgcccggacgctagccggcctggccatggctgaccgcgggtgcccgctggaggcggcgccgctgcctgccgaggtgcgggagagcctggctgagctggagctggagctgtcggaaggtgacatcactcaaaaaggatatgaaaagaaaagggcaaagctgcttgcacgttatataccgcttattcaaggaatagacccatctctgcaagcagagaatagaattcctgggccctcacaaaccacggccgctgcacccaagcagcagaagtctcggcccaccgcctcgagggatgagcgcttccggtcagatgtccacactgaagccgtgcaagcagctttggccaaatacaaagagaggaagatgcctatgccttcgaagagacgttctgtccttgtgcattcgtctgtggaaacctacacccctccagacacgtcgtctgcctcagaagatgagggctctttacggcgacccgggcgactcacctccactccgctccagagccattccagcgtcgagccctggctcgaccgggtcattcagggctcgtccacctcatcctctgcatcctccacctcatctcacccgggagggagacccaccactgctcccagtgctgcagccacgccgggggccgccgctaccactgcactcgcaggcctcgaggcccacacccacatagatctgcattctgcccctcctgatgtcaccacgggcctcgtggagcattcgtactttgagcgtccacaggtggcttctgtgagaagtgttcctcgggggtgcagcgggagcatgctggaaacagcagatggtgtccctgtgaacagcagagtgtcctccaaaatccagcagcttctgaacaccctgaagaggccaaagcgccctccactgaaggagttctttgtggatgattttgaggaattgttggaagttcagcaaccagatccaaatcagccaaagcctgagggaagcgagacgagtgtgctgagaggggagcctctcactgcaggtgtcccccgaccgccgtcgctgttggccaccttgcagcgctggggcacaacacagcccaaatccccctgtctgactgccttggatacaactgggaaagccgtctacactctcacctatggtaaactttggagtcggagtttaaaactagcttatactctacttaataaactgacaagtaagaatgaacctctacttaaacctggagacagagtggcgctcgtgtttccgaatagtgaccctgtgatgttcatggttgcattttatgggtgtctcctggcagagctggttcctgtccccatagaagtgccattaacaagaaaggatgcaggcagccagcaggttgggtttctgctgggcagctgtggagtcttcttggccctgaccacagacgcttgtcagaaaggcctccccaaggcacagacaggagaggtggcagctttcaaaggttggcccccgctctcctggctagtgattgatgggaagcatctagccaagcccccaaaggactggcaccctctggcccaggacacagggactgggactgcctacattgagtataaaaccagcaaagaaggcagtacggtgggggtcacagtgtcccacgcatccctgctggcacagtgccgggctctgacccaggcgtgcgggtactcagaagctgaaacattaacaaacgtgctggatttcaaaagggatgctggtctgtggcatggcgtgttaacaagcgtcatgaacaggatgcacgtggtcagcgtcccctacgcgctgatgaaggcgaacccactctcctggatccagaaagtgtgcttctataaagctcgggccgcgctggtgaagtcgcgagacatgcactggtctctcctagctcagcggggccagagggacgtcagcctcagctcactgcgcatgctgattgtggccgatggtgccaacccgtggtcgatctcctcctgtgacgccttcctcaacgtcttccagtccagaggtctgaggccagaggtcatctgtccttgtgcaagttctcctgaggcgctgactgtcgccatccgcaggccacctgatctgggaggaccacctccaagaaaagcagtcctgtcgatgaacggtctaagttatggtgttatcagagtggatactgaagaaaagttgtcagtccttactgttcaggacgttggtcaggtgatgcctggagctaatgtatgtgttgtgaagttagaaggtaccccttatctttgtaaaactgatgaagtgggagaaatatgcgtcagttccagtgcaactggcacagcgtactatggattgcttggaatcacgaagaatgtgtttgaggcagttccggtcaccacaggaggagcacccatctttgacaggccattcaccaggacaggcctgctgggcttcatcgggcctgacaacctggtcttcatcgtgggcaaactggacgggctgatggtcactggagttcgcagacacaatgcagatgacgttgtggccaccgcactggccgtggagcccatgaagtttgtctacagaggcaggatcgctgtgttctctgtgaccgtgctgcacgacgaccggattgtcctggtggctgagcagcggccggatgcctcggaggaggacagcttccagtggatgagccgtgtgctgcaggtgggcgccccggcacggcctatggttcggtgaatctcccaagctggcacccccactccactccaagtgccaagtggttggcttgtcccgcccggtcctccctggctccagctttgtttatctgtatttttcattgcaaattgacaaattacagctgtatgtatttacgggatacaaagtgatgttataatttatgaatacaatatagaataattaatatatcca

SEQ ID NO: 264514 - DNA, 2670 bp, Artificial Sequence
  derived and/or modified sequence
atggccgacagaggctgccccctggaggccgcccccctgcccgccgaggtgagagagagcctggccgagctggagctggagctgagcgagggcgacatcacccagaagggctacgagaagaagagagccaagctgctggccagatacatccccctgatccagggcatcgaccccagcctgcaggccgagaacagaatccccggccccagccagaccaccgccgccgcccccaagcagcagaagagcagacccaccgccagcagagacgagagattcagaagcgacgtgcacaccgaggccgtgcaggccgccctggccaagtacaaggagagaaagatgcccatgcccagcaagagaagaagcgtgctggtgcacagcagcgtggagacctacaccccccccgacaccagcagcgccagcgaggacgagggcagcctgagaagacccggcagactgaccagcacccccctgcagagccacagcagcgtggagccctggctggacagagtgatccagggcagcagcaccagcagcagcgccagcagcaccagcagccaccccggcggcagacccaccaccgcccccagcgccgccgccacccccggcgccgccgccaccaccgccctggccggcctggaggcccacacccacatcgacctgcacagcgccccccccgacgtgaccaccggcctggtggagcacagctacttcgagagaccccaggtggccagcgtgagaagcgtgcccagaggctgcagcggcagcatgctggagaccgccgacggcgtgcccgtgaacagcagagtgagcagcaagatccagcagctgctgaacaccctgaagagacccaagagaccccccctgaaggagttcttcgtggacgacttcgaggagctgctggaggtgcagcagcccgaccccaaccagcccaagcccgagggcagcgagaccagcgtgctgagaggcgagcccctgaccgccggcgtgcccagaccccccagcctgctggccaccctgcagagatggggcaccacccagcccaagagcccctgcctgaccgccctggacaccaccggcaaggccgtgtacaccctgacctacggcaagctgtggagcagaagcctgaagctggcctacaccctgctgaacaagctgaccagcaagaacgagcccctgctgaagcccggcgacagagtggccctggtgttccccaacagcgaccccgtgatgttcatggtggccttctacggctgcctgctggccgagctggtgcccgtgcccatcgaggtgcccctgaccagaaaggacgccggcagccagcaggtgggcttcctgctgggcagctgcggcgtgttcctggccctgaccaccgacgcctgccagaagggcctgcccaaggcccagaccggcgaggtggccgccttcaagggctggccccccctgagctggctggtgatcgacggcaagcacctggccaagccccccaaggactggcaccccctggcccaggacaccggcaccggcaccgcctacatcgagtacaagaccagcaaggagggcagcaccgtgggcgtgaccgtgagccacgccagcctgctggcccagtgcagagccctgacccaggcctgcggctacagcgaggccgagaccctgaccaacgtgctggacttcaagagagacgccggcctgtggcacggcgtgctgaccagcgtgatgaacagaatgcacgtggtgagcgtgccctacgccctgatgaaggccaaccccctgagctggatccagaaggtgtgcttctacaaggccagagccgccctggtgaagagcagagacatgcactggagcctgctggcccagagaggccagagagacgtgagcctgagcagcctgagaatgctgatcgtggccgacggcgccaacccctggagcatcagcagctgcgacgccttcctgaacgtgttccagagcagaggcctgagacccgaggtgatctgcccctgcgccagcagccccgaggccctgaccgtggccatcagaagaccccccgacctgggcggccccccccccagaaaggccgtgctgagcatgaacggcctgagctacggcgtgatcagagtggacaccgaggagaagctgagcgtgctgaccgtgcaggacgtgggccaggtgatgcccggcgccaacgtgtgcgtggtgaagctggagggcaccccctacctgtgcaagaccgacgaggtgggcgagatctgcgtgagcagcagcgccaccggcaccgcctactacggcctgctgggcatcaccaagaacgtgttcgaggccgtgcccgtgaccaccggcggcgcccccatcttcgacagacccttcaccagaaccggcctgctgggcttcatcggccccgacaacctggtgttcatcgtgggcaagctggacggcctgatggtgaccggcgtgagaagacacaacgccgacgacgtggtggccaccgccctggccgtggagcccatgaagttcgtgtacagaggcagaatcgccgtgttcagcgtgaccgtgctgcacgacgacagaatcgtgctggtggccgagcagagacccgacgccagcgaggaggacagcttccagtggatgagcagagtgctgcaggtgggcgcccccgccagacccatggtgagatag

SEQ ID NO: 264515 - protein, 841 aa, Artificial Sequence
  derived and/or modified sequence
MADRGCPLEAAPLPAEVRESLAELELELSEGDITQKGYEKKRAKLLARYIPLIQGIDPSLQAENRIPGPSQTTAAAPKQQKSRPTASRDERFRSDVHTEAVQAALAKYKERKMPMPSKRRSVLVHSSVETYTPPDTSSASEDEGSLRRPGRLTSTPLQSHSSVEPWLDRVIQGSSTSSSASSTSSHPGGRPTTAPSAAATPGAAATTALAGLEAHTHIDLHSAPPDVTTGLVEHSYFERPQVASVRSVPRGCSGSMLETADGVPVNSRVSSKIQQLLNTLKRPKRPPLKEFFVDDFEELLEVQQPDPNQPKPEGSETSVLRGEPLTAGVPRPPSLLATLQRWGTTQPKSPCLTALDTTGKAVYTLTYGKLWSRSLKLAYTLLNKLTSKNEPLLKPGDRVALVFPNSDPVMFMVAFYGCLLAELVPVPIEVPLTRKDAGSQQVGFLLGSCGVFLALTTDACQKGLPKAQTGEVAAFKGWPPLSWLVIDGKHLAKPPKDWHPLAQDTGTGTAYIEYKTSKEGSTVGVTVSHASLLAQCRALTQACGYSEAETLTNVLDFKRDAGLWHGVLTSVMNRMHVVSVPYALMKANPLSWIQKVCFYKARAALVKSRDMHWSLLAQRGQRDVSLSSLRMLIVADGANPWSISSCDAFLNVFQSRGLRPEVICPCASSPEALTVAIRRPPDLGGPPPRKAVLSMNGLSYGVIRVDTEEKLSVLTVQDVGQVMPGANVCVVKLEGTPYLCKTDEVGEICVSSSATGTAYYGLLGITKNVFEAVPVTTGGAPIFDRPFTRTGLLGFIGPDNLVFIVGKLDGLMVTGVRRHNADDVVATALAVEPMKFVYRGR

SEQ ID NO: 264516 - protein, 102 aa, Artificial Sequence
  derived and/or modified sequence
MANGTNASAPYYSYEYYLDYLDLIPVDEKKLKAHKHSIVIAFWVSLAAFVVLLFLILLYMSWSASPQMSFNTDESLLHSEVLPQTRAISCDELQAPREEGAA

SEQ ID NO: 264517 - DNA, 309 bp, Artificial Sequence
  derived and/or modified sequence
atggctaacggcaccaatgcaagtgccccctactatagctatgaatattacctggattatctggacctgatccctgtggacgaaaaaaaattgaaagcacataaacatagcatcgtgattgcgttctgggtttccctcgcggcctttgtggtgctcctcttcctgatcctgctgtacatgtcctggtccgcaagcccacagatgtccttcaacactgatgaatcccttttgcattccgaggtgcttccccagacacgcgccatttcctgtgatgagctccaagccccccgggaggagggagccgcatag

SEQ ID NO: 264518 - DNA, 309 bp, Artificial Sequence
  derived and/or modified sequence
atggcgaatgggacaaacgcctccgcgccgtattattcctatgagtattacctagattacctagacctgatcccggtggacgagaagaaacttaaggcccacaagcactcaattgtgatcgcgttctgggtgtcactggccgcgtttgtggtcctcctattcctgatcctcttgtatatgagttggtccgcaagtccacagatgtcctttaatactgatgagtcactcctacattctgaagtgctgccccaaaccagagccatcagttgcgacgagcttcaggcccctcgagaggagggcgctgcttag

SEQ ID NO: 264519 - DNA, 309 bp, Artificial Sequence
  derived and/or modified sequence
atggccaacggcaccaatgccagcgccccctactacagctatgagtactacctggactacctggacctgatccctgtggatgagaagaagctgaaggcccacaagcacagcatcgtcatcgccttctgggtgtccctggccgcctttgtggtgctgctcttcctgatcctgctgtacatgtcctggagcgccagcccccagatgtccttcaacacagatgagagcctgctgcacagcgaggtgctgccccagacccgggccatcagctgtgatgagctgcaggccccccgggaggagggcgccgcctag

SEQ ID NO: 264520 - DNA, 440 bp, Artificial Sequence
  derived and/or modified sequence
atggccaacgggaccaacgcctctgccccatactacagctatgaatactacctggactatctggacctcattcccgtggacgagaagaagctgaaagcccacaaacattccatcgtgatcgcattctgggtgagcctggctgccttcgtggtgctgctcttcctcatcttgctctacatgtcctggtccgcctccccgcagatgagctttaacacagatgaatctcttctgcattcagaagtgctgcctcaaactcgagctatttcctgtgatgagctccaagcccctagagaggaaggggcggcctgacgaggcactggatgggcctcatggcctagaagtccccacattccttgcaactctgatgctgggcacctacaggcccgagtttatcatttactgggcagttcaataaagtcctctcaacttttcttgtcaaa

SEQ ID NO: 264521 - DNA, 624 bp, Artificial Sequence
  derived and/or modified sequence
ggataatggggaggctatgcaggtgtgtgggctggagggactttgcagatgtgattaaggattgtgagatggaaaaattatccttgattacctgcacggacccagtataatcacaactgtccttataagaagaggagctttggaagaagagagagttgactacggaagagggaaaagtgccacagacatggccaacgggaccaacgcctctgccccatactacagctatgaatactacctggactatctggacctcattcccgtggacgagaagaagctgaaagcccacaaacattccatcgtgatcgcattctgggtgagcctggctgccttcgtggtgctgctcttcctcatcttgctctacatgtcctggtccgcctccccgcagatgagctttaacacagatgaatctcttctgcattcagaagtgctgcctcaaactcgagctatttcctgtgatgagctccaagcccctagagaggaaggggcggcctgacgaggcactggatgggcctcatggcctagaagtccccacattccttgcaactctgatgctgggcacctacaggcccgagtttatcatttactgggcagttcaataaagtcctctcaacttttcttgtc

SEQ ID NO: 264522 - DNA, 309 bp, Artificial Sequence
  derived and/or modified sequence
atggccaacggcaccaacgccagcgccccctactacagctacgagtactatctggactatctggacctaattcccgtggatgaaaaaaagctaaaagctcacaaacactctatcgtcatcgccttttgggtgtcgctagccgcttttgttgtactgctctttctgatcctgttgtacatgtcttggtcagcttccccacagatgagctttaacaccgacgaatccttgctacactcagaagttcttccacaaaccagggcgatttcctgcgatgaattgcaggccccaagggaggaaggagccgcttag

SEQ ID NO: 264523 - DNA, 309 bp, Artificial Sequence
  derived and/or modified sequence
atggccaacggcaccaacgccagcgccccctactacagctacgagtactacttggactacctggatctgatccccgtcgacgagaagaagctgaaggctcataaacatagcatcgtgatcgctttttgggtctcactggcagccttcgtggttttgctgttcctcatcctgctctacatgagctggagcgcctccccccagatgtcattcaacacagatgagtccctgcttcactctgaggtgttgccacaaaccagggctatcagttgcgacgagttgcaggctcctcgcgaagagggtgctgcatag

SEQ ID NO: 264524 - DNA, 309 bp, Artificial Sequence
  derived and/or modified sequence
atggcaaacggcacaaatgcatcagcaccctactactcgtatgagtactatctggactatctggacctcattccagtggatgaaaagaaattgaaagcccacaagcactccattgtaatagctttttgggtgagtttggctgcattcgttgtgctgctatttctgatcttgctgtacatgtcgtggagcgcttccccccagatgagctttaacaccgatgagagtttgctgcattcggaagtcctgccacagactcgtgccattagctgcgacgagcttcaggctccgagggaggagggtgctgcctag

SEQ ID NO: 264525 - DNA, 309 bp, Artificial Sequence
  derived and/or modified sequence
atggccaacggaaccaacgcttccgcaccgtattactcctacgagtactacttggattatctggacctgattcccgtggacgaaaagaagttgaaggcgcacaagcactccatcgtgatcgccttctgggtgtctctggccgcatttgtcgtcctgcttttcctcattcttctctacatgtcctggagcgcctctccccaaatgtcctttaatacagatgagtccttattacattccgaggtgttgccccagacccgggctatctcttgcgatgagctccaagcccctcgagaggaaggagctgcttag

SEQ ID NO: 264526 - DNA, 309 bp, Artificial Sequence
  derived and/or modified sequence
atggccaacggcaccaacgccagcgccccctactacagctacgagtactacctggactacctggacctgatccccgtggacgagaagaagctgaaggcccacaagcacagcatcgtgatcgccttctgggtgagcctggccgccttcgtggtgctgctgttcctgatcctgctgtacatgagctggagcgccagcccccagatgagcttcaacaccgacgagagcctgctgcacagcgaggtgctgccccagaccagagccatcagctgcgacgagctgcaggcccccagagaggagggcgccgcctag

SEQ ID NO: 264527 - protein, 472 aa, Artificial Sequence
  derived and/or modified sequence
MGQVLPVFAHCKEAPSTASSTPDSTEGGNDDSDFRELHTAREFSEEDEEETTSQDWGTPRELTFSYIAFDGVVGSGGRRDSTARRPRPQGRSVSEPRDQHPQPSLGDSLESIPSLSQSPEPGRRGDPDTAPPSERPLEDLRLRLDHLGWVARGTGSGEDSSTSSSTPLEDEEPQEPNRLETGEAGEELDLRLRLAQPSSPEVLTPQLSPGSGTPQAGTPSPSRSRDSNSGPEEPLLEEEEKQWGPLEREPVRGQCLDSTDQLEFTVEPRLLVADLLYWKDTRTSGVVFTGLMVSLLCLLHFSIVSVAAHLALLLLCGTISLRVYRKVLQAVHRGDGANPFQAYLDVDLTLTREQTERLSHQITSRVVSAATQLRHFFLVEDLVDSLKLALLFYILTFVGAIFNGLTLLILGVIGLFTIPLLYRQHQAQIDQYVGLVTNQLSHIKAKIRAKIPGTGALASAAAAVSGSKAKAE

SEQ ID NO: 264528 - DNA, 231 bp, Artificial Sequence
  derived and/or modified sequence
atgatcgctggagagcacaggctggatccagctactatatcactgggcgttgatcagaccgatgaccatcagcaacctacacatagcagaatcagaaagaagagggtgtcccccacctctgtttggtttcagccttatttctgcatcttgaaaactctctgtaccaccttagacaccgtccaagacgatgcaacatcgtcctggatgcttatatgccatgtcgatttctag

SEQ ID NO: 264529 - DNA, 1419 bp, Artificial Sequence
  derived and/or modified sequence
atgggtcaagttctccctgtgttcgcacactgtaaagaggcccccagcactgcttcctctacccccgacagtactgagggtggaaacgacgactccgattttcgcgaattacatacggccagggaattcagtgaagaagatgaggaagaaacaaccagtcaggattgggggaccccaagggaacttacattctcgtacattgccttcgacggggtcgtgggaagtgggggccgtagagactccactgctcgacggccacgcccccaaggacgatctgtgtccgaaccgagagatcagcacccccaaccctccctcggtgactccctggaatcaattccaagcctctcacaatcacctgagcctggcagaagaggggaccccgacactgctccacctagtgaaagaccactcgaagacctgcgcttgcgcctcgatcatcttgggtgggttgcgcggggaacgggctcaggcgaagattccagcacgtcttcctccacgcctctggaagacgaggagcctcaggagcccaatcgattagagacaggcgaggctggagaggaattagatttgcgtctccgccttgctcaaccgtcatcccccgaggttttgacccctcagttatctcccggatcgggaacgccgcaagctggtacaccctccccaagtcgcagccgcgactcgaacagcggaccagaggagcctctgctggaggaggaggagaagcagtgggggccgcttgagcgagagccagtaaggggccaatgcctcgactcaaccgaccagctggaattcaccgtcgaaccccgcctattggtcgcagacctcttgtattggaaagacacacgcacctccggagttgtgttcacaggcctgatggtatctcttctctgtctgctgcacttctccatcgtgtccgttgctgcccatcttgcgctgctgctgttgtgtggcacgatttccctgcgagtgtaccgcaaagtgctgcaggcagtccacaggggggacggcgctaacccctttcaggcttacctcgatgtagatctaaccctgacacgggaacaaacagaacgactgtctcaccagatcacctcgagggtggtttctgctgccacccagctcaggcattttttcctcgtggaggacctcgtggattccctcaagctggccctgctgttttatattttgaccttcgtgggggccattttcaatggcctgacgctgttgatcctgggcgttattgggctgtttacgatcccactgctttaccggcagcatcaggcccagatcgaccagtatgtcggcctggttaccaatcagctttcccacatcaaagcaaaaatcagggcgaaaatccctggaactggcgcgttggcaagtgccgctgccgctgtgtccgggtcaaaggcaaaggccgagtag

SEQ ID NO: 264530 - DNA, 1419 bp, Artificial Sequence
  derived and/or modified sequence
atgggccaggtgctgcctgtgtttgcccactgcaaggaggcccccagcacagccagcagcaccccagacagcacagaaggaggaaatgatgacagcgacttccgggagctgcacacagcccgggagttcagcgaggaggatgaggaggagaccaccagccaggactggggcaccccccgggagctgaccttctcctacatcgcctttgatggagtggtgggcagcggcggccggcgggacagcacagcccggcggccccggccccagggccgctctgtgtctgagccccgggaccagcacccccagcccagcctgggggacagcctggagagcatccccagcctgagccagagccctgagcctggaagaagaggagaccctgacacagcccctccttctgagcggcccctggaggacctgcggctgcggctggaccacctgggctgggtggcccggggcaccggcagcggggaggacagcagcaccagcagcagcacccccctggaggatgaggagccccaggagcccaaccggctggagactggagaggccggggaggagctggacctgcggctgcggctggcccagcccagcagccctgaggtgctgaccccccagctgagccctggcagcggcaccccccaggccggcacccccagccccagccgcagccgggacagcaacagcggccctgaggagcccctgctggaggaggaggagaagcagtggggccccctggagcgggagcctgtgcggggccagtgcctggacagcacagaccagctggagttcaccgtggagccccggctgctggtggccgacctgctgtactggaaggacaccaggaccagcggcgtggtgttcaccggcctgatggtgtccctgctgtgcctgctgcacttcagcatcgtgtctgtggccgcccacctggccctgctgctgctgtgtggcaccatcagcctgcgggtgtacaggaaggtgctgcaggccgtgcacagaggagatggagccaaccccttccaggcctacctggatgtggacctgaccctgacccgggagcagacagagcggctgagccaccagatcaccagccgggtggtgtctgctgccacccagctgcggcacttcttcctggtggaggacctggtggacagcctgaagctggccctgctcttctacatcctgacctttgtgggcgccatcttcaacggcctgaccctgctgatcctgggcgtgattggcctcttcaccatccccctgctgtaccggcagcaccaggcccagattgaccagtatgtgggcctggtgaccaaccagctgagccacatcaaggccaagatccgggccaagatccctggcaccggggccctggccagcgctgctgctgctgtgtctggcagcaaggccaaggccgagtag

SEQ ID NO: 264531 - DNA, 1419 bp, Artificial Sequence
  derived and/or modified sequence
atgggccaggtgctgcccgtgttcgcccactgcaaggaggccccctcgaccgcctcaagcactcctgatagcacagagggaggtaatgatgattcggacttcagggagctacacacagctcgggagttcagcgaggaagacgaggaggagaccacatctcaggattggggcacgcctagggagctgaccttttcgtatatcgcatttgatggcgtggtcggtagcggcgggaggcgggacagtaccgccaggcgccctcgccctcagggaaggtcagtaagtgagccaagagaccaacatccccagccctctctgggtgattctctggaatccattccaagcctgtcacagagtcctgaaccaggtaggagaggcgatcccgataccgccccacctagcgagcggccactggaggatctgagactaaggcttgaccacctcggctgggttgcccggggcacagggagtggcgaggacagctccacctcaagcagcactcctctggaggacgaggagccccaggaaccgaatcgccttgagacaggggaggcaggagaagagctcgacctgagactacgtctggcccagccgtccagtcccgaggtcttgactcctcagctgtcccccgggtccggcactccacaggcaggtacgcctagcccatcacgttcccgggactccaactcagggccggaagagccattgttggaagaggaagagaaacagtgggggcctttggaacgcgagccagtgcgaggccaatgcctggacagcacagatcagctcgagtttaccgtggagccgaggctgctcgtcgccgacttactgtattggaaggatactcgaaccagcggcgtggtgttcacgggcctgatggtatccttgctttgcctgctgcacttttccatcgtttctgtggccgcacacctcgctctgctactgctatgcggcacgatttccctgcgggtgtatcgcaaggtcctccaggccgtacacagaggggatggggccaacccgtttcaagcgtacctcgatgttgatctgacgctcacaagagagcaaacagagagactgtcgcatcaaatcacttcccgagtggtgagcgcggcaacccaacttcggcacttctttctcgtggaggacctggtagacagtttgaagttagctctgctgttttacattctgaccttcgtcggcgccatatttaacggactcaccctgctgatcctgggcgtgatcggcttgttcacgattcctctgctatacaggcagcaccaggcccaaattgaccagtatgtcggcctggtgactaaccagctttcgcatattaaagcaaaaattcgtgctaagatcccaggcacaggggccctggcttccgccgccgcagccgtgagcgggagcaaggcaaaggccgaatag

SEQ ID NO: 264532 - DNA, 1419 bp, Artificial Sequence
  derived and/or modified sequence
atgggacaagttctccccgtgttcgcccactgcaaggaggctcccagcaccgcaagcagcactcctgacagcaccgaagggggaaatgatgattccgatttcagggagttgcacaccgccagggaatttagcgaagaggatgaagaggaaacaactagccaggactgggggacccctcgcgaactgaccttctcttatattgcttttgacggcgtcgtcggaagtggcggtaggagagattccactgctagacgacctcggcctcaggggaggtctgttagcgaacctcgtgaccagcatcctcagccctctcttggcgactccctcgagtccattcctagcctgagtcagtctccagagcctggccgaaggggggatccagatactgcacccccatctgaacggcctttggaggatctccgcctccgcctagatcatctcggttgggtcgcgagaggaacgggaagcggcgaagattcctccacatctagctccaccccactggaggacgaagaaccccaggagcccaaccgtctcgagactggcgaggccggtgaagaactagacttgcgactacgtttagcccagccaagcagcccagaggtactgacgcctcagttatcgccgggatcaggtactccacaggcgggaacacctagcccgagtcgatctagagactctaacagcggccctgaggagcctctgctggaggaggaggagaagcagtgggggcctttagagagggagccggtgcgcggacagtgtttggattccacagaccagttggagttcacagtggaacccagactcctggtggccgacctcctgtattggaaagatacaagaacttcaggtgtggtgttcacaggcctcatggtctccctcctctgcctgcttcattttagcatagtgagtgtggcggctcacctcgcgctcctgctgttgtgcggaaccatcagtctgagggtgtaccgcaaagttctacaggccgtacacaggggtgatggggctaacccgtttcaagcctatctcgacgtggacctgaccctgactagggaacagactgaacgactctcccatcagatcacttcacgcgtcgtgtccgctgccacacaactcaggcactttttcctagtcgaagacctggttgacagcctgaagctagctctgttgttttacattctaacattcgtgggcgcaatttttaatgggctgaccctgctgattttgggggttataggactcttcactattcctctactgtaccggcagcatcaggcacagatagaccagtacgtcgggctggtcaccaaccagctcagtcacatcaaggctaagatacgtgcaaaaattcccggaaccggcgctcttgcttctgctgcagctgccgtgagtgggagtaaagctaaagccgagtag

SEQ ID NO: 264533 - DNA, 2065 bp, Artificial Sequence
  derived and/or modified sequence
cgcgcgctgcagtgccttccccacctcggccccgcccgcccccgccgagccgagcaccagggcggcggcggcggcggcggcggcggcggcggctggagcagcccgggaggaggaggcggcgagaatggcagcggcgtcgtgggcgcggcggagatgagcgcccgcgaccccgggcccagggcggcacagccggagtgggcgggggtcccgatgcaggcccgaggggggccatggggcaggtcctgccggtcttcgcccactgcaaagaagctccgtctacagcctcctcaactcctgattccacagaaggagggaacgacgactctgattttcgagagctgcacacagcccgggaattctcagaggaggacgaggaggagaccacgtcgcaggactggggcaccccccgggagctgaccttctcctacatcgcctttgatggtgtagtgggctccgggggccgcagggattcaactgcccgccgcccccgcccccagggccgctcagtctcggaaccacgagaccagcaccctcagcccagcctgggcgacagcttggagagcatccccagcctgagccaatccccggagcctggacgacggggtgatcctgacaccgcgcctccatccgagcgccctctggaagacctgaggcttcggttggaccatctgggctgggtggcccggggaacgggatccggggaggactcttccaccagcagctccaccccgctggaagacgaagaaccccaagaacccaacagattggagacaggagaagctggggaagaactggacctacgactccgacttgctcagccctcatcgcccgaggtcttgactccccagctcagtccgggctctgggacaccccaggccggtactccgtccccatcccgatcgcgagattcgaactctgggcccgaagagccattgctggaagaggaagaaaagcagtgggggccactggagcgagagccagtaaggggacagtgcctcgatagcacggaccaattagaattcacggtggagccacgccttctagtggcggacctgctgtactggaaggacacgaggacgtcaggagtggtcttcacaggcctgatggtctccctcctctgcctcctgcactttagcatcgtgtccgtggccgcgcacttggctctgttgctgctctgcggcaccatctctctcagggtttaccgcaaagtgctgcaggccgtgcaccggggggatggagccaaccctttccaggcctacctggatgtggacctcaccctgactcgggagcagacggaacgtttgtcccaccagatcacctcccgcgtggtctcggcggccacgcagctgcggcacttcttcctggtagaagacctcgtggattccctcaagctggccctcctcttctacatcttgaccttcgtgggtgccatcttcaatggtttgactcttctcattctgggagtgattggtctattcaccatccccctgctgtaccggcagcaccaggctcagatcgaccaatatgtggggttggtgaccaatcagttgagccacatcaaagctaagatccgagctaaaatcccagggaccggagccctggcctctgcagcagccgcagtctccggatccaaagccaaagccgaatgagaacggtgtctctgcccgcaggacgcctgcccccagcccccgcagccctctggccccctccatctcttgtccgttcccacccacccccctcctcggcccgagccttttcccggtgggtgtcaggatcactcccactagggactctgcgctaattacctgagcgaccaggactacatttcccaagaggctctgctccaggagtccaggaaagacgaggcaccttggccgcggggcctgctgggacttgtagttgcctagacagggcaccaccctgcacttccggacccgccgctggaggcgccgtgaggcgttggtgtctcctggatgctactagccccaacgccggggctttgcatggggcccaggggaggcctgagcttggatttacactgtaataaagactcctgtggaaaacc

SEQ ID NO: 264534 - DNA, 1419 bp, Artificial Sequence
  derived and/or modified sequence
atgggccaggtgctgcccgtgttcgcccactgcaaggaggcccccagcaccgccagcagcacccccgacagcaccgagggcggcaacgacgacagcgacttcagagagctgcacaccgccagagagttcagcgaggaggacgaggaggagaccaccagccaggactggggcacccccagagagctgaccttcagctacatcgccttcgacggcgtggtgggcagcggcggcagaagagacagcaccgccagaagacccagaccccagggcagaagcgtgagcgagcccagagaccagcacccccagcccagcctgggcgacagcctggagagcatccccagcctgagccagagccccgagcccggcagaagaggcgaccccgacaccgccccccccagcgagagacccctggaggacctgagactgagactggaccacctgggctgggtggccagaggcaccggcagcggcgaggacagcagcaccagcagcagcacccccctggaggacgaggagccccaggagcccaacagactggagaccggcgaggccggcgaggagctggacctgagactgagactggcccagcccagcagccccgaggtgctgaccccccagctgagccccggcagcggcaccccccaggccggcacccccagccccagcagaagcagagacagcaacagcggccccgaggagcccctgctggaggaggaggagaagcagtggggccccctggagagagagcccgtgagaggccagtgcctggacagcaccgaccagctggagttcaccgtggagcccagactgctggtggccgacctgctgtactggaaggacaccagaaccagcggcgtggtgttcaccggcctgatggtgagcctgctgtgcctgctgcacttcagcatcgtgagcgtggccgcccacctggccctgctgctgctgtgcggcaccatcagcctgagagtgtacagaaaggtgctgcaggccgtgcacagaggcgacggcgccaaccccttccaggcctacctggacgtggacctgaccctgaccagagagcagaccgagagactgagccaccagatcaccagcagagtggtgagcgccgccacccagctgagacacttcttcctggtggaggacctggtggacagcctgaagctggccctgctgttctacatcctgaccttcgtgggcgccatcttcaacggcctgaccctgctgatcctgggcgtgatcggcctgttcaccatccccctgctgtacagacagcaccaggcccagatcgaccagtacgtgggcctggtgaccaaccagctgagccacatcaaggccaagatcagagccaagatccccggcaccggcgccctggccagcgccgccgccgccgtgagcggcagcaaggccaaggccgagtag

SEQ ID NO: 264535 - DNA, 618 bp, Artificial Sequence
  derived and/or modified sequence
atggggtcgaaggtcgctgatcttctgtattggaaggatacgaggacctccggggttgtgtttactgggctgatggtgtccctgctttgtctgctgcatttttcaatcgtgagtgtcgcagcacatctggcgctgctactgctgtgcggcacaatttctttacgggtatatcgcaaggtgcttcaagccgtccatcggggagatggcgcaaacccattccaggcctatttggatgtcgatctcacattgacccgcgaacagacggagaggctgagccaccagataaccagcagagtggtgagtgctgccacccagctccgccatttctttctcgtggaggacttggtggacagcttgaagttagcccttcttttttatattttaaccttcgttggagctatctttaatggactgacgttgctaattctgggggtgattggtctgttcaccatccctctgctttatcgccagcatcaggctcagattgatcagtacgtgggactggttacaaaccagctgagccatatcaaagctaagattagggccaaaattccaggaacaggagccttagccagcgcagcagccgccgtctccgggtccaaagccaaggccgagtag

SEQ ID NO: 264536 - DNA, 618 bp, Artificial Sequence
  derived and/or modified sequence
atgggcagcaaggtggccgacctgctgtactggaaggacaccaggaccagcggcgtggtgttcaccggcctgatggtgtccctgctgtgcctgctgcacttcagcatcgtgtctgtggccgcccacctggccctgctgctgctgtgtggcaccatcagcctgcgggtgtacaggaaggtgctgcaggccgtgcacagaggagatggagccaaccccttccaggcctacctggatgtggacctgaccctgacccgggagcagacagagcggctgagccaccagatcaccagccgggtggtgtctgctgccacccagctgcggcacttcttcctggtggaggacctggtggacagcctgaagctggccctgctcttctacatcctgacctttgtgggcgccatcttcaacggcctgaccctgctgatcctgggcgtcatcggcctcttcaccatccccctgctgtaccggcagcaccaggcccagattgaccagtatgtgggcctggtgaccaaccagctgagccacatcaaggccaagatccgggccaagatccctggcactggagccctggccagcgctgctgctgctgtgtctggcagcaaggccaaggccgagtag

SEQ ID NO: 264537 - DNA, 618 bp, Artificial Sequence
  derived and/or modified sequence
atgggcagcaaggtggccgacctgctgtactggaaggacacccggactagtggagtagtgttcaccgggttgatggtgtcactgttgtgcttactacacttttccatcgtctccgtggccgctcatttagctctgctgctgctttgcggcacgatctccctccgggtgtacaggaaggtcctgcaggctgtgcacaggggcgatggtgccaacccgtttcaggcttacctagatgtagatctgactttgacacgggaacaaaccgaacggctgagccatcagatcacaagcagggtggtctccgccgcaacccagctgcggcatttcttcctggtcgaggaccttgtggatagcctgaagctggcattgctattttacatactcaccttcgtcggggccatcttcaacgggctcacccttctgatcctgggggtcattggcctgttcactatcccgcttttatacagacaacatcaggcccaaatcgaccagtatgtcggactggtcactaaccagctgtctcatataaaggccaagatacgggctaagatccccggaaccggcgctttggccagcgcagccgccgccgttagtgggagtaaggccaaggcagagtag

SEQ ID NO: 264538 - DNA, 618 bp, Artificial Sequence
  derived and/or modified sequence
atgggcagcaaggttgcggacctgttgtactggaaggacaccagaacgtctggcgtagtttttacaggcctaatggttagcctgttgtgcctcctgcactttagtattgtgtcggtcgctgcgcatcttgcccttctacttctttgcggcactattagtctcagggtttatcgcaaggtcctccaggcggttcacaggggagatggcgctaatccttttcaagcatacctggatgttgatttgacgctaacccgcgagcagaccgaacgtctgtctcatcaaatcaccagccgagtggtatcagctgccacacagctgaggcacttttttttggtggaggacttggtagatagtttgaagctggccctgctgttctatattctcaccttcgtaggtgccattttcaacggcttaaccttgctcatcctgggggtcattggtctttttactattcctcttctctatcggcagcatcaggcgcagattgatcagtatgttggcttggtgaccaaccagctgtcccatattaaggcgaaaatcagggccaaaatcccgggaaccggcgcactggccagcgccgctgccgctgttagcggtagtaaggccaaggcagaatag

SEQ ID NO: 264539 - DNA, 618 bp, Artificial Sequence
  derived and/or modified sequence
atgggcagcaaggtggccgacctgctgtactggaaggacaccagaaccagcggcgtggtgttcaccggcctgatggtgagcctgctgtgcctgctgcacttcagcatcgtgagcgtggccgcccacctggccctgctgctgctgtgcggcaccatcagcctgagagtgtacagaaaggtgctgcaggccgtgcacagaggcgacggcgccaaccccttccaggcctacctggacgtggacctgaccctgaccagagagcagaccgagagactgagccaccagatcaccagcagagtggtgagcgccgccacccagctgagacacttcttcctggtggaggacctggtggacagcctgaagctggccctgctgttctacatcctgaccttcgtgggcgccatcttcaacggcctgaccctgctgatcctgggcgtgatcggcctgttcaccatccccctgctgtacagacagcaccaggcccagatcgaccagtacgtgggcctggtgaccaaccagctgagccacatcaaggccaagatcagagccaagatccccggcaccggcgccctggccagcgccgccgccgccgtgagcggcagcaaggccaaggccgagtag

SEQ ID NO: 264540 - protein, 574 aa, Artificial Sequence
  derived and/or modified sequence
MRRLSSWRKMATAEKQKHDGRVKIGHYILGDTLGVGTFGKVKVGKHELTGHKVAVKILNRQKIRSLDVVGKIRREIQNLKLFRHPHIIKLYQVISTPSDIFMVMEYVSGGELFDYICKNGRKSDVPGVVKTGSTKELDEKESRRLFQQILSGVDYCHRHMVVHRDLKPENVLLDAHMNAKIADFGLSNMMSDGEFLRTSCGSPNYAAPEVISGRLYAGPEVDIWSSGVILYALLCGTLPFDDDHVPTLFKKICDGIFYTPQYLNPSVISLLKHMLQVDPMKRATIKDIREHEWFKQDLPKYLFPEDPSYSSTMIDDEALKEVCEKFECSEEEVLSCLYNRNHQDPLAVAYHLIIDNRRIMNEAKDFYLATSPPDSFLDDHHLTRPHPERVPFLVAETPRARHTLDELNPQKSKHQGVRKAKWHLGIRSQSRPNDIMAEVCRAIKQLDYEWKVVNPYYLRVRRKNPVTSTYSKMSLQLYQVDSRTYLLDFRSIDDEITEAKSGTATPQRSGSVSNYRSCQRSDSDAEAQGKSSEVSLTSSVTSLDSSPVDLTPRPGSHTIEFFEMCANLIKILAQ

SEQ ID NO: 264541 - DNA, 1725 bp, Artificial Sequence
  derived and/or modified sequence
atgaggcggctctcctcctggagaaaaatggccacggctgaaaagcaaaagcacgacggaagagtaaagatcgggcattacattcttggggacactttgggagtaggaacattcggaaaggtgaaggtcgggaaacatgagctgaccggccataaggtcgccgttaaaatcttgaacagacagaagattcggagcctcgatgtggtgggcaaaatcaggcgcgaaatccagaacctcaaactgtttagacaccctcacatcatcaagctttatcaggttattagcacaccgtcggatatcttcatggtgatggagtatgtcagtggaggagaactgtttgattacatatgcaaaaatgggagaaagtcagatgttcccggggtggtcaagacaggatctactaaagagttggacgaaaaggaatctcgccggttgtttcaacagatactgtctggcgttgattattgccaccgccatatggtggtgcacagagacctgaaacccgagaacgttctactcgacgctcacatgaacgccaagattgcagacttcgggctttctaacatgatgtccgacggggagtttttgagaacgtcctgcggctccccgaattatgccgccccggaggttatcagcggcaggctgtacgcagggcccgaggtggatatctggtctagcggggtcatcttatatgctcttctctgcggcacactcccctttgatgatgaccatgtgccaactctgttcaagaaaatttgcgatggtattttctatacgccccaatacctaaacccctccgtgatttccctcctgaaacatatgttacaggttgaccctatgaagagagccacaatcaaagatatcagagagcatgaatggttcaagcaggacctgcctaagtacttgttcccggaagatcctagttactcttcaaccatgattgacgacgaagcccttaaggaggtgtgtgagaaattcgagtgctccgaggaagaagtactttcatgcctttacaataggaaccaccaggatcctctcgcagttgcatatcatttgatcattgacaaccggagaattatgaatgaggcgaaggacttttacctggcaacttctccccccgatagtttccttgatgaccatcatctgacccgaccgcacccagaacgggtgcctttcttggtggcagaaacacctcgggcacgccacacactggacgaactaaatcctcagaagtctaagcaccagggtgttaggaaagccaaatggcacttgggcattaggagtcaaagtaggccaaacgacattatggctgaggtctgccgcgctattaagcaactggactatgagtggaaggtcgtaaacccttactacttgcgggttcgcaggaagaaccctgtgacatcgacctatagtaaaatgtccttgcagctgtatcaagttgatagtaggacataccttttggactttcgctccatagatgatgaaatcacggaagcgaaatctgggactgcaactccccagcgatctggctctgtgtctaattataggtcttgccagcgctcagatagtgacgctgaggcacaagggaagagcagcgaggtttctctcacatcttctgtcacatcactcgattcctcgccagtggatttaaccccaagaccaggatcccacaccatcgaatttttcgagatgtgcgctaacttgatcaaaattctggcccagtag

SEQ ID NO: 264542 - DNA, 1725 bp, Artificial Sequence
  derived and/or modified sequence
atgaggcggctgagctcctggaggaagatggccacagctgagaagcagaagcatgatggccgggtgaagattggccactacatcctgggggacaccctgggcgtgggcaccttcggcaaggtgaaggtgggcaagcatgagctgaccggccacaaggtggccgtgaagatcctgaaccggcagaagatccgcagcctggatgtggtgggcaagatcagaagagagatccagaacctgaagctgttccgccacccccacatcatcaagctgtaccaggtgatcagcacccccagcgacatcttcatggtgatggagtatgtgtctggaggagagctgtttgactacatctgcaagaatggaaggaagagtgatgtgcctggggtggtgaagacaggcagcaccaaggagctggatgagaaggagagcagaagactcttccagcagatcctgtctggagtggactactgccaccgccacatggtggtgcaccgggacctgaagccagaaaatgtgctgctggatgcccacatgaatgccaagattgctgactttggcctgagcaacatgatgtctgatggagagttcctgcggaccagctgtggcagccccaactatgctgcccctgaggtgatcagcggccgcctgtatgccggccctgaggtggacatctggagcagcggggtcatcctgtatgccctgctgtgtggcaccctgccctttgatgatgaccacgtgcccaccctcttcaagaagatctgtgatggcatcttctacaccccccagtacctgaaccccagcgtcatcagcctgctgaagcacatgctgcaggtggaccccatgaagagggccaccatcaaggacatccgggagcacgagtggttcaagcaggacctgcccaagtacctgtttcctgaggaccccagctacagcagcaccatgattgatgatgaggccctgaaggaggtgtgtgagaagtttgaatgttctgaggaggaggtgctgagctgcctgtacaacagaaaccaccaggaccccctggccgtggcctaccacctgatcatcgacaacagacgcatcatgaatgaggccaaggacttctacctggccaccagccccccagacagcttcctggatgaccaccacctgacccggccccaccctgagcgggtgcccttcctggtggccgagaccccccgggcccggcacaccctggatgagctgaacccccagaagagcaagcaccagggcgtgaggaaggccaagtggcacctgggcatccgcagccagagccggcccaatgacatcatggccgaggtgtgccgggccatcaagcagctggactatgagtggaaggtggtgaacccctactacctgcgggtgcggaggaagaaccctgtgaccagcacctacagcaagatgagcctgcagctgtaccaggtggacagcaggacctacctgctggacttccgcagcattgatgatgagatcacagaggccaagtctggaacagccaccccccagaggagcggctctgtgagcaactaccgcagctgccagaggagtgacagtgatgctgaggcccagggcaagagcagcgaggtgtccctgaccagctctgtgaccagcctggacagcagccctgtggacctgaccccccggcccggcagccacaccatcgagttctttgagatgtgtgccaacctgatcaagatcctggcccagtag

SEQ ID NO: 264543 - DNA, 1725 bp, Artificial Sequence
  derived and/or modified sequence
atgcggcggctgagcagctggcggaagatggccaccgccgagaagcagaagcatgatggacgggtgaaaattggccactacatcttaggcgatactctgggcgtcggaactttcggcaaggtgaaagtcggaaagcatgagctgaccgggcataaggtggccgtgaaaatcttaaaccgacaaaagattcgtagtctcgacgttgtcgggaagattagaagggaaatccagaatctgaagctcttccggcatccgcatatcattaagctttatcaagtgatcagcactccgtctgatattttcatggtgatggaatacgtgagtggcggcgagctatttgactacatatgtaagaacggtcgtaaaagtgacgttcctggggtcgtaaaaaccggcagtacaaaggagctggatgagaaagagtcccggcgtttattccagcagattctgtcgggtgtggattattgccaccgtcatatggtggtccaccgggacttgaagcctgaaaatgtgctcctggacgcacatatgaacgctaagattgcagatttcgggctctccaatatgatgagcgatggcgagtttctgaggacaagttgtggcagccccaattatgccgcacctgaagtgatttcaggacgactgtacgccggcccagaagtggatatctggagctctggcgtgattctctacgcccttctgtgtgggaccctgccttttgacgacgaccatgtgccgactctgttcaagaagatctgtgacgggatcttctacactccgcagtacctcaatcctagcgtaatcagcctgctgaagcacatgctgcaggtggaccctatgaaaagggctacaatcaaggatattcgggaacacgaatggtttaaacaggaccttcctaagtacctctttcctgaggatccatcttactctagcactatgattgacgatgaggcattaaaagaagtttgcgaaaaatttgagtgctccgaagaggaggtcctgtcatgtctgtacaaccgaaaccaccaagaccccctggcagtcgcctatcacttgatcattgacaacagacggatcatgaatgaggcaaaggacttttatttagccacaagtcctcccgacagctttttagatgatcatcacctgaccaggccacatcccgagcgcgtaccgttcctcgtggccgagacacctagggctcgccatacacttgacgagctcaacccacagaagtccaaacatcagggcgtgcgcaaagccaagtggcaccttgggatcagatctcaatcacggcctaacgacatcatggcggaagtctgcagggcgattaaacagcttgattatgaatggaaagtagtcaatccctattatctgagagtaagacgcaaaaatccggtgacctcaacatattcaaaaatgagtttacagctatatcaagtggattctaggacttatctgctggactttcgcagtatagatgacgagatcactgaagccaaatccgggaccgctacaccacagagaagcggatcagtttccaactatagaagctgtcagcgttccgacagcgacgctgaggctcaaggaaaaagctctgaggtaagccttacatcaagtgtcaccagcctggattcaagccccgtcgacctgaccccaaggcctggatcccatacaattgagttttttgagatgtgtgctaacctgatcaaaattctggcacagtag

SEQ ID NO: 264544 - DNA, 1725 bp, Artificial Sequence
  derived and/or modified sequence
atgcgacgtctgagctcatggcgcaaaatggccactgccgaaaagcagaagcatgatggtcgcgtgaaaatcggacattatattttgggagatacactgggcgtcggaacattcgggaaagttaaagttggtaagcacgaattaacaggccacaaagtggctgtgaagatcctcaatcgacagaagatacgcagtctggatgtggtcggaaagattaggcgcgagattcagaacctgaaattgtttcgccatccccacattattaaactgtatcaagtcatttctacaccaagcgacatatttatggtgatggagtacgtcagtggcggagagctgtttgactatatctgcaagaacgggagaaagagcgatgtccctggcgtcgtgaagacaggatctactaaagaactcgacgagaaagaaagtcgaagacttttccagcaaatattgtctggcgtcgattattgccacaggcacatggtggtgcacagggacctcaaacctgagaacgtattgctggatgcacacatgaatgctaaaattgcggacttcgggttgtctaacatgatgtcagatggagaatttctccgtaccagttgcgggtccccaaactacgccgctccagaggtcatcagtggcagactctatgcgggaccagaagtagatatttggtctagtggcgtgatcctctacgcattgctctgtggaaccctgcccttcgacgacgaccacgtaccgacactcttcaagaagatctgtgatgggatattctacacaccacagtacttaaacccgagtgtcatcagcctgctgaaacatatgctgcaagttgacccgatgaagcgagctacaatcaaagacattagagagcacgagtggttcaagcaggatctgcctaagtacctgtttcccgaagacccctcttacagctcaaccatgatcgacgacgaggcattgaaagaggtgtgtgaaaaatttgagtgctcagaggaagaggtgcttagttgcctatacaataggaaccaccaagaccccttagctgtggcataccatctcattatcgataacaggaggatcatgaacgaggcaaaagacttctatctcgcaacctctccccctgactctttcctggatgaccaccacctgacacgccctcaccccgagcgcgtgcccttcctggtcgctgagactcctcgtgcaaggcatacccttgatgagctcaacccacagaagtcaaagcaccagggtgtgcgcaaggccaaatggcacctaggtatccgctcccagtcccgccctaacgatattatggcggaggtgtgtcgtgcaattaagcagctggattatgagtggaaagtggtcaacccttactacctgagagtgagacggaagaatccagtgacgtccacttacagcaaaatgtccctgcagttgtatcaggtggatagccggacctacctcctggatttccgtagtatcgacgacgagattaccgaggccaagtcaggcaccgctaccccacagcgcagcggatcagtgtctaattacaggtcttgccagagatccgactccgacgccgaggcccaggggaagagttctgaagtgtctctcacttcttcggtgaccagcctcgacagcagcccagttgatctgacaccacgacctggctcacacaccatagaatttttcgagatgtgtgcaaacttgatcaaaatccttgcccagtag

SEQ ID NO: 264545 - DNA, 1918 bp, Artificial Sequence
  derived and/or modified sequence
attctcctggcagcccccgcccgccccgccagggggagcgtctgcgcccgacgtaggctgcggggcctgggctggcggcgcagggcggtgactcggctcggtggctgccctcccgcgtccccaccccctccccgcccgcccccggcgcggccctgcccgccccctccgccccctcccgcagcgccatgcgcagactcagttcctggagaaagatggcgacagccgagaagcagaaacacgacgggcgggtgaagatcggccactacattctgggtgacacgctgggggtcggcaccttcggcaaagtgaaggttggcaaacatgaattgactgggcataaagtagctgtgaagatactcaatcgacagaagattcggagccttgatgtggtaggaaaaatccgcagagaaattcagaacctcaagcttttcaggcatcctcatataattaaactgtaccaggtcatcagtacaccatctgatattttcatggtgatggaatatgtctcaggaggagagctatttgattatatctgtaagaatggaaggaaatctgatgtacctggagtagtaaaaacaggctccacgaaggagctggatgaaaaagaaagtcggcgtctgttccaacagatcctttctggtgtggattattgtcacaggcatatggtggtccatagagatttgaaacctgaaaatgtcctgcttgatgcacacatgaatgcaaagatagctgattttggtctttcaaacatgatgtcagatggtgaatttttaagaacaagttgtggctcacccaactatgctgcaccagaagtaatttcaggaagattgtatgcaggcccagaggtagatatatggagcagtggggttattctctatgctttattatgtggaacccttccatttgatgatgaccatgtgccaactctttttaagaagatatgtgatgggatcttctatacccctcaatatttaaatccttctgtgattagccttttgaaacatatgctgcaggtggatcccatgaagagggccacaatcaaagatatcagggaacatgaatggtttaaacaggaccttccaaaatatctctttcctgaggatccatcatatagttcaaccatgattgatgatgaagccttaaaagaagtatgtgaaaagtttgagtgctcagaagaggaagttctcagctgtctttacaacagaaatcaccaggatcctttggcagttgcctaccatctcataatagataacaggagaataatgaatgaagccaaagatttctatttggcgacaagcccacctgattcttttcttgatgatcatcacctgactcggccccatcctgaaagagtaccattcttggttgctgaaacaccaagggcacgccatacccttgatgaattaaatccacagaaatccaaacaccaaggtgtaaggaaagcaaaatggcatttaggaattagaagtcaaagtcgaccaaatgatattatggcagaagtatgtagagcaatcaaacaattggattatgaatggaaggttgtaaacccatattatttgcgtgtacgaaggaagaatcctgtgacaagcacttactccaaaatgagtctacagttataccaagtggatagtagaacttatctactggatttccgtagtattgatgatgaaattacagaagccaaatcagggactgctactccacagagatcgggatcagttagcaactatcgatcttgccaaaggagtgattcagatgctgaggctcaaggaaaatcctcagaagtttctcttacctcatctgtgacctcacttgactcttctcctgttgacctaactccaagacctggaagtcacacaatagaattttttgagatgtgtgcaaatctaattaaaattcttgcacaataaacagaaaa

SEQ ID NO: 264546 - DNA, 1725 bp, Artificial Sequence
  derived and/or modified sequence
atgagaagactgagcagctggagaaagatggccaccgccgagaagcagaagcacgacggcagagtgaagatcggccactacatcctgggcgacaccctgggcgtgggcaccttcggcaaggtgaaggtgggcaagcacgagctgaccggccacaaggtggccgtgaagatcctgaacagacagaagatcagaagcctggacgtggtgggcaagatcagaagagagatccagaacctgaagctgttcagacacccccacatcatcaagctgtaccaggtgatcagcacccccagcgacatcttcatggtgatggagtacgtgagcggcggcgagctgttcgactacatctgcaagaacggcagaaagagcgacgtgcccggcgtggtgaagaccggcagcaccaaggagctggacgagaaggagagcagaagactgttccagcagatcctgagcggcgtggactactgccacagacacatggtggtgcacagagacctgaagcccgagaacgtgctgctggacgcccacatgaacgccaagatcgccgacttcggcctgagcaacatgatgagcgacggcgagttcctgagaaccagctgcggcagccccaactacgccgcccccgaggtgatcagcggcagactgtacgccggccccgaggtggacatctggagcagcggcgtgatcctgtacgccctgctgtgcggcaccctgcccttcgacgacgaccacgtgcccaccctgttcaagaagatctgcgacggcatcttctacaccccccagtacctgaaccccagcgtgatcagcctgctgaagcacatgctgcaggtggaccccatgaagagagccaccatcaaggacatcagagagcacgagtggttcaagcaggacctgcccaagtacctgttccccgaggaccccagctacagcagcaccatgatcgacgacgaggccctgaaggaggtgtgcgagaagttcgagtgcagcgaggaggaggtgctgagctgcctgtacaacagaaaccaccaggaccccctggccgtggcctaccacctgatcatcgacaacagaagaatcatgaacgaggccaaggacttctacctggccaccagcccccccgacagcttcctggacgaccaccacctgaccagaccccaccccgagagagtgcccttcctggtggccgagacccccagagccagacacaccctggacgagctgaacccccagaagagcaagcaccagggcgtgagaaaggccaagtggcacctgggcatcagaagccagagcagacccaacgacatcatggccgaggtgtgcagagccatcaagcagctggactacgagtggaaggtggtgaacccctactacctgagagtgagaagaaagaaccccgtgaccagcacctacagcaagatgagcctgcagctgtaccaggtggacagcagaacctacctgctggacttcagaagcatcgacgacgagatcaccgaggccaagagcggcaccgccaccccccagagaagcggcagcgtgagcaactacagaagctgccagagaagcgacagcgacgccgaggcccagggcaagagcagcgaggtgagcctgaccagcagcgtgaccagcctggacagcagccccgtggacctgacccccagacccggcagccacaccatcgagttcttcgagatgtgcgccaacctgatcaagatcctggcccagtag

SEQ ID NO: 264547 - protein, 513 aa, Artificial Sequence
  derived and/or modified sequence
MGSSWCLYGCCNAGVKTTRLEAHSEMGSTEILEKETPENLSNGTSSNVEAAKRLAKRLYQLDRFKRSDVAKHLGKNNEFSKLVAEEYLKFFDFTGMTLDQSLRYFFKAFSLVGETQERERVLIHFSNRYFYCNPDTIASQDGVHCLTCAIMLLNTDLHGHNIGKKMTCQEFIANLQGVNEGVDFSKDLLKALYNSIKNEKLEWAVDDEEKKKSPSESTEEKANGTHPKTISRIGSTTNPFLDIPHDPNAAVYKSGFLARKIHADMDGKKTPRGKRGWKTFYAVLKGTVLYLQKDEYKPEKALSEEDLKNAVSVHHALASKATDYEKKPNVFKLKTADWRVLLFQTQSPEEMQGWINKINCVAAVFSAPPFPAAIGSQKKFSRPLLPATTTKLSQEEQLKSHESKLKQITTELAEHRSYPPDKKVKAKDVDEYKLKDHYLEFEKTRYEMYVSILKEGGKELLSNDESEAAGLKKSHSSPSLNPDTSPITAKVKRNVSERKDHRPETPSIKQKVT

SEQ ID NO: 264548 - DNA, 1542 bp, Artificial Sequence
  derived and/or modified sequence
atggggtcttcatggtgcttgtacggttgctgtaacgccggggtgaaaacgacgcgactggaggctcactccgaaatgggaagtactgaaatcttggagaaggaaactcctgaaaacctgtccaacggaacctcttcaaacgtcgaagccgcgaaaagactggccaagcggctgtatcagctggaccggttcaagcgtagtgacgtggcaaaacatttggggaagaacaatgagttttccaaactggtagcggaggagtatctgaaattcttcgactttactggcatgacgttggatcagagccttagatacttcttcaaggctttctcactcgtgggcgaaacccaggaaagggagcgcgtgctcatccacttctcaaacagatatttctattgcaaccccgataccatcgcttcacaggatggagtacactgtcttacctgtgctatcatgctattgaacactgacctacacgggcataacattgggaagaagatgacttgccaagagtttatcgccaatcttcaaggtgtgaacgagggtgtcgacttttctaaagaccttttaaaggcgctatacaattccatcaaaaatgaaaaactcgagtgggccgtggacgatgaagaaaagaaaaagagccccagcgagtctacagaggagaaagctaatggcacacaccctaagaccatctcccgtatcgggtccacaaccaaccctttcttggacatcccacacgatcccaatgcagccgtctacaagtccggcttcctggcccggaagatccacgctgacatggacgggaaaaagacaccacgcggcaagagaggttggaaaaccttctacgcagtgctgaaagggaccgtcctgtatctacagaaagatgagtataaacctgagaaggccctgagcgaggaagatctcaagaatgccgtgtctgtccatcacgcgttggccagcaaggccactgactacgagaaaaagccgaatgtgtttaagctcaaaacagcagactggagggtgttgctgttccaaactcaaagccccgaagaaatgcagggctggataaataaaatcaattgtgtggcagctgtgtttagcgctcccccttttccagctgcaataggctcccagaagaagttcagccgccccctcctgccggccactacgaccaagctcagtcaggaggaacagctaaaaagccacgagtctaagctgaaacagatcactaccgaactggcggagcacagatcgtacccccctgacaaaaaagtcaaagcgaaggacgtagacgaatacaaattgaaagaccattacctggagtttgagaagacaagatacgagatgtacgtatcaatcctgaaagagggcggcaaagagctactgtctaatgatgagtccgaggctgccggcttgaagaaaagtcacagctctcccagcctgaacccagacaccagtccaattaccgctaaggtcaaacgaaacgtttctgagagaaaagaccatcgaccggaaactcctagcatcaagcagaaggttacttag

SEQ ID NO: 264549 - DNA, 810 bp, Artificial Sequence
  derived and/or modified sequence
atgattggggtcaactctgtgcagtccgcatctaaggttcgggttcgcacatccggaagtgtgaaatactcccgcgaggattcaataaggaggcagtctcacaggtcaaaatctatgaagatttctaatagcagcgagttcagtgcaaaggagaataaagccctgtacaacagcatcaaaaatgaaaaactcgagtgggccgtggatgatgaggagaagaaaaaatctcctagcgagtctacggaagaaaaagcaaatgggacacatcccaagacaatttccaggattgggtccacaacgaacccattcctcgacattcctcacgatcctaatgcggctgtatataagtctgggttccttgcacgaaagatccacgcggacatggatggaaaaaagacgcctagggggaagcgcggatggaagactttctatgccgtgctcaagggcactgtgctgtatctgcagaagcacgaatctaagctaaagcaaatcaccaccgaactggctgagcatcgatcctacccccctgataagaaagtgaaggccaaagatgtagatgagtataaactcaaagatcactaccttgaattcgagaagacaagatacgagatgtacgtgtcaattctgaaggaagggggaaaagagctgttgagcaacgacgagtccgaagctgctggcttgaaaaagtcacactcaagtccgtccttgaacccggataccagccctattaccgctaaggttaagcgcaatgtgtccgagaggaaagaccaccgcccagagacgccatcaataaagcagaaagtgacctag

SEQ ID NO: 264550 - DNA, 1542 bp, Artificial Sequence
  derived and/or modified sequence
atgggcagctcctggtgcctgtatggctgctgcaatgccggcgtgaagaccacccggctggaggcccacagcgagatgggcagcacagagatcctggagaaggagaccccagagaacctgagcaatggcaccagcagcaatgtggaggccgccaagaggctggccaagaggctgtaccagctggaccgcttcaagagaagtgatgtggccaagcacctgggcaagaacaatgagttcagcaagctggtggccgaggagtacctgaagttctttgacttcaccggcatgaccctggaccagagcctgcgctacttcttcaaggccttcagcctggtgggggagacccaggagcgggagcgggtgctgatccacttcagcaaccgctacttctactgcaacccagacaccatcgccagccaggatggagtgcactgcctgacctgtgccatcatgctgctgaacacagacctgcacggccacaacatcggcaagaagatgacctgccaggagttcatcgccaacctgcagggcgtgaatgaaggagtggacttcagcaaggacctgctgaaggccctgtacaacagcatcaagaatgagaagctggagtgggccgtggatgatgaggagaagaagaagagccccagcgagagcacagaggagaaggccaacggcacccaccccaagaccatcagcagaattggcagcaccaccaaccccttcctggacatcccccatgaccccaatgctgctgtgtacaagagcggcttcctggccaggaagatccatgctgacatggatggcaagaagaccccccggggcaagaggggctggaagaccttctatgctgtgctgaagggcaccgtgctgtacctgcagaaggatgagtacaagccagagaaggccctgtctgaggaggacctgaagaatgctgtgtctgtgcaccacgccctggccagcaaggccacagattatgagaagaagcccaacgtgttcaagctgaagacagctgactggagggtgctgctcttccagacccagagccctgaggagatgcagggctggatcaacaagatcaactgtgtggccgctgtgttcagcgccccacccttccctgctgccatcggcagccagaagaagttcagccggcccctgctgcctgccaccaccaccaagctgagccaggaggagcagctgaagagccatgagagcaagctgaagcagatcaccacagagctggccgagcacaggagctaccccccagacaagaaggtgaaggccaaggatgtggatgagtacaagctgaaggaccactacctggagtttgagaagaccaggtatgagatgtatgtgtccatcctgaaggagggcggcaaggagctgctgagcaatgatgagagcgaggccgccggcctgaagaagagccacagcagccccagcctgaacccagacaccagccccatcacagccaaggtgaagagaaatgtgtctgagaggaaggaccacaggcctgagacccccagcatcaagcagaaggtgacctag

SEQ ID NO: 264551 - DNA, 810 bp, Artificial Sequence
  derived and/or modified sequence
atgattggagtgaacagcgtgcagagcgccagcaaggtgcgggtgaggaccagcggctctgtgaagtacagccgggaggacagcatccggcggcagagccacaggagcaagtccatgaagatcagcaacagcagcgagttcagcgccaaggagaacaaggccctgtacaacagcatcaagaatgagaagctggagtgggccgtggatgatgaggagaagaagaagagccccagcgagagcacagaggagaaggccaacggcacccaccccaagaccatcagccgcatcggcagcaccaccaaccccttcctggacatcccccatgaccccaatgctgctgtgtacaagagcggcttcctggccaggaagatccacgccgacatggatggcaagaagaccccccggggcaagaggggctggaagaccttctatgctgtgctgaagggcaccgtgctgtacctgcagaagcatgagagcaagctgaagcagatcaccacagagctggccgagcacaggagctaccccccagacaagaaggtgaaggccaaggatgtggatgagtacaagctgaaggaccactacctggagtttgagaagaccaggtatgagatgtatgtgtccatcctgaaggagggcggcaaggagctgctgagcaatgatgagagcgaggccgccggcctgaagaagagccacagcagccccagcctgaacccagacaccagccccatcacagccaaggtgaagagaaatgtgtctgagaggaaggaccacaggcctgagacccccagcatcaagcagaaggtgacctag

SEQ ID NO: 264552 - DNA, 1542 bp, Artificial Sequence
  derived and/or modified sequence
atgggcagcagctggtgcctgtacggctgctgcaacgccggcgtgaagacaacccggctggaggcccactctgagatggggtctacagagattctggaaaaggagacacctgaaaacctgtctaacggcacatctagcaatgtggaggccgccaaacgtctggctaagcggttgtaccagctggatcgtttcaagcgtagcgatgtggccaaacatctgggcaagaataatgagttttcaaaattggtcgctgaagagtacctgaaattttttgatttcactgggatgactctggatcaaagcctacgatacttcttcaaagctttctctcttgttggtgagactcaggaacgtgagcgggtactgattcattttagtaatcgctatttctactgtaatcccgacacaatcgcttcacaggacggagtgcattgtctgacttgcgccatcatgttgttaaatacagatctgcacgggcacaatataggcaagaagatgacatgtcaagaatttattgcaaacctgcagggtgtgaacgagggagtcgatttcagcaaggatctactcaaagcattatacaattctattaagaacgagaagctggagtgggcagtggacgacgaggaaaaaaaaaagtccccttcagaaagcactgaggaaaaagccaatggtacccatccaaaaacaattagccgcatcggcagcacaaccaacccattcttagatatcccccacgaccctaacgccgctgtgtataaatccggctttctggctcgcaagatacatgccgacatggacgggaagaaaaccccccgcgggaagagaggttggaaaacattctatgcagttctaaagggcactgtcctttatctccagaaggacgagtacaaacccgaaaaagccctatcagaagaagacttgaaaaacgccgtgtcagtgcaccacgcactcgctagcaaggccacagactatgagaaaaaaccaaacgtgtttaaattgaagaccgctgactggagggttctgctgtttcagacgcagtccccagaagagatgcagggttggataaataagataaactgcgtagctgccgttttcagcgcccctcctttcccggctgcaataggcagtcagaaaaaattttccaggccactgttgcctgccacaactactaaactttcccaggaagagcagcttaaaagtcacgaatcaaaacttaaacagatcaccaccgagttagctgaacatcgaagctatccgcccgataaaaaggtgaaggccaaggacgttgacgagtacaagctgaaggatcactatctggagtttgagaagaccaggtatgagatgtatgtgtctattctcaaggaggggggcaaggagttactctcgaacgatgagtctgaggctgctgggctcaagaaatcacactcgtcaccctctttaaaccccgatacttcacctatcaccgccaaggtcaaaaggaacgtgtctgaaaggaaagaccaccgtcctgaaacccccagcattaagcagaaggtgacttag

SEQ ID NO: 264553 - DNA, 810 bp, Artificial Sequence
  derived and/or modified sequence
atgatcggcgtgaacagcgtgcagagcgccagcaaggtgcgggtgagaacatctggcagcgtaaagtattcgcgcgaggactcaatacggcgtcagagtcaccggtcgaaatccatgaagatatctaatagcagcgaattctccgccaaagagaacaaggctctgtataatagcatcaagaatgagaagcttgaatgggccgtggacgacgaagagaagaaaaagtcaccttcagaatctacagaagagaaggctaatggaacccatcctaagactatctcacgcataggttccaccacaaacccgtttctggatattcctcatgacccaaacgcggctgtgtacaagtccggattcctcgcaaggaagattcacgccgatatggacggtaagaaaacacctaggggcaaaagaggttggaagacattctacgctgtcctcaagggtacggtactgtacttacagaagcacgagagcaaactaaagcaaatcacaactgagctggccgagcatagaagttatccgccggacaagaaggttaaggctaaggacgtggatgaatataagttgaaagaccactacctggagttcgagaaaacccgctatgagatgtatgtttccattctaaaggagggtggaaaggagttgctttctaacgacgagtccgaggccgccggattaaagaaatcacattctagcccatcactgaatcccgatacgagcccaattactgcaaaagtcaagcgcaacgtgagcgagcgaaaagatcaccgaccagagactccgtcaatcaaacaaaaggttacatag

SEQ ID NO: 264554 - DNA, 6665 bp, Artificial Sequence
  derived and/or modified sequence
aggctcggcagtcactgaacttgggagctgaagaatactggacggggcttcggagaggaaggatggtccaggcgcaccccaggggttgcgatgggctcttcttggtgtctgtatggttgctgcaatgctggggtgaaaacaacacggctagaagctcattctgaaatggggagcactgaaattttggaaaaggagaccccagaaaatctcagtaatggtaccagcagcaatgtggaagcagccaaaaggttggccaaacgcctttatcagctggacagattcaaaagatcagatgttgcaaaacaccttggcaagaacaacgaatttagcaaactagttgcagaagaatatctgaagttttttgattttacaggaatgacgctggatcagtcactcaggtatttctttaaagcattctctcttgtgggagaaactcaagaacgagagagagttttaatacacttctccaatagatatttttattgtaacccagataccattgcttcacaagatggagtccattgccttacctgtgcaataatgcttcttaataccgatctacatggccacaatattggaaagaagatgacctgtcaggagttcattgcaaatctgcaaggggtaaatgagggtgttgatttctccaaggatctgctgaaagctctgtacaactcaatcaagaatgagaagcttgaatgggcagtagatgatgaagagaaaaaaaagtctccctcagaaagtactgaggagaaagctaacggaacacatccaaagaccatcagtcgtattggaagtactactaacccatttttggacattcctcatgatccaaatgctgctgtgtacaaaagtggattcttggctcggaaaattcatgcagatatggatggaaagaagactccaagaggaaaacgaggatggaaaaccttttatgctgtactgaagggaacagttctttacttgcaaaaggatgaatacaagccagaaaaggccttgtctgaagaggacttgaaaaacgctgtgagtgtgcaccacgcattggcatccaaggccacggactatgagaagaaaccaaacgtgtttaaacttaaaactgccgactggagggtcttgctttttcaaactcagagcccagaggaaatgcaagggtggataaacaaaatcaattgtgtggcagctgtattttctgcaccaccatttccagcagcaatcggctctcagaagaagtttagccgcccacttctgcctgccactacaacaaaactgtctcaggaggagcaactgaagtcacatgaaagtaagctgaagcagatcaccaccgagctggccgagcaccgctcatatccccccgacaagaaggtcaaagccaaggacgtcgatgagtacaaactgaaagaccactatctggagtttgagaaaacccgctatgaaatgtatgtcagcattctcaaggaaggaggcaaagagctactgagtaacgatgaaagcgaggctgcaggactgaagaagtcgcactcgagtccttcgctgaacccggatacttctccaatcactgccaaagtcaagcgtaacgtgtcagagaggaaggatcaccgacctgaaacaccaagcattaagcaaaaagttacttagagtccatctgcggccaggaagtgctggtcatggagcaaaatagggtttttcaagatctttctggtaatccgtgaatatatttaaaaaaaaaaagtctgtgacaaaacggtgcattagtaattttttctattgtatatttttgttagtttctgtacagattgtctttgctcttgatttcttttgctttgatgatttttgcaacttgatagctaatgcaccttttctgtgaggaggaggggatcgtgatttcagaatgaattatgtatcccttctcttttggttttctcttgtttgcagtctgctcagttgttttatgtattctcatatcaactgttaaacttttttttaaggttaaagaatttaatccattgtgaaacacttaactggacaaactgtagttttagtaaattctagctggagttaatatacgcctttatatgtgaaatcttgcccagtcacagaggtagaattgagcactcacagatgctccagtaagaatcacagtgctgggaatctagttgctccaatatgaggcagcttcatgtgcagcttagcacttgttgttgagatcggaccctgctggaagcagggaaaagaagcgtgaagatcgtaggattgagaacttagggaagcacattagcttgcttgaagtgctgattccatttcagccaagcaagggaaagaggaagtggagtcattttgcctttgaaggctgaggaaagattgatacccagttaattttgtttgctaaaggatgggggcaataatcggcccttgaggagctgcagcagtaggcatgtgctcagtctgcaggaattgttacctcactcccacagggtctagactagaaatccatcatctctatcgttgatatccttccatccaggaatagatttttcttactctacatatgtgtgtgtgcgtgcgtgtgtgtgcgtgtgtgggcatggggttgtgtcctggttgtgatattgaggtcttccttcctaacaaattaatactaaaatgaaacagcttttcttgtgtccttaagacaaaataaggaaggaaaacgtagctgcagttgtccacgatggatattggttctttaaaatatatctgaaagtagtagtcagaatgaattatggttggaaaactgaggaatcttctggttgcaggtgcaaagtgactttgtttattcttgtctcagtctccttgatagccacttcactctgctactactcaactttctcctaaaaatacttcatctattttcagtcctttctttctgtctactcaaaatggttctattaactttgcagtcatgagcttgttccagttacagtccctttgaagttcagggtgataaacagaatattcttctgtagaggaagagaaaggagtgaaagtttagcccactgagacctagagctttgtgatttcctaaccttgaaactctgtaatccctaaagttaaaatctccgcaagtggcacaacttcagaactaatagtatcactttgatttttctttttcctcccttagaaagtttctctagttctatagtttatttgttgaaggtactatgaccaaagaatcagctgctctacaggaatagcatggttccagtgaattagagaaaacctgctgtaaagccatggtagtgtctaagtggtatgttattatgatgtactagcatttatttacagaattatttattaacgtttacttccttcccctctgtaaatgtccatgactattgcccagagaaggcttacccctctctagggttgcagttgctttctttgtaataagtattttgccacacctgtaaaaaaaaaaacctcacttttaactctctgccttgtttgggtaaaggcagtaactaagtttatgtttcagaactgcaaaacaaacaggatagttaccaatatggcccatgtatcagattgatttttgtagcctctcactgaatccaacatatccacaagcaagttatctgtctttctacctgataatctaaattatcaggatatttgttttctgcctaaatgtttatactaagccgaggggagagaggtacctagaccatgtcatctacaagcttcagtaactaaagaaaaaggaacttccctgagtggcttgaatgtgtttgcccacagtctatatctatgtatatagaatgtctgtatgtattttacttatttaatatacattgaatggtaccttgctacagtatttctgacatttagagtagtgttgaaatactcggctagcatcagcaccactatagcactgtccgtgtcatatgagtcactaatattaactccagggacttctggataggctaatagatcattggatacgaagggctcttttgaagcttcagtataccatgtttgcatagtttatctttaaaaacaactttaaaggttcttttgtgagccaggatctcagactgccgtagcatgatgctgtccatctttagcgcatgggctgagaacacctcttccctgaggcttctgaaggttgctgtctgtcatgagtgcatgaaggaggccaagagtttatgctatgggaggaaacagtcactgatttgcctagattctgagagtctggcccatagccaaccacattttcctttgggataatttatttcctgtggcatctagccagaagaaattgaggatgtttcctttcacagctgctccaagcctgttgcccaattcacggtacaagggagcaccccttccctttcctctgaaggtacgccacccacctccgtcgcccacctcagcgcccaggagccttgggacttccttccatatgataaatcattcttcttcacgtcaatacacttcatattaatttctagtacagaaaatcttgacagctatcagaatgccttggtcatagtgttgttgcaaaattgaccatacaggtggcccatgtataaaatctgaattttaggggtttgtccccacctcgcatgctggcttttacagggaggtgtctgggattcctcattagcaatcaaaacttaattactgggatgcagagtccttactttatcgccagcccgtaggcatttctgaagtgcacttttttgaaacatcattttgctaactctcagcagtgtctaattaaactgagcaatacttttgtgaattttaattaatctcagcaaaaccatgatgggagagagtcctctgatggaaatgtagtccctggattatgtgtaacctttttattcctcttagatgcagaggatagaaagcattttttggtgcagtggtcttgtggcaaacacaagaccctctatgcgtctccaactgttatcctaatctagaaaatgaggactggcccctgggcaaaagtgacatgaggaatttactctggaagaggaaaatctgggtggctttccaaggctaagataggtttgtatttcaccctgtggccaagctacagaacttctgagattgtggaagaatttttgcaaccagcagggaaagaggcctcttactgcctaaacacaaagttacactgagcttttctactgtcctttgcctattgctccctctatcatgtaaagatctgggaaggatgagaggcagggcctgcttgtcatgagctgcactcttttctttttaactaatcattgacaattggaagaaaattgacgttaaagaagtttctccattgtcttactaacaaaaccttttgggtttcattaattgtccttgaaattgagttcctttggcatttttccttgcagtcatcagttaagcatgttgcatcctgaattcacagaagtttagctttgcaggtttgaatctctgtaatttaactcccgtggacttggtcgagttttcagcaggttgggagccacctctcttcatttcagcagtgagtcatcccttgacttttcaaatgacagaattttttccaattgtaaaattagcactgtaaaacaaagaaccaaagtggcatcctaagagttgttaaacctgaagtctagtttatgaggaattgtccaagttggagtttaaatagtatctgcttttgtctcaaagcatctaagttattctgacagaaaatggtaagtcagctttgcaggcagatgcgcctctgggcctcctaccttgctccacagctttctggccatcttgtctcccaggccatgccactgctctgccacatgtcagcaaatttctttccaccagtcttatagcatcttacatgatcaaatcatcacagaataaccccgtgatagattattgatagcaatagagaggggctttgtcactgatttttctctcagattccttttccatctctcatccataaaggaaggactgaaatccaaaggcattctccttttgtacctacagtatccagaacccacgtgggcagccttctgcttatgacaataattggcccattgcatgcagagagaatgtcttcatagagagaatgtcattaaatacttgaatctgcatgacagtttgacttgaatgcaacagcaggaaaattttgcaagttacataattgtatatacagtaggttttcttaagtctcttcggttcatcctttgtaatttgtgtgtgtatctgtagtattgcaggcttttggagactattcttacaggcagtatgtcagtcatcaaagaaaatgctgtcacctgccattgttgtatttgtgggtatttatagttgtatgtatgtaaatgcatcagtgtgtagattgcatatcagtgtatggtacatgtacatcaaaattatttttgtccttaatcagtgtgatatgaaaagcaagtacaacctcataggactgattatataatgaagttgttgagagtatatatagtggtattgttttattaaacttaaactcaaataatattttgattaaaatttttaataagactttatgctagaaaattctttgagctttgaatcaccagggcaaaaatgactttcaactaaccttgtgaatcttttgcagtgtactgtgtgcaataccaagggcatagctccctgtaatttgggaaatacag

SEQ ID NO: 264555 - DNA, 6136 bp, Artificial Sequence
  derived and/or modified sequence
ggtgcttcttaagctaacgcggatcacggcgctcaggagctgctcaggcacaaccccgcagagttcctccagcgtgagagccttggaacggttggaaagtgcctttttatttctctaaaccccttccttagttgaccttcgaaaatgattggcgtgaatagtgtccagagtgccagcaaggtacgggtgaggacctcaggttccgtgaaatactcccgggaggattctatccggcggcagtctcacaggtcaaagtccatgaaaatttccaactcctcagagttttctgctaaggagaacaaggctctgtacaactcaatcaagaatgagaagcttgaatgggcagtagatgatgaagagaaaaaaaagtctccctcagaaagtactgaggagaaagctaacggaacacatccaaagaccatcagtcgtattggaagtactactaacccatttttggacattcctcatgatccaaatgctgctgtgtacaaaagtggattcttggctcggaaaattcatgcagatatggatggaaagaagactccaagaggaaaacgaggatggaaaaccttttatgctgtactgaagggaacagttctttacttgcaaaagcatgaaagtaagctgaagcagatcaccaccgagctggccgagcaccgctcatatccccccgacaagaaggtcaaagccaaggacgtcgatgagtacaaactgaaagaccactatctggagtttgagaaaacccgctatgaaatgtatgtcagcattctcaaggaaggaggcaaagagctactgagtaacgatgaaagcgaggctgcaggactgaagaagtcgcactcgagtccttcgctgaacccggatacttctccaatcactgccaaagtcaagcgtaacgtgtcagagaggaaggatcaccgacctgaaacaccaagcattaagcaaaaagttacttagagtccatctgcggccaggaagtgctggtcatggagcaaaatagggtttttcaagatctttctggtaatccgtgaatatatttaaaaaaaaaaagtctgtgacaaaacggtgcattagtaattttttctattgtatatttttgttagtttctgtacagattgtctttgctcttgatttcttttgctttgatgatttttgcaacttgatagctaatgcaccttttctgtgaggaggaggggatcgtgatttcagaatgaattatgtatcccttctcttttggttttctcttgtttgcagtctgctcagttgttttatgtattctcatatcaactgttaaacttttttttaaggttaaagaatttaatccattgtgaaacacttaactggacaaactgtagttttagtaaattctagctggagttaatatacgcctttatatgtgaaatcttgcccagtcacagaggtagaattgagcactcacagatgctccagtaagaatcacagtgctgggaatctagttgctccaatatgaggcagcttcatgtgcagcttagcacttgttgttgagatcggaccctgctggaagcagggaaaagaagcgtgaagatcgtaggattgagaacttagggaagcacattagcttgcttgaagtgctgattccatttcagccaagcaagggaaagaggaagtggagtcattttgcctttgaaggctgaggaaagattgatacccagttaattttgtttgctaaaggatgggggcaataatcggcccttgaggagctgcagcagtaggcatgtgctcagtctgcaggaattgttacctcactcccacagggtctagactagaaatccatcatctctatcgttgatatccttccatccaggaatagatttttcttactctacatatgtgtgtgtgcgtgcgtgtgtgtgcgtgtgtgggcatggggttgtgtcctggttgtgatattgaggtcttccttcctaacaaattaatactaaaatgaaacagcttttcttgtgtccttaagacaaaataaggaaggaaaacgtagctgcagttgtccacgatggatattggttctttaaaatatatctgaaagtagtagtcagaatgaattatggttggaaaactgaggaatcttctggttgcaggtgcaaagtgactttgtttattcttgtctcagtctccttgatagccacttcactctgctactactcaactttctcctaaaaatacttcatctattttcagtcctttctttctgtctactcaaaatggttctattaactttgcagtcatgagcttgttccagttacagtccctttgaagttcagggtgataaacagaatattcttctgtagaggaagagaaaggagtgaaagtttagcccactgagacctagagctttgtgatttcctaaccttgaaactctgtaatccctaaagttaaaatctccgcaagtggcacaacttcagaactaatagtatcactttgatttttctttttcctcccttagaaagtttctctagttctatagtttatttgttgaaggtactatgaccaaagaatcagctgctctacaggaatagcatggttccagtgaattagagaaaacctgctgtaaagccatggtagtgtctaagtggtatgttattatgatgtactagcatttatttacagaattatttattaacgtttacttccttcccctctgtaaatgtccatgactattgcccagagaaggcttacccctctctagggttgcagttgctttctttgtaataagtattttgccacacctgtaaaaaaaaaaacctcacttttaactctctgccttgtttgggtaaaggcagtaactaagtttatgtttcagaactgcaaaacaaacaggatagttaccaatatggcccatgtatcagattgatttttgtagcctctcactgaatccaacatatccacaagcaagttatctgtctttctacctgataatctaaattatcaggatatttgttttctgcctaaatgtttatactaagccgaggggagagaggtacctagaccatgtcatctacaagcttcagtaactaaagaaaaaggaacttccctgagtggcttgaatgtgtttgcccacagtctatatctatgtatatagaatgtctgtatgtattttacttatttaatatacattgaatggtaccttgctacagtatttctgacatttagagtagtgttgaaatactcggctagcatcagcaccactatagcactgtccgtgtcatatgagtcactaatattaactccagggacttctggataggctaatagatcattggatacgaagggctcttttgaagcttcagtataccatgtttgcatagtttatctttaaaaacaactttaaaggttcttttgtgagccaggatctcagactgccgtagcatgatgctgtccatctttagcgcatgggctgagaacacctcttccctgaggcttctgaaggttgctgtctgtcatgagtgcatgaaggaggccaagagtttatgctatgggaggaaacagtcactgatttgcctagattctgagagtctggcccatagccaaccacattttcctttgggataatttatttcctgtggcatctagccagaagaaattgaggatgtttcctttcacagctgctccaagcctgttgcccaattcacggtacaagggagcaccccttccctttcctctgaaggtacgccacccacctccgtcgcccacctcagcgcccaggagccttgggacttccttccatatgataaatcattcttcttcacgtcaatacacttcatattaatttctagtacagaaaatcttgacagctatcagaatgccttggtcatagtgttgttgcaaaattgaccatacaggtggcccatgtataaaatctgaattttaggggtttgtccccacctcgcatgctggcttttacagggaggtgtctgggattcctcattagcaatcaaaacttaattactgggatgcagagtccttactttatcgccagcccgtaggcatttctgaagtgcacttttttgaaacatcattttgctaactctcagcagtgtctaattaaactgagcaatacttttgtgaattttaattaatctcagcaaaaccatgatgggagagagtcctctgatggaaatgtagtccctggattatgtgtaacctttttattcctcttagatgcagaggatagaaagcattttttggtgcagtggtcttgtggcaaacacaagaccctctatgcgtctccaactgttatcctaatctagaaaatgaggactggcccctgggcaaaagtgacatgaggaatttactctggaagaggaaaatctgggtggctttccaaggctaagataggtttgtatttcaccctgtggccaagctacagaacttctgagattgtggaagaatttttgcaaccagcagggaaagaggcctcttactgcctaaacacaaagttacactgagcttttctactgtcctttgcctattgctccctctatcatgtaaagatctgggaaggatgagaggcagggcctgcttgtcatgagctgcactcttttctttttaactaatcattgacaattggaagaaaattgacgttaaagaagtttctccattgtcttactaacaaaaccttttgggtttcattaattgtccttgaaattgagttcctttggcatttttccttgcagtcatcagttaagcatgttgcatcctgaattcacagaagtttagctttgcaggtttgaatctctgtaatttaactcccgtggacttggtcgagttttcagcaggttgggagccacctctcttcatttcagcagtgagtcatcccttgacttttcaaatgacagaattttttccaattgtaaaattagcactgtaaaacaaagaaccaaagtggcatcctaagagttgttaaacctgaagtctagtttatgaggaattgtccaagttggagtttaaatagtatctgcttttgtctcaaagcatctaagttattctgacagaaaatggtaagtcagctttgcaggcagatgcgcctctgggcctcctaccttgctccacagctttctggccatcttgtctcccaggccatgccactgctctgccacatgtcagcaaatttctttccaccagtcttatagcatcttacatgatcaaatcatcacagaataaccccgtgatagattattgatagcaatagagaggggctttgtcactgatttttctctcagattccttttccatctctcatccataaaggaaggactgaaatccaaaggcattctccttttgtacctacagtatccagaacccacgtgggcagccttctgcttatgacaataattggcccattgcatgcagagagaatgtcttcatagagagaatgtcattaaatacttgaatctgcatgacagtttgacttgaatgcaacagcaggaaaattttgcaagttacataattgtatatacagtaggttttcttaagtctcttcggttcatcctttgtaatttgtgtgtgtatctgtagtattgcaggcttttggagactattcttacaggcagtatgtcagtcatcaaagaaaatgctgtcacctgccattgttgtatttgtgggtatttatagttgtatgtatgtaaatgcatcagtgtgtagattgcatatcagtgtatggtacatgtacatcaaaattatttttgtccttaatcagtgtgatatgaaaagcaagtacaacctcataggactgattatataatgaagttgttgagagtatatatagtggtattgttttattaaacttaaactcaaataatattttgattaaaatttttaataagactttatgctagaaaattctttgagctttgaatcaccagggcaaaaatgactttcaactaaccttgtgaatcttttgcagtgtactgtgtgcaataccaagggcatagctccctgtaatttgggaaatacagaaagaaaagaaaaaaaaaaaaaaaggcagcctgtgcagtcttagtaactttagtattaagagcacttaaagtcaaactgacaattttgggcttattacaaaatgtgatgctttaaagcacacgttctttattgttgttgtaattagtcc

SEQ ID NO: 264556 - DNA, 1542 bp, Artificial Sequence
  derived and/or modified sequence
atgggaagtagttggtgcttgtatggttgctgtaatgctggtgtgaaaaccactcgcctggaggcacacagtgaaatgggctcaaccgagattttagagaaagagaccccagaaaatctgagtaatggtacctcatccaatgtggaagccgctaagcgcctggcaaagcgactgtaccagctggaccggtttaaaagaagtgacgtggccaagcatttgggtaaaaacaatgagttttctaagcttgtggctgaggaatatctgaagttttttgactttacaggtatgacattggaccagagccttcgctatttttttaaagctttcagtcttgttggcgagacccaagaacgggagcgggtactaatccatttctcaaatagatatttctactgcaaccccgacacaattgccagccaggacggggtccattgtctgacgtgtgccataatgctgttaaatacagatctgcacgggcataacatcggaaaaaagatgacctgtcaggaatttatagctaatcttcagggcgttaacgaaggtgtagatttctctaaagaccttctcaaggccctctacaactcgatcaaaaacgagaagctggaatgggcagtagacgacgaggagaaaaaaaagtctccctccgagtcaactgaggagaaagctaacggaacacaccccaaaacaatatcccggattggctctaccactaatccctttctcgatattcctcacgatcctaatgccgctgtttacaagagtggctttctcgctaggaaaatccacgcagatatggacgggaagaagactccgcgtggtaaaagagggtggaagacattttatgctgtgctgaaaggcaccgtgttgtacttgcagaaggacgagtacaaacccgaaaaggcattatctgaagaggatctaaaaaatgctgtgtccgtccatcatgctctggcaagcaaagccactgactatgaaaagaagcctaacgtctttaaactgaagaccgccgactggcgggtgctcttgtttcagactcagtcgccggaggaaatgcagggttggatcaacaagataaactgcgtggctgccgtgtttagcgcccctccctttccagccgcaataggctcccagaagaagttcagtcgccctcttcttcccgcaacgactaccaaactcagccaggaggagcagcttaagtcacatgagtctaagctcaaacagatcactacagagctggccgagcaccgatcctatcctcccgataaaaaagtgaaagcaaaggatgtagatgagtataaattgaaagaccactaccttgaattcgaaaagactaggtacgagatgtacgtgtctatccttaaggagggcggaaaggaactcctgagtaatgatgagtctgaggccgcagggctgaagaaatcgcactcatccccgagtcttaaccccgatacctccccaataacagccaaggttaagagaaacgtgtcggagcgtaaagaccatcggccagaaacgccctctatcaagcagaaggtcacctag

SEQ ID NO: 264557 - DNA, 810 bp, Artificial Sequence
  derived and/or modified sequence
atgatcggagtcaactctgtgcaatcggcaagcaaggttagggtcagaacctctgggagtgtcaaatactctagggaggactcgattaggcggcaatctcacagatccaagtcgatgaagataagtaactcctccgaattttctgcaaaagaaaataaggccttatacaatagcattaaaaacgagaagctggagtgggccgtcgacgacgaggagaagaaaaaatccccgtccgaaagcactgaagagaaagcaaacgggactcaccctaagacaatatcccgtattgggtctacaactaaccccttccttgacatcccgcatgatccaaatgcagctgtctacaagagtggattcctcgcgcgaaagatacacgctgatatggacggcaaaaagactccgaggggcaaaagggggtggaaaacattttatgctgttcttaaaggcacagtcctttacctgcagaagcatgaatccaaactaaagcaaataaccacagagctggccgaacacagaagctacccacctgacaaaaaagtgaaagcgaaagacgtcgacgagtataaactgaaagatcactatttggaatttgaaaagacacgatatgaaatgtacgtcagcatactcaaggaaggtgggaaagaactcctctcaaacgatgaaagtgaagcggcaggcctcaagaagagtcattcatctccgtcccttaatcccgatactagccctatcactgcgaaggtgaagaggaatgtgagtgaaagaaaggaccatcgccctgagactccaagcatcaagcaaaaagttacgtag

SEQ ID NO: 264558 - DNA, 1542 bp, Artificial Sequence
  derived and/or modified sequence
atgggcagcagctggtgcctgtacggctgctgcaacgccggcgtgaagaccaccagactggaggcccacagcgagatgggcagcaccgagatcctggagaaggagacccccgagaacctgagcaacggcaccagcagcaacgtggaggccgccaagagactggccaagagactgtaccagctggacagattcaagagaagcgacgtggccaagcacctgggcaagaacaacgagttcagcaagctggtggccgaggagtacctgaagttcttcgacttcaccggcatgaccctggaccagagcctgagatacttcttcaaggccttcagcctggtgggcgagacccaggagagagagagagtgctgatccacttcagcaacagatacttctactgcaaccccgacaccatcgccagccaggacggcgtgcactgcctgacctgcgccatcatgctgctgaacaccgacctgcacggccacaacatcggcaagaagatgacctgccaggagttcatcgccaacctgcagggcgtgaacgagggcgtggacttcagcaaggacctgctgaaggccctgtacaacagcatcaagaacgagaagctggagtgggccgtggacgacgaggagaagaagaagagccccagcgagagcaccgaggagaaggccaacggcacccaccccaagaccatcagcagaatcggcagcaccaccaaccccttcctggacatcccccacgaccccaacgccgccgtgtacaagagcggcttcctggccagaaagatccacgccgacatggacggcaagaagacccccagaggcaagagaggctggaagaccttctacgccgtgctgaagggcaccgtgctgtacctgcagaaggacgagtacaagcccgagaaggccctgagcgaggaggacctgaagaacgccgtgagcgtgcaccacgccctggccagcaaggccaccgactacgagaagaagcccaacgtgttcaagctgaagaccgccgactggagagtgctgctgttccagacccagagccccgaggagatgcagggctggatcaacaagatcaactgcgtggccgccgtgttcagcgccccccccttccccgccgccatcggcagccagaagaagttcagcagacccctgctgcccgccaccaccaccaagctgagccaggaggagcagctgaagagccacgagagcaagctgaagcagatcaccaccgagctggccgagcacagaagctacccccccgacaagaaggtgaaggccaaggacgtggacgagtacaagctgaaggaccactacctggagttcgagaagaccagatacgagatgtacgtgagcatcctgaaggagggcggcaaggagctgctgagcaacgacgagagcgaggccgccggcctgaagaagagccacagcagccccagcctgaaccccgacaccagccccatcaccgccaaggtgaagagaaacgtgagcgagagaaaggaccacagacccgagacccccagcatcaagcagaaggtgacctag

SEQ ID NO: 264559 - DNA, 810 bp, Artificial Sequence
  derived and/or modified sequence
atgatcggcgtgaacagcgtgcagagcgccagcaaggtgagagtgagaaccagcggcagcgtgaagtacagcagagaggacagcatcagaagacagagccacagaagcaagagcatgaagatcagcaacagcagcgagttcagcgccaaggagaacaaggccctgtacaacagcatcaagaacgagaagctggagtgggccgtggacgacgaggagaagaagaagagccccagcgagagcaccgaggagaaggccaacggcacccaccccaagaccatcagcagaatcggcagcaccaccaaccccttcctggacatcccccacgaccccaacgccgccgtgtacaagagcggcttcctggccagaaagatccacgccgacatggacggcaagaagacccccagaggcaagagaggctggaagaccttctacgccgtgctgaagggcaccgtgctgtacctgcagaagcacgagagcaagctgaagcagatcaccaccgagctggccgagcacagaagctacccccccgacaagaaggtgaaggccaaggacgtggacgagtacaagctgaaggaccactacctggagttcgagaagaccagatacgagatgtacgtgagcatcctgaaggagggcggcaaggagctgctgagcaacgacgagagcgaggccgccggcctgaagaagagccacagcagccccagcctgaaccccgacaccagccccatcaccgccaaggtgaagagaaacgtgagcgagagaaaggaccacagacccgagacccccagcatcaagcagaaggtgacctag

SEQ ID NO: 264560 - protein, 149 aa, Artificial Sequence
  derived and/or modified sequence
MADPGPDPESESESVFPREVGLFADSYSEKSQFCFCGHVLTITQNFGSRLGVAARVWDAALSLCNYFESQNVDFRGKKVIELGAGTGIVGILAALQGAYGLVRETEDDVIEQELWRGMRGACGHALSMSTMTPWESIKGSSVRGGCYHH

SEQ ID NO: 264561 - DNA, 450 bp, Artificial Sequence
  derived and/or modified sequence
atggccgaccccggccccgaccccgagagcgagagcgagagcgtgttccccagagaggtgggcctgttcgccgacagctacagcgagaagagccagttctgcttctgcggccacgtgctgaccatcacccagaacttcggcagcagactgggcgtggccgccagagtgtgggacgccgccctgagcctgtgcaactacttcgagagccagaacgtggacttcagaggcaagaaggtgatcgagctgggcgccggcaccggcatcgtgggcatcctggccgccctgcagggcgcctacggcctggtgagagagaccgaggacgacgtgatcgagcaggagctgtggagaggcatgagaggcgcctgcggccacgccctgagcatgagcaccatgaccccctgggagagcatcaagggcagcagcgtgagaggcggctgctaccaccactag

SEQ ID NO: 264562 - DNA, 450 bp, Artificial Sequence
  derived and/or modified sequence
atggctgatcccgggccagatccagaatcggagagcgagtctgtgttcccccgggaggttggccttttcgccgacagctacagcgaaaagtctcagttttgcttctgcggccatgtgctcaccatcacgcagaactttgggtcgcgactgggtgtagccgcaagggtgtgggatgcggctctgagcttatgtaattacttcgaatctcagaacgtagacttccggggcaagaaggttatcgaacttggagcaggcacgggcatagtaggcatattagccgctctgcagggtgcctacggcctggtgcgagagaccgaggatgatgtgattgagcaggagctgtggcgcggaatgcgaggtgcctgtgggcacgccctttctatgtccactatgacaccctgggagagcataaagggttcgagcgtgagggggggctgctatcatcactag

SEQ ID NO: 264563 - DNA, 450 bp, Artificial Sequence
  derived and/or modified sequence
atggctgaccccggccctgaccctgagagcgagagcgagagcgtcttcccccgggaggtgggcctgtttgctgacagctacagcgagaagagccagttctgcttctgtggccacgtgctgaccatcacccagaactttggcagccggctgggcgtggccgcccgggtgtgggatgctgccctgagcctgtgcaactactttgagagccagaatgtggacttccggggcaagaaggtgattgagctgggcgccggcaccggcatcgtgggcatcctggccgccctgcagggcgcctacggcctggtgcgggagacagaagatgatgtgattgagcaggagctgtggaggggcatgagaggagcctgtggccacgccctgtccatgagcaccatgaccccctgggagagcatcaagggcagctctgtgcggggcggctgctaccaccactag

SEQ ID NO: 264564 - DNA, 2762 bp, Artificial Sequence
  derived and/or modified sequence
gatctgagcgccggccgcggtgcccaggcactcccttggcgggccggatggcggaccccggcccagatcccgaatctgagtcggaatcggtgttcccgcgggaggtcgggctctttgcagactcttactcggagaagagccagttctgtttctgtgggcatgtgctgaccatcacgcagaactttgggtcccgcctcggggtggcggcgcgcgtgtgggacgcggccctgagcctgtgcaattatttcgagagtcaaaatgtggatttccgaggcaagaaggtgatcgaactgggtgcggggacaggcatcgtggggatcttggcagcgctgcagggagcttatggtctagtgagggagacagaggacgatgtcatagaacaagaactctggcgaggtatgcgtggagcctgtggacatgctctatccatgtctaccatgactccctgggaatccatcaagggaagctctgtcagggggggatgttaccatcactgacctgcccctggccctagaacagatccagggcaacgtccaggccaatgtgccagctggaggccaggcccaggtgcgtgccttgtcctgggggattgaccatcatgtcttccctgcaaactatgacctggtgctgggggctgatatcgtgtacctggaacccaccttccctctgctgctggggaccctccaacacctgtgcaggccccatggcaccatctatctggcctccaagatgagaaaggagcatgggacagagagcttctttcagcacctcctgccccagcatttccaactggagctggctcagcgggatgaggatgaaaatgtcaacatctatagggccaggcacagggaaccaagacctgcttgacatcacccttgctgttcttctcaatctcttgctctaatgaaggaactgtgtatctcaaaaaccatatttccagagccacaaacatgaggaccaaaaaggatggatttccctggcctctctcactttcctccttccctctttgttaccccagatactcttgggcaggtgcagtgaggtgcctgcttacaaggaatcccagagttctggcagcactagtgttagaacaccaaggaggttcctggctcctgttctcagagaaggaggatggtaaggtatccaggatttttagggggtaagggagatatatgggatgtgagagcagtgattgtagacagactgtcactgatcacttccattcctgttgctgtttacacagaatggactttaaaaaaattctgtgggatttttttttctttttttctttttttttgagacagggtctcactctgtcatccaggctggagtgcagtggtgtgatcacagctcactgcagcctcaacctctgaaggcccagatgatcttcctgcctcagctccccaagtagctgggactagaggcatgcgccaccacacccggctaatttttgtattttcagtagagacagggtttcgccatgttgcccagggtggtctcaaactcctgggctcaagtgatccacccgccttgcctcccaaagtgctgggattgcaggcatggcccactgtgctagcctaggatttttttttttttttaagaaagaattaagccttaaaaatctattgtgcaagaacccaacttttactcaggagctgagaaggaagaagcctcaaaccacccatttcctgctttttagagatagagtctagtggaaccatggctctaactgggtcaagtcctcctagctctgaagctaaggctgcagagctgtcctttggactgtatttcttcatgctttccagagttagagccttgatcacggaacatcattgtgtgcagaagaatactgtacctagtactaagttcttttcatctttgatttttctttagcttcatcagtccttccttcctaatctctaatcccctgaagcctaacacagttcctaatgtgttttgccttaacctcttttctcttcccacattggtacttctggttggggctctctttacttactgcttaggcacatagtcaccttctctggactccctgcttccatgctttctccttcagtccattccgcaaactcttgtgatcttccaaaattagctctgattagctttcacttcctgtagaagcaagaacaagctcctctgcttggtacttagtctgtgtccatgtgatccaaaattaccttcctattgcatttcctactcctttgctacgtgtattggacctctggccaaattacaaaagatgtactctttgttctctaaaaccacactaaagttttctgacttctttcacactctttatgataatcctctgcctgaaaggctattgccacctgtcaaaatcttcattattctttgcctctttcctgagcctcttgcttgaatgtgatttctttctccctgagacccataaggttcatcttatgggaccttaatttgtcttgcatggacatttgtgattctcattttctcaccattaaattaccttggagggtagggctgtggtttactcctgtctaaacccctgaagcctaacacagttcctggcacacaacaggtgttcaacagatattgtgctcattcaataaatatttactcgctttgtttaatggattccacccctgccttcctaggtgaccttggacaaattctcgaacccattcaccaaccacacaagtttgttgtgagtcataaatggataatgaatataaatgcgcattgaaaataaacataaaatgttacccaca

SEQ ID NO: 264565 - DNA, 450 bp, Artificial Sequence
  derived and/or modified sequence
atggccgaccccggccccgaccccgagagcgagagcgagagcgtgtttcctcgggaggtggggttgttcgcagatagctacagcgaaaaaagccaattctgcttctgtgggcatgtcctgacaattacacagaactttggttcccgtttgggcgttgccgctcgagtatgggacgctgctctgtcgctctgcaactattttgagagccaaaacgtagactttcgcggaaagaaggtaatcgagctgggagccggcactggtattgtgggcatcctcgcggcgctgcagggggcttatggcctggttcgcgagacagaggatgatgtgatcgaacaggaactgtggcgcggaatgcgaggagcatgtggacacgcactgtccatgtccaccatgactccttgggagtccattaaaggtagctccgtccgcggtggatgttatcaccactag

SEQ ID NO: 264566 - DNA, 450 bp, Artificial Sequence
  derived and/or modified sequence
atggccgacccaggccctgaccccgagagtgaaagcgaaagcgtttttccgagagaagttggtttgtttgctgactcgtattccgaaaaaagccagttctgcttttgcggtcacgtgcttaccattacccagaacttcggatcacggcttggtgtcgcggctagagtctgggacgccgctctttctctgtgtaattattttgagtcccagaacgtggactttcggggtaagaaagtgatcgagctgggcgctggtactggcatcgtggggatcctggccgctctgcaaggggcttatggacttgttagagaaaccgaagacgacgtaattgagcaagaactttggagggggatgaggggggcatgtggccatgctctgtcaatgagcaccatgacaccctgggagtccataaaaggctcttcagtgagagggggatgttaccaccactag

SEQ ID NO: 264567 - DNA, 306 bp, Artificial Sequence
  derived and/or modified sequence
atggaacagccaatgcagaacggggaggaagaccggccgctagggggaggcgaggggcaccagccagcagggaatcgcaggggacaggcacggcgcctggcacccaattttcgctgggctatcccaaaccgtcaaatcaatgacgggatgggcggagatggcgacgatatggagatcttcatggaggagatgcgtgaaattaggcgcaagcttcgcgagctgcagctacggaactgcttgagaatcctaatgggcgaactgtcgaatcatcacgatcatcacgatgagttctgcctgatgccttag

SEQ ID NO: 264568 - DNA, 306 bp, Artificial Sequence
  derived and/or modified sequence
atggagcaacccatgcagaatggtgaggaggatcggcctctgggcggcggtgaagggcaccagccagcgggtaataggagagggcaggcaaggaggttggcccctaattttaggtgggctatcccaaacagacagatcaatgatggaatgggaggcgatggagatgacatggaaatcttcatggaagaaatgcgcgaaattcggaggaagttgcgagaactccagcttcgtaactgtctgcggatcctcatgggagaattatctaaccaccatgatcaccacgacgagttctgtcttatgccctag

SEQ ID NO: 264569 - DNA, 306 bp, Artificial Sequence
  derived and/or modified sequence
atggagcagcccatgcagaatggagaggaggaccggcccctgggcggcggggagggccaccagcctgctggcaacagaagaggccaggcccggcggctggcccccaacttccgctgggccatccccaaccggcagatcaatgatggcatgggaggagatggagatgacatggagatcttcatggaggagatgagggagatccggaggaagctgcgggagctgcagctgaggaactgcctgcgcatcctgatgggagagctgagcaaccaccacgaccaccatgatgagttctgcctgatgccctag

SEQ ID NO: 264570 - DNA, 306 bp, Artificial Sequence
  derived and/or modified sequence
atggagcagcccatgcagaacggcgaggaggaccggcccctgggcggcggtgaaggtcaccagccggcggggaatcggcgagggcaagcgagacgactcgcacctaacttccggtgggctatcccaaatcgccagatcaacgatggcatgggtggagacggtgatgatatggaaatctttatggaggagatgcgagaaattagacgtaagctgagggaactgcagctgcgaaactgcctgaggatcttgatgggtgagttatccaatcatcatgatcatcacgacgaattttgcctaatgccctag

SEQ ID NO: 264571 - DNA, 306 bp, Artificial Sequence
  derived and/or modified sequence
atggagcagcccatgcagaacggcgaggaggaccggcccctgggcggaggcgagggacaccagcccgccgggaatcggaggggccaggcacgacggctagcccccaatttccgatgggctatccctaaccggcagatcaatgacggtatgggcggagatggggacgatatggagatctttatggaggaaatgcgagaaattagaagaaaactgcgggagctccaattaaggaactgtttgcgcatcctgatgggcgagctctccaatcaccacgaccaccatgatgaattctgtttaatgccttag

SEQ ID NO: 264572 - DNA, 753 bp, Artificial Sequence
  derived and/or modified sequence
gaggggagcccgggctcggagcacggaaagggccgggcggcggcgggtcttcgctagcgttccgctgcagcagcccccaccccccacaacccccaccccggctcgactgcaggtctgcgaggctaagtgtctccgcggcgcacctcgcggcgagaatccggaggagaaggagactgcaaggataggcccaggaaaacgaagagatggagcagcctatgcagaatggagaggaagaccgccctttgggaggaggtgaaggccaccagcctgcaggaaatcgacggggacaggctcgccgacttgcccctaattttcgatgggccatacccaataggcagatcaatgatgggatgggtggagatggagatgatatggaaatattcatggaggagatgagagaaatcagaagaaaacttagggagctgcagttgaggaattgtctgcgtatccttatgggggagctctctaatcaccatgaccatcatgatgaattttgccttatgccttgactcctgccatttatcatgagattaatactgtgattcccgctgttttctttttccttgcattttcctaatatgcctttactgatccgtttgctgtgaaccctatgttatttccatgtgtcaagtgggtcttgtgttgccagcttctatttgaagattgcctttgcactcagtgtaagtttctgtcagcagtagtttcacccatttgcatggaaaaatttaaagctaataaagcaatttaaaaagc

SEQ ID NO: 264573 - DNA, 306 bp, Artificial Sequence
  derived and/or modified sequence
atggaacagcctatgcagaacggcgaagaagaccgcccattggggggtggagagggccatcagcctgccggtaatcggcgtggtcaggcacgcagactcgcaccaaatttccgatgggccatccccaacaggcagattaacgacggaatgggtggcgacggtgacgacatggagattttcatggaggaaatgagggaaatcaggcggaaactacgggagcttcagcttcggaattgtctgcggatcctgatgggggagctgtcaaaccatcatgaccaccacgacgagttttgtctgatgccttag

SEQ ID NO: 264574 - DNA, 306 bp, Artificial Sequence
  derived and/or modified sequence
atggaacagccgatgcaaaatggagaggaggatcgaccacttggagggggtgagggccaccagcccgcaggcaatcgtaggggtcaggctcggcgactggcccctaattttagatgggccattccaaatcgacaaattaatgatggcatggggggagacggagacgacatggagatttttatggaagaaatgcgagaaatcaggcgaaagctccgagagttacagctgaggaattgcctccgaatcctcatgggagagttgtcaaatcaccatgatcaccatgatgagttctgcctgatgccttag

SEQ ID NO: 264575 - DNA, 306 bp, Artificial Sequence
  derived and/or modified sequence
atggagcagcccatgcagaacggcgaggaggacagacccctgggcggcggcgagggccaccagcccgccggcaacagaagaggccaggccagaagactggcccccaacttcagatgggccatccccaacagacagatcaacgacggcatgggcggcgacggcgacgacatggagatcttcatggaggagatgagagagatcagaagaaagctgagagagctgcagctgagaaactgcctgagaatcctgatgggcgagctgagcaaccaccacgaccaccacgacgagttctgcctgatgccctag

SEQ ID NO: 264576 - protein, 323 aa, Artificial Sequence
  derived and/or modified sequence
MGNSASRSDFEWVYTDQPHTQRRKEILAKYPAIKALMRPDPRLKWAVLVLVLVQMLACWLVRGLAWRWLLFWAYAFGGCVNHSLTLAIHDISHNAAFGTGRAARNRWLAVFANLPVGVPYAASFKKYHVDHHRYLGGDGLDVDVPTRLEGWFFCTPARKLLWLVLQPFFYSLRPLCVHPKAVTRMEVLNTLVQLAADLAIFALWGLKPVVYLLASSFLGLGLHPISGHFVAEHYMFLKGHETYSYYGPLNWITFNVGYHVEHHDFPSIPGYNLPLVRKIAPEYYDHLPQHHSWVKVLWDFVFEDSLGPYARVKRVYRLAKDGL

SEQ ID NO: 264577 - DNA, 972 bp, Artificial Sequence
  derived and/or modified sequence
atgggtaatagcgcctccaggtcagatttcgagtgggtttacacagatcagcctcacactcaaagacggaaggagatccttgcgaaatatccagctataaaggcattgatgcgcccagacccaaggttgaagtgggcagtgctagtgctggtgctggtccaaatgctcgcctgttggcttgtgaggggtcttgcctggagatggctcctgttctgggcatacgcattcgggggctgcgtcaaccactcacttaccctagctattcacgacatttcacataacgccgcattcgggacaggacgcgcagccagaaatcgctggctggctgtgttcgcaaacctgccagtcggcgtgccctatgcggcatcctttaagaaatatcatgtagatcatcaccgatatctaggcggagacgggctagacgtcgatgtcccgacacgtcttgaaggctggttcttttgcacaccagccagaaaactgctctggctcgtgctgcagccattcttctactccttacggccactgtgcgtgcacccaaaggctgtaacacggatggaggtgctcaacacactggtccagctggccgccgatttagccatctttgcactctggggacttaagcccgttgtttatctgctggcgtccagttttctcggactgggactgcaccccatctctggccattttgtcgccgagcactacatgtttctcaaggggcacgagacctactcctactacggccccctaaattggattacttttaacgtcggttatcacgttgagcaccacgattttcctagcattcctggctacaacctgcccctcgttcgtaagatcgcccctgaatactacgaccacctcccacaacaccactcctgggtcaaggtgttgtgggattttgtgtttgaggattcgcttggtccttacgccagagtgaagcgggtatatagacttgcaaaggacggactctag

SEQ ID NO: 264578 - DNA, 972 bp, Artificial Sequence
  derived and/or modified sequence
atgggcaacagcgccagcagaagtgactttgagtgggtgtacacagaccagccccacacccagaggaggaaggagatcctggccaagtacccagccatcaaggccctgatgaggccagacccccggctgaagtgggccgtgctggtgctggtgctggtgcagatgctggcctgctggctggtgcggggcctggcctggcgctggctgctcttctgggcctatgccttcggcggctgtgtgaaccacagcctgaccctggccatccatgacatcagccacaatgctgcctttggaacaggccgggccgccaggaaccgctggctggccgtgtttgccaacctgcctgtgggcgtgccctatgctgccagcttcaagaagtaccacgtggaccaccaccgctacctgggcggagatggcctggatgtggatgtgcccacccggctggagggctggttcttctgcaccccagccaggaagctgctgtggctggtgctgcagcccttcttctacagcctgcggcccctgtgtgtgcaccccaaggctgtgaccaggatggaggtgctgaacaccctggtgcagctggccgctgacctggccatctttgccctgtggggcctgaagcctgtggtgtacctgctggccagcagcttcctgggcctgggcctgcaccccatcagcggccactttgtggccgagcactacatgttcctgaagggccacgagacctacagctactacggccccctgaactggatcaccttcaacgtgggctaccacgtggagcaccacgacttccccagcatccctggctacaacctgcccctggtgaggaagatcgcccctgagtactatgaccacctgccccagcaccacagctgggtgaaggtgctgtgggactttgtgtttgaggacagcctgggcccctatgcccgggtgaagagggtgtaccgcctggccaaggatggcctgtag

SEQ ID NO: 264579 - DNA, 972 bp, Artificial Sequence
  derived and/or modified sequence
atgggcaacagcgccagccggagcgacttcgagtgggtgtacaccgatcaaccgcacactcagcgaaggaaggaaattttagctaagtatcctgctattaaagccctgatgcgcccagacccacgcttgaagtgggccgtgctggtgttagttctggtgcagatgctggcctgctggttagtgaggggtctggcctggcggtggttgctgttctgggcttacgcgtttggcgggtgtgttaaccattctcttacactggccatccatgatattagccacaatgccgcattcgggaccggcagggctgccagaaaccgttggttagcagtctttgccaacctgcccgtgggtgtgccttatgcggcaagctttaaaaagtatcatgtagatcatcacaggtatctggggggagatggactcgatgtggacgtgccaactcgtctggaggggtggtttttctgcacccctgcacgtaagctcctctggctggtgctacagccttttttttacagcctgcggcctttatgcgtacatcctaaagccgtgactcgaatggaagttttaaacacactcgtccagctggctgctgatctggctatctttgcactttggggcctgaagcccgtagtttacctccttgcctctagcttccttgggctgggtctacatccaatttctgggcacttcgtagctgaacattacatgtttctcaagggccacgagacgtatagctactacggccctctgaactggatcacgttcaacgttggttaccacgtagagcaccatgatttccctagcatcccaggctataatctccctctcgtccgcaagattgcccccgagtactatgatcacctgcctcagcaccactcttgggtaaaggtcctgtgggactttgtgttcgaggattccttgggtccatacgccagggttaaacgggtgtataggctcgcgaaagatgggttgtag

SEQ ID NO: 264580 - DNA, 972 bp, Artificial Sequence
  derived and/or modified sequence
atgggcaactccgctagccggagtgattttgagtgggtctacaccgaccagccccacacccagagacgcaaagagatcttggccaaatacccagctataaaagccttgatgcgtccagacccacgtctaaaatgggcggtgctcgtgttagtgttggtgcaaatgctagcatgctggctcgtgcggggtctagcctggcgctggctgctgttttgggcgtatgcctttgggggttgcgtgaaccactctcttacattagcaatacacgacattagccataatgcagcatttgggactgggcgagcggctcggaaccggtggctggctgtgtttgcaaacctgccagttggcgtgccctatgctgctagctttaagaaatatcatgtggaccaccatcggtatctgggcggagatggtctcgatgtggatgtgcccacccgcctcgaagggtggttcttttgtaccccagccaggaagcttttgtggctagtgctacagccctttttctactctttgcgcccactgtgtgtgcacccaaaagcagttacaagaatggaagtgctgaacacactggtccagttagccgcagacctggctatattcgccctgtgggggctgaaacctgtggtgtatctcttagcttcatcatttcttggcctgggcctccatcccatttccggccatttcgtcgccgagcattatatgttccttaaggggcatgaaacttattcgtattacgggcctttgaattggattaccttcaatgtcgggtaccacgtagagcaccatgatttcccaagcatccctggctataatctgccgctggttcgcaaaatcgcccctgagtattacgaccatctgccacagcaccatagctgggtgaaggttctatgggactttgtgtttgaagacagccttggcccatatgctagagttaagcgcgtctacagattagcaaaagatggcctgtag

SEQ ID NO: 264581 - DNA, 972 bp, Artificial Sequence
  derived and/or modified sequence
atgggcaacagcgccagcagaagcgacttcgagtgggtgtacaccgaccagccccacacccagagaagaaaggagatcctggccaagtaccccgccatcaaggccctgatgagacccgaccccagactgaagtgggccgtgctggtgctggtgctggtgcagatgctggcctgctggctggtgagaggcctggcctggagatggctgctgttctgggcctacgccttcggcggctgcgtgaaccacagcctgaccctggccatccacgacatcagccacaacgccgccttcggcaccggcagagccgccagaaacagatggctggccgtgttcgccaacctgcccgtgggcgtgccctacgccgccagcttcaagaagtaccacgtggaccaccacagatacctgggcggcgacggcctggacgtggacgtgcccaccagactggagggctggttcttctgcacccccgccagaaagctgctgtggctggtgctgcagcccttcttctacagcctgagacccctgtgcgtgcaccccaaggccgtgaccagaatggaggtgctgaacaccctggtgcagctggccgccgacctggccatcttcgccctgtggggcctgaagcccgtggtgtacctgctggccagcagcttcctgggcctgggcctgcaccccatcagcggccacttcgtggccgagcactacatgttcctgaagggccacgagacctacagctactacggccccctgaactggatcaccttcaacgtgggctaccacgtggagcaccacgacttccccagcatccccggctacaacctgcccctggtgagaaagatcgcccccgagtactacgaccacctgccccagcaccacagctgggtgaaggtgctgtgggacttcgtgttcgaggacagcctgggcccctacgccagagtgaagagagtgtacagactggccaaggacggcctgtag

SEQ ID NO: 264582 - DNA, 1890 bp, Artificial Sequence
  derived and/or modified sequence
cgggtggaggaagggaggattgctgcaccaacctttcctcggcgcctgtttactggcaccgtcgcatccattccacgccgatcctccgcagtccccctatcctgccagccgctcctccttggggcaggggcggcgcgagccacaggggcgtgcccgcgagcgggtcggggctgcggagagaacgggccggggtaaaaacccgacggctgcccgcgggtgggcggggcgcgcagagccggtgggaggccgcggtggcagcagtcgcccccgcgcatcgagggacccagggactcgcgcagatggcacgcggccacctcggtcctgccggggagccccatttccaaccgaggcaactgaggttcccaaagcgccagctacccgccggggtctggagagcgccggggcccggccgccccgcccagccagaggtgccccgccccaagcctggcgcacctggccccgccccgccgggaccccgcccccgccctaatcagagctggttccgcgccgcggccgccgcgacaggtgcagcagagccgagccggccgcgctccgaacggcgcctcccgccccaccatgggcaacagcgcgagccgcagcgacttcgagtgggtctacaccgaccagccgcacacgcagcggcgcaaggagatactggccaagtacccggccatcaaggccctgatgcggccagacccgcgcctcaagtgggcggtgctggtgctggtgctggtgcagatgctggcctgctggctggtgcgcgggctggcctggcgctggctgctgttctgggcctacgcctttggtggctgcgtgaaccactcgctgacgctggccatccacgacatctcgcacaacgcggccttcggcacgggccgtgcggcacgcaaccgctggctggccgtgttcgccaacctgcccgtgggtgtgccctacgccgcctccttcaagaagtaccacgtggaccaccaccgctacctgggcggcgacgggctggacgtggacgtgcccacgcgtctggagggctggttcttctgcacacccgcccgcaagctgctctggctggtgctgcagcccttcttctactcactacggccgctctgcgtccaccccaaggccgtgacccgcatggaggtgctcaacacgctggtgcagctggcggccgacctggccatctttgccctttgggggctcaagcccgtggtctacctgctggccagctccttcctgggcctgggcctgcaccccatctcgggccacttcgtggccgagcactacatgttcctcaagggccacgagacctactcctactatgggcctctcaactggatcaccttcaatgtgggctaccacgtggagcaccacgacttccccagcatcccgggctacaacctgccgctggtgcggaagatcgcgcccgagtactacgaccacctgccgcagcaccactcctgggtgaaggtgctctgggattttgtgtttgaggactccctggggccctatgccagggtgaagcgggtgtacaggctggcaaaagatggtctgtgagcccgggctgcctcctggtggtggccattgtcccccatcggcccctcagccttgcaccccagcactgagaagctacatttccttcctgtgctctggactgctgcccttgtccccgaggagtgtcccgcgcagccacacctggcaacagcagtgtgggctgcagggctccgtctgcacgtggacttgccctggaccttgagtgtggccctccctttctgggcctccccaggtgaggcctggccctgccccaccatgacctgggtgctctgagcccacggttcccacggagctgacttctccggggtgcctgtgccctacattaaacccggcgtttgtttcaca

SEQ ID NO: 264583 - protein, 496 aa, Artificial Sequence
  derived and/or modified sequence
MWGRFLAPEASGRDSPGGARSFPAGPDYSSAWLPANESLWQATTVPSNHRNNHIRRHSIASDSGDTGIGTSCSDSVEDHSTSSGTLSFKPSQSLITLPTAHVMPSNSSASISKLRESLTPDGSKWSTSLMQTLGNHSRGEQDSSLDMKDFRPLRKWSSLSKLTAPDNCGQGGTVCREESRNGLEKIGKAKALTSQLRTIGPSCLHDSMEMLRLEDKEINKKRSSTLDCKYKFESCSKEDFRASSSTLRRQPVDMTYSALPESKPIMTSSEAFEPPKYLMLGQQAVGGVPIQPSVRTQMWLTEQLRTNPLEGRNTEDSYSLAPWQQQQIEDFRQGSETPMQVLTGSSRQSYSPGYQDFSKWESMLKIKEGLLRQKEIVIDRQKQQITHLHERIRDNELRAQHAMLGHYVNCEDSYVASLQPQYENTSLQTPFSEESVSHSQQGEFEQKLASTEKEVLQLNEFLKQRLSLFSEEKKKLEEKVGFSNKVELGQQHFLSI

SEQ ID NO: 264584 - DNA, 1491 bp, Artificial Sequence
  derived and/or modified sequence
atgtggggcagattcctggcccccgaggccagcggcagagacagccccggcggcgccagaagcttccccgccggccccgactacagcagcgcctggctgcccgccaacgagagcctgtggcaggccaccaccgtgcccagcaaccacagaaacaaccacatcagaagacacagcatcgccagcgacagcggcgacaccggcatcggcaccagctgcagcgacagcgtggaggaccacagcaccagcagcggcaccctgagcttcaagcccagccagagcctgatcaccctgcccaccgcccacgtgatgcccagcaacagcagcgccagcatcagcaagctgagagagagcctgacccccgacggcagcaagtggagcaccagcctgatgcagaccctgggcaaccacagcagaggcgagcaggacagcagcctggacatgaaggacttcagacccctgagaaagtggagcagcctgagcaagctgaccgcccccgacaactgcggccagggcggcaccgtgtgcagagaggagagcagaaacggcctggagaagatcggcaaggccaaggccctgaccagccagctgagaaccatcggccccagctgcctgcacgacagcatggagatgctgagactggaggacaaggagatcaacaagaagagaagcagcaccctggactgcaagtacaagttcgagagctgcagcaaggaggacttcagagccagcagcagcaccctgagaagacagcccgtggacatgacctacagcgccctgcccgagagcaagcccatcatgaccagcagcgaggccttcgagccccccaagtacctgatgctgggccagcaggccgtgggcggcgtgcccatccagcccagcgtgagaacccagatgtggctgaccgagcagctgagaaccaaccccctggagggcagaaacaccgaggacagctacagcctggccccctggcagcagcagcagatcgaggacttcagacagggcagcgagacccccatgcaggtgctgaccggcagcagcagacagagctacagccccggctaccaggacttcagcaagtgggagagcatgctgaagatcaaggagggcctgctgagacagaaggagatcgtgatcgacagacagaagcagcagatcacccacctgcacgagagaatcagagacaacgagctgagagcccagcacgccatgctgggccactacgtgaactgcgaggacagctacgtggccagcctgcagccccagtacgagaacaccagcctgcagacccccttcagcgaggagagcgtgagccacagccagcagggcgagttcgagcagaagctggccagcaccgagaaggaggtgctgcagctgaacgagttcctgaagcagagactgagcctgttcagcgaggagaagaagaagctggaggagaaggtgggcttcagcaacaaggtggagctgggccagcagcacttcctgagcatctag

SEQ ID NO: 264585 - DNA, 1491 bp, Artificial Sequence
  derived and/or modified sequence
atgtgggggagatttctcgcccctgaagcctccggcagagacagtcccgggggcgcgaggagcttccccgccgggcccgactattcaagtgcctggcttcccgcaaacgagtcactgtggcaggccaccacggtgccgtccaaccatcggaacaaccacataaggcgacacagcatcgccagcgactctggcgacactggtattggcacatcttgcagtgacagcgtggaagatcattcgaccagcagcgggactctgtctttcaagccctcccaaagtctcattacccttcctaccgctcatgttatgccaagtaattcctccgccagcatttcaaagctgcgcgagtccctcacacctgacggaagcaagtggtccactagcctgatgcaaacactgggaaaccactcgaggggtgaacaagattcgtccctggatatgaaggacttccgccccctccgcaagtggtcctccctaagcaagttgactgcccccgacaactgcggacaggggggcaccgtctgcagggaggagagccggaatggcctcgagaagatcggtaaagcaaaggctttgacttcccagttgcggaccattgggccgtcttgtctacatgattccatggagatgctgagattagaggataaggagattaacaaaaaaaggtccagcaccctggactgcaaatataagttcgaatcttgcagcaaggaagactttagggcctcctcatcaacacttcgccggcaacccgtcgatatgacatattcagcactgcctgaatccaaacctataatgacctcttccgaggcctttgagccacctaagtacctcatgctgggccaacaggccgtcggcggtgtgcccatccagccgtcagtcaggactcaaatgtggctcactgagcaactgaggactaatccgctggagggccgcaatacagaagattcctattcactggcaccttggcagcagcagcaaatcgaagacttccgccaagggtcagagacccccatgcaggtgttgacaggtagctctcgccagtcctattccccgggttaccaggatttttccaagtgggagtccatgctcaaaatcaaagaaggcctcctgcgacagaaggagatagtcattgatagacagaagcagcagattactcatctccacgaacgcatccgagacaatgaactgagggctcaacacgctatgctaggtcactatgtaaattgcgaggactcctacgtggcaagcctccagccccagtatgagaatacatcgcttcagactccattttcggaagagagcgtaagtcacagtcagcaaggagaattcgagcagaaattggcctccacagagaaagaagttctgcagctgaatgaattcctgaaacaacgtctgtccctgttttcggaggaaaagaaaaaactcgaagaaaaggtcgggttcagtaataaggtagaattgggacagcagcatttcctgtccatatag

SEQ ID NO: 264586 - DNA, 1491 bp, Artificial Sequence
  derived and/or modified sequence
atgtggggccgcttcctggcccctgaggccagcggccgggacagccctgggggcgcccgctccttccctgctggccctgactacagcagcgcctggctgcctgccaatgaaagcctgtggcaggccaccaccgtgcccagcaaccacaggaacaaccacatcagaagacacagcatcgccagtgacagcggggacaccggcatcggcaccagctgcagcgacagcgtggaggaccacagcaccagcagcggcaccctgtccttcaagcccagccagagcctcatcaccctgcccacagcccacgtgatgcccagcaacagcagcgccagcatcagcaagctgcgggagagcctgaccccagatggcagcaagtggagcaccagcctgatgcagaccctgggcaaccacagcagaggagagcaggacagcagcctggacatgaaggacttccggcccctgaggaagtggagcagcctgagcaagctgacagccccagacaactgtggccagggcggcaccgtgtgccgggaggagagcagaaatggcctggagaagattggcaaggccaaggccctgaccagccagctgcggaccatcggccccagctgcctgcatgacagcatggagatgctgcggctggaggacaaggagatcaacaagaagaggagcagcaccctggactgcaagtacaagtttgagagctgcagcaaggaggacttccgggccagcagcagcaccctgcggcggcagcctgtggacatgacctacagcgccctgcctgagagcaagcccatcatgaccagcagcgaggcctttgagccccccaagtacctgatgctgggccagcaggccgtgggcggcgtgcccatccagcccagcgtgaggacccagatgtggctgacagagcagctgcggaccaaccccctggagggcaggaacacagaagattcctacagcctggccccctggcagcagcagcagatcgaggacttccggcagggcagcgagacccccatgcaggtgctgaccggcagcagccggcagagctacagccctggctaccaggacttcagcaagtgggagagcatgctgaagatcaaggagggcctgctgcggcagaaggagatcgtcatcgaccggcagaagcagcagatcacccacctgcacgagcgcatccgggacaatgagctgcgggcccagcacgccatgctgggccactacgtgaactgtgaagattcctatgtggccagcctgcagccccagtatgagaacaccagcctgcagacccccttcagcgaggagagcgtgagccacagccagcagggcgagtttgagcagaagctggccagcacagagaaggaggtgctgcagctgaatgagttcctgaagcagaggctgagcctcttcagcgaggagaagaagaagctggaggagaaggtgggcttcagcaacaaggtggagctgggccagcagcacttcctgagcatctag

SEQ ID NO: 264587 - DNA, 1491 bp, Artificial Sequence
  derived and/or modified sequence
atgtggggccggttcctggcccccgaggccagcggccgggacagcccagggggagctaggagcttccccgcaggcccagactattcctccgcctggctaccggccaatgagagcctctggcaggcaaccacggtgccttctaatcacaggaacaatcacatcagaaggcacagtatagcttctgatagtggcgacaccgggatcggaacaagctgttccgattctgtagaggaccattccacatcttcaggtacattatctttcaaacctagccagagcctgattactcttcctactgcccacgtgatgccaagtaattccagcgcaagtattagcaagctgagagaatctctcacacccgacggttccaagtggagcacatctcttatgcagacgctgggcaaccattcacgaggcgagcaagactcttcactggacatgaaagacttcaggccccttcgcaaatggagcagcttgtccaagctgactgccccggacaactgcgggcagggaggcacggtgtgtcgcgaggagagccgaaacggcctcgaaaagatcggcaaagctaaagctcttacgagccagcttaggaccatcggaccttcctgcctgcatgacagtatggaaatgcttaggttggaagacaaagagattaataaaaagcgatcctctaccctcgattgtaaatacaagttcgaatcttgttctaaggaggatttcagagccagtagctcaaccctgcgaaggcagccagtggacatgacatattcggcgcttcctgagtccaaacccatcatgactagtagcgaggcttttgaacctcctaagtacttgatgctgggtcagcaggcagtaggcggagtccccatccagccctccgttcgtacccaaatgtggctcacagagcaactgcggactaatcccctggaaggaagaaacaccgaggactcttatagcttggcaccctggcagcagcagcaaattgaagatttccgtcagggatctgaaacacctatgcaggtgctcactggatcatcccgtcagagctactctcctggctaccaggatttttccaagtgggagagcatgttgaagatcaaggaaggcctcctgcggcaaaaagaaattgtaatcgatcggcaaaagcaacagattacccacctgcacgagaggatccgagacaacgagctccgggcccagcatgccatgctgggccattacgtgaactgcgaggactcttatgtggcaagcctgcaaccccagtacgagaacacctctctccagacgcccttctctgaagagagcgtctctcactcacagcaaggggagtttgagcagaagctggcctctaccgaaaaggaagtgctccaactcaacgaatttcttaagcagcggctatcactgttctcagaggagaaaaagaaactggaggagaaagttggtttttctaataaagtagaactcggccaacagcactttctctccatatag

SEQ ID NO: 264588 - DNA, 2079 bp, Artificial Sequence
  derived and/or modified sequence
agtatcgcaaaataggccaagtcgctgccctctactcaactcgcagggcgggaggatggagacagagggatgcggcgggagggcgggacagcccagtcgccgccaaggaggcgaagcggggtcggggtagctcacccgccccccgcagtccccgccccccgcagtccccgccccgcgcggcgccgcgcacgcctgaagtcattgcccgaggccccgccccctcgcggccccagccccggctctggctctgccggcggagggggcggagagaacccgcagctgcaacttcgcctggagcctttgagcctgggctcagccggggatctagcagccgtcaccgccgagtcgccgcttccccggcgcgggcctcagcccagccggcttggccatggcaggcgccggcagtgcggcgaatctggcccctgcgctccccgcccgtagctgagcagccgttaaccagccatcccgcctttcctcctgcccgtgtcgccgaggcccacgctccgcgcaagtttccgccgccgaagaagcaggaggacggacgtgaggagtcgggcgtccctggcccacccggccctctcgcccgcgatgtgggggcgcttcctggctccggaggccagcggccgggatagccccggcggagcccgcagcttccctgccggcccagattattcatcagcatggctacctgctaatgaatcattgtggcaggccacaactgttccatctaaccatcgaaataaccatatcaggagacacagtatagcttctgacagtggagacactggcattggaacttcctgttctgatagcgtggaagatcattcaacttcaagtggcacattatcttttaagcctagtcaatcattgattactcttcctactgcccatgtgatgccgtctaattccagcgcttcaatttccaaacttagggaatcattgacaccagatggctcaaaatggagtacaagcctcatgcaaacattgggaaaccacagtaggggggagcaggactcttccctagacatgaaggacttccggccacttcggaaatggtcatctttatccaaactcactgccccggataactgtggccagggtggcactgtatgcagagaagagtcaaggaatggtttggagaagatagggaaggctaaggctttaacatcacaactgaggacaattgggcctagctgtttacatgatagtatggagatgcttaggttagaggacaaggaaataaataaaaaacggtcatcaactctggactgcaagtataaatttgagagctgtagcaaggaggactttagagcctcttcctctactcttaggagacagcctgtagacatgacatatagtgccttacctgaaagcaagcccattatgacaagctcagaggcttttgaacctccaaaatatttaatgcttggtcaacaggcagtaggtggagttcccattcagccttccgtaaggactcagatgtggcttacagagcagctgcggacaaatcctttggaaggtagaaatacagaggattcttacagtttagctccttggcaacagcagcaaattgaagactttcgacaaggaagtgaaacaccaatgcaggttttgactggatcatctcgtcaaagttattcacctggctatcaggatttcagtaagtgggaatcaatgttgaaaataaaagaaggacttctaaggcagaaagaaattgtaatcgatcggcagaagcaacaaattacccacctgcatgagaggataagggataatgaattacgggctcaacatgccatgttaggacattatgtaaattgtgaggattcttatgtggctagtttgcagccacaatatgagaacacttcactccagacaccattttcagaggaatcagtttcccattcccaacaaggggaatttgagcaaaagcttgcatctactgagaaagaagttttacagcttaatgagtttctcaaacaaagactaagcctatttagtgaagagaagaagaaactagaggaaaaagtaggtttttctaataaagttgaattaggtcaacaacatttcctcagcatataa

SEQ ID NO: 264589 - DNA, 1491 bp, Artificial Sequence
  derived and/or modified sequence
atgtggggcagattcctcgcgcctgaggcctccgggcgagatagcccgggtggcgcacggtcctttcctgcaggtcctgattattccagcgcttggctcccagctaatgaatccctgtggcaggcaacaacagtcccatccaaccatcggaataaccatatcagaaggcattccattgcgtcagactcaggggacactgggatcggcacatcctgctccgactccgtggaggaccacagtactagctctggcaccttatctttcaagcctagccagagcctgatcaccttgccaacagcccacgtgatgcccagcaatagcagcgcgtccatatccaaactgcgagaatctctgaccccagacgggagtaaatggagtacgagtctgatgcaaacgctgggcaaccattcgcgaggagagcaagattctagcctggatatgaaggacttcagaccgttgaggaagtggtcaagcctctccaaactgacagccccagacaattgtggccagggtggaactgtgtgccgcgaggagtcccgcaacggactggaaaaaattggcaaagcgaaggcactgacgagccagttgcgcactatcggcccaagttgcctgcatgactccatggagatgttacgcctggaagataaggaaattaataagaaacgctcttccactctcgactgcaaatacaagttcgagtcttgctctaaggaagactttcgagcctcaagtagcacactgcgacgccagcctgtcgatatgacatacagtgctttaccggagtccaagcctatcatgacatcttctgaggcattcgagcctccaaagtacctgatgctaggtcagcaggccgtgggtggcgtgcctattcagccgtccgtgcgaactcagatgtggctcacggaacagctccggactaacccactagaagggagaaacacagaagactcgtattccctggccccatggcaacagcagcagatcgaagatttccgacagggaagtgagacaccaatgcaggttctgacaggatcctcgcgccagtcttatagtccgggataccaagacttttctaaatgggagtctatgcttaagatcaaagaaggcttactgcgacagaaggagattgtgattgaccggcaaaaacaacagattactcacctgcacgagcgaatccgtgataacgaactccgggcacagcacgcaatgctcgggcattacgttaattgcgaagattcttatgttgcttcactacagcctcagtatgagaacacttccctccaaacaccattttccgaggagagtgtctcacacagccagcagggcgagttcgagcaaaaactggcctccacagaaaaagaggtcctccagctgaatgaattcctcaagcagagactctctttattctcggaagagaagaaaaaactggaagagaaggttggcttctccaacaaggtggagctgggacagcagcattttctcagtatctag

SEQ ID NO: 264590 - protein, 204 aa, Artificial Sequence
  derived and/or modified sequence
MSWTCPRCQQPVFFAEKVSSLGKNWHRFCLKCERCHSILSPGGHAEHNGRPYCHKPCYGALFGPRGVNIGGVGSYLYNPPTPSPGCTTPLSPSSFSPPRPRTGLPQGKKSPPHMKTFTGETSLCPGCGEPVYFAEKVMSLGRNWHRPCLRCQRCHKTLTAGSHAEHDGVPYCHVPCYGYLFGPKGVNIGDVGCYIYDPVKIKFK

SEQ ID NO: 264591 - protein, 110 aa, Artificial Sequence
  derived and/or modified sequence
  misc_feature (1)..(1): Xaa can be any naturally occurring amino acid
XHKPCYGALFGPRGVNIGGVGSYLYNPPTPSPGCTTPLSPSSFSPPRPRTGLPQGKKTEKVMSLGRNWHRPCLRCQRCHKTLTAGSHAEHDGVPYCHVPCYGYLFGPKAL

SEQ ID NO: 264592 - DNA, 615 bp, Artificial Sequence
  derived and/or modified sequence
atgagctggacctgccccagatgccagcagcccgtgttcttcgccgagaaggtgagcagcctgggcaagaactggcacagattctgcctgaagtgcgagagatgccacagcatcctgagccccggcggccacgccgagcacaacggcagaccctactgccacaagccctgctacggcgccctgttcggccccagaggcgtgaacatcggcggcgtgggcagctacctgtacaacccccccacccccagccccggctgcaccacccccctgagccccagcagcttcagcccccccagacccagaaccggcctgccccagggcaagaagagccccccccacatgaagaccttcaccggcgagaccagcctgtgccccggctgcggcgagcccgtgtacttcgccgagaaggtgatgagcctgggcagaaactggcacagaccctgcctgagatgccagagatgccacaagaccctgaccgccggcagccacgccgagcacgacggcgtgccctactgccacgtgccctgctacggctacctgttcggccccaagggcgtgaacatcggcgacgtgggctgctacatctacgaccccgtgaagatcaagttcaagtag

SEQ ID NO: 264593 - DNA, 333 bp, Artificial Sequence
  derived and/or modified sequence
tgacacaagccctgctacggcgccctgttcggccccagaggcgtgaacatcggcggcgtgggcagctacctgtacaacccccccacccccagccccggctgcaccacccccctgagccccagcagcttcagcccccccagacccagaaccggcctgccccagggcaagaagaccgagaaggtgatgagcctgggcagaaactggcacagaccctgcctgagatgccagagatgccacaagaccctgaccgccggcagccacgccgagcacgacggcgtgccctactgccacgtgccctgctacggctacctgttcggccccaaggccctgtag

SEQ ID NO: 264594 - DNA, 615 bp, Artificial Sequence
  derived and/or modified sequence
atgtcctggacatgccctaggtgccaacagcctgtattcttcgccgagaaagtgtcctctcttggcaaaaactggcacagattttgcctcaagtgcgagaggtgccatagcatccttagccctggggggcatgcagaacacaacggaaggccatattgccataaaccctgttatggagcactgttcgggccccgaggcgtgaatataggtggggtcggaagttatttgtataaccctcccactccctcccccggatgcactacacccctctcaccatcttcattctcaccaccgagaccgaggactggattaccacaaggaaagaagagcccaccccacatgaagacatttacaggagaaacttctctgtgtcctgggtgcggagaacccgtctattttgccgagaaagtcatgagtctgggccggaactggcacagaccctgcttgcgctgccagaggtgccataagacattaacagcggggtcccatgctgaacacgacggagtcccttattgtcatgtgccgtgctatggttatctttttggccccaagggagtcaacatcggtgatgtgggctgttatatttatgacccggtgaagatcaaattcaagtag

SEQ ID NO: 264595 - DNA, 333 bp, Artificial Sequence
  derived and/or modified sequence
taacacaagccatgctacggcgcactgttcgggccgaggggagtaaacatcggtggggtgggtagctacctatataatcccccaacaccctcccccggctgtactacccccctaagtccatcctcttttagcccacctcgaccacgtactgggctccctcaagggaagaagacggaaaaagtcatgagcctgggaaggaactggcaccggccatgtctgcggtgccaacgttgtcacaaaacacttactgccggcagccatgctgaacatgatggagttccgtactgccacgtgccgtgctacgggtatctgtttgggcccaaagccttatag

SEQ ID NO: 264596 - DNA, 962 bp, Artificial Sequence
  derived and/or modified sequence
gagctatgagctggacctgtccgcgttgccagcaacctgttttcttcgctgagaaggtgagctccctgggcaagaactggcaccgcttctgcctgaaatgtgagcgctgccacagcatcctgtcccctggcgggcatgcagagcacaatgggaggccatactgccacaagccatgctatggggctctctttggacccaggggggtgaacattggtggtgtaggctcctacttgtacaatccccccactcccagccctggctgcaccactcctctcagccccagcagcttcagccctcccaggccaaggactggcctcccccaaggcaagaaaagccctccccatatgaagacattcactggggagacctcgctgtgccctggctgtggggagcccgtctattttgctgagaaggtgatgtcattaggcagaaattggcaccgaccgtgtctgaggtgccagcgttgccacaagaccctgactgctgggagtcatgctgagcatgatggagtcccctactgccacgtcccctgctacggctacctgtttggccccaaaggtgtgaacattggcgatgtgggctgctacatctatgacccagtgaagataaaattcaaatgagacgctcacaaaaaaggtcaccctaactcaggcctcccatcatgcccctcatggtccaatggaagctacaaaaatctccagtcccatgggggttggggaaggtgggatcttgggggcctgggcctaggctccatggtaggccagagagtctagactttctctgccaattttttccctttcccatttctatctggttagggaacagcccgttttgaagggtatcctcctcctggccatcacaacccctttccccagcacattctggagcttcaaggtactcataaaacttgtgtttattgaatttcagcctctgtggcttcttcaataaaatgttggctccca

SEQ ID NO: 264597 - DNA, 615 bp, Artificial Sequence
  derived and/or modified sequence
atgtcctggacctgcccccgctgccagcagcctgtgttctttgctgagaaggtgagcagcctgggcaagaactggcaccgcttctgcctgaagtgtgagcgctgccacagcatcctgagccctgggggccatgctgagcacaacggccggccctactgccacaagccctgctacggggccctgtttggcccccggggcgtgaacattggaggagtgggcagctacctgtacaacccccccacccccagccctggctgcaccacccccctgagccccagcagcttcagccccccccggcccaggacaggcctgccccagggcaagaagagccccccccacatgaagaccttcaccggggagaccagcctgtgccccggctgtggggagcctgtgtactttgctgagaaggtgatgagcctgggcaggaactggcaccggccctgcctgcgctgccagcgctgccacaagaccctgacagctggcagccacgccgagcatgatggagtgccctactgccacgtgccctgctacggctacctgtttggccccaagggcgtgaacattggagatgtgggctgctacatctatgaccctgtgaagatcaagttcaagtag

SEQ ID NO: 264598 - DNA, 333 bp, Artificial Sequence
  derived and/or modified sequence
tgacacaagccctgctacggggccctgtttggcccccggggcgtgaacattggaggagtgggcagctacctgtacaacccccccacccccagccctggctgcaccacccccctgagccccagcagcttcagccccccccggcccaggacaggcctgccccagggcaagaagacagagaaggtgatgagcctgggcaggaactggcaccggccctgcctgcgctgccagcgctgccacaagaccctgacagctggcagccacgccgagcatgatggagtgccctactgccacgtgccctgctacggctacctgtttggccccaaggccctgtag

SEQ ID NO: 264599 - DNA, 615 bp, Artificial Sequence
  derived and/or modified sequence
atgagctggacctgcccccggtgccagcagcccgtgttcttcgccgagaaggttagttctttagggaagaactggcaccgattttgtctgaaatgtgagcggtgtcactcaattctctcccccggcggacacgcagagcataatggacggccctactgtcacaagccctgctacggagcactcttcggccctcggggcgttaacattggtggggtcggatcctacttgtacaaccccccaaccccaagtcccggctgtaccacaccattgtccccctcatcattcagcccaccaagacctaggacaggtttgccacaggggaaaaagtccccacctcacatgaaaacatttaccggcgagacctcgctctgccccggatgtggagaacccgtgtactttgccgaaaaagtgatgagccttggtaggaactggcaccgcccctgccttcgatgccaacggtgtcacaagacattgactgctgggagccatgccgaacatgacggggtgccctattgccacgtgccctgctacggatacctctttgggcctaagggtgttaatatcggcgatgtgggctgttatatatatgatcctgtgaagatcaagtttaagtag

SEQ ID NO: 264600 - DNA, 333 bp, Artificial Sequence
  derived and/or modified sequence
tgacacaagccctgctacggcgccctgttcggcccccggggcgtgaatattgggggggtcgggtcgtacttatacaatccaccgaccccctcacccggatgtaccacgcctctgtccccctcaagcttctcaccaccaaggcccaggactggcctgccccaagggaagaagacggagaaggtgatgagtctgggcagaaattggcaccggccctgcttacggtgtcagcgttgccataagaccctaactgccggatctcatgctgagcatgacggtgtgccatactgccacgtgccctgttatggatatctttttggacctaaagccctttag

SEQ ID NO: 264601 - DNA, 430 bp, Artificial Sequence
  derived and/or modified sequence
ccacaagccatgctatggggctctctttggacccaggggggtgaacattggtggtgtaggctcctacttgtacaatccccccactcccagccctggctgcaccactcctctcagccccagcagcttcagccctcccaggccaaggactggcctcccccaaggcaagaaaactgagaaggtgatgtcattaggcagaaattggcaccgaccgtgtctgaggtgccagcgttgccacaagaccctgactgctgggagtcatgctgagcatgatggagtcccctactgccacgtcccctgctacggctacctgtttggccccaaagccctctaggtcctgcctgtttcttgcctgcctcacccagtggcatcacgatgatggtaaaaccagccagggctgagccagtaagggtgcgggtgatggcaaacatta

SEQ ID NO: 264602 - DNA, 615 bp, Artificial Sequence
  derived and/or modified sequence
atgtcttggacatgcccacgatgtcagcagcctgtcttctttgccgaaaaggtgtctagtctgggcaagaattggcaccgtttctgtctgaagtgtgaacggtgtcactctatcctctctcctggcggtcacgccgagcacaacggccgtccttactgtcataaaccctgctatggagccttgttcggcccaagaggagtcaacattggaggggtcggcagctacctgtacaatcccccaacacccagccctgggtgtactactccactctctcccagctcttttagccccccacggcctaggactggcctccctcagggcaaaaaatctccaccgcacatgaagacatttaccggagagacttcgttgtgtcctggatgtggggagccggtctattttgctgagaaggtcatgtcattaggaaggaactggcacaggccatgcctgaggtgccaacgctgccacaaaaccctcacagcgggtagccatgctgagcacgatggcgtgccctactgtcatgttccatgttatggctacctttttgggccaaaaggagtgaatataggcgacgttggctgttatatatatgacccagtcaagattaagttcaagtag

SEQ ID NO: 264603 - DNA, 333 bp, Artificial Sequence
  derived and/or modified sequence
taacacaaaccttgctacggagctctatttggtcccaggggagtgaatattggcggtgtggggagctacctctacaacccgcctactccctcccccggttgtaccacacctctctccccttcctctttcagtccacctcgcccacgaacaggcctcccgcagggtaagaagaccgagaaagttatgtctttgggcaggaattggcacaggccctgtttgagatgccagcgctgccacaagactctgactgctggctctcacgccgaacacgacggtgtgccatattgccatgtcccctgctacgggtacctgttcggccctaaagccctgtag

SEQ ID NO: 264604 - DNA, 474 bp, Artificial Sequence
  derived and/or modified sequence
gagcccgtctattttgctgagaaggtgatgtcattaggcagaaattggcaccgaccgtgtctgaggtgccagcgttgccacaagaccctgactgctgggagtcatgctgaggtgtgaacattggcgatgtgggctgctacatctatgacccagtgaagataaaattcaaatgagacgctcacaaaaaaggtcaccctaactcaggcctcccatcatgcccctcatggtccaatggaagctacaaaaatctccagtcccatgggggttggggaaggtgggatcttgggggcctgggcctaggctccatggtaggccagagagtctagactttctctgccaattttttccctttcccatttctatctggttagggaacagcccgttttgaagggtatcctcctcctggccatcacaacccctttccccagcacattctggagcttcaaggtactcataaaacttgtgtttattgaa

SEQ ID NO: 264605 - protein, 343 aa, Artificial Sequence
  derived and/or modified sequence
MPRRSLHAAAVLLLVILKEQPSSPAPVNGSKWTYFGPDGENSWSKKYPSCGGLLQSPIDLHSDILQYDASLTPLEFQGYNLSANKQFLLTNNGHSVKLNLPSDMHIQGLQSRYSATQLHLHWGNPNDPHGSEHTVSGQHFAAELHIVHYNSDLYPDASTASNKSEGLAVLAVLIEMGSFNPSYDKIFSHLQHVKYKGQEAFVPGFNIEELLPERTAEYYRYRGSLTTPPCNPTVLWTVFRNPVQISQEQLLALETALYCTHMDDPSPREMINNFRQVQKFDERLVYTSFSQGIILSLALAGILGICIVVVVSIWLFRRKSIKKGDNKGVIYKPATKMETEAHA

SEQ ID NO: 264606 - DNA, 1032 bp, Artificial Sequence
  derived and/or modified sequence
atgccaagaagaagccttcacgccgcggcggttctcctgttggtgatcttaaaagagcaaccttcctcgcccgcaccagtgaatggatcaaagtggacctacttcgggccagacggagagaattcttggtccaagaaatatccgtcctgtggaggtcttctacagtcccctattgatctgcactcggacatcctgcagtatgacgcaagcctcacgccgctggaatttcagggctacaacctgtcagcaaataagcaattcctcttaacaaacaacggtcatagtgtgaagctgaatttgcctagcgacatgcatattcagggcttacagagccggtattccgctacccaactgcacctgcactgggggaaccctaatgacccgcatgggagcgaacacactgtcagtggacaacacttcgccgccgaactgcacattgttcactacaatagcgacctttaccctgatgcgagcacagcttccaacaaatcggaaggactggccgttcttgccgtcctgatcgagatgggaagttttaacccctcctacgataagattttttcacacttgcagcatgttaagtacaagggacaggaggctttcgtgccggggtttaacatcgaagagttgttgcccgagaggactgctgaatattaccgctacagaggctccttgactacacctccttgtaacccaactgtattgtggacagtgttccgcaaccctgtccaaatctctcaggaacagctgctcgccctggaaaccgccctgtattgtacccacatggacgacccttcaccccgcgagatgatcaacaactttcggcaggttcaaaagttcgacgagaggctcgtgtatacctccttctcgcagggcattatcctatctcttgctctggccggaatattaggaatctgtattgttgtggtggtaagtatatggctcttccggaggaagagcatcaaaaagggtgataacaagggcgtcatctacaagcctgcaacaaagatggaaaccgaagctcacgcctag

SEQ ID NO: 264607 - DNA, 1032 bp, Artificial Sequence
  derived and/or modified sequence
atgcccaggaggagcctgcacgccgctgctgtgctgctgctggtgatcctgaaggagcagcccagcagccctgcccctgtgaatggcagcaagtggacctactttggaccagatggagagaacagctggagcaagaagtaccccagctgtggcggcctgctgcagagccccatcgacctgcacagcgacatcctgcagtatgatgccagcctgacccccctggagttccagggctacaacctgagcgccaacaagcagttcctgctgaccaacaacggccacagcgtgaagctgaacctgcccagcgacatgcacatccagggcctgcagagccgctacagcgccacccagctgcacctgcactggggcaaccccaatgacccccacggcagcgagcacacagtgtctggccagcactttgctgctgagctgcacatcgtgcactacaacagcgacctgtacccagatgccagcacagccagcaacaagtctgagggcctggccgtgctggccgtgctgattgagatgggcagcttcaaccccagctatgacaagatcttcagccacctgcagcacgtgaagtacaagggccaggaggcctttgtgcccggcttcaacatcgaggagctgctgcctgagaggacagctgagtactaccgctaccggggcagcctgaccaccccaccctgcaaccccaccgtgctgtggacagtgttcaggaaccctgtgcagatcagccaggagcagctgctggccctggagacagccctgtactgcacccacatggatgaccccagcccccgggagatgatcaacaacttccggcaggtgcagaagtttgatgagcggctggtgtacaccagcttcagccagggcatcatcctgagcctggccctggccggcatcctgggcatctgcatcgtggtggtggtgtccatctggctgttccggaggaagagcatcaagaagggggacaacaagggcgtcatctacaagccagccaccaagatggagacagaggcccacgcctag

SEQ ID NO: 264608 - DNA, 1032 bp, Artificial Sequence
  derived and/or modified sequence
atgccccggcggagcctgcacgccgccgccgtgctgctgctggtgatccttaaggagcaaccgagttctcccgctcctgtgaacggaagcaagtggacctactttggtcctgacggtgagaacagctggagcaaaaagtacccttcatgtggaggactgctgcagtctcctattgacctgcactcggacatactgcagtatgacgcttccctgactccgctcgagttccaggggtacaacctgtcagccaacaagcagtttctccttaccaacaacgggcacagcgtgaagctgaatctcccaagcgatatgcatatccagggcctacagtctcggtacagcgcaacccagctgcacctccattggggtaatccaaacgacccacacggttctgagcacacggtaagtggccagcatttcgccgctgagctgcatatcgttcactacaactctgatttatatccagatgcgtccacagctagtaacaaatctgagggcttggccgtcttagccgttctgatagagatgggaagctttaacccaagttatgataaaatcttctcccatctccaacacgtcaaatataaagggcaggaagcctttgtgcccggattcaacatcgaggaactgttgcccgagcgtacagcagaatactatagatatcgggggtcattgacaacgccaccgtgcaatcccactgtgctgtggacagtgtttaggaatcctgttcagatttctcaggaacagctcctagcattggagacggccctttattgcacccacatggacgaccccagtccgcgtgaaatgatcaacaactttaggcaagtgcagaagtttgatgagcgcctcgtctatacctcgtttagccaggggatcatactgagcctcgctcttgcggggatccttggaatctgtattgtggtggttgtctctatttggctttttcgcaggaaatccatcaagaaaggcgacaacaagggagtgatctacaagccagcaaccaaaatggagaccgaagcacacgcgtag

SEQ ID NO: 264609 - DNA, 1032 bp, Artificial Sequence
  derived and/or modified sequence
atgcccagaaggtctctgcatgccgctgctgtgctgctgctggtgatcctgaaggagcagccaagctcccctgcgccagtgaatggatcgaagtggacgtactttggccctgatggcgagaactcctggtccaaaaagtatcctagctgcgggggtctgctgcagagtccgattgatcttcatagcgacatactccagtacgatgccagcctcaccccgctggagtttcaggggtacaatctttctgcaaacaagcagttcctactcacaaacaacggccactcggtcaaacttaatctgccgtcagacatgcatattcaaggcctgcagtctagatactctgctactcagttacacctgcactggggcaatcccaacgacccccacggtagcgagcacacagtcagtggccagcactttgccgcagagttacacattgtgcactacaacagcgacctctacccagacgcatccactgcatctaacaagtctgagggcctggcggtgttggcagttcttatagaaatgggcagcttcaatcctagctatgacaaaattttcagccacctgcagcatgtcaaatataagggccaggaagcctttgtgccgggatttaatatcgaagaactccttcccgaacgtaccgctgaatattacagatataggggctccctcactacccctccttgtaaccccaccgttctgtggacagtctttcggaatcccgtccagatttctcaagaacagctgttagcactcgaaactgcactttactgcacacatatggatgatccgtcacctagagaaatgattaataatttccgacaggtgcagaaattcgacgaaaggttggtatacacttccttcagccaaggaataatcttaagcctggctctggctggtatactcgggatctgcatcgtggtcgtagtctcgatctggctgttcagaaggaagagcatcaaaaaaggggataacaaaggcgtgatatacaagcccgcaactaagatggaaaccgaagcgcatgcatag

SEQ ID NO: 264610 - DNA, 2744 bp, Artificial Sequence
  derived and/or modified sequence
gtactcgccacggcacccaggctgcgcgcacgcggtcccggtgtgcagctggagagcgagcggccaccgggagcccccggcacagcccgcgcccgccccgcaggagcccgcgaagatgccccggcgcagcctgcacgcggcggccgtgctcctgctggtgatcttaaaggaacagccttccagcccggccccagtgaacggttccaagtggacttattttggtcctgatggggagaatagctggtccaagaagtacccgtcgtgtgggggcctgctgcagtcccccatagacctgcacagtgacatcctccagtatgacgccagcctcacgcccctcgagttccaaggctacaatctgtctgccaacaagcagtttctcctgaccaacaatggccattcagtgaagctgaacctgccctcggacatgcacatccagggcctccagtctcgctacagtgccacgcagctgcacctgcactgggggaacccgaatgacccgcacggctctgagcacaccgtcagcggacagcacttcgccgccgagctgcacattgtccattataactcagacctttatcctgacgccagcactgccagcaacaagtcagaaggcctcgctgtcctggctgttctcattgagatgggctccttcaatccgtcctatgacaagatcttcagtcaccttcaacatgtaaagtacaaaggccaggaagcattcgtcccgggattcaacattgaagagctgcttccggagaggaccgctgaatattaccgctaccgggggtccctgaccacacccccttgcaaccccactgtgctctggacagttttccgaaaccccgtgcaaatttcccaggagcagctgctggctttggagacagccctgtactgcacacacatggacgacccttcccccagagaaatgatcaacaacttccggcaggtccagaagttcgatgagaggctggtatacacctccttctcccaaggcatcatcctctcactggccctggctggcattcttggcatctgtattgtggtggtggtgtccatttggcttttcagaaggaagagtatcaaaaaaggtgataacaagggagtcatttacaagccagccaccaagatggagactgaggcccacgcttgaggtccccggagctcccgggcacatccaggaaggaccttgctttggaccctacacacttcggctctctggacacttgcgacacctcaaggtgttctctgtagctcaatctgcaaacatgccaggcctcagggatcctctgctgggtgcctccttgccttgggaccatggccaccccagagccatccgatcgatggatgggatgcactctcagaccaagcagcaggaattcaaagctgcttgctgtaactgtgtgagattgtgaagtggtctgaattctggaatcacaaaccaagccatgctggtgggccattaatggttggaaaacactttcatccggggctttgccagagcgtgctttcaagtgtcctggaaattctgctgcttctccaagctttcagacaagaatgtgcactctctgcttaggttttgcttgggaaactcaacttctttcctctggagacggggcatctccctctgatttccttctgctatgacaaaacctttaatctgcaccttacaactcggggacaaatggggacaggaaggatcaagttgtagagagaaaaagaaaacaagagatatacattgtgatatattagggacactttcacagtcctgtcctctggatcacagacactgcacagaccttagggaatggcaggttcaagttccacttcttggtggggatgagaagggagagagagctagagggacaaagagaatgagaagacatggatgatctgggagagtctcactttggaatcagaattggaatcacattctgtttatcaagccataatgtaaggacagaataatacaatattaagtccaaatccaacctcctgtcagtggagcagttatgttttatactctacagattttacaaataatgaggctgttccttgaaaatgtgttgttgctgtgtcctggaggagacatgagttccgagatgacccaatctgcctttgaatctggaggaaataggcagaaacaaaatgactgtagaacttattctctgtaggccaaatttcatttcagccacttctgcaggatccctactgccaacctggaatggagacttttatctacttctctctctctgaagatgtcaaatcgtggtttagatcaaatatatttcaagctataaaagcaggaggttatctgtgcagggggctggcatcatgtatttaggggcaagtaataatggaatgctactaagatactccatattcttccccgaatcacacagacagtttctgacaggcgcaactcctccattttcctcccgcaggtgagaaccctgtggagatgagtcagtgccatgactgagaaggaaccgacccctagttgagagcaccttgcagttccccgagaactttctgattcacagtctcattttgacagcatgaaatgtcctcttgaagcatagctttttaaatatctttttccttctactcctccctctgactctaagaattctctcttctggaatcgcttgaacccaggaggcggaggttgcagtaagccaaggtcatgccactgcactctagcctgggtgacagagcgagactccatctcaaaaaaaaaaaaaaaaaaa

SEQ ID NO: 264611 - DNA, 1032 bp, Artificial Sequence
  derived and/or modified sequence
atgcccagaagaagcctgcacgccgccgccgtgctgctgctggtgatcctgaaggagcagcccagcagccccgcccccgtgaacggcagcaagtggacctacttcggccccgacggcgagaacagctggagcaagaagtaccccagctgcggcggcctgctgcagagccccatcgacctgcacagcgacatcctgcagtacgacgccagcctgacccccctggagttccagggctacaacctgagcgccaacaagcagttcctgctgaccaacaacggccacagcgtgaagctgaacctgcccagcgacatgcacatccagggcctgcagagcagatacagcgccacccagctgcacctgcactggggcaaccccaacgacccccacggcagcgagcacaccgtgagcggccagcacttcgccgccgagctgcacatcgtgcactacaacagcgacctgtaccccgacgccagcaccgccagcaacaagagcgagggcctggccgtgctggccgtgctgatcgagatgggcagcttcaaccccagctacgacaagatcttcagccacctgcagcacgtgaagtacaagggccaggaggccttcgtgcccggcttcaacatcgaggagctgctgcccgagagaaccgccgagtactacagatacagaggcagcctgaccacccccccctgcaaccccaccgtgctgtggaccgtgttcagaaaccccgtgcagatcagccaggagcagctgctggccctggagaccgccctgtactgcacccacatggacgaccccagccccagagagatgatcaacaacttcagacaggtgcagaagttcgacgagagactggtgtacaccagcttcagccagggcatcatcctgagcctggccctggccggcatcctgggcatctgcatcgtggtggtggtgagcatctggctgttcagaagaaagagcatcaagaagggcgacaacaagggcgtgatctacaagcccgccaccaagatggagaccgaggcccacgcctag

SEQ ID NO: 264612 - DNA, 192 bp, Artificial Sequence
  derived and/or modified sequence
atgagcaagagcgtgcccgccttcctgcaggacgagagcgacgacagagagaccgacaccgccagcgagagcagctaccagctgagcagacacaagaagagccccagcagcctgaccaacctgagcagcagcagcggcatgaccagcctgagcagcgtgagcggcagcgtgatgagcgtgtacagcggctag

SEQ ID NO: 264613 - DNA, 1131 bp, Artificial Sequence
  derived and/or modified sequence
atgagcaagagcgtgcccgccttcctgcaggacgagagcgacgacagagagaccgacaccgccagcgagagcagctaccagctgagcagacacaagaagagccccagcagcctgaccaacctgagcagcagcagcggcatgaccagcctgagcagcgtgagcggcagcgtgatgagcgtgtacagcggcgacttcggcaacctggaggtgaagggcaacatccagttcgccatcgagtacgtggagagcctgaaggagctgcacgtgttcgtggcccagtgcaaggacctggccgccgccgacgtgaagaagcagagaagcgacccctacgtgaaggcctacctgctgcccgacaagggcaagatgggcaagaagaagaccctggtggtgaagaagaccctgaaccccgtgtacaacgagatcctgagatacaagatcgagaagcagatcctgaagacccagaagctgaacctgagcatctggcacagagacaccttcaagagaaacagcttcctgggcgaggtggagctggacctggagacctgggactgggacaacaagcagaacaagcagctgagatggtaccccctgaagagaaagaccgcccccgtggccctggaggccgagaacagaggcgagatgaagctggccctgcagtacgtgcccgagcccgtgcccggcaagaagctgcccaccaccggcgaggtgcacatctgggtgaaggagtgcctggacctgcccctgctgagaggcagccacctgaacagcttcgtgaagtgcaccatcctgcccgacaccagcagaaagagcagacagaagaccagagccgtgggcaagaccaccaaccccatcttcaaccacaccatggtgtacgacggcttcagacccgaggacctgatggaggcctgcgtggagctgaccgtgtgggaccactacaagctgaccaaccagttcctgggcggcctgagaatcggcttcggcaccggcaagagctacggcaccgaggtggactggatggacagcaccagcgaggaggtggccctgtgggagaagatggtgaacagccccaacacctggatcgaggccaccctgcccctgagaatgctgctgatcgccaagatcagcaagtag

SEQ ID NO: 264614 - DNA, 312 bp, Artificial Sequence
  derived and/or modified sequence
atgagcaagagcgtgcccgccttcctgcaggacgagagcgacgacagagagaccgacaccgccagcgagagcagctaccagctgagcagacacaagaagagccccagcagcctgaccaacctgagcagcagcagcggcatgaccagcctgagcagcgtgagcggcagcgtgatgagcgtgtacagcggcgacttcggcaacctggaggtgaagggcaacatccagttcgccatcgagtacgtggagagcctgaaggagctgcacgtgttcgtggcccagtgcaaggacctggccgccgccgacgtgaagtag

SEQ ID NO: 264615 - DNA, 468 bp, Artificial Sequence
  derived and/or modified sequence
atgagcaagagcgtgcccgccttcctgcaggacgagagcgacgacagagagaccgacaccgccagcgagagcagctaccagctgagcagacacaagaagagccccagcagcctgaccaacctgagcagcagcagcggcatgaccagcctgagcagcgtgagcggcagcgtgatgagcgtgtacagcggcgacttcggcaacctggaggtgaagggcaacatccagttcgccatcgagtacgtggagagcctgaaggagctgcacgtgttcgtggcccagtgcaaggacctggccgccgccgacgtgaagaagcagagaagcgacccctacgtgaaggcctacctgctgcccgacaagggcaagatgggcaagaagaagaccctggtggtgaagaagaccctgaaccccgtgtacaacgagatcctgagatacaagatcgagaagcagatcctgaagacccagaagtag

SEQ ID NO: 264616 - DNA, 213 bp, Artificial Sequence
  derived and/or modified sequence
atgagcaagagcgtgcccgccttcctgcaggacgagagcgacgacagagagaccgacaccgccagcgagagcagctaccagctgagcagacacaagaagagccccagcagcctgaccaacctgagcagcagcagcggcatgaccagcctgagcagcgtgagcggcagcgtgatgagcgtgtacagcggcgacttcggcaacctggaggtgtag

SEQ ID NO: 264617 - DNA, 192 bp, Artificial Sequence
  derived and/or modified sequence
atgtccaaatcagtgcctgccttcttgcaggacgaaagcgacgatagagagaccgacaccgcgagtgaaagtagctatcagctcagtaggcacaagaaatcgccgagttctctgaccaatctgtcttctagctcaggcatgacaagcctgtcaagcgtctccgggagcgtcatgtccgtttactccgggtag

SEQ ID NO: 264618 - DNA, 1131 bp, Artificial Sequence
  derived and/or modified sequence
atgtccaagagtgtgccggcattcctgcaagatgagtcagacgaccgtgagacggataccgcctccgagagctcctatcagctgagtagacacaaaaagtcccccagtagcttgaccaatctctcctctagctcgggcatgaccagcctttcttccgtctcaggttctgtgatgagtgtgtacagcggggacttcggcaatctggaggtgaaagggaacatccagttcgcgatagaatatgtcgaatccctgaaagagctgcatgtgttcgtggcgcagtgcaaggacctcgccgcagctgatgtgaagaaacagcgctcagacccttacgtgaaagcgtacctcctgccggacaaaggaaagatggggaagaagaagaccctcgtcgttaaaaagactcttaatccagtgtacaacgagattcttagatataagatcgagaagcagattctaaagacccagaaactgaacttatctatatggcatcgtgataccttcaagcgcaactcatttctgggcgaggtggagctggacctggagacatgggactgggataacaagcagaacaagcagttgcgctggtatcccttgaaacgaaaaacggcacccgtggcactcgaagccgaaaaccggggtgagatgaagcttgctctgcagtatgtgcccgagcctgtaccaggcaaaaagttgcccactaccggagaagtgcatatctgggtgaaggagtgcctggacctgccgctccttagaggaagccaccttaactctttcgttaagtgcaccatcctgcctgacacaagtcgaaagagcaggcagaagacccgggcagtggggaaaaccaccaacccaatctttaaccatacaatggtctacgatggattccggcccgaagatctaatggaagcctgtgtggagttgaccgtttgggatcactacaaattgacaaaccagtttctcggcggcctacgcattgggttcggtacaggaaaaagctacggcacggaggtggactggatggattcaaccagtgaagaggttgccctttgggagaagatggtcaactcaccgaacacatggattgaggcaaccctccctttacgcatgttgctgatcgctaagattagcaagtag

SEQ ID NO: 264619 - DNA, 312 bp, Artificial Sequence
  derived and/or modified sequence
atgtcgaaatcagttccagccttcttgcaggacgaatcagatgaccgcgagaccgacaccgccagtgagagttcatatcagctcagtaggcataaaaagagtcctagtagcctgacaaacctttcttcttccagtggaatgacttcgctgtcctcggtgagcggaagcgttatgtcggtctattcaggagatttcggcaacttagaagtgaaaggcaatatccagttcgcgattgagtacgtcgagagcttaaaggaactgcacgtgttcgtggcccaatgtaaagatctggctgccgccgacgtgaagtag

SEQ ID NO: 264620 - DNA, 468 bp, Artificial Sequence
  derived and/or modified sequence
atgagcaagagtgtccctgctttcctgcaggatgagtctgacgatcgcgagacagatactgctagtgaatcctcataccaactgagtaggcacaagaaaagtccatctagtctgacaaatctgagcagcagctcaggcatgacctcactgagcagtgtgtctggatccgtcatgtcggtgtacagcggtgatttcgggaacttggaagtgaagggaaacattcagtttgcgattgaatacgtggagagtttgaaagaactgcacgtgttcgttgcccagtgtaaggaccttgcggcagcagacgtgaaaaagcaaagaagcgatccctatgtaaaggcgtatctgttacctgacaaaggtaagatggggaaaaagaaaacactggtggtgaagaagacactcaaccctgtgtataacgagatcctccgctataaaattgagaagcagattcttaaaacacaaaagtag

SEQ ID NO: 264621 - DNA, 1131 bp, Artificial Sequence
  derived and/or modified sequence
atgtccaagagcgtgcctgcatttcttcaggacgaatctgatgacagagaaactgatactgcatcggaaagcagctaccagctgtcccgccataaaaaatctccttcttctctaaccaacctcagctcctcttctgggatgacctcgttatcttcggtgtcaggcagcgtaatgtctgtctattcaggcgattttggcaatttagaggtcaagggtaatatccagtttgccatagaatatgtcgagtcactgaaggaactccacgttttcgtcgcccagtgtaaagacctggccgcggccgacgtgaaaaaacaaagatccgatccctacgttaaggcttacctgcttccagacaagggcaaaatgggtaagaaaaaaacattggtcgttaaaaaaactctgaaccctgtgtataacgagattttgagatacaaaattgaaaaacaaatcctgaaaactcagaagctcaatctaagtatttggcatagggataccttcaaacggaactctttcttaggtgaagtcgagttggacctcgagacctgggactgggacaacaagcaaaataaacagctgcgctggtaccccctgaagcggaaaacagctccagttgcgctggaagccgaaaaccggggagagatgaaactggccttgcagtacgtgcctgagccagtccccgggaagaagctgccgacgaccggcgaggtgcacatctgggttaaggaatgccttgatctgccattactgcggggatcccatcttaacagtttcgttaagtgcacaattttgccagatacatcccgtaagagcagacaaaagactcgggccgtagggaagaccactaatccaatttttaaccatacgatggtttacgacggattcaggccggaggatcttatggaggcctgtgtggaactgactgtgtgggaccattataagctgacaaaccagtttttaggggggctacggatcggctttgggaccggcaaatcttatgggaccgaggttgactggatggactctacttcagaggaggttgcattgtgggagaaaatggtgaactctcctaacacatggatagaggcaaccctgcccttacgcatgctgttaatcgccaagatttcaaagtag

SEQ ID NO: 264622 - DNA, 213 bp, Artificial Sequence
  derived and/or modified sequence
atgagtaaatccgtccccgctttccttcaggatgagtccgacgacagagaaaccgataccgcctctgaaagctcgtatcagctcagccggcataagaagtccccatcaagtttgacaaatttgtcctcctcctccggaatgacctctcttagttccgtgagcggaagtgttatgtcagtgtattccggggatttcgggaacctggaggtctag

SEQ ID NO: 264623 - DNA, 192 bp, Artificial Sequence
  derived and/or modified sequence
atgagcaagtctgtgcctgccttcctgcaggatgaaagtgatgaccgggagacagacacagccagcgagagcagctaccagctgagccgccacaagaagagccccagcagcctgaccaacctgagcagcagcagcggcatgaccagcctgagctctgtgtctggctctgtgatgtctgtgtacagcggctag

SEQ ID NO: 264624 - DNA, 1131 bp, Artificial Sequence
  derived and/or modified sequence
atgagcaagtctgtgcctgccttcctgcaggatgaaagtgatgaccgggagacagacacagccagcgagagcagctaccagctgagccgccacaagaagagccccagcagcctgaccaacctgagcagcagcagcggcatgaccagcctgagctctgtgtctggctctgtgatgtctgtgtacagcggggactttggaaacctggaggtgaagggcaacatccagtttgccatcgagtatgtggagagcctgaaggagctgcacgtgtttgtggcccagtgcaaggacctggccgctgctgatgtgaagaagcagaggagtgacccctacgtgaaggcctacctgctgcctgacaagggcaagatgggcaagaagaagaccctggtggtgaagaagaccctgaaccctgtgtacaatgagatcctgcgctacaagattgagaagcagatcctgaagacccagaagctgaacctgagcatctggcaccgggacaccttcaagaggaacagcttcctgggggaggtggagctggacctggagacctgggactgggacaacaagcagaacaagcagctgcgctggtaccccctgaagaggaagacagcccctgtggccctggaggctgaaaatagaggagagatgaagctggccctgcagtatgtgcctgagcctgtgcctgggaagaagctgcccaccactggagaggtgcacatctgggtgaaggagtgcctggacctgcccctgctgcggggcagccacctgaacagctttgtgaagtgcaccatcctgcctgacaccagcaggaagagccggcagaagaccagggctgtgggcaagaccaccaaccccatcttcaaccacaccatggtgtatgatggcttccggcctgaggacctgatggaggcctgtgtggagctgactgtgtgggaccactacaagctgaccaaccagttcctgggcggcctgcgcatcggcttcggcaccgggaagagctatggaacagaggtggactggatggacagcaccagcgaggaggtggccctgtgggagaagatggtgaacagccccaacacctggattgaggccaccctgcccctgaggatgctgctgattgccaagatcagcaagtag

SEQ ID NO: 264625 - DNA, 312 bp, Artificial Sequence
  derived and/or modified sequence
atgagcaagtctgtgcctgccttcctgcaggatgaaagtgatgaccgggagacagacacagccagcgagagcagctaccagctgagccgccacaagaagagccccagcagcctgaccaacctgagcagcagcagcggcatgaccagcctgagctctgtgtctggctctgtgatgtctgtgtacagcggggactttggaaacctggaggtgaagggcaacatccagtttgccatcgagtatgtggagagcctgaaggagctgcacgtgtttgtggcccagtgcaaggacctggccgctgctgatgtgaagtag

SEQ ID NO: 264626 - DNA, 468 bp, Artificial Sequence
  derived and/or modified sequence
atgagcaagtctgtgcctgccttcctgcaggatgaaagtgatgaccgggagacagacacagccagcgagagcagctaccagctgagccgccacaagaagagccccagcagcctgaccaacctgagcagcagcagcggcatgaccagcctgagctctgtgtctggctctgtgatgtctgtgtacagcggggactttggaaacctggaggtgaagggcaacatccagtttgccatcgagtatgtggagagcctgaaggagctgcacgtgtttgtggcccagtgcaaggacctggccgctgctgatgtgaagaagcagaggagtgacccctacgtgaaggcctacctgctgcctgacaagggcaagatgggcaagaagaagaccctggtggtgaagaagaccctgaaccctgtgtacaatgagatcctgcgctacaagattgagaagcagatcctgaagacccagaagtag

SEQ ID NO: 264627 - DNA, 213 bp, Artificial Sequence
  derived and/or modified sequence
atgagcaagtctgtgcctgccttcctgcaggatgaaagtgatgaccgggagacagacacagccagcgagagcagctaccagctgagccgccacaagaagagccccagcagcctgaccaacctgagcagcagcagcggcatgaccagcctgagctctgtgtctggctctgtgatgtctgtgtacagcggggactttggaaacctggaggtgtag

SEQ ID NO: 264628 - DNA, 192 bp, Artificial Sequence
  derived and/or modified sequence
atgagcaagagcgtgcccgccttcctgcaggacgagagcgacgaccgtgagactgacactgcctctgaatcttcataccaactcagccggcataagaagagcccttcatctttaactaacctaagttcgagctcagggatgacctccttgagcagcgtcagcgggtctgtcatgagcgtttatagcggatag

SEQ ID NO: 264629 - DNA, 1131 bp, Artificial Sequence
  derived and/or modified sequence
atgagcaagagcgtgcccgccttcctgcaggacgagagcgacgacagggaaaccgatacagccagtgaaagctcttatcaactctcacgtcataagaagtccccatcttcgctaacaaacctctcctctagttcggggatgacctcactttcttccgttagcggttccgtgatgtccgtatacagcggggacttcggaaacctcgaggtaaagggcaatatacagttcgcaatagaatacgtggagtccctaaaagagctccacgtttttgtagcccagtgtaaggatttggctgctgcagacgtcaagaagcagaggtcagacccttacgttaaagcgtacctgctgcctgacaaaggtaaaatgggtaaaaagaagaccctcgttgttaagaagaccttaaacccggtatataacgaaattttaagatacaaaatcgagaagcagattttgaaaactcagaagttaaatctatccatctggcatagggacacttttaagagaaatagtttcctcggggaggttgaactggatctggaaacctgggactgggacaataagcagaataagcagctgaggtggtacccactgaagcggaagactgctccagttgcgctggaggcagaaaacagaggagaaatgaagctggccttgcagtacgtgccagaacccgtaccagggaagaagttgccaaccactggggaggtgcacatatgggtcaaagagtgtctcgacttacctctgttgcgcggaagccacctcaattccttcgtgaagtgtactatcctacccgacacatcccgaaagagtcgtcaaaaaactcgagcagtggggaaaaccaccaaccccatctttaaccataccatggtgtacgatggcttcagaccagaggatctcatggaagcatgcgtggaactgaccgtgtgggaccattataagctgacaaatcaattccttggcgggcttcgcattggatttggaaccggcaagtcctacggcacggaagtagattggatggattccactagcgaagaggttgcgttatgggagaagatggtcaatagtcccaacacatggatcgaggccactctgcccttgagaatgcttctgatagctaaaatcagcaagtag

SEQ ID NO: 264630 - DNA, 312 bp, Artificial Sequence
  derived and/or modified sequence
atgagcaagagcgtgcccgccttcctgcaggacgagagcgacgacagagaaaccgacaccgcgagcgaaagtagttaccaactgagccgccacaaaaagagcccctccagtctgacaaatctcagttcttctagtggcatgaccagcctgagttctgtgtctggaagcgtcatgtcagtctactccggtgactttggaaacctggaagtgaaaggaaacatccagttcgccattgagtacgtggaaagcctgaaagaactgcacgtgttcgtggcccagtgtaaagatctcgcagccgcagacgttaaatag

SEQ ID NO: 264631 - DNA, 468 bp, Artificial Sequence
  derived and/or modified sequence
atgagcaagagcgtgcccgccttcctgcaggacgagagcgacgaccgcgaaacggacaccgcatccgagtcatcgtatcagctcagtagacacaaaaagtcaccttcatctctgacaaatctctcatcttctagtggaatgacaagcctgtcttccgtcagcgggagtgtgatgagcgtttattccggcgactttggcaacctggaagtgaagggcaatatacagtttgccattgaatacgtggaaagcctgaaagaactccacgtgtttgttgctcagtgtaaggatttagctgccgcagacgtcaagaaacagagatcagacccctatgtaaaagcctatctgctcccagataaaggcaagatgggcaaaaaaaagactctggtggtgaagaaaaccttgaatcccgtatataatgaaatcctgcgctataagattgagaagcagattttaaagactcagaagtag

SEQ ID NO: 264632 - DNA, 1131 bp, Artificial Sequence
  derived and/or modified sequence
atgagcaagagcgtgcccgccttcctgcaggacgagagcgacgacagggaaactgacacggcgtctgaatcttcctatcagctctctcggcacaagaagtccccctcgtctctcactaacctgtcctcttccagtgggatgacctcgctgtcctcagtgtctggttccgtgatgtctgtctattcaggcgattttgggaatctggaggtgaaaggaaatattcaatttgctatagaatatgtggaatcgttgaaagaattacacgtgttcgtggctcagtgtaaggacttggctgcagccgacgtgaagaaacaaagatcagatccctatgtcaaggcttatctcctgcccgacaaaggcaagatgggaaagaaaaagacacttgtggtaaaaaagaccctcaacccagtttataatgagattctccggtataagatcgagaagcagatcctgaagacccaaaagctgaacttatccatttggcaccgcgatacattcaagaggaattcattcctcggcgaggtagagctagacctcgagacctgggactgggacaataagcagaacaagcagttgaggtggtatccgctgaagcgaaaaaccgcccctgtggcactcgaagctgagaacaggggcgaaatgaaactcgcattgcaatacgtgcctgagcccgttcctgggaaaaaattacccacgactggcgaggtgcatatatgggtcaaggaatgtcttgatctgcctttgttgcgcgggagtcatctcaattcatttgtgaagtgtaccattctgcccgacacatcacgcaaaagcaggcagaaaacacgggccgtgggcaaaaccaccaaccccatttttaatcacacaatggtgtacgacggcttccgcccggaagacctgatggaggcttgtgtcgaattgactgtctgggatcactataagctcactaaccagttcctgggaggccttcggattggattcggcactggcaagtcgtatggaactgaggttgactggatggactcaacgtcagaggaagtggccctctgggaaaaaatggtcaattcgccaaacacatggattgaagccacacttcctctgcggatgctgttaatagcgaagatttctaagtag

SEQ ID NO: 264633 - DNA, 213 bp, Artificial Sequence
  derived and/or modified sequence
atgagcaagagcgtgcccgccttcctgcaggacgagagcgacgacagagaaacagataccgcttccgaatccagttaccagttgtcaagacacaaaaaaagcccgtcatccttgacaaacctatcttctagtagcggtatgaccagtctgagctctgtaagtgggtccgtgatgtcggtgtacagtggcgactttggcaacttggaggtctag

SEQ ID NO: 264634 - DNA, 192 bp, Artificial Sequence
  derived and/or modified sequence
atgtcaaagtcagtgccagccttcctccaggacgaatccgacgacagggagaccgacacagctagtgaaagttcctatcagcttagtcggcataaaaagtccccctccagtctgacaaacctgtctagttcctcagggatgacttcactctcttccgtttccgggagtgttatgagcgtgtattcgggctag

SEQ ID NO: 264635 - DNA, 1131 bp, Artificial Sequence
  derived and/or modified sequence
atgtcaaagagtgtccccgcattcctgcaggacgaaagcgacgaccgggaaacagacactgcgtctgaatcttcgtaccagctttctaggcacaagaagagtccttcatcgttgaccaacctctccagcagctccggcatgacatcgctgtctagcgtttcgggttccgtgatgagtgtatattcaggcgacttcggcaacctcgaggttaaagggaatatacaattcgcgatcgagtatgtcgagagtttaaaggaactacacgtgttcgtggctcagtgtaaggaccttgctgccgcagatgtgaaaaagcagagatctgacccttatgtgaaggcctatttgctcccggataagggcaagatggggaaaaaaaagaccttagtcgtgaagaagacacttaatccggtgtataacgaaattctgagatacaagatcgagaaacagattctgaagacccaaaagctcaatctctcgatatggcatagagatactttcaagagaaactcattcctcggtgaggtggagcttgatctggaaacatgggattgggacaacaaacaaaacaagcaattgcgctggtacccgcttaagcggaaaaccgcgccagtggccttggaggccgagaatcgcggagaaatgaagctggctcttcagtatgtgcccgaacctgtccccggtaaaaaattaccgactactggcgaggtgcacatctgggtgaaagagtgtctggatctgccgttattaaggggctcccacctgaattcttttgttaagtgtacgatcctgcccgataccagtcgtaagagcagacagaaaaccagggctgtgggcaaaactaccaacccaatcttcaaccatacaatggtgtacgatggtttcagaccagaggatctgatggaggcctgcgttgagttaaccgtgtgggaccactataagttgaccaaccagttcctcgggggtctgaggatcggattcggcactggaaagtcgtatgggacagaggtggactggatggactcaactagtgaagaggtagcgctatgggaaaaaatggtgaacagtcccaatacttggatcgaggccacgctaccccttagaatgctgttgattgctaaaatttcaaaatag

SEQ ID NO: 264636 - DNA, 312 bp, Artificial Sequence
  derived and/or modified sequence
atgagcaagagcgtacccgcatttctccaagacgagtctgacgatcgcgaaacggataccgcctccgagagctcataccagctttctaggcacaagaagtcccccagcagcttgacgaatctgtcttcaagttccggtatgacatccctgtcctcggtttcaggtagcgttatgtccgtgtacagcggcgacttcggcaacctcgaggttaaggggaatatacaattcgctattgagtacgttgaaagcttgaaggaattgcacgtgttcgtggcccaatgtaaggatttagctgctgccgacgtcaaatag

SEQ ID NO: 264637 - DNA, 468 bp, Artificial Sequence
  derived and/or modified sequence
atgtccaagagcgttcctgcatttctgcaggatgagagcgatgacagggaaaccgacaccgctagcgagagctcgtaccaactatcgaggcacaagaaaagcccgagtagtctaacaaacctgagttcaagcagcggtatgactagcctcagttccgtttctggctccgtaatgtccgtttactctggggactttggtaatcttgaggttaaaggaaacattcaattcgccattgagtacgttgagagtttgaaagagctccatgtgtttgtggctcaatgcaaagatctggctgctgctgatgtcaaaaagcagcgcagtgatccatacgtcaaggcatacctcctgcctgacaaaggcaaaatgggtaaaaagaagaccttggtcgtgaaaaaaacactaaatccagtttacaatgagatcctacggtataagatcgaaaaacagattctcaaaacgcagaaatag

SEQ ID NO: 264638 - DNA, 1131 bp, Artificial Sequence
  derived and/or modified sequence
atgagcaaatcggtcccagccttcctgcaggacgaatccgatgacagagagacagacacggcctctgaaagcagctatcagctgtcccggcataaaaaaagcccatcctccctgaccaacctctcttcctcatccggcatgacttctttatcatccgtttcaggtagtgtgatgtccgtctactccggcgatttcgggaatctggaggtgaaagggaatattcagtttgctatcgagtacgtagagtcactaaaggagttacacgtcttcgtcgcgcagtgtaaagatctagccgctgcggacgtgaagaaacaacgttcggatccatatgtaaaagcctatctgctgcccgacaagggcaagatgggcaaaaagaaaaccctggttgtcaagaaaacactcaaccccgtgtacaacgaaatactccggtataaaatcgaaaagcagatactcaagactcagaagcttaatctatcgatctggcaccgggataccttcaagcgaaatagctttctgggcgaggtggagctcgatttagagacctgggattgggacaacaagcagaacaagcagctcagatggtaccctctcaagcgaaaaacagcaccagtagcccttgaagcagaaaacagaggtgagatgaaactggctttacagtatgtcccggagccagtccctggtaaaaagctccctaccactggtgaggttcatatctgggttaaggagtgcctggacctgccacttctccggggtagtcacctgaacagctttgtaaaatgcactattctcccagacactagcagaaagtcccgccagaaaactagagcggttggaaagaccaccaatcctatcttcaatcacacaatggtttacgacggtttcagacctgaggatcttatggaggcttgtgtcgagctgacagtgtgggaccactacaagttaactaaccagtttttggggggattaagaattgggttcgggacaggcaagtcctacggcacggaggtagactggatggattccacatcagaagaagtggccctttgggaaaaaatggtgaattccccgaatacttggattgaggctaccctacccctgcgcatgcttttgattgccaagataagtaaatag

SEQ ID NO: 264639 - DNA, 213 bp, Artificial Sequence
  derived and/or modified sequence
atgagtaagagtgtgcctgcttttctgcaagacgagagcgacgacagagagacagacaccgcgtctgaatctagctaccagttaagccggcataaaaaaagtccatcgagcttgactaacctgagctcctcgtccggcatgactagcctgtcttcagtgtccggatcagtcatgtcagtgtatagtggggacttcgggaacctggaggtgtag

SEQ ID NO: 264640 - DNA, 1098 bp, Artificial Sequence
  derived and/or modified sequence
atgagcgacgacagagagaccgacaccgccagcgagagcagctaccagctgagcagacacaagaagagccccagcagcctgaccaacctgagcagcagcagcggcatgaccagcctgagcagcgtgagcggcagcgtgatgagcgtgtacagcggcgacttcggcaacctggaggtgaagggcaacatccagttcgccatcgagtacgtggagagcctgaaggagctgcacgtgttcgtggcccagtgcaaggacctggccgccgccgacgtgaagaagcagagaagcgacccctacgtgaaggcctacctgctgcccgacaagggcaagatgggcaagaagaagaccctggtggtgaagaagaccctgaaccccgtgtacaacgagatcctgagatacaagatcgagaagcagatcctgaagacccagaagctgaacctgagcatctggcacagagacaccttcaagagaaacagcttcctgggcgaggtggagctggacctggagacctgggactgggacaacaagcagaacaagcagctgagatggtaccccctgaagagaaagaccgcccccgtggccctggaggccgagaacagaggcgagatgaagctggccctgcagtacgtgcccgagcccgtgcccggcaagaagctgcccaccaccggcgaggtgcacatctgggtgaaggagtgcctggacctgcccctgctgagaggcagccacctgaacagcttcgtgaagtgcaccatcctgcccgacaccagcagaaagagcagacagaagaccagagccgtgggcaagaccaccaaccccatcttcaaccacaccatggtgtacgacggcttcagacccgaggacctgatggaggcctgcgtggagctgaccgtgtgggaccactacaagctgaccaaccagttcctgggcggcctgagaatcggcttcggcaccggcaagagctacggcaccgaggtggactggatggacagcaccagcgaggaggtggccctgtgggagaagatggtgaacagccccaacacctggatcgaggccaccctgcccctgagaatgctgctgatcgccaagatcagcaagtag

SEQ ID NO: 264641 - DNA, 1098 bp, Artificial Sequence
  derived and/or modified sequence
atgtctgacgatagggagaccgacacagccagcgagtctagctatcagctgagccgacataaaaaaagtccctccagcctgactaacctgtccagctccagtggaatgaccagcctgagcagtgtatctggctcagtgatgtctgtgtattctggagatttcggtaacctggaggtaaagggaaatattcaattcgcaatcgaatacgtggagagcctgaaggagctccatgtgtttgtagcccagtgtaaggatctggccgctgcagatgtgaagaaacagcgctcggatccttatgtcaaagcctatctgctccctgacaaaggaaagatgggaaaaaagaagactctcgtagtgaaaaaaacccttaaccccgtctataacgagatcctgaggtataagattgaaaaacagatacttaagacacagaagctgaatctgtccatatggcacagagatacattcaaacgtaatagttttctcggcgaggtagaactggacctggagacatgggactgggacaacaagcagaacaagcagctaaggtggtaccccctgaagagaaagacagcccccgtcgctttggaagctgagaaccgtggcgagatgaagctggcactgcagtatgtgccggagcccgtgcccgggaagaaacttccaacaacaggcgaggtgcatatctgggtgaaggaatgcctagacctgcctctccttaggggctcccacctgaattccttcgtgaagtgtacaattctccctgacacttccaggaagtcccggcaaaagactagggctgttggtaagaccaccaatcccatttttaatcacactatggtgtatgacggattccggcccgaagatttgatggaagcttgtgtggaattgaccgtgtgggatcactataagttaactaaccaattcctgggaggcttgcgcataggcttcggcactgggaagagttacggtacagaagtggactggatggacagcacaagcgaagaagtggccttatgggaaaagatggtcaactctcccaatacgtggattgaggcaacacttcccctgagaatgctgctgatcgccaaaatatcgaagtag

SEQ ID NO: 264642 - DNA, 1098 bp, Artificial Sequence
  derived and/or modified sequence
atgtctgatgaccgggagacagacacagccagcgagagcagctaccagctgagccgccacaagaagagccccagcagcctgaccaacctgagcagcagcagcggcatgaccagcctgagctctgtgtctggctctgtgatgtctgtgtacagcggggactttggaaacctggaggtgaagggcaacatccagtttgccattgaatatgtggagagcctgaaggagctgcacgtgtttgtggcccagtgcaaggacctggccgctgctgatgtgaagaagcagaggagtgacccctacgtgaaggcctacctgctgcctgacaagggcaagatgggcaagaagaagaccctggtggtgaagaagaccctgaaccctgtgtacaatgagatcctgcgctacaagattgagaagcagatcctgaagacccagaagctgaacctgagcatctggcaccgggacaccttcaagagaaattccttcctgggggaggtggagctggacctggagacctgggactgggacaacaagcagaacaagcagctgcgctggtaccccctgaagaggaagacagcccctgtggccctggaggccgagaacagaggagagatgaagctggccctgcagtatgtgcctgagcctgtgcctgggaagaagctgcccaccaccggggaggtgcacatctgggtgaaggaatgtctggacctgcccctgctgcggggcagccacctgaacagctttgtgaagtgcaccatcctgcctgacaccagcaggaagagccggcagaagaccagggctgtgggcaagaccaccaaccccatcttcaaccacaccatggtgtatgatggcttccggcctgaggacctgatggaggcctgtgtggagctgactgtgtgggaccactacaagctgaccaaccagttcctgggcggcctgagaattggatttggaacaggcaagagctatggaacagaggtggactggatggacagcaccagcgaggaggtggccctgtgggagaagatggtgaacagccccaacacctggattgaggccaccctgcccctgaggatgctgctgattgccaagatcagcaagtag

SEQ ID NO: 264643 - DNA, 1098 bp, Artificial Sequence
  derived and/or modified sequence
atgagcgacgaccgggagaccgacaccgccagcgagagcagctaccagctatctagacacaaaaagagtccctctagcctgaccaacctctctagcagttccgggatgaccagcctgtcaagcgtaagtggatctgtgatgtctgtctacagcggcgatttcggcaatttggaagtcaaagggaacatacagttcgcaattgagtacgtcgagtctctcaaagagctccatgtctttgtcgcccagtgcaaggatctggcagccgctgacgtgaagaagcagcggtctgatccttacgtgaaagcctatcttctgcctgacaaaggtaaaatgggtaaaaagaaaaccctggtggttaaaaaaactctgaatcctgtgtataatgaaatcctgcgttacaagattgagaagcagatccttaagactcagaagctgaacctttccatatggcaccgagacacttttaaacggaattccttcctcggcgaggtggagcttgacctggagacatgggactgggataataagcagaacaagcagctgcggtggtatcctctcaaacgcaagaccgcacctgtagccctggaggcagagaacaggggcgagatgaagctcgctttgcagtacgttcctgagcccgttccgggcaagaagctccccacaacgggggaggtgcacatctgggtaaaggagtgtttggacctgccactgctgagggggtctcacctcaacagtttcgtgaagtgtactattctcccagatacctctaggaaatcaaggcagaagaccagagccgtcgggaaaaccaccaatcccatttttaaccacacgatggtgtacgatggttttcggcccgaagatcttatggaagcgtgcgtcgaactaacagtatgggatcattacaaactgaccaatcaatttttaggcggcttaaggattggattcgggacgggtaaaagttatggaactgaggtggattggatggattctacttctgaagaggtcgctttgtgggagaaaatggttaacagtccaaatacttggatcgaggcaactctccccctgcgcatgctcctcatcgctaagatatcaaagtag

SEQ ID NO: 264644 - DNA, 1098 bp, Artificial Sequence
  derived and/or modified sequence
atgagcgacgacagggagacagataccgccagcgagagtagctaccagctatcccggcataagaagagcccatcgtcgctgaccaaccttagttcttcaagtgggatgacttcactttcgagcgtttcaggatccgtgatgtctgtgtatagtggcgactttggtaatctcgaagtcaaaggtaacatccagtttgccatagaatacgtggaatctctgaaagaactgcacgtgtttgtcgcccagtgcaaggatttggcagcggctgacgtaaaaaagcagcgctctgatccttatgtgaaggcatacctcctccccgacaagggcaaaatgggaaaaaaaaagacactcgtggtgaaaaagacactgaatcccgtatacaatgagatccttaggtacaaaatagaaaaacagatcttgaagactcaaaaactgaacctttctatctggcacagggataccttcaagcgcaattctttcctgggcgaggtggaactagatctggagacgtgggattgggacaataagcagaacaagcagctccgttggtaccccctgaagcggaaaactgctcctgttgctctcgaggccgagaataggggggaaatgaagttggcactgcaatacgtgcccgagccagttccaggcaagaaattgccaaccactggcgaagtccacatttgggtcaaggagtgcttagacttgcccctgctgcgcggttctcacttaaattctttcgtcaagtgtacaatcctgccagacacctcccggaaaagtcggcagaagacaagggctgttggcaagaccaccaaccctatttttaatcacactatggtctacgacgggtttcgccctgaggacctgatggaagcttgcgtggagctgactgtctgggatcactataagctgaccaatcaattcttagggggactgagaatcggctttggcaccggaaagtcctatgggactgaggtcgactggatggactccactagtgaggaagtagccctttgggagaagatggtcaatagcccaaacacgtggatcgaggccacccttcctctgaggatgctactgattgctaagatctccaagtag

SEQ ID NO: 264645 - DNA, 1943 bp, Artificial Sequence
  derived and/or modified sequence
acagaagaatagagaggctgttgcagccccgtgctttctcctgctgctggccgattgcttgctctgaactaaccctctaacccttgggagtctgtgtgcagcagtgatgtgagctgcatccgggctgaaatgggagctcccgctatggcactggctcaaggagctaatctaaagagaaagtattttggggaagacatcttggttgcacccctcattgcatcttgactaattgcttccaactccgggggcttccagggacaatctcattgttcttttctctccaagggtcagccatgttaaccatttgttaatttcttctgaacagatcaagcaaaagtagataatcagccagaagaattagtgcgtagtgctgaagatgagtgatgacagagaaacagatacagcatcagaaagcagttaccagctcagcagacacaagaagagcccgagctctttaaccaatcttagcagctcctctggcatgacgtccttgtcttctgtgagtggcagtgtgatgagtgtttatagtggagactttggcaatctggaagttaaaggaaatattcagtttgcaattgaatatgtggagtcactgaaggagttgcatgtttttgtggcccagtgtaaggacttagcagcagcggatgtaaaaaaacagcgttcagacccatatgtaaaggcctatttgctaccagacaaaggcaaaatgggcaagaagaaaacactcgtagtgaagaaaaccttgaatcctgtgtataacgaaatactgcggtataaaattgaaaaacaaatcttaaagacacagaaattgaacctgtccatttggcatcgggatacatttaagcgcaatagtttcctaggggaggtggaacttgatttggaaacatgggactgggataacaaacagaataaacaattgagatggtaccctctgaagcggaagacagcaccagttgcccttgaagcagaaaacagaggtgaaatgaaactagctctccagtatgtcccagagccagtccctggtaaaaagcttcctacaactggagaagtgcacatctgggtgaaggaatgccttgatctaccactgctaaggggaagtcatctaaattcttttgttaaatgtaccatccttccagatacaagtaggaaaagtcgccagaagacaagagctgtagggaaaaccaccaaccctatcttcaaccacactatggtgtatgatgggttcaggcctgaagatctgatggaagcctgtgtagagcttactgtctgggaccattacaaattaaccaaccaatttttgggaggtcttcgtattggctttggaacaggtaaaagttatgggactgaagtggactggatggactctacttcagaggaagttgctctctgggagaagatggtaaactcccccaatacttggattgaagcaacactgcctctcagaatgcttttgattgccaagatttccaaatgagcccaaattccactggctcctccactgaaaactactaaaccggtggaatctgatcttgaaaatctgagtaggtggacaaatatcctcactttctatctattgcacctaaggaatactacacagcatgtaaaagtcaatctgcatgtgcttctttgattacaaggcccaagggatttaaatataacaaaatgtgtaatttgtgactctaatattaaataagatatttgaacaagctaggaaaattgaatttctgctgctgcttcaaagaaaaagctgccccagagcattaaacatggggtattgttaagaagcaaaatgttcttgtttgccatcatgtgtttcacaccacaattctgtgccacagttaagagggtctggtacccttgcaggacctttgtaggttgtgggaaaaagtcgcagaaagatactcaaagtggagcagggaatggagacagacatcagtgatgat

SEQ ID NO: 264646 - protein, 5202 aa, Artificial Sequence
  derived and/or modified sequence
MNCPVLSLGSGFLFQVIEMLIFAYFASISLTESRGLFPRLENVGAFKKVSIVPTQAVCGLPDRSTFCHSSAAAESIQFCTQRFCIQDCPYRSSHPTYTALFSAGLSSCITPDKNDLHPNAHSNSASFIFGNHKSCFSSPPSPKLMASFTLAVWLKPEQQGVMCVIEKTVDGQIVFKLTISEKETMFYYRTVNGLQPPIKVMTLGRILVKKWIHLSVQVHQTKISFFINGVEKDHTPFNARTLSGSITDFASGTVQIGQSLNGLEQFVGRMQDFRLYQVALTNREILEVFSGDLLRLHAQSHCRCPGSHPRVHPLAQRYCIPNDAGDTADNRVSRLNPEAHPLSFVNDNDVGTSWVSNVFTNITQLNQGVTISVDLENGQYQVFYIIIQFFSPQPTEIRIQRKKENSLDWEDWQYFARNCGAFGMKNNGDLEKPDSVNCLQLSNFTPYSRGNVTFSILTPGPNYRPGYNNFYNTPSLQEFVKATQIRFHFHGQYYTTETAVNLRHRYYAVDEITISGRCQCHGHADNCDTTSQPYRCLCSQESFTEGLHCDRCLPLYNDKPFRQGDQVYAFNCKPCQCNSHSKSCHYNISVDPFPFEHFRGGGGVCDDCEHNTTGRNCELCKDYFFRQVGADPSAIDVCKPCDCDTVGTRNGSILCDQIGGQCNCKRHVSGRQCNQCQNGFYNLQELDPDGCSPCNCNTSGTVDGDITCHQNSGQCKCKANVIGLRCDHCNFGFKFLRSFNDVGCEPCQCNLHGSVNKFCNPHSGQCECKKEAKGLQCDTCRENFYGLDVTNCKACDCDTAGSLPGTVCNAKTGQCICKPNVEGRQCNKCLEGNFYLRQNNSFLCLPCNCDKTGTINGSLLCNKSTGQCPCKLGVTGLRCNQCEPHRYNLTIDNFQHCQMCECDSLGTLPGTICDPISGQCLCVPNRQGRRCNQCQPGFYISPGNATGCLPCSCHTTGAVNHICNSLTGQCVCQDASIAGQRCDQCKDHYFGFDPQTGRCQPCNCHLSGALNETCHLVTGQCFCKQFVTGSKCDACVPSASHLDVNNLLGCSKTPFQQPPPRGQVQSSSAINLSWSPPDSPNAHWLTYSLLRDGFEIYTTEDQYPYSIQYFLDTDLLPYTKYSYYIETTNVHGSTRSVAVTYKTKPGVPEGNLTLSYIIPIGSDSVTLTWTTLSNQSGPIEKYILSCAPLAGGQPCVSYEGHETSATIWNLVPFAKYDFSVQACTSGGCLHSLPITVTTAQAPPQRLSPPKMQKISSTELHVEWSPPAELNGIIIRYELYMRRLRSTKETTSEESRVFQSSGWLSPHSFVESANENALKPPQTMTTITGLEPYTKYEFRVLAVNMAGSVSSAWVSERTGESAPVFMIPPSVFPLSSYSLNISWEKPADNVTRGKVVGYDINMLSEQSPQQSIPMAFSQLLHTAKSQELSYTVEGLKPYRIYEFTITLCNSVGCVTSASGAGQTLAAAPAQLRPPLVKGINSTTIHLRWFPPEELNGPSPIYQLERRESSLPALMTTMMKGIRFIGNGYCKFPSSTHPVNTDFTGIKASFRTKVPEGLIVFAASPGNQEEYFALQLKKGRLYFLFDPQGSPVEVTTTNDHGKQYSDGKWHEIIAIRHQAFGQITLDGIYTGSSAILNGSTVIGDNTGVFLGGLPRSYTILRKDPEIIQKGFVGCLKDVHFMKNYNPSAIWEPLDWQSSEEQINVYNSWEGCPASLNEGAQFLGAGFLELHPYMFHGGMNFEISFKFRTDQLNGLLLFVYNKDGPDFLAMELKSGILTFRLNTSLAFTQVDLLLGLSYCNGKWNKVIIKKEGSFISASVNGLMKHASESGDQPLVVNSPVYVGGIPQELLNSYQHLCLEQGFGGCMKDVKFTRGAVVNLASVSSGAVRVNLDGCLSTDSAVNCRGNDSILVYQGKEQSVYEGGLQPFTEYLYRVIASHEGGSVYSDWSRGRTTGAAPQSVPTPSRVRSLNGYSIEVTWDEPVVRGVIEKYILKAYSEDSTRPPRMPSASAEFVNTSNLTGILTGLLPFKNYAVTLTACTLAGCTESSHALNISTPQEAPQEVQPPVAKSLPSSLLLSWNPPKKANGIITQYCLYMDGRLIYSGSEENYIVTDLAVFTPHQFLLSACTHVGCTNSSWVLLYTAQLPPEHVDSPVLTVLDSRTIHIQWKQPRKISGILERYVLYMSNHTHDFTIWSVIYNSTELFQDHMLQYVLPGNKYLIKLGACTGGGCTVSEASEALTDEDIPEGVPAPKAHSYSPDSFNVSWTEPEYPNGVITSYGLYLDGILIHNSSELSYRAYGFAPWSLHSFRVQACTAKGCALGPLVENRTLEAPPEGTVNVFVKTQGSRKAHVRWEAPFRPNGLLTHSVLFTGIFYVDPVGNNYTLLNVTKVMYSGEETNLWVLIDGLVPFTNYTVQVNISNSQGSLITDPITIAMPPGAPDGVLPPRLSSATPTSLQVVWSTPARNNAPGSPRYQLQMRSGDSTHGFLELFSNPSASLSYEVSDLQPYTEYMFRLVASNGFGSAHSSWIPFMTAEDKPGPVVPPILLDVKSRMMLVTWQHPRKSNGVITHYNIYLHGRLYLRTPGNVTNCTVMHLHPYTAYKFQVEACTSKGCSLSPESQTVWTLPGAPEGIPSPELFSDTPTSVIISWQPPTHPNGLVENFTIERRVKGKEEVTTLVTLPRSHSMRFIDKTSALSPWTKYEYRVLMSTLHGGTNSSAWVEVTTRPSRPAGVQPPVVTVLEPDAVQVTWKPPLIQNGDILSYEIHMPDPHITLTNVTSAVLSQKVTHLIPFTNYSVTIVACSGGNGYLGGCTESLPTYVTTHPTVPQNVGPLSVIPLSESYVVISWQPPSKPNGPNLRYELLRRKIQQPLASNPPEDLNRWHNIYSGTQWLYEDKGLSRFTTYEYMLFVHNSVGFTPSREVTVTTLAGLPERGANLTASVLNHTAIDVRWAKPTVQDLQGEVEYYTLFWSSATSNDSLKILPDVNSHVIGHLKPNTEYWIFISVFNGVHSINSAGLHATTCDGEPQGMLPPEVVIINSTAVRVIWTSPSNPNGVVTEYSIYVNNKLYKTGMNVPGSFILRDLSPFTIYDIQVEVCTIYACVKSNGTQITTVEDTPSDIPTPTIRGITSRSLQIDWVSPRKPNGIILGYDLLWKTWYPCAKTQKLVQDQSDELCKAVRCQKPESICGHICYSSEAKVCCNGVLYNPKPGHRCCEEKYIPFVLNSTGVCCGGRIQEAQPNHQCCSGYYARILPGEVCCPDEQHNRVSVGIGDSCCGRMPYSTSGNQICCAGRLHDGHGQKCCGRQIVSNDLECCGGEEGVVYNRLPGMFCCGQDYVNMSDTICCSASSGESKAHIKKNDPVPVKCCETELIPKSQKCCNGVGYNPLKYVCSDKISTGMMMKETKECRILCPASMEATEHCGRCDFNFTSHICTVIRGSHNSTGKASIEEMCSSAEETIHTGSVNTYSYTDVNLKPYMTYEYRISAWNSYGRGLSKAVRARTKEDVPQGVSPPTWTKIDNLEDTIVLNWRKPIQSNGPIIYYILLRNGIERFRGTSLSFSDKEGIQPFQEYSYQLKACTVAGCATSSKVVAATTQGVPESILPPSITALSAVALHLSWSVPEKSNGVIKEYQIRQVGKGLIHTDTTDRRQHTVTGLQPYTNYSFTLTACTSAGCTSSEPFLGQTLQAAPEGVWVTPRHIIINSTTVELYWSLPEKPNGLVSQYQLSRNGNLLFLGGSEEQNFTDKNLEPNSRYTYKLEVKTGGGSSASDDYIVQTPMSTPEEIYPPYNITVIGPYSIFVAWIPPGILIPEIPVEYNVLLNDGSVTPLAFSVGHHQSTLLENLTPFTQYEIRIQACQNGSCGVSSRMFVKTPEAAPMDLNSPVLKALGSACIEIKWMPPEKPNGIIINYFIYRRPAGIEEESVLFVWSEGALEFMDEGDTLRPFTLYEYRVRACNSKGSVESLWSLTQTLEAPPQDFPAPWAQATSAHSVLLNWTKPESPNGIISHYRVVYQERPDDPTFNSPTVHAFTVKGTSHQAHLYGLEPFTTYRIGVVAANHAGEILSPWTLIQTLESSPSGLRNFIVEQKENGRALLLQWSEPMRTNGVIKTYNIFSDGFLEYSGLNRQFLFRRLDPFTLYTLTLEACTRAGCAHSAPQPLWTDEAPPDSQLAPTVHSVKSTSVELSWSEPVNPNGKIIRYEVIRRCFEGKAWGNQTIQADEKIVFTEYNTERNTFMYNDTGLQPWTQCEYKIYTWNSAGHTCSSWNVVRTLQAPPEGLSPPVISYVSMNPQKLLISWIPPEQSNGIIQSYRLQRNEMLYPFSFDPVTFNYTDEELLPFSTYSYALQACTSGGCSTSKPTSITTLEAAPSEVSPPDLWAVSATQMNVCWSPPTVQNGKITKYLVRYDNKESLAGQGLCLLVSHLQPYSQYNFSLVACTNGGCTASVSKSAWTMEALPENMDSPTLQVTGSESIEITWKPPRNPNGQIRSYELRRDGTIVYTGLETRYRDFTLTPGVEYSYTVTASNSQGGILSPLVKDRTSPSAPSGMEPPKLQARGPQEILVNWDPPVRTNGDIINYTLFIRELFERETKIIHINTTHNSFGMQSYIVNQLKPFHRYEIRIQACTTLGCASSDWTFIQTPEIAPLMQPPPHLEVQMAPGGFQPTVSLLWTGPLQPNGKVLYYELYRRQIATQPRKSNPVLIYNGSSTSFIDSELLPFTEYEYQVWAVNSAGKAPSSWTWCRTGPAPPEGLRAPTFHVISSTQAVVNISAPGKPNGIVSLYRLFSSSAHGAETVLSEGMATQQTLHGLQAFTNYSIGVEACTCFNCCSKGPTAELRTHPAPPSGLSSPQIGTLASRTASFRWSPPMFPNGVIHSYELQFHVACPPDSALPCTPSQIETKYTGLGQKASLGGLQPYTTYKLRVVAHNEVGSTASEWISFTTQKELPQYRAPFSVDSNLSVVCVNWSDTFLLNGQLKEYVLTDGGRRVYSGLDTTLYIPRTADKTFFFQVICTTDEGSVKTPLIQYDTSTGLGLVLTTPGKKKGSRSKSTEFYSELWFIVLMAMLGLILLAIFLSLILQRKIHKEPYIRERPPLVPLQKRMSPLNVYPPGENHMGLADTKIPRSGTPVSIRSNRSACVLRIPSQNQTSLTYSQGSLHRSVSQLMDIQDKKVLMDNSLWEAIMGHNSGLYVDEEDLMNAIKDFSSVTKERTTFTDTHL

SEQ ID NO: 264647 - protein, 1546 aa, Artificial Sequence
  derived and/or modified sequence
MNCPVLSLGSGFLFQVIEMLIFAYFASISLTESRGLFPRLENVGAFKKVSIVPTQAVCGLPDRSTFCHSSAAAESIQFCTQRFCIQDCPYRSSHPTYTALFSAGLSSCITPDKNDLHPNAHSNSASFIFGNHKSCFSSPPSPKLMASFTLAVWLKPEQQGVMCVIEKTVDGQIVFKLTISEKETMFYYRTVNGLQPPIKVMTLGRILVKKWIHLSVQVHQTKISFFINGVEKDHTPFNARTLSGSITDFASGTVQIGQSLNGLEQFVGRMQDFRLYQVALTNREILEVFSGDLLRLHAQSHCRCPGSHPRVHPLAQRYCIPNDAGDTADNRVSRLNPEAHPLSFVNDNDVGTSWVSNVFTNITQLNQGVTISVDLENGQYQVFYIIIQFFSPQPTEIRIQRKKENSLDWEDWQYFARNCGAFGMKNNGDLEKPDSVNCLQLSNFTPYSRGNVTFSILTPGPNYRPGYNNFYNTPSLQEFVKATQIRFHFHGQYYTTETAVNLRHRYYAVDEITISGRCQCHGHADNCDTTSQPYRCLCSQESFTEGLHCDRCLPLYNDKPFRQGDQVYAFNCKPCQCNSHSKSCHYNISVDPFPFEHFRGGGGVCDDCEHNTTGRNCELCKDYFFRQVGADPSAIDVCKPCDCDTVGTRNGSILCDQIGGQCNCKRHVSGRQCNQCQNGFYNLQELDPDGCSPCNCNTSGTVDGDITCHQNSGQCKCKANVIGLRCDHCNFGFKFLRSFNDVGCEPCQCNLHGSVNKFCNPHSGQCECKKEAKGLQCDTCRENFYGLDVTNCKACDCDTAGSLPGTVCNAKTGQCICKPNVEGRQCNKCLEGNFYLRQNNSFLCLPCNCDKTGTINGSLLCNKSTGQCPCKLGVTGLRCNQCEPHRYNLTIDNFQHCQMCECDSLGTLPGTICDPISGQCLCVPNRQGRRCNQCQPGFYISPGNATGCLPCSCHTTGAVNHICNSLTGQCVCQDASIAGQRCDQCKDHYFGFDPQTGRCQPCNCHLSGALNETCHLVTGQCFCKQFVTGSKCDACVPSASHLDVNNLLGCSKTPFQQPPPRGQVQSSSAINLSWSPPDSPNAHWLTYSLLRDGFEIYTTEDQYPYSIQYFLDTDLLPYTKYSYYIETTNVHGSTRSVAVTYKTKPGVPEGNLTLSYIIPIGSDSVTLTWTTLSNQSGPIEKYILSCAPLAGGQPCVSYEGHETSATIWNLVPFAKYDFSVQACTSGGCLHSLPITVTTAQAPPQRLSPPKMQKISSTELHVEWSPPAELNGIIIRYELYMRRLRSTKETTSEESRVFQSSGWLSPHSFVESANENALKPPQTMTTITGLEPYTKYEFRVLAVNMAGSVSSAWVSERTGESAPVFMIPPSVFPLSSYSLNISWEKPADNVTRGKVVGYDINMLSEQSPQQSIPMAFSQLLHTAKSQELSYTVEGLKPYRIYEFTITLCNSVGCVTSASGAGQTLAAAPAQLRPPLVKGINSTTIHLRWFPPEELNGPSPIYQLERRESSLPALMTTMMKGIRFIGNGYCKFPSSTHPVNTDFTGKCV

SEQ ID NO: 264648 - protein, 5226 aa, Artificial Sequence
  derived and/or modified sequence
MNCPVLSLGSGFLFQVIEMLIFAYFASISLTESRGLFPRLENVGAFKKVSIVPTQAVCGLPDRSTFCHSSAAAESIQFCTQRFCIQDCPYRSSHPTYTALFSAGLSSCITPDKNDLHPNAHSNSASFIFGNHKSCFSSPPSPKLMASFTLAVWLKPEQQGVMCVIEKTVDGQIVFKLTISEKETMFYYRTVNGLQPPIKVMTLGRILVKKWIHLSVQVHQTKISFFINGVEKDHTPFNARTLSGSITDFASGTVQIGQSLNGLEQFVGRMQDFRLYQVALTNREILEVFSGDLLRLHAQSHCRCPGSHPRVHPLAQRYCIPNDAGDTADNRVSRLNPEAHPLSFVNDNDVGTSWVSNVFTNITQLNQGVTISVDLENGQYQVFYIIIQFFSPQPTEIRIQRKKENSLDWEDWQYFARNCGAFGMKNNGDLEKPDSVNCLQLSNFTPYSRGNVTFSILTPGPNYRPGYNNFYNTPSLQEFVKATQIRFHFHGQYYTTETAVNLRHRYYAVDEITISGRCQCHGHADNCDTTSQPYRCLCSQESFTEGLHCDRCLPLYNDKPFRQGDQVYAFNCKPCQCNSHSKSCHYNISVDPFPFEHFRGGGGVCDDCEHNTTGRNCELCKDYFFRQVGADPSAIDVCKPCDCDTVGTRNGSILCDQIGGQCNCKRHVSGRQCNQCQNGFYNLQELDPDGCSPCNCNTSGTVDGDITCHQNSGQCKCKANVIGLRCDHCNFGFKFLRSFNDVGCEPCQCNLHGSVNKFCNPHSGQCECKKEAKGLQCDTCRENFYGLDVTNCKACDCDTAGSLPGTVCNAKTGQCICKPNVEGRQCNKCLEGNFYLRQNNSFLCLPCNCDKTGTINGSLLCNKSTGQCPCKLGVTGLRCNQCEPHRYNLTIDNFQHCQMCECDSLGTLPGTICDPISGQCLCVPNRQGRRCNQCQPGFYISPGNATGCLPCSCHTTGAVNHICNSLTGQCVCQDASIAGQRCDQCKDHYFGFDPQTGRCQPCNCHLSGALNETCHLVTGQCFCKQFVTGSKCDACVPSASHLDVNNLLGCSKTPFQQPPPRGQVQSSSAINLSWSPPDSPNAHWLTYSLLRDGFEIYTTEDQYPYSIQYFLDTDLLPYTKYSYYIETTNVHGSTRSVAVTYKTKPGVPEGNLTLSYIIPIGSDSVTLTWTTLSNQSGPIEKYILSCAPLAGGQPCVSYEGHETSATIWNLVPFAKYDFSVQACTSGGCLHSLPITVTTAQAPPQRLSPPKMQKISSTELHVEWSPPAELNGIIIRYELYMRRLRSTKETTSEESRVFQSSGWLSPHSFVESANENALKPPQTMTTITGLEPYTKYEFRVLAVNMAGSVSSAWVSERTGESAPVFMIPPSVFPLSSYSLNISWEKPADNVTRGKVVGYDINMLSEQSPQQSIPMAFSQLLHTAKSQELSYTVEGLKPYRIYEFTITLCNSVGCVTSASGAGQTLAAAPAQLRPPLVKGINSTTIHLRWFPPEELNGPSPIYQLERRESSLPALMTTMMKGIRFIGNGYCKFPSSTHPVNTDFTGIKASFRTKVPEGLIVFAASPGNQEEYFALQLKKGRLYFLFDPQGSPVEVTTTNDHGKQYSDGKWHEIIAIRHQAFGQITLDGIYTGSSAILNGSTVIGDNTGVFLGGLPRSYTILRKDPEIIQKGFVGCLKDVHFMKNYNPSAIWEPLDWQSSEEQINVYNSWEGCPASLNEGAQFLGAGFLELHPYMFHGGMNFEISFKFRTDQLNGLLLFVYNKDGPDFLAMELKSGILTFRLNTSLAFTQVDLLLGLSYCNGKWNKVIIKKEGSFISASVNGLMKHASESGDQPLVVNSPVYVGGIPQELLNSYQHLCLEQGFGGCMKDVKFTRGAVVNLASVSSGAVRVNLDGCLSTDSAVNCRGNDSILVYQGKEQSVYEGGLQPFTEYLYRVIASHEGGSVYSDWSRGRTTGAAPQSVPTPSRVRSLNGYSIEVTWDEPVVRGVIEKYILKAYSEDSTRPPRMPSASAEFVNTSNLTGILTGLLPFKNYAVTLTACTLAGCTESSHALNISTPQEAPQEVQPPVAKSLPSSLLLSWNPPKKANGIITQYCLYMDGRLIYSGSEENYIVTDLAVFTPHQFLLSACTHVGCTNSSWVLLYTAQLPPEHVDSPVLTVLDSRTIHIQWKQPRKISGILERYVLYMSNHTHDFTIWSVIYNSTELFQDHMLQYVLPGNKYLIKLGACTGGGCTVSEASEALTDEDIPEGVPAPKAHSYSPDSFNVSWTEPEYPNGVITSYGLYLDGILIHNSSELSYRAYGFAPWSLHSFRVQACTAKGCALGPLVENRTLEAPPEGTVNVFVKTQGSRKAHVRWEAPFRPNGLLTHSVLFTGIFYVDPVGNNYTLLNVTKVMYSGEETNLWVLIDGLVPFTNYTVQVNISNSQGSLITDPITIAMPPGAPDGVLPPRLSSATPTSLQVVWSTPARNNAPGSPRYQLQMRSGDSTHGFLELFSNPSASLSYEVSDLQPYTEYMFRLVASNGFGSAHSSWIPFMTAEDKPGPVVPPILLDVKSRMMLVTWQHPRKSNGVITHYNIYLHGRLYLRTPGNVTNCTVMHLHPYTAYKFQVEACTSKGCSLSPESQTVWTLPGAPEGIPSPELFSDTPTSVIISWQPPTHPNGLVENFTIERRVKGKEEVTTLVTLPRSHSMRFIDKTSALSPWTKYEYRVLMSTLHGGTNSSAWVEVTTRPSRPAGVQPPVVTVLEPDAVQVTWKPPLIQNGDILSYEIHMPDPHITLTNVTSAVLSQKVTHLIPFTNYSVTIVACSGGNGYLGGCTESLPTYVTTHPTVPQNVGPLSVIPLSESYVVISWQPPSKPNGPNLRYELLRRKIQQPLASNPPEDLNRWHNIYSGTQWLYEDKGLSRFTTYEYMLFVHNSVGFTPSREVTVTTLAGLPERGANLTASVLNHTAIDVRWAKPTVQDLQGEVEYYTLFWSSATSNDSLKILPDVNSHVIGHLKPNTEYWIFISVFNGVHSINSAGLHATTCDGEPQGMLPPEVVIINSTAVRVIWTSPSNPNGVVTEYSIYVNNKLYKTGMNVPGSFILRDLSPFTIYDIQVEVCTIYACVKSNGTQITTVEDTPSDIPTPTIRGITSRSLQIDWVSPRKPNGIILGYDLLWKTWYPCAKTQKLVQDQSDELCKAVRCQKPESICGHICYSSEAKVCCNGVLYNPKPGHRCCEEKYIPFVLNSTGVCCGGRIQEAQPNHQCCSGYYARILPGEVCCPDEQHNRVSVGIGDSCCGRMPYSTSGNQICCAGRLHDGHGQKCCGRQIVSNDLECCGGEEGVVYNRLPGMFCCGQDYVNMSDTICCSASSGESKAHIKKNDPVPVKCCETELIPKSQKCCNGVGYNPLKYVCSDKISTGMMMKETKECRILCPASMEATEHCGRCDFNFTSHICTVIRGSHNSTGKASIEEMCSSAEETIHTGSVNTYSYTDVNLKPYMTYEYRISAWNSYGRGLSKAVRARTKEDVPQGVSPPTWTKIDNLEDTIVLNWRKPIQSNGPIIYYILLRNGIERFRGTSLSFSDKEGIQPFQEYSYQLKACTVAGCATSSKVVAATTQGVPESILPPSITALSAVALHLSWSVPEKSNGVIKEYQIRQVGKGLIHTDTTDRRQHTVTGLQPYTNYSFTLTACTSAGCTSSEPFLGQTLQAAPEGVWVTPRHIIINSTTVELYWSLPEKPNGLVSQYQLSRNGNLLFLGGSEEQNFTDKNLEPNSRYTYKLEVKTGGGSSASDDYIVQTPMSTPEEIYPPYNITVIGPYSIFVAWIPPGILIPEIPVEYNVLLNDGSVTPLAFSVGHHQSTLLENLTPFTQYEIRIQACQNGSCGVSSRMFVKTPEAAPMDLNSPVLKALGSACIEIKWMPPEKPNGIIINYFIYRRPAGIEEESVLFVWSEGALEFMDEGDTLRPFTLYEYRVRACNSKGSVESLWSLTQTLEAPPQDFPAPWAQATSAHSVLLNWTKPESPNGIISHYRVVYQERPDDPTFNSPTVHAFTVKGTSHQAHLYGLEPFTTYRIGVVAANHAGEILSPWTLIQTLESSPSGLRNFIVEQKENGRALLLQWSEPMRTNGVIKTYNIFSDGFLEYSGLNRQFLFRRLDPFTLYTLTLEACTRAGCAHSAPQPLWTDEAPPDSQLAPTVHSVKSTSVELSWSEPVNPNGKIIRYEVIRRCFEGKAWGNQTIQADEKIVFTEYNTERNTFMYNDTGLQPWTQCEYKIYTWNSAGHTCSSWNVVRTLQAPPEGLSPPVISYVSMNPQKLLISWIPPEQSNGIIQSYRLQRNEMLYPFSFDPVTFNYTDEELLPFSTYSYALQACTSGGCSTSKPTSITTLEAAPSEVSPPDLWAVSATQMNVCWSPPTVQNGKITKYLVRYDNKESLAGQGLCLLVSHLQPYSQYNFSLVACTNGGCTASVSKSAWTMEALPENMDSPTLQVTGSESIEITWKPPRNPNGQIRSYELRRDGTIVYTGLETRYRDFTLTPGVEYSYTVTASNSQGGILSPLVKDRTSPSAPSGMEPPKLQARGPQEILVNWDPPVRTNGDIINYTLFIRELFERETKIIHINTTHNSFGMQSYIVNQLKPFHRYEIRIQACTTLGCASSDWTFIQTPEIAPLMQPPPHLEVQMAPGGFQPTVSLLWTGPLQPNGKVLYYELYRRQIATQPRKSNPVLIYNGSSTSFIDSELLPFTEYEYQVWAVNSAGKAPSSWTWCRTGPAPPEGLRAPTFHVISSTQAVVNISAPGKPNGIVSLYRLFSSSAHGAETVLSEGMATQQTLHGLQAFTNYSIGVEACTCFNCCSKGPTAELRTHPAPPSGLSSPQIGTLASRTASFRWSPPMFPNGVIHSYELQFHVACPPDSALPCTPSQIETKYTGLGQKASLGGLQPYTTYKLRVVAHNEVGSTASEWISFTTQKELPQYRAPFSVDSNLSVVCVNWSDTFLLNGQLKEYVLTDGGRRVYSGLDTTLYIPRTADKTFFFQVICTTDEGSVKTPLIQYDTSTGLGLVLTTPGKKKGSRSKSTEFYSELWFIVLMAMLGLILLAIFLSLILQRKIHKEPYIRERPPLVPLQKRMSPLNVYPPGENHMFDSVADISDVSSNVTLKSYTMHFEGLADTKIPRSGTPVSIRSNRSACVLRIPSQNQTSLTYSQGSLHRSVSQLMDIQDKKVLMDNSLWEAIMGHNSGLYVDEEDLMNAIKDFSSVTKERTTFTDTHL

SEQ ID NO: 264649 - DNA, 85 bp, Artificial Sequence
  derived and/or modified sequence
aaatcatcatcgaatgggatcgaatggtatccttgaatggaatcgaatggaatcatcatcagatggaaatgaatggaatcgtcat

SEQ ID NO: 264650 - DNA, 123 bp, Artificial Sequence
  derived and/or modified sequence
cgaatggaatcattatggaatggaatgaaatggaataatcaaatggaattgaatggaatcatcgaatggaatcgaacaaaatcctctttgaatggaataagatggaatcaccaaatggaattg

SEQ ID NO: 264651 - DNA, 93 bp, Artificial Sequence
  derived and/or modified sequence
tggaatagaatggaatcaatgttaagtggaatcgagtggaatcatcgaaagaaatcgaatggaatcattgtcgaatggtatggaatggaatca

SEQ ID NO: 264652 - DNA, 291 bp, Artificial Sequence
  derived and/or modified sequence
atgaccccctgcctggagtccttctgtcaacgcgccaaagattgtaagcaaaatatccccctgccctttctaatccaggattggcctctcagtgagtcaaaaccccagggccaagatttctggacccctcagcccctacaagctgcagctccctcccacgagtttcagcaggtggcccttcatcccgctaggaccaggttggctagtcgacctcaagggggtcgccttatgtcttcacgggaggttgggttgagggccccccgctgtagttgcggtaagcgcaagagatag

SEQ ID NO: 264653 - DNA, 15609 bp, Artificial Sequence
  derived and/or modified sequence
atgaactgccccgtgctgagcctgggcagcggcttcctgttccaggtgatcgagatgctgatcttcgcctacttcgccagcatcagcctgaccgagagcagaggcctgttccccagactggagaacgtgggcgccttcaagaaggtgagcatcgtgcccacccaggccgtgtgcggcctgcccgacagaagcaccttctgccacagcagcgccgccgccgagagcatccagttctgcacccagagattctgcatccaggactgcccctacagaagcagccaccccacctacaccgccctgttcagcgccggcctgagcagctgcatcacccccgacaagaacgacctgcaccccaacgcccacagcaacagcgccagcttcatcttcggcaaccacaagagctgcttcagcagcccccccagccccaagctgatggccagcttcaccctggccgtgtggctgaagcccgagcagcagggcgtgatgtgcgtgatcgagaagaccgtggacggccagatcgtgttcaagctgaccatcagcgagaaggagaccatgttctactacagaaccgtgaacggcctgcagccccccatcaaggtgatgaccctgggcagaatcctggtgaagaagtggatccacctgagcgtgcaggtgcaccagaccaagatcagcttcttcatcaacggcgtggagaaggaccacacccccttcaacgccagaaccctgagcggcagcatcaccgacttcgccagcggcaccgtgcagatcggccagagcctgaacggcctggagcagttcgtgggcagaatgcaggacttcagactgtaccaggtggccctgaccaacagagagatcctggaggtgttcagcggcgacctgctgagactgcacgcccagagccactgcagatgccccggcagccaccccagagtgcaccccctggcccagagatactgcatccccaacgacgccggcgacaccgccgacaacagagtgagcagactgaaccccgaggcccaccccctgagcttcgtgaacgacaacgacgtgggcaccagctgggtgagcaacgtgttcaccaacatcacccagctgaaccagggcgtgaccatcagcgtggacctggagaacggccagtaccaggtgttctacatcatcatccagttcttcagcccccagcccaccgagatcagaatccagagaaagaaggagaacagcctggactgggaggactggcagtacttcgccagaaactgcggcgccttcggcatgaagaacaacggcgacctggagaagcccgacagcgtgaactgcctgcagctgagcaacttcaccccctacagcagaggcaacgtgaccttcagcatcctgacccccggccccaactacagacccggctacaacaacttctacaacacccccagcctgcaggagttcgtgaaggccacccagatcagattccacttccacggccagtactacaccaccgagaccgccgtgaacctgagacacagatactacgccgtggacgagatcaccatcagcggcagatgccagtgccacggccacgccgacaactgcgacaccaccagccagccctacagatgcctgtgcagccaggagagcttcaccgagggcctgcactgcgacagatgcctgcccctgtacaacgacaagcccttcagacagggcgaccaggtgtacgccttcaactgcaagccctgccagtgcaacagccacagcaagagctgccactacaacatcagcgtggaccccttccccttcgagcacttcagaggcggcggcggcgtgtgcgacgactgcgagcacaacaccaccggcagaaactgcgagctgtgcaaggactacttcttcagacaggtgggcgccgaccccagcgccatcgacgtgtgcaagccctgcgactgcgacaccgtgggcaccagaaacggcagcatcctgtgcgaccagatcggcggccagtgcaactgcaagagacacgtgagcggcagacagtgcaaccagtgccagaacggcttctacaacctgcaggagctggaccccgacggctgcagcccctgcaactgcaacaccagcggcaccgtggacggcgacatcacctgccaccagaacagcggccagtgcaagtgcaaggccaacgtgatcggcctgagatgcgaccactgcaacttcggcttcaagttcctgagaagcttcaacgacgtgggctgcgagccctgccagtgcaacctgcacggcagcgtgaacaagttctgcaacccccacagcggccagtgcgagtgcaagaaggaggccaagggcctgcagtgcgacacctgcagagagaacttctacggcctggacgtgaccaactgcaaggcctgcgactgcgacaccgccggcagcctgcccggcaccgtgtgcaacgccaagaccggccagtgcatctgcaagcccaacgtggagggcagacagtgcaacaagtgcctggagggcaacttctacctgagacagaacaacagcttcctgtgcctgccctgcaactgcgacaagaccggcaccatcaacggcagcctgctgtgcaacaagagcaccggccagtgcccctgcaagctgggcgtgaccggcctgagatgcaaccagtgcgagccccacagatacaacctgaccatcgacaacttccagcactgccagatgtgcgagtgcgacagcctgggcaccctgcccggcaccatctgcgaccccatcagcggccagtgcctgtgcgtgcccaacagacagggcagaagatgcaaccagtgccagcccggcttctacatcagccccggcaacgccaccggctgcctgccctgcagctgccacaccaccggcgccgtgaaccacatctgcaacagcctgaccggccagtgcgtgtgccaggacgccagcatcgccggccagagatgcgaccagtgcaaggaccactacttcggcttcgacccccagaccggcagatgccagccctgcaactgccacctgagcggcgccctgaacgagacctgccacctggtgaccggccagtgcttctgcaagcagttcgtgaccggcagcaagtgcgacgcctgcgtgcccagcgccagccacctggacgtgaacaacctgctgggctgcagcaagacccccttccagcagcccccccccagaggccaggtgcagagcagcagcgccatcaacctgagctggagcccccccgacagccccaacgcccactggctgacctacagcctgctgagagacggcttcgagatctacaccaccgaggaccagtacccctacagcatccagtacttcctggacaccgacctgctgccctacaccaagtacagctactacatcgagaccaccaacgtgcacggcagcaccagaagcgtggccgtgacctacaagaccaagcccggcgtgcccgagggcaacctgaccctgagctacatcatccccatcggcagcgacagcgtgaccctgacctggaccaccctgagcaaccagagcggccccatcgagaagtacatcctgagctgcgcccccctggccggcggccagccctgcgtgagctacgagggccacgagaccagcgccaccatctggaacctggtgcccttcgccaagtacgacttcagcgtgcaggcctgcaccagcggcggctgcctgcacagcctgcccatcaccgtgaccaccgcccaggcccccccccagagactgagcccccccaagatgcagaagatcagcagcaccgagctgcacgtggagtggagcccccccgccgagctgaacggcatcatcatcagatacgagctgtacatgagaagactgagaagcaccaaggagaccaccagcgaggagagcagagtgttccagagcagcggctggctgagcccccacagcttcgtggagagcgccaacgagaacgccctgaagcccccccagaccatgaccaccatcaccggcctggagccctacaccaagtacgagttcagagtgctggccgtgaacatggccggcagcgtgagcagcgcctgggtgagcgagagaaccggcgagagcgcccccgtgttcatgatcccccccagcgtgttccccctgagcagctacagcctgaacatcagctgggagaagcccgccgacaacgtgaccagaggcaaggtggtgggctacgacatcaacatgctgagcgagcagagcccccagcagagcatccccatggccttcagccagctgctgcacaccgccaagagccaggagctgagctacaccgtggagggcctgaagccctacagaatctacgagttcaccatcaccctgtgcaacagcgtgggctgcgtgaccagcgccagcggcgccggccagaccctggccgccgcccccgcccagctgagaccccccctggtgaagggcatcaacagcaccaccatccacctgagatggttcccccccgaggagctgaacggccccagccccatctaccagctggagagaagagagagcagcctgcccgccctgatgaccaccatgatgaagggcatcagattcatcggcaacggctactgcaagttccccagcagcacccaccccgtgaacaccgacttcaccggcatcaaggccagcttcagaaccaaggtgcccgagggcctgatcgtgttcgccgccagccccggcaaccaggaggagtacttcgccctgcagctgaagaagggcagactgtacttcctgttcgacccccagggcagccccgtggaggtgaccaccaccaacgaccacggcaagcagtacagcgacggcaagtggcacgagatcatcgccatcagacaccaggccttcggccagatcaccctggacggcatctacaccggcagcagcgccatcctgaacggcagcaccgtgatcggcgacaacaccggcgtgttcctgggcggcctgcccagaagctacaccatcctgagaaaggaccccgagatcatccagaagggcttcgtgggctgcctgaaggacgtgcacttcatgaagaactacaaccccagcgccatctgggagcccctggactggcagagcagcgaggagcagatcaacgtgtacaacagctgggagggctgccccgccagcctgaacgagggcgcccagttcctgggcgccggcttcctggagctgcacccctacatgttccacggcggcatgaacttcgagatcagcttcaagttcagaaccgaccagctgaacggcctgctgctgttcgtgtacaacaaggacggccccgacttcctggccatggagctgaagagcggcatcctgaccttcagactgaacaccagcctggccttcacccaggtggacctgctgctgggcctgagctactgcaacggcaagtggaacaaggtgatcatcaagaaggagggcagcttcatcagcgccagcgtgaacggcctgatgaagcacgccagcgagagcggcgaccagcccctggtggtgaacagccccgtgtacgtgggcggcatcccccaggagctgctgaacagctaccagcacctgtgcctggagcagggcttcggcggctgcatgaaggacgtgaagttcaccagaggcgccgtggtgaacctggccagcgtgagcagcggcgccgtgagagtgaacctggacggctgcctgagcaccgacagcgccgtgaactgcagaggcaacgacagcatcctggtgtaccagggcaaggagcagagcgtgtacgagggcggcctgcagcccttcaccgagtacctgtacagagtgatcgccagccacgagggcggcagcgtgtacagcgactggagcagaggcagaaccaccggcgccgccccccagagcgtgcccacccccagcagagtgagaagcctgaacggctacagcatcgaggtgacctgggacgagcccgtggtgagaggcgtgatcgagaagtacatcctgaaggcctacagcgaggacagcaccagaccccccagaatgcccagcgccagcgccgagttcgtgaacaccagcaacctgaccggcatcctgaccggcctgctgcccttcaagaactacgccgtgaccctgaccgcctgcaccctggccggctgcaccgagagcagccacgccctgaacatcagcaccccccaggaggccccccaggaggtgcagccccccgtggccaagagcctgcccagcagcctgctgctgagctggaacccccccaagaaggccaacggcatcatcacccagtactgcctgtacatggacggcagactgatctacagcggcagcgaggagaactacatcgtgaccgacctggccgtgttcaccccccaccagttcctgctgagcgcctgcacccacgtgggctgcaccaacagcagctgggtgctgctgtacaccgcccagctgccccccgagcacgtggacagccccgtgctgaccgtgctggacagcagaaccatccacatccagtggaagcagcccagaaagatcagcggcatcctggagagatacgtgctgtacatgagcaaccacacccacgacttcaccatctggagcgtgatctacaacagcaccgagctgttccaggaccacatgctgcagtacgtgctgcccggcaacaagtacctgatcaagctgggcgcctgcaccggcggcggctgcaccgtgagcgaggccagcgaggccctgaccgacgaggacatccccgagggcgtgcccgcccccaaggcccacagctacagccccgacagcttcaacgtgagctggaccgagcccgagtaccccaacggcgtgatcaccagctacggcctgtacctggacggcatcctgatccacaacagcagcgagctgagctacagagcctacggcttcgccccctggagcctgcacagcttcagagtgcaggcctgcaccgccaagggctgcgccctgggccccctggtggagaacagaaccctggaggccccccccgagggcaccgtgaacgtgttcgtgaagacccagggcagcagaaaggcccacgtgagatgggaggcccccttcagacccaacggcctgctgacccacagcgtgctgttcaccggcatcttctacgtggaccccgtgggcaacaactacaccctgctgaacgtgaccaaggtgatgtacagcggcgaggagaccaacctgtgggtgctgatcgacggcctggtgcccttcaccaactacaccgtgcaggtgaacatcagcaacagccagggcagcctgatcaccgaccccatcaccatcgccatgccccccggcgcccccgacggcgtgctgccccccagactgagcagcgccacccccaccagcctgcaggtggtgtggagcacccccgccagaaacaacgcccccggcagccccagataccagctgcagatgagaagcggcgacagcacccacggcttcctggagctgttcagcaaccccagcgccagcctgagctacgaggtgagcgacctgcagccctacaccgagtacatgttcagactggtggccagcaacggcttcggcagcgcccacagcagctggatccccttcatgaccgccgaggacaagcccggccccgtggtgccccccatcctgctggacgtgaagagcagaatgatgctggtgacctggcagcaccccagaaagagcaacggcgtgatcacccactacaacatctacctgcacggcagactgtacctgagaacccccggcaacgtgaccaactgcaccgtgatgcacctgcacccctacaccgcctacaagttccaggtggaggcctgcaccagcaagggctgcagcctgagccccgagagccagaccgtgtggaccctgcccggcgcccccgagggcatccccagccccgagctgttcagcgacacccccaccagcgtgatcatcagctggcagccccccacccaccccaacggcctggtggagaacttcaccatcgagagaagagtgaagggcaaggaggaggtgaccaccctggtgaccctgcccagaagccacagcatgagattcatcgacaagaccagcgccctgagcccctggaccaagtacgagtacagagtgctgatgagcaccctgcacggcggcaccaacagcagcgcctgggtggaggtgaccaccagacccagcagacccgccggcgtgcagccccccgtggtgaccgtgctggagcccgacgccgtgcaggtgacctggaagccccccctgatccagaacggcgacatcctgagctacgagatccacatgcccgacccccacatcaccctgaccaacgtgaccagcgccgtgctgagccagaaggtgacccacctgatccccttcaccaactacagcgtgaccatcgtggcctgcagcggcggcaacggctacctgggcggctgcaccgagagcctgcccacctacgtgaccacccaccccaccgtgccccagaacgtgggccccctgagcgtgatccccctgagcgagagctacgtggtgatcagctggcagccccccagcaagcccaacggccccaacctgagatacgagctgctgagaagaaagatccagcagcccctggccagcaacccccccgaggacctgaacagatggcacaacatctacagcggcacccagtggctgtacgaggacaagggcctgagcagattcaccacctacgagtacatgctgttcgtgcacaacagcgtgggcttcacccccagcagagaggtgaccgtgaccaccctggccggcctgcccgagagaggcgccaacctgaccgccagcgtgctgaaccacaccgccatcgacgtgagatgggccaagcccaccgtgcaggacctgcagggcgaggtggagtactacaccctgttctggagcagcgccaccagcaacgacagcctgaagatcctgcccgacgtgaacagccacgtgatcggccacctgaagcccaacaccgagtactggatcttcatcagcgtgttcaacggcgtgcacagcatcaacagcgccggcctgcacgccaccacctgcgacggcgagccccagggcatgctgccccccgaggtggtgatcatcaacagcaccgccgtgagagtgatctggaccagccccagcaaccccaacggcgtggtgaccgagtacagcatctacgtgaacaacaagctgtacaagaccggcatgaacgtgcccggcagcttcatcctgagagacctgagccccttcaccatctacgacatccaggtggaggtgtgcaccatctacgcctgcgtgaagagcaacggcacccagatcaccaccgtggaggacacccccagcgacatccccacccccaccatcagaggcatcaccagcagaagcctgcagatcgactgggtgagccccagaaagcccaacggcatcatcctgggctacgacctgctgtggaagacctggtacccctgcgccaagacccagaagctggtgcaggaccagagcgacgagctgtgcaaggccgtgagatgccagaagcccgagagcatctgcggccacatctgctacagcagcgaggccaaggtgtgctgcaacggcgtgctgtacaaccccaagcccggccacagatgctgcgaggagaagtacatccccttcgtgctgaacagcaccggcgtgtgctgcggcggcagaatccaggaggcccagcccaaccaccagtgctgcagcggctactacgccagaatcctgcccggcgaggtgtgctgccccgacgagcagcacaacagagtgagcgtgggcatcggcgacagctgctgcggcagaatgccctacagcaccagcggcaaccagatctgctgcgccggcagactgcacgacggccacggccagaagtgctgcggcagacagatcgtgagcaacgacctggagtgctgcggcggcgaggagggcgtggtgtacaacagactgcccggcatgttctgctgcggccaggactacgtgaacatgagcgacaccatctgctgcagcgccagcagcggcgagagcaaggcccacatcaagaagaacgaccccgtgcccgtgaagtgctgcgagaccgagctgatccccaagagccagaagtgctgcaacggcgtgggctacaaccccctgaagtacgtgtgcagcgacaagatcagcaccggcatgatgatgaaggagaccaaggagtgcagaatcctgtgccccgccagcatggaggccaccgagcactgcggcagatgcgacttcaacttcaccagccacatctgcaccgtgatcagaggcagccacaacagcaccggcaaggccagcatcgaggagatgtgcagcagcgccgaggagaccatccacaccggcagcgtgaacacctacagctacaccgacgtgaacctgaagccctacatgacctacgagtacagaatcagcgcctggaacagctacggcagaggcctgagcaaggccgtgagagccagaaccaaggaggacgtgccccagggcgtgagcccccccacctggaccaagatcgacaacctggaggacaccatcgtgctgaactggagaaagcccatccagagcaacggccccatcatctactacatcctgctgagaaacggcatcgagagattcagaggcaccagcctgagcttcagcgacaaggagggcatccagcccttccaggagtacagctaccagctgaaggcctgcaccgtggccggctgcgccaccagcagcaaggtggtggccgccaccacccagggcgtgcccgagagcatcctgccccccagcatcaccgccctgagcgccgtggccctgcacctgagctggagcgtgcccgagaagagcaacggcgtgatcaaggagtaccagatcagacaggtgggcaagggcctgatccacaccgacaccaccgacagaagacagcacaccgtgaccggcctgcagccctacaccaactacagcttcaccctgaccgcctgcaccagcgccggctgcaccagcagcgagcccttcctgggccagaccctgcaggccgcccccgagggcgtgtgggtgacccccagacacatcatcatcaacagcaccaccgtggagctgtactggagcctgcccgagaagcccaacggcctggtgagccagtaccagctgagcagaaacggcaacctgctgttcctgggcggcagcgaggagcagaacttcaccgacaagaacctggagcccaacagcagatacacctacaagctggaggtgaagaccggcggcggcagcagcgccagcgacgactacatcgtgcagacccccatgagcacccccgaggagatctaccccccctacaacatcaccgtgatcggcccctacagcatcttcgtggcctggatcccccccggcatcctgatccccgagatccccgtggagtacaacgtgctgctgaacgacggcagcgtgacccccctggccttcagcgtgggccaccaccagagcaccctgctggagaacctgacccccttcacccagtacgagatcagaatccaggcctgccagaacggcagctgcggcgtgagcagcagaatgttcgtgaagacccccgaggccgcccccatggacctgaacagccccgtgctgaaggccctgggcagcgcctgcatcgagatcaagtggatgccccccgagaagcccaacggcatcatcatcaactacttcatctacagaagacccgccggcatcgaggaggagagcgtgctgttcgtgtggagcgagggcgccctggagttcatggacgagggcgacaccctgagacccttcaccctgtacgagtacagagtgagagcctgcaacagcaagggcagcgtggagagcctgtggagcctgacccagaccctggaggcccccccccaggacttccccgccccctgggcccaggccaccagcgcccacagcgtgctgctgaactggaccaagcccgagagccccaacggcatcatcagccactacagagtggtgtaccaggagagacccgacgaccccaccttcaacagccccaccgtgcacgccttcaccgtgaagggcaccagccaccaggcccacctgtacggcctggagcccttcaccacctacagaatcggcgtggtggccgccaaccacgccggcgagatcctgagcccctggaccctgatccagaccctggagagcagccccagcggcctgagaaacttcatcgtggagcagaaggagaacggcagagccctgctgctgcagtggagcgagcccatgagaaccaacggcgtgatcaagacctacaacatcttcagcgacggcttcctggagtacagcggcctgaacagacagttcctgttcagaagactggaccccttcaccctgtacaccctgaccctggaggcctgcaccagagccggctgcgcccacagcgccccccagcccctgtggaccgacgaggccccccccgacagccagctggcccccaccgtgcacagcgtgaagagcaccagcgtggagctgagctggagcgagcccgtgaaccccaacggcaagatcatcagatacgaggtgatcagaagatgcttcgagggcaaggcctggggcaaccagaccatccaggccgacgagaagatcgtgttcaccgagtacaacaccgagagaaacaccttcatgtacaacgacaccggcctgcagccctggacccagtgcgagtacaagatctacacctggaacagcgccggccacacctgcagcagctggaacgtggtgagaaccctgcaggccccccccgagggcctgagcccccccgtgatcagctacgtgagcatgaacccccagaagctgctgatcagctggatcccccccgagcagagcaacggcatcatccagagctacagactgcagagaaacgagatgctgtaccccttcagcttcgaccccgtgaccttcaactacaccgacgaggagctgctgcccttcagcacctacagctacgccctgcaggcctgcaccagcggcggctgcagcaccagcaagcccaccagcatcaccaccctggaggccgcccccagcgaggtgagcccccccgacctgtgggccgtgagcgccacccagatgaacgtgtgctggagcccccccaccgtgcagaacggcaagatcaccaagtacctggtgagatacgacaacaaggagagcctggccggccagggcctgtgcctgctggtgagccacctgcagccctacagccagtacaacttcagcctggtggcctgcaccaacggcggctgcaccgccagcgtgagcaagagcgcctggaccatggaggccctgcccgagaacatggacagccccaccctgcaggtgaccggcagcgagagcatcgagatcacctggaagccccccagaaaccccaacggccagatcagaagctacgagctgagaagagacggcaccatcgtgtacaccggcctggagaccagatacagagacttcaccctgacccccggcgtggagtacagctacaccgtgaccgccagcaacagccagggcggcatcctgagccccctggtgaaggacagaaccagccccagcgcccccagcggcatggagccccccaagctgcaggccagaggcccccaggagatcctggtgaactgggacccccccgtgagaaccaacggcgacatcatcaactacaccctgttcatcagagagctgttcgagagagagaccaagatcatccacatcaacaccacccacaacagcttcggcatgcagagctacatcgtgaaccagctgaagcccttccacagatacgagatcagaatccaggcctgcaccaccctgggctgcgccagcagcgactggaccttcatccagacccccgagatcgcccccctgatgcagccccccccccacctggaggtgcagatggcccccggcggcttccagcccaccgtgagcctgctgtggaccggccccctgcagcccaacggcaaggtgctgtactacgagctgtacagaagacagatcgccacccagcccagaaagagcaaccccgtgctgatctacaacggcagcagcaccagcttcatcgacagcgagctgctgcccttcaccgagtacgagtaccaggtgtgggccgtgaacagcgccggcaaggcccccagcagctggacctggtgcagaaccggccccgccccccccgagggcctgagagcccccaccttccacgtgatcagcagcacccaggccgtggtgaacatcagcgcccccggcaagcccaacggcatcgtgagcctgtacagactgttcagcagcagcgcccacggcgccgagaccgtgctgagcgagggcatggccacccagcagaccctgcacggcctgcaggccttcaccaactacagcatcggcgtggaggcctgcacctgcttcaactgctgcagcaagggccccaccgccgagctgagaacccaccccgccccccccagcggcctgagcagcccccagatcggcaccctggccagcagaaccgccagcttcagatggagcccccccatgttccccaacggcgtgatccacagctacgagctgcagttccacgtggcctgcccccccgacagcgccctgccctgcacccccagccagatcgagaccaagtacaccggcctgggccagaaggccagcctgggcggcctgcagccctacaccacctacaagctgagagtggtggcccacaacgaggtgggcagcaccgccagcgagtggatcagcttcaccacccagaaggagctgccccagtacagagcccccttcagcgtggacagcaacctgagcgtggtgtgcgtgaactggagcgacaccttcctgctgaacggccagctgaaggagtacgtgctgaccgacggcggcagaagagtgtacagcggcctggacaccaccctgtacatccccagaaccgccgacaagaccttcttcttccaggtgatctgcaccaccgacgagggcagcgtgaagacccccctgatccagtacgacaccagcaccggcctgggcctggtgctgaccacccccggcaagaagaagggcagcagaagcaagagcaccgagttctacagcgagctgtggttcatcgtgctgatggccatgctgggcctgatcctgctggccatcttcctgagcctgatcctgcagagaaagatccacaaggagccctacatcagagagagaccccccctggtgcccctgcagaagagaatgagccccctgaacgtgtacccccccggcgagaaccacatgggcctggccgacaccaagatccccagaagcggcacccccgtgagcatcagaagcaacagaagcgcctgcgtgctgagaatccccagccagaaccagaccagcctgacctacagccagggcagcctgcacagaagcgtgagccagctgatggacatccaggacaagaaggtgctgatggacaacagcctgtgggaggccatcatgggccacaacagcggcctgtacgtggacgaggaggacctgatgaacgccatcaaggacttcagcagcgtgaccaaggagagaaccaccttcaccgacacccacctgtag

SEQ ID NO: 264654 - DNA, 15681 bp, Artificial Sequence
  derived and/or modified sequence
atgaactgccccgtgctgagcctgggcagcggcttcctgttccaggtgatcgagatgctgatcttcgcctacttcgccagcatcagcctgaccgagagcagaggcctgttccccagactggagaacgtgggcgccttcaagaaggtgagcatcgtgcccacccaggccgtgtgcggcctgcccgacagaagcaccttctgccacagcagcgccgccgccgagagcatccagttctgcacccagagattctgcatccaggactgcccctacagaagcagccaccccacctacaccgccctgttcagcgccggcctgagcagctgcatcacccccgacaagaacgacctgcaccccaacgcccacagcaacagcgccagcttcatcttcggcaaccacaagagctgcttcagcagcccccccagccccaagctgatggccagcttcaccctggccgtgtggctgaagcccgagcagcagggcgtgatgtgcgtgatcgagaagaccgtggacggccagatcgtgttcaagctgaccatcagcgagaaggagaccatgttctactacagaaccgtgaacggcctgcagccccccatcaaggtgatgaccctgggcagaatcctggtgaagaagtggatccacctgagcgtgcaggtgcaccagaccaagatcagcttcttcatcaacggcgtggagaaggaccacacccccttcaacgccagaaccctgagcggcagcatcaccgacttcgccagcggcaccgtgcagatcggccagagcctgaacggcctggagcagttcgtgggcagaatgcaggacttcagactgtaccaggtggccctgaccaacagagagatcctggaggtgttcagcggcgacctgctgagactgcacgcccagagccactgcagatgccccggcagccaccccagagtgcaccccctggcccagagatactgcatccccaacgacgccggcgacaccgccgacaacagagtgagcagactgaaccccgaggcccaccccctgagcttcgtgaacgacaacgacgtgggcaccagctgggtgagcaacgtgttcaccaacatcacccagctgaaccagggcgtgaccatcagcgtggacctggagaacggccagtaccaggtgttctacatcatcatccagttcttcagcccccagcccaccgagatcagaatccagagaaagaaggagaacagcctggactgggaggactggcagtacttcgccagaaactgcggcgccttcggcatgaagaacaacggcgacctggagaagcccgacagcgtgaactgcctgcagctgagcaacttcaccccctacagcagaggcaacgtgaccttcagcatcctgacccccggccccaactacagacccggctacaacaacttctacaacacccccagcctgcaggagttcgtgaaggccacccagatcagattccacttccacggccagtactacaccaccgagaccgccgtgaacctgagacacagatactacgccgtggacgagatcaccatcagcggcagatgccagtgccacggccacgccgacaactgcgacaccaccagccagccctacagatgcctgtgcagccaggagagcttcaccgagggcctgcactgcgacagatgcctgcccctgtacaacgacaagcccttcagacagggcgaccaggtgtacgccttcaactgcaagccctgccagtgcaacagccacagcaagagctgccactacaacatcagcgtggaccccttccccttcgagcacttcagaggcggcggcggcgtgtgcgacgactgcgagcacaacaccaccggcagaaactgcgagctgtgcaaggactacttcttcagacaggtgggcgccgaccccagcgccatcgacgtgtgcaagccctgcgactgcgacaccgtgggcaccagaaacggcagcatcctgtgcgaccagatcggcggccagtgcaactgcaagagacacgtgagcggcagacagtgcaaccagtgccagaacggcttctacaacctgcaggagctggaccccgacggctgcagcccctgcaactgcaacaccagcggcaccgtggacggcgacatcacctgccaccagaacagcggccagtgcaagtgcaaggccaacgtgatcggcctgagatgcgaccactgcaacttcggcttcaagttcctgagaagcttcaacgacgtgggctgcgagccctgccagtgcaacctgcacggcagcgtgaacaagttctgcaacccccacagcggccagtgcgagtgcaagaaggaggccaagggcctgcagtgcgacacctgcagagagaacttctacggcctggacgtgaccaactgcaaggcctgcgactgcgacaccgccggcagcctgcccggcaccgtgtgcaacgccaagaccggccagtgcatctgcaagcccaacgtggagggcagacagtgcaacaagtgcctggagggcaacttctacctgagacagaacaacagcttcctgtgcctgccctgcaactgcgacaagaccggcaccatcaacggcagcctgctgtgcaacaagagcaccggccagtgcccctgcaagctgggcgtgaccggcctgagatgcaaccagtgcgagccccacagatacaacctgaccatcgacaacttccagcactgccagatgtgcgagtgcgacagcctgggcaccctgcccggcaccatctgcgaccccatcagcggccagtgcctgtgcgtgcccaacagacagggcagaagatgcaaccagtgccagcccggcttctacatcagccccggcaacgccaccggctgcctgccctgcagctgccacaccaccggcgccgtgaaccacatctgcaacagcctgaccggccagtgcgtgtgccaggacgccagcatcgccggccagagatgcgaccagtgcaaggaccactacttcggcttcgacccccagaccggcagatgccagccctgcaactgccacctgagcggcgccctgaacgagacctgccacctggtgaccggccagtgcttctgcaagcagttcgtgaccggcagcaagtgcgacgcctgcgtgcccagcgccagccacctggacgtgaacaacctgctgggctgcagcaagacccccttccagcagcccccccccagaggccaggtgcagagcagcagcgccatcaacctgagctggagcccccccgacagccccaacgcccactggctgacctacagcctgctgagagacggcttcgagatctacaccaccgaggaccagtacccctacagcatccagtacttcctggacaccgacctgctgccctacaccaagtacagctactacatcgagaccaccaacgtgcacggcagcaccagaagcgtggccgtgacctacaagaccaagcccggcgtgcccgagggcaacctgaccctgagctacatcatccccatcggcagcgacagcgtgaccctgacctggaccaccctgagcaaccagagcggccccatcgagaagtacatcctgagctgcgcccccctggccggcggccagccctgcgtgagctacgagggccacgagaccagcgccaccatctggaacctggtgcccttcgccaagtacgacttcagcgtgcaggcctgcaccagcggcggctgcctgcacagcctgcccatcaccgtgaccaccgcccaggcccccccccagagactgagcccccccaagatgcagaagatcagcagcaccgagctgcacgtggagtggagcccccccgccgagctgaacggcatcatcatcagatacgagctgtacatgagaagactgagaagcaccaaggagaccaccagcgaggagagcagagtgttccagagcagcggctggctgagcccccacagcttcgtggagagcgccaacgagaacgccctgaagcccccccagaccatgaccaccatcaccggcctggagccctacaccaagtacgagttcagagtgctggccgtgaacatggccggcagcgtgagcagcgcctgggtgagcgagagaaccggcgagagcgcccccgtgttcatgatcccccccagcgtgttccccctgagcagctacagcctgaacatcagctgggagaagcccgccgacaacgtgaccagaggcaaggtggtgggctacgacatcaacatgctgagcgagcagagcccccagcagagcatccccatggccttcagccagctgctgcacaccgccaagagccaggagctgagctacaccgtggagggcctgaagccctacagaatctacgagttcaccatcaccctgtgcaacagcgtgggctgcgtgaccagcgccagcggcgccggccagaccctggccgccgcccccgcccagctgagaccccccctggtgaagggcatcaacagcaccaccatccacctgagatggttcccccccgaggagctgaacggccccagccccatctaccagctggagagaagagagagcagcctgcccgccctgatgaccaccatgatgaagggcatcagattcatcggcaacggctactgcaagttccccagcagcacccaccccgtgaacaccgacttcaccggcatcaaggccagcttcagaaccaaggtgcccgagggcctgatcgtgttcgccgccagccccggcaaccaggaggagtacttcgccctgcagctgaagaagggcagactgtacttcctgttcgacccccagggcagccccgtggaggtgaccaccaccaacgaccacggcaagcagtacagcgacggcaagtggcacgagatcatcgccatcagacaccaggccttcggccagatcaccctggacggcatctacaccggcagcagcgccatcctgaacggcagcaccgtgatcggcgacaacaccggcgtgttcctgggcggcctgcccagaagctacaccatcctgagaaaggaccccgagatcatccagaagggcttcgtgggctgcctgaaggacgtgcacttcatgaagaactacaaccccagcgccatctgggagcccctggactggcagagcagcgaggagcagatcaacgtgtacaacagctgggagggctgccccgccagcctgaacgagggcgcccagttcctgggcgccggcttcctggagctgcacccctacatgttccacggcggcatgaacttcgagatcagcttcaagttcagaaccgaccagctgaacggcctgctgctgttcgtgtacaacaaggacggccccgacttcctggccatggagctgaagagcggcatcctgaccttcagactgaacaccagcctggccttcacccaggtggacctgctgctgggcctgagctactgcaacggcaagtggaacaaggtgatcatcaagaaggagggcagcttcatcagcgccagcgtgaacggcctgatgaagcacgccagcgagagcggcgaccagcccctggtggtgaacagccccgtgtacgtgggcggcatcccccaggagctgctgaacagctaccagcacctgtgcctggagcagggcttcggcggctgcatgaaggacgtgaagttcaccagaggcgccgtggtgaacctggccagcgtgagcagcggcgccgtgagagtgaacctggacggctgcctgagcaccgacagcgccgtgaactgcagaggcaacgacagcatcctggtgtaccagggcaaggagcagagcgtgtacgagggcggcctgcagcccttcaccgagtacctgtacagagtgatcgccagccacgagggcggcagcgtgtacagcgactggagcagaggcagaaccaccggcgccgccccccagagcgtgcccacccccagcagagtgagaagcctgaacggctacagcatcgaggtgacctgggacgagcccgtggtgagaggcgtgatcgagaagtacatcctgaaggcctacagcgaggacagcaccagaccccccagaatgcccagcgccagcgccgagttcgtgaacaccagcaacctgaccggcatcctgaccggcctgctgcccttcaagaactacgccgtgaccctgaccgcctgcaccctggccggctgcaccgagagcagccacgccctgaacatcagcaccccccaggaggccccccaggaggtgcagccccccgtggccaagagcctgcccagcagcctgctgctgagctggaacccccccaagaaggccaacggcatcatcacccagtactgcctgtacatggacggcagactgatctacagcggcagcgaggagaactacatcgtgaccgacctggccgtgttcaccccccaccagttcctgctgagcgcctgcacccacgtgggctgcaccaacagcagctgggtgctgctgtacaccgcccagctgccccccgagcacgtggacagccccgtgctgaccgtgctggacagcagaaccatccacatccagtggaagcagcccagaaagatcagcggcatcctggagagatacgtgctgtacatgagcaaccacacccacgacttcaccatctggagcgtgatctacaacagcaccgagctgttccaggaccacatgctgcagtacgtgctgcccggcaacaagtacctgatcaagctgggcgcctgcaccggcggcggctgcaccgtgagcgaggccagcgaggccctgaccgacgaggacatccccgagggcgtgcccgcccccaaggcccacagctacagccccgacagcttcaacgtgagctggaccgagcccgagtaccccaacggcgtgatcaccagctacggcctgtacctggacggcatcctgatccacaacagcagcgagctgagctacagagcctacggcttcgccccctggagcctgcacagcttcagagtgcaggcctgcaccgccaagggctgcgccctgggccccctggtggagaacagaaccctggaggccccccccgagggcaccgtgaacgtgttcgtgaagacccagggcagcagaaaggcccacgtgagatgggaggcccccttcagacccaacggcctgctgacccacagcgtgctgttcaccggcatcttctacgtggaccccgtgggcaacaactacaccctgctgaacgtgaccaaggtgatgtacagcggcgaggagaccaacctgtgggtgctgatcgacggcctggtgcccttcaccaactacaccgtgcaggtgaacatcagcaacagccagggcagcctgatcaccgaccccatcaccatcgccatgccccccggcgcccccgacggcgtgctgccccccagactgagcagcgccacccccaccagcctgcaggtggtgtggagcacccccgccagaaacaacgcccccggcagccccagataccagctgcagatgagaagcggcgacagcacccacggcttcctggagctgttcagcaaccccagcgccagcctgagctacgaggtgagcgacctgcagccctacaccgagtacatgttcagactggtggccagcaacggcttcggcagcgcccacagcagctggatccccttcatgaccgccgaggacaagcccggccccgtggtgccccccatcctgctggacgtgaagagcagaatgatgctggtgacctggcagcaccccagaaagagcaacggcgtgatcacccactacaacatctacctgcacggcagactgtacctgagaacccccggcaacgtgaccaactgcaccgtgatgcacctgcacccctacaccgcctacaagttccaggtggaggcctgcaccagcaagggctgcagcctgagccccgagagccagaccgtgtggaccctgcccggcgcccccgagggcatccccagccccgagctgttcagcgacacccccaccagcgtgatcatcagctggcagccccccacccaccccaacggcctggtggagaacttcaccatcgagagaagagtgaagggcaaggaggaggtgaccaccctggtgaccctgcccagaagccacagcatgagattcatcgacaagaccagcgccctgagcccctggaccaagtacgagtacagagtgctgatgagcaccctgcacggcggcaccaacagcagcgcctgggtggaggtgaccaccagacccagcagacccgccggcgtgcagccccccgtggtgaccgtgctggagcccgacgccgtgcaggtgacctggaagccccccctgatccagaacggcgacatcctgagctacgagatccacatgcccgacccccacatcaccctgaccaacgtgaccagcgccgtgctgagccagaaggtgacccacctgatccccttcaccaactacagcgtgaccatcgtggcctgcagcggcggcaacggctacctgggcggctgcaccgagagcctgcccacctacgtgaccacccaccccaccgtgccccagaacgtgggccccctgagcgtgatccccctgagcgagagctacgtggtgatcagctggcagccccccagcaagcccaacggccccaacctgagatacgagctgctgagaagaaagatccagcagcccctggccagcaacccccccgaggacctgaacagatggcacaacatctacagcggcacccagtggctgtacgaggacaagggcctgagcagattcaccacctacgagtacatgctgttcgtgcacaacagcgtgggcttcacccccagcagagaggtgaccgtgaccaccctggccggcctgcccgagagaggcgccaacctgaccgccagcgtgctgaaccacaccgccatcgacgtgagatgggccaagcccaccgtgcaggacctgcagggcgaggtggagtactacaccctgttctggagcagcgccaccagcaacgacagcctgaagatcctgcccgacgtgaacagccacgtgatcggccacctgaagcccaacaccgagtactggatcttcatcagcgtgttcaacggcgtgcacagcatcaacagcgccggcctgcacgccaccacctgcgacggcgagccccagggcatgctgccccccgaggtggtgatcatcaacagcaccgccgtgagagtgatctggaccagccccagcaaccccaacggcgtggtgaccgagtacagcatctacgtgaacaacaagctgtacaagaccggcatgaacgtgcccggcagcttcatcctgagagacctgagccccttcaccatctacgacatccaggtggaggtgtgcaccatctacgcctgcgtgaagagcaacggcacccagatcaccaccgtggaggacacccccagcgacatccccacccccaccatcagaggcatcaccagcagaagcctgcagatcgactgggtgagccccagaaagcccaacggcatcatcctgggctacgacctgctgtggaagacctggtacccctgcgccaagacccagaagctggtgcaggaccagagcgacgagctgtgcaaggccgtgagatgccagaagcccgagagcatctgcggccacatctgctacagcagcgaggccaaggtgtgctgcaacggcgtgctgtacaaccccaagcccggccacagatgctgcgaggagaagtacatccccttcgtgctgaacagcaccggcgtgtgctgcggcggcagaatccaggaggcccagcccaaccaccagtgctgcagcggctactacgccagaatcctgcccggcgaggtgtgctgccccgacgagcagcacaacagagtgagcgtgggcatcggcgacagctgctgcggcagaatgccctacagcaccagcggcaaccagatctgctgcgccggcagactgcacgacggccacggccagaagtgctgcggcagacagatcgtgagcaacgacctggagtgctgcggcggcgaggagggcgtggtgtacaacagactgcccggcatgttctgctgcggccaggactacgtgaacatgagcgacaccatctgctgcagcgccagcagcggcgagagcaaggcccacatcaagaagaacgaccccgtgcccgtgaagtgctgcgagaccgagctgatccccaagagccagaagtgctgcaacggcgtgggctacaaccccctgaagtacgtgtgcagcgacaagatcagcaccggcatgatgatgaaggagaccaaggagtgcagaatcctgtgccccgccagcatggaggccaccgagcactgcggcagatgcgacttcaacttcaccagccacatctgcaccgtgatcagaggcagccacaacagcaccggcaaggccagcatcgaggagatgtgcagcagcgccgaggagaccatccacaccggcagcgtgaacacctacagctacaccgacgtgaacctgaagccctacatgacctacgagtacagaatcagcgcctggaacagctacggcagaggcctgagcaaggccgtgagagccagaaccaaggaggacgtgccccagggcgtgagcccccccacctggaccaagatcgacaacctggaggacaccatcgtgctgaactggagaaagcccatccagagcaacggccccatcatctactacatcctgctgagaaacggcatcgagagattcagaggcaccagcctgagcttcagcgacaaggagggcatccagcccttccaggagtacagctaccagctgaaggcctgcaccgtggccggctgcgccaccagcagcaaggtggtggccgccaccacccagggcgtgcccgagagcatcctgccccccagcatcaccgccctgagcgccgtggccctgcacctgagctggagcgtgcccgagaagagcaacggcgtgatcaaggagtaccagatcagacaggtgggcaagggcctgatccacaccgacaccaccgacagaagacagcacaccgtgaccggcctgcagccctacaccaactacagcttcaccctgaccgcctgcaccagcgccggctgcaccagcagcgagcccttcctgggccagaccctgcaggccgcccccgagggcgtgtgggtgacccccagacacatcatcatcaacagcaccaccgtggagctgtactggagcctgcccgagaagcccaacggcctggtgagccagtaccagctgagcagaaacggcaacctgctgttcctgggcggcagcgaggagcagaacttcaccgacaagaacctggagcccaacagcagatacacctacaagctggaggtgaagaccggcggcggcagcagcgccagcgacgactacatcgtgcagacccccatgagcacccccgaggagatctaccccccctacaacatcaccgtgatcggcccctacagcatcttcgtggcctggatcccccccggcatcctgatccccgagatccccgtggagtacaacgtgctgctgaacgacggcagcgtgacccccctggccttcagcgtgggccaccaccagagcaccctgctggagaacctgacccccttcacccagtacgagatcagaatccaggcctgccagaacggcagctgcggcgtgagcagcagaatgttcgtgaagacccccgaggccgcccccatggacctgaacagccccgtgctgaaggccctgggcagcgcctgcatcgagatcaagtggatgccccccgagaagcccaacggcatcatcatcaactacttcatctacagaagacccgccggcatcgaggaggagagcgtgctgttcgtgtggagcgagggcgccctggagttcatggacgagggcgacaccctgagacccttcaccctgtacgagtacagagtgagagcctgcaacagcaagggcagcgtggagagcctgtggagcctgacccagaccctggaggcccccccccaggacttccccgccccctgggcccaggccaccagcgcccacagcgtgctgctgaactggaccaagcccgagagccccaacggcatcatcagccactacagagtggtgtaccaggagagacccgacgaccccaccttcaacagccccaccgtgcacgccttcaccgtgaagggcaccagccaccaggcccacctgtacggcctggagcccttcaccacctacagaatcggcgtggtggccgccaaccacgccggcgagatcctgagcccctggaccctgatccagaccctggagagcagccccagcggcctgagaaacttcatcgtggagcagaaggagaacggcagagccctgctgctgcagtggagcgagcccatgagaaccaacggcgtgatcaagacctacaacatcttcagcgacggcttcctggagtacagcggcctgaacagacagttcctgttcagaagactggaccccttcaccctgtacaccctgaccctggaggcctgcaccagagccggctgcgcccacagcgccccccagcccctgtggaccgacgaggccccccccgacagccagctggcccccaccgtgcacagcgtgaagagcaccagcgtggagctgagctggagcgagcccgtgaaccccaacggcaagatcatcagatacgaggtgatcagaagatgcttcgagggcaaggcctggggcaaccagaccatccaggccgacgagaagatcgtgttcaccgagtacaacaccgagagaaacaccttcatgtacaacgacaccggcctgcagccctggacccagtgcgagtacaagatctacacctggaacagcgccggccacacctgcagcagctggaacgtggtgagaaccctgcaggccccccccgagggcctgagcccccccgtgatcagctacgtgagcatgaacccccagaagctgctgatcagctggatcccccccgagcagagcaacggcatcatccagagctacagactgcagagaaacgagatgctgtaccccttcagcttcgaccccgtgaccttcaactacaccgacgaggagctgctgcccttcagcacctacagctacgccctgcaggcctgcaccagcggcggctgcagcaccagcaagcccaccagcatcaccaccctggaggccgcccccagcgaggtgagcccccccgacctgtgggccgtgagcgccacccagatgaacgtgtgctggagcccccccaccgtgcagaacggcaagatcaccaagtacctggtgagatacgacaacaaggagagcctggccggccagggcctgtgcctgctggtgagccacctgcagccctacagccagtacaacttcagcctggtggcctgcaccaacggcggctgcaccgccagcgtgagcaagagcgcctggaccatggaggccctgcccgagaacatggacagccccaccctgcaggtgaccggcagcgagagcatcgagatcacctggaagccccccagaaaccccaacggccagatcagaagctacgagctgagaagagacggcaccatcgtgtacaccggcctggagaccagatacagagacttcaccctgacccccggcgtggagtacagctacaccgtgaccgccagcaacagccagggcggcatcctgagccccctggtgaaggacagaaccagccccagcgcccccagcggcatggagccccccaagctgcaggccagaggcccccaggagatcctggtgaactgggacccccccgtgagaaccaacggcgacatcatcaactacaccctgttcatcagagagctgttcgagagagagaccaagatcatccacatcaacaccacccacaacagcttcggcatgcagagctacatcgtgaaccagctgaagcccttccacagatacgagatcagaatccaggcctgcaccaccctgggctgcgccagcagcgactggaccttcatccagacccccgagatcgcccccctgatgcagccccccccccacctggaggtgcagatggcccccggcggcttccagcccaccgtgagcctgctgtggaccggccccctgcagcccaacggcaaggtgctgtactacgagctgtacagaagacagatcgccacccagcccagaaagagcaaccccgtgctgatctacaacggcagcagcaccagcttcatcgacagcgagctgctgcccttcaccgagtacgagtaccaggtgtgggccgtgaacagcgccggcaaggcccccagcagctggacctggtgcagaaccggccccgccccccccgagggcctgagagcccccaccttccacgtgatcagcagcacccaggccgtggtgaacatcagcgcccccggcaagcccaacggcatcgtgagcctgtacagactgttcagcagcagcgcccacggcgccgagaccgtgctgagcgagggcatggccacccagcagaccctgcacggcctgcaggccttcaccaactacagcatcggcgtggaggcctgcacctgcttcaactgctgcagcaagggccccaccgccgagctgagaacccaccccgccccccccagcggcctgagcagcccccagatcggcaccctggccagcagaaccgccagcttcagatggagcccccccatgttccccaacggcgtgatccacagctacgagctgcagttccacgtggcctgcccccccgacagcgccctgccctgcacccccagccagatcgagaccaagtacaccggcctgggccagaaggccagcctgggcggcctgcagccctacaccacctacaagctgagagtggtggcccacaacgaggtgggcagcaccgccagcgagtggatcagcttcaccacccagaaggagctgccccagtacagagcccccttcagcgtggacagcaacctgagcgtggtgtgcgtgaactggagcgacaccttcctgctgaacggccagctgaaggagtacgtgctgaccgacggcggcagaagagtgtacagcggcctggacaccaccctgtacatccccagaaccgccgacaagaccttcttcttccaggtgatctgcaccaccgacgagggcagcgtgaagacccccctgatccagtacgacaccagcaccggcctgggcctggtgctgaccacccccggcaagaagaagggcagcagaagcaagagcaccgagttctacagcgagctgtggttcatcgtgctgatggccatgctgggcctgatcctgctggccatcttcctgagcctgatcctgcagagaaagatccacaaggagccctacatcagagagagaccccccctggtgcccctgcagaagagaatgagccccctgaacgtgtacccccccggcgagaaccacatgttcgacagcgtggccgacatcagcgacgtgagcagcaacgtgaccctgaagagctacaccatgcacttcgagggcctggccgacaccaagatccccagaagcggcacccccgtgagcatcagaagcaacagaagcgcctgcgtgctgagaatccccagccagaaccagaccagcctgacctacagccagggcagcctgcacagaagcgtgagccagctgatggacatccaggacaagaaggtgctgatggacaacagcctgtgggaggccatcatgggccacaacagcggcctgtacgtggacgaggaggacctgatgaacgccatcaaggacttcagcagcgtgaccaaggagagaaccaccttcaccgacacccacctgtag

SEQ ID NO: 264655 - DNA, 15609 bp, Artificial Sequence
  derived and/or modified sequence
atgaattgccccgtgctctcccttggaagcgggttcctttttcaagttattgagatgctcatctttgcttatttcgcatcaatcagtctgacggaaagccgaggcttgttcccacggttggagaacgttggggctttcaaaaaagtgtctatcgtcccaactcaagcagtgtgcgggctgcccgatcgctctactttctgccactctagtgctgccgcagaatctattcagttctgtacgcagcgtttctgcattcaagattgcccctaccgctccagtcatcccacatataccgccctgttcagtgcaggcctgagcagctgcatcacacccgataaaaacgatctacacccgaatgcccacagtaatagtgcttccttcattttcgggaatcacaaaagctgcttttcctcaccaccttctccaaagctgatggcgagctttaccctggccgtttggctcaagcccgagcagcagggcgttatgtgtgtgatagaaaaaactgtggacggccaaattgtgttcaagttgacaataagcgaaaaggagaccatgttctattacagaaccgtgaatggcctgcagccaccaatcaaagtaatgacactgggccggattcttgtgaaaaagtggatacacctgtccgtccaagtacaccaaactaagatctcgttctttatcaacggcgtggagaaagatcatacccctttcaacgctcgtaccttgtccggttccataaccgatttcgctagcgggacagttcagatcggccagagcctgaatgggttagaacaattcgtcggcagaatgcaggatttcagactttaccaggtcgccctcacgaatagagaaattctggaagtttttagtggagacttgctgcgccttcatgcacagagccactgtcgctgccccgggagtcacccgcgcgtgcaccctttagcccagaggtactgtatccctaatgatgccggtgataccgcggataatagagtttcaaggttgaatccagaagctcatccactgtcgttcgtgaatgataatgacgttggaacatcgtgggtctcgaacgtgttcacaaatataactcagcttaaccagggcgtgaccatatctgtcgatctcgagaatggccaataccaggtcttttatattatcatccagttttttagcccccagcctactgaaatccggatccagcgcaaaaaggagaacagcctagattgggaggattggcagtatttcgcgcggaattgtggggctttcggtatgaagaacaacggcgatctggagaagcctgactccgtcaattgtcttcagctgtctaactttactccatactcccgcggcaatgttacctttagtattctgacccccgggcccaattataggccgggatacaacaatttttacaataccccaagcctccaggaatttgtcaaggcaacacaaattcgattccacttccatggccagtattacactactgagaccgccgtgaaccttcggcaccggtattatgccgttgacgagattactatctcgggtaggtgccaatgccacgggcacgctgataactgcgatactacgtcacagccatacaggtgtttgtgttcccaggaaagctttactgagggccttcattgtgacaggtgcctgccactttataacgacaaaccattccggcagggtgatcaggtgtatgcctttaactgtaaaccatgtcagtgcaattcccattccaaatcttgtcactacaacatctccgtggacccatttccatttgaacacttcaggggcggcggtggcgtgtgtgatgactgtgaacacaatactactggacgcaattgcgagctgtgcaaggattatttcttcagacaagttggggccgatcccagcgcaatcgacgtctgcaagccttgcgactgtgacacggtgggcactaggaatggaagcattctgtgtgatcaaatagggggccagtgtaactgcaagcggcacgtatccggacggcagtgcaaccagtgtcagaacggattctacaacctccaagagctcgaccccgacgggtgcagcccatgcaattgtaacacatctggtaccgttgacggagacattacgtgtcatcagaactccggccagtgcaaatgtaaagccaacgtgatcggcctcagatgcgaccattgcaactttggatttaagtttctacgctcatttaacgacgtggggtgtgaaccttgtcaatgcaatctgcacggttctgtaaataaattttgcaatccccactccggacagtgcgagtgcaagaaggaggcaaaggggttgcagtgtgacacctgcagggagaacttctatggtctggacgtaacaaactgtaaagcatgtgactgtgatactgccggctccctgcctgggacggtgtgcaacgctaagacaggtcagtgcatctgtaaaccaaatgtggaggggaggcagtgcaataaatgtctcgaggggaatttttacctcagacaaaataacagttttctgtgtttgccttgtaattgtgacaaaactggtaccatcaatggctccttactctgcaataagtcaacagggcagtgcccgtgtaaattaggcgtcaccggcctgcggtgcaatcagtgcgaaccccaccggtataacttaacaattgacaactttcaacactgccagatgtgtgagtgcgattcactgggaactctgccaggtaccatttgcgaccccatttccggccagtgtctatgtgtcccaaatcgccagggcagaagatgcaaccagtgccagcctggtttctacatcagtccaggtaacgccacagggtgcttaccatgttcttgccataccacaggtgcggtgaaccacatttgcaatagtttaaccggccagtgcgtttgtcaggacgcaagcatcgccggtcagagatgtgatcaatgcaaggaccattacttcggatttgatccccaaactggcagatgccagccgtgcaactgccacctgtcgggggccctgaatgagacttgtcatttggtgactggccagtgcttttgtaagcagtttgtcaccgggtcaaagtgtgacgcttgcgtgcctagtgccagtcatcttgacgtgaacaacttgctgggctgttctaagacgcccttccagcaaccaccgccgagaggacaagttcagagctcctctgctattaaccttagttggtcaccgccggattctccaaacgcacattggctcacatactctctgctgcgtgacggcttcgagatttatacaaccgaggaccaatacccgtactccatccaatacttcctggataccgacctcctcccctacactaagtacagctattacatcgaaactacaaacgtacacggctctaccaggtccgtagctgttacatacaaaactaaaccaggggtgccagagggtaaccttactctctcctatataatccccattgggtccgactctgttactttgacctggaccactttgagcaaccagtccggtccgattgagaagtacatactgtcttgtgcgccactcgctggaggtcaaccttgcgtgtcttacgagggtcatgagacctccgctactatctggaacctggtgccctttgccaagtatgatttcagcgtccaggcttgtacatcaggcgggtgtttgcattcgctgcccatcactgtgactaccgcccaagcccctccccagcggctcagtccacctaagatgcaaaaaattagttcgaccgagctgcatgtggaatggtccccgcccgccgagctcaacgggattatcatcagatacgagttgtacatgcgcaggctcagatctacaaaagaaacaacatccgaggagagcagggtattccagtcctccggttggctgtccccccactcatttgtcgagagcgctaatgagaacgcccttaaaccacctcagacgatgaccacgatcaccgggctggagccgtataccaagtacgagtttcgagtcctggctgtaaacatggccgggagtgtgtccagcgcgtgggtctcggaaaggacaggagagtcagctccagtgtttatgatacccccttcggtgtttcccctatcttcctatagtcttaacattagttgggagaagccagcagataatgtgactcgcggaaaagttgtcggctacgatatcaacatgctgagcgaacagagccctcagcaaagcatccctatggctttcagccaattgctgcataccgcaaagagccaggaattgagctacactgtggaggggctcaagccctatagaatatacgaattcaccatcactctatgcaattccgtcggatgcgtcacatcagcgtccggagctggacagacactcgccgctgcacccgcccagttgcgcccgccccttgtgaaaggcatcaattccaccactattcacctcaggtggtttccccccgaagagttgaatgggccttctccgatctaccagctggaacggcgggagtcatctctgcctgctttaatgacaactatgatgaaagggataagatttatagggaacggctactgcaaatttccatcttctacacaccctgtcaatacggattttacaggcataaaagcgtctttcagaacaaaggtgcctgaaggcttaatcgtgtttgcagccagccccggcaaccaggaagagtacttcgctcttcagcttaaaaagggccgcctttattttctattcgacccccagggttcgcctgtcgaggtcacaacgacaaacgaccatgggaaacagtacagcgatggcaagtggcacgagataatcgccattcgacatcaggcatttgggcaaatcaccctggatgggatctatacaggcagttcagcaattctgaacggcagcacagtgatcggtgataataccggtgtattcctggggggcctgcctagatcttacaccattttgcgtaaagaccctgagattattcagaagggcttcgtgggttgcctgaaggacgtgcacttcatgaagaattacaatccaagcgccatctgggagcccctagactggcagtcaagcgaagaacagatcaatgtctacaactcttgggaaggctgccccgccagcctcaacgaaggagctcaatttctgggcgctggatttctcgagctccatccttacatgttccacggcggtatgaatttcgaaatctcctttaagttccgcacagatcaattgaacggtctcttgctatttgtgtataataaagacggacccgattttttggctatggagctgaaaagcgggattttgacatttcggctgaatacctcactcgcatttacacaagtggacctcttactggggctctcttactgcaacggcaaatggaacaaggtcatcattaaaaaggaaggcagctttatatcagcctcagtgaacgggctcatgaaacacgcctctgaatccggtgaccagccgcttgtggtaaactcgccagtttacgtaggtggcattccacaggaactcctgaacagttaccagcatctatgcttggagcagggcttcgggggatgtatgaaggacgttaaatttacccgtggtgcagtcgtcaatctcgccagtgtgtcctcaggtgcagtgcgcgtaaacctggacggttgcctgtcaacagactccgccgtgaattgcagggggaatgacagtatactggtttatcagggaaaagagcaatcagtgtacgaaggcggcctgcagcccttcactgagtacctctatagagtgattgcaagtcatgagggtggctcagtttattcagactggagcagaggccggaccacaggcgccgcaccgcagtccgttcccacccccagccgggtgagaagtttgaacggctactctattgaggtcacttgggacgagccagtggtcaggggggtgatagagaagtacatcttgaaagcttacagtgaagactcaacgcgaccccctaggatgccttctgctagtgccgaatttgtgaataccagcaacctgactggcatcctcactggtttgcttccatttaaaaattacgccgtcacattgactgcctgtaccctggctggttgcacggaatccagtcacgctctgaacatctctaccccccaagaggctccgcaggaggttcaaccacctgtcgccaaatctctgccttcctcactcctcttaagctggaacccacccaagaaggcaaacgggattattactcagtactgcctatacatggacggacgcctcatctattccggttcagaggaaaattatatcgtcacagatctggccgtattcaccccccatcagttcctcctgtccgcctgcacccacgtaggttgcaccaatagctcctgggtgttgctgtacacggcccaattaccaccagagcatgtcgattctccagttttgactgtgttagactcacggactatacatatccagtggaagcagcctagaaagatctccgggatcttggaacggtacgtgctgtacatgtctaatcatacccatgatttcactatctggtctgtcatttacaactcgaccgagctgttccaggaccatatgctgcagtacgtactccctggcaataagtaccttatcaaactgggcgcttgtacaggcgggggatgcactgtgagcgaggccagcgaagccctcaccgacgaagatatacccgagggtgtccccgccccaaaagcgcattcctactcgcctgattcttttaacgtctcatggacagagcccgaatatccaaacggcgtcatcacatcctatggcctgtaccttgacggcatccttattcataatagcagtgagctatcatacagagcctacggctttgccccttggagcctccactcctttcgtgtgcaggcctgtacggccaagggatgtgctctgggtcctctggtcgagaatcgcactttagaggcccccccggaaggtacagttaatgtgttcgtgaagacacaggggtccagaaaggcccacgtacggtgggaagctcccttccgccccaacgggttactcacgcattctgtcctctttactggcatattttacgtggaccccgttggaaacaattatactctcctcaatgtcaccaaagtgatgtatagcggggaagagaccaacctgtgggtgctcatcgacgggttggtgccttttactaattacacggtgcaggtaaatatatccaatagccaagggagcctgatcaccgacccaattacaattgccatgcctcctggagctccggatggcgtgctgcctccaagactgagttcggccacaccaacaagcctgcaggtcgtttggtcaacccctgccaggaataacgccccaggctcaccccgctatcagctgcagatgagaagcggggattccactcacggattcttggagcttttctccaatcccagtgcttccttgtcttatgaggtcagtgatttgcagccatacaccgagtatatgttcagactcgtggcgtccaatggcttcggaagtgcccactcctcgtggattcctttcatgacggcagaagacaagcccggccctgttgttcctcctatcctgttagacgtgaaatcacgtatgatgctggtcacctggcagcaccctaggaagagtaatggcgtgataactcactataacatatacctgcacgggcgcctgtacctaagaacccctggaaatgtgacaaattgtacagtgatgcatcttcacccatacaccgcttacaagtttcaggtagaggcatgtacatcaaaaggttgtagtctgtcccctgagtcccagaccgtgtggaccttaccaggcgcccccgagggaatcccctctccagaactcttctccgataccccaacgtctgttatcatcagttggcagcccccgacgcacccaaacgggttagtggagaactttaccatcgagcggcgggttaaaggtaaggaggaggttactacattagtgacgttacctagatctcattccatgagatttatcgataaaacctcagcactgagtccatggaccaaatatgagtaccgggtgctgatgtccactctgcacggaggaacgaatagttctgcctgggttgaagtcaccacacggccaagcaggccagcaggcgttcagcctccagtggtgacagtgctagagcccgatgccgtgcaggttacctggaagcctcccttgatacagaacggcgatattctgtcatatgaaatccatatgcctgaccctcatattacattgacgaacgttacttcagcagtattatcacagaaggtgactcatctgatcccatttaccaactatagcgttacaatcgtggcttgtagcggcggaaacggttacctcgggggatgcaccgaatccctgcctacctacgtgacaacccaccccacggtgccacagaatgtgggtcctctgtcagtgattccactgagcgagtcctacgtggtaatatcctggcagccaccttctaagccgaacggaccaaaccttaggtacgagcttctgaggcggaagatccagcaacctctggcttccaatcctcccgaggatcttaaccgctggcacaatatatactctggcactcaatggctgtatgaggacaagggcctgtcacggttcacaacttacgagtacatgcttttcgtccacaattcggtgggttttactccatccagagaagtaaccgtgacaaccctggcaggtttgccagaaagaggcgccaacctgaccgctagtgtactaaaccatacagctatcgacgtgcgatgggcaaagccaaccgtgcaggatttgcagggggaggtggaatactataccctgttctggagctccgccacgtccaatgacagtctgaaaattctgcccgacgtgaactctcacgttatcggccacctcaagcccaacacagagtattggatctttatctcagtgttcaacggggtgcacagtattaactccgcgggcttgcacgctaccacatgtgacggagaaccccagggaatgctgcccccagaagtcgtgattattaacagcacagcagttcgggtgatttggacctccccaagtaacccaaacggggtggtgacggaatactccatctatgtgaacaacaagctgtataagacagggatgaacgtaccaggatctttcatcctaagagatctctcacctttcactatctacgacatccaagtcgaggtgtgcacaatctatgcttgcgttaaatccaatggcacccaaattaccactgtggaggacacaccatccgacataccgactcctaccatccgcggcatcacctctaggagtctgcagatagactgggtcagtccccggaagcccaacggtataatcctcggttacgacctgctgtggaagacatggtatccctgtgccaaaactcagaagctggtgcaggatcagagcgacgaactctgtaaggccgttagatgccagaaacccgagtccatttgcgggcacatctgctattcttcggaggccaaggtgtgttgtaatggagtgctgtacaaccctaaaccgggccaccgctgctgcgaggagaagtacatcccatttgtgttgaactccacaggggtctgttgtggcggccggatacaagaggcccagcccaaccatcagtgttgctcgggttattatgctaggattctcccaggggaggtgtgttgcccggacgagcagcataaccgtgtgagtgtaggaatcggcgatagctgctgcggtcgaatgccatactcgacgagtggaaaccagatctgttgtgcaggccggctacacgatgggcacggccagaaatgctgcggccgacagatcgtctctaacgacctggaatgctgtgggggagaggaaggtgtggtctacaataggctcccgggcatgttctgctgcggccaggactacgttaatatgagcgatacaatctgctgctctgcatcgagcggggagtccaaagcgcacattaagaagaacgaccccgttccagttaagtgttgtgaaacggagctaatcccaaaatcacagaagtgctgtaatggtgttggctataaccctctcaagtacgtgtgctccgataagatcagcaccggcatgatgatgaaagagacaaaagaatgtcgcatcttgtgcccagcgtccatggaagcaacagaacattgcgggcgctgtgacttcaacttcacatctcacatctgcactgttattcgggggagtcataatagtaccggcaaggcttctattgaggaaatgtgctccagtgcagaagaaacaatccataccgggtctgtcaacacatactcctacacagacgtcaaccttaaaccatacatgacgtacgaataccgtatatccgcttggaactcttatggccgaggcctgagtaaagcggttcgggcgaggactaaagaggatgtcccgcagggtgtgtcaccacccacatggaccaagattgacaatctcgaggatacaattgtgctcaattggagaaagcctattcagagtaatggtcctatcatttactacatcttattgaggaacggtattgagagattcaggggcaccagccttagcttcagtgataaagaagggatccaaccattccaggagtatagttaccagcttaaagcgtgtactgttgccggttgtgccacatccagtaaagtggtggctgccactactcaaggggtgcccgaatccatacttccaccatcgatcaccgcattgtccgcagtcgccctgcatctgtcatggtctgtgccagagaagagtaatggcgttatcaaggaataccagataagacaagttgggaagggactgatccacacggacaccaccgatcgacgccagcacactgtcacaggccttcaaccttatacaaactactcttttaccctcactgcatgtacttccgccggttgcacttcctctgagccttttctgggacagactcttcaggccgcacctgagggagtgtgggtgacaccccgacatattattatcaattccacgacagtcgaactttactggagtctaccagaaaagcctaacggcctggtatcacagtatcagctaagccgaaatggtaacctgctgttcctgggcggcagcgaagagcaaaactttaccgataaaaatttggaacctaattccagatacacttacaagctagaagttaaaactgggggtggcagctcggcgtcagacgattacatcgttcaaacacccatgtctaccccagaggagatttacccaccatataatatcactgtgataggaccatattccatcttcgtcgcatggatccctcctggcatactgatccctgagatccctgtggagtataatgtgcttctgaacgacgggtctgttacacccctggcttttagtgtggggcatcaccaatcgaccctgctcgagaaccttactccattcacgcagtatgaaatcagaattcaggcttgccagaacgggtcgtgcggggtatcctctagaatgttcgtaaaaaccccagaggcagcaccaatggacctgaatagtcccgttctgaaagcactgggatccgcttgcatcgaaatcaaatggatgccacctgaaaaacccaatggcatcatcatcaattattttatctatagacgacctgccggtattgaagaggaatcagtactgtttgtttggtctgagggcgccctcgagtttatggacgaaggagacactctgcgtccatttacactctacgagtaccgagttcgggcatgcaactccaagggctcagtcgagagcctctggtccctcactcagaccctagaagccccgccccaggacttccctgctccatgggctcaggctaccagcgctcatagcgtcctgttgaactggacaaaaccggagtcccctaatggcattattagtcactaccgcgtcgtgtaccaggagaggcctgatgatcccaccttcaattctcccactgtgcacgccttcacagtcaagggaacatcccatcaggcccatctgtacgggctggaacctttcactacttatagaatcggagtggtggccgcaaaccacgctggagaaattctgtccccttggactctcattcagacccttgagtcatctccttcaggcctgcggaattttatcgtcgagcagaaagaaaacggccgggcccttctgctgcaatggtccgagccaatgcgcacaaacggggtgatcaagacatataatattttctccgacggctttctggagtactccgggctgaatcggcaatttcttttcaggcgcttggatccattcaccttatacaccttaaccttagaagcatgcacccgcgccggatgtgctcactccgcccctcagccactgtggaccgatgaggcccccccggactctcagctggccccaaccgttcatagcgtgaaaagcacttctgttgagctcagttggtccgagccagtcaaccccaatggtaaaataattaggtacgaggtgattcggcgctgtttcgagggaaaagcatggggtaaccagacaatccaggctgatgagaagatcgtgtttaccgagtacaatactgagaggaacacgtttatgtacaatgatactgggctgcaaccttggacacaatgtgagtacaagatatatacatggaattcagcaggccacacatgttcatcatggaacgtcgttcgcacgttgcaagctccacccgagggcctgtctccaccggttatctcatatgtctccatgaatccgcaaaagttgctgatctcctggattccgccagaacaaagcaatggaattatacagtcgtatcgcctgcagcgcaacgaaatgctctatcctttcagctttgacccagtaacattcaactatacagacgaagagctcctgccattttccacatattcctacgctttacaggcatgcacaagtggtggctgctctactagtaaaccaaccagtataacgacactggaggctgcgccaagcgaggtgagccccccggacctctgggccgtgtctgcaacccagatgaatgtatgttggtcaccacccactgtacagaatggcaaaattacaaaatatctggtcagatacgataataaagagtctctggcgggccagggtctctgcctgctggtgagccacctacagccgtattcccagtataacttcagcctcgttgcttgtaccaatggaggctgcacagcaagcgttagcaagagtgcatggacaatggaggccttaccagaaaacatggattcacctaccctgcaggtgactgggtctgagagcatcgagatcacatggaaacctccaaggaatcccaatggacagattcgctcctatgaattaaggcgggatggtacaatagtgtacacgggactagaaactcgctacagagacttcaccctgactccgggcgtagagtactcctacaccgttacggcaagtaacagccagggagggatcctgtcacctctcgttaaggacagaacctccccctctgccccgtcaggcatggaacctccaaaactacaggctcgtgggcctcaggagattcttgtcaactgggacccgcccgtacggaccaacggcgatataattaactatacattattcatcagggagctcttcgagagggagaccaagattatacatattaacacaacccacaattcatttgggatgcaaagttacattgtaaatcaattgaagcctttccacaggtacgaaatcagaatacaggcttgcacaacactaggctgcgcatctagcgattggacattcatccagacaccagaaattgcccctcttatgcagccacccccgcatttagaggtgcaaatggctcccggtggctttcagccaaccgtatccctgctatggacagggccattacaacctaacggcaaggttttatattacgagctgtaccggaggcagatagccacccaaccacgcaaatcgaatcccgttcttatttacaatggaagctctacatctttcatcgactccgaacttctacccttcactgagtatgaataccaagtgtgggcggtaaactctgcgggcaaagcaccatcctcctggacctggtgccgaaccgggcccgccccccccgagggcttgcgggcccccacctttcatgttatatccagcacccaagccgtcgtcaacatctccgctcccgggaaacccaacggaattgtatctctttatcggctgttttctagcagcgctcatggagcagaaaccgtgctgtcagaggggatggccactcagcagaccctgcacgggcttcaggcttttacgaactattcaatcggcgtcgaggcgtgcacctgtttcaactgctgctctaaaggtcccactgcggaattgcggactcaccccgccccaccgtcaggcttgagctcgccacagattgggaccttggcatcaagaaccgctagcttcaggtggagtccacctatgttcccgaacggtgtgatacactcttatgagctccagttccacgtggcctgtccacctgattcagctcttccatgcacacccagtcagattgaaacaaagtacaccgggcttggtcagaaagcctctctcggaggccttcaaccctacaccacttacaagttgcgggtggtggctcataatgaggtgggaagcaccgcttctgaatggataagcttcaccactcagaaggagttgcctcaatatagagcccccttcagtgttgacagtaacttgtccgtcgtgtgcgtcaactggtctgatacattcctattaaacggtcaactcaaagagtacgtgctgacagacggcggccgccgggtgtactcagggctggatacaaccctctatatcccccggaccgctgataaaaccttcttttttcaggtgatctgcaccaccgatgaggggtccgtgaaaaccccacttatccagtacgatacatctaccgggctgggtttggtcctcaccaccccaggcaaaaagaagggctcacgaagtaagtcaacagagttctatagcgaactgtggtttatcgtcctgatggctatgttaggcttaattctcctcgccatcttcctttccttgatcctccagagaaaaatacataaggagccttatatccgcgagcgcccccctctggtccccctgcagaagcgcatgtcccctctcaacgtgtatccacccggcgagaaccacatgggtcttgcggacaccaagattccacggtccggaactccggtttccattcgcagcaaccgctccgcttgcgtgctccgaataccaagccaaaatcaaaccagtctgacatactctcagggaagtctgcatagatcagtttcgcagttgatggatatacaggataaaaaggtgttaatggacaactctctttgggaagccattatgggtcataattctggcctgtatgtggacgaggaagatctgatgaacgctattaaggattttagcagtgtcactaaagagcggacaaccttcactgatacccacctctag

SEQ ID NO: 264656 - DNA, 15681 bp, Artificial Sequence
  derived and/or modified sequence
atgaactgtcctgtcctttcgctgggatctggcttcctgtttcaggtcatcgagatgttaatcttcgcctactttgcttccatatctcttacagagagccgcggactgtttcccagactcgagaacgttggagccttcaagaaagttagtatagtgcccacacaggcagtttgcggactgcccgaccggtcaactttctgtcattcctccgcggctgcggaatcaatccagttctgtactcagcgtttttgcattcaggattgtccttacagatcttcacatccaacgtataccgctcttttctccgctggattgtcctcttgtatcacacccgataaaaatgatctgcaccccaatgcacactcaaattccgcatcatttatttttggcaaccacaaaagctgcttctcgtccccccctagcccgaagctaatggccagcttcaccttggccgtgtggctgaaacctgaacagcaaggcgttatgtgtgtgatcgaaaaaactgttgatggccagatcgtgtttaaattgaccattagtgagaaggagacaatgttttactaccggacagttaacgggttacagccacccatcaaggtgatgaccttgggaaggattctcgtcaaaaagtggatccacctgtccgttcaggtccaccagactaagatttctttcttcatcaacggagtggagaaagaccacacacctttcaacgccaggaccctctccggaagtatcacagatttcgcctccggcacagtacaaatcgggcagtcactaaatgggctggagcagttcgttgggagaatgcaggactttcgcctgtatcaagttgccttgacgaatcgagaaattcttgaagtcttctccggcgacctgctccgcctccatgctcaatctcactgtcgctgccctgggagtcatccccgggttcacccccttgctcagaggtactgtatcccaaatgacgcgggcgacaccgctgataacagagtgtcacgcctgaaccctgaagcccatccactgagtttcgtgaatgacaatgatgtgggcacttcctgggtttctaacgtgttcacgaatataacacagctcaaccaaggtgtgacaataagtgtggacttggagaacggccagtaccaggtgttctatattatcatccagttctttagcccccagcccactgagattcggatccagcggaagaaagaaaattctctggattgggaagactggcagtactttgctcggaactgtggtgcgttcggcatgaagaataacggtgatctggagaaaccagactctgtgaattgcctgcagctctctaattttacgccctattcgcggggtaatgtgacgtttagtatcttgacaccgggacccaactacagacccgggtataacaacttctataataccccctctctccaagagttcgtgaaggccacacagattcggttccactttcatggccagtactacactactgagaccgccgtcaatttgcgacatcgatattatgccgtggacgagatcacgattagtggccggtgtcagtgccacggacacgccgacaactgcgacaccacttctcagccctatcgatgtttgtgttctcaagaatccttcactgaagggttacactgcgacagatgcctgccactttacaatgacaaaccattccgccagggggaccaagtgtatgctttcaactgcaagccatgtcaatgcaatagccattccaaatcctgccattacaacataagtgtggatccctttccgtttgaacactttcgggggggcggcggggtctgtgacgactgcgagcacaatactaccggcaggaattgcgagctctgtaaagattacttcttcagacaagtcggagctgacccctccgcgattgatgtgtgcaaaccctgtgactgtgatactgtggggacacggaatggcagtatactctgtgaccaaatcggagggcagtgtaactgcaaacgccacgtgagcggccgccagtgtaatcagtgccagaacggtttctataatttacaagagctggacccagacggctgctctccatgtaactgtaacaccagcgggacagtggatggcgacataacctgtcatcagaatagcggtcagtgcaaatgcaaggcaaacgttataggcttgcggtgtgatcattgcaactttggatttaagttcctgaggtcctttaatgatgttgggtgcgagccttgccagtgcaacctgcatgggagcgtgaataaattttgcaatccccactctggccagtgtgagtgcaagaaggaggccaagggcctgcagtgcgacacttgcagagaaaacttttatggcctggacgttactaactgtaaggcctgcgattgcgataccgccggaagcctaccaggaaccgtgtgtaatgctaagactgggcagtgcatttgcaaaccgaatgtagaagggcgccagtgcaataagtgtctcgagggaaacttctatctgaggcagaacaatagctttttgtgcctcccctgcaattgtgacaaaacaggaactatcaacggatcattgctctgtaataagagcacagggcaatgcccctgcaagctgggcgtgaccggcctgcggtgcaatcagtgtgagccacacaggtataacctgactattgataactttcagcattgccaaatgtgtgagtgcgatagtctcgggactctacccggcacaatatgcgatccaatatccggccagtgcctatgcgtgcccaacagacaggggaggaggtgcaaccagtgccaacccggattctacatatccccgggcaatgcaacaggttgtctcccatgttcctgccacacaacaggcgccgtgaatcacatatgcaatagtctgaccgggcagtgtgtatgccaggacgccagtatcgccggccagaggtgtgaccagtgtaaggatcattattttggattcgacccccagacggggcggtgtcagccttgtaattgccatctctccggtgctctcaacgagacctgccatctagtgaccggacagtgcttctgcaagcagttcgtgacaggatctaaatgcgacgcttgcgtgccaagtgcttcccacttggatgtgaacaatctgctcggctgttccaagacacccttccagcagccgcctccacgtggacaggtccagagtagcagtgctatcaacctgagctggagtccccctgattctcctaacgctcactggctgacgtatagcctactccgggatggctttgagatctacacgaccgaggaccagtacccttacagtattcagtattttctcgatacggacctgctcccttatacaaagtattcttactatatcgaaaccacaaatgtgcacgggtctactcgttcagtggctgtcacctataagactaagccgggtgtgccagaagggaatctgactcttagctacattattcccatcgggtctgactctgtcactctcacctggacaaccctctcaaatcagtcaggaccaattgaaaagtacatcctctcctgcgctcccttggcaggggggcagccctgtgtgagttacgaggggcacgagacatctgcaaccatctggaacctggtgccattcgcaaaatacgacttttcagtccaggcctgtacgtctggaggatgcttgcattccctgccaattaccgttaccaccgcacaggcaccgcctcagcgattgtcacctcccaagatgcagaagatctcaagcactgagctgcatgtagagtggagtcctcctgcggagctgaacggtattataatcagatatgaactctatatgagaaggttaagaagcacaaaagaaactaccagcgaggagtcacgcgtcttccagagctccggttggctcagtccacactccttcgtggagtccgcgaatgaaaacgctcttaaaccacctcagaccatgactacgatcactgggctggagccttacactaagtatgagttcagagtgttagcggtcaacatggctggctcagtgagttccgcctgggtctctgagcgcaccggggaatctgcccccgtattcatgataccgcctagtgtcttcccgctgtcctcatattcactcaatattagttgggagaaaccagctgacaacgttactaggggaaaggtggtcggatacgatatcaacatgctctctgagcagagcccacaacaaagtatcccaatggccttctctcagcttctgcacactgctaagtctcaggagctatcatacaccgtagaagggttaaagccgtatcgcatatatgagttcacgatcaccctttgcaactccgtcgggtgtgtgacatctgcctcaggcgctgggcagaccctggcggctgcaccagcccagcttagaccgcccctggtcaaggggatcaactctacaacaatccacctgcgctggtttcctccagaagaactaaacggcccctcgcccatctatcagctggaaaggagagaatcctcacttccagcactcatgacaactatgatgaagggaatccggttcataggcaacggatattgcaaattcccttcctctacccaccccgttaacaccgacttcacaggaatcaaggctagcttccggactaaggttccagagggtctgattgtttttgctgcatcccccggaaatcaggaagagtactttgcgctgcaactgaaaaagggacggttgtacttcttgttcgacccacagggtagcccagtcgaagtcactaccacgaacgaccatggtaaacagtactcagatggcaagtggcacgagattatagcaataaggcaccaggccttcgggcagatcacacttgacggtatttacactggaagtagtgctatcctgaatgggtcaactgtaatcggagacaatacaggagtcttcctgggtggcttgccccggagttacacaatcttgcgaaaggatcctgagatcatacaaaaaggctttgtgggatgtctcaaggatgttcacttcatgaaaaattacaacccttcagctatctgggagccactggattggcagtcttctgaggagcagattaatgtgtacaactcctgggaaggatgtcccgcatctctcaacgagggcgcgcagttcctgggagccggattcttggaactgcacccttacatgtttcatgggggtatgaattttgagatctcttttaagttcagaaccgaccagttaaatggactattgctcttcgtgtacaacaaggacgggccagacttcctggctatggagctgaaatctggcattctcacctttaggctcaatacctctttggcatttacacaagtcgacctgttgctgggtctttcctactgcaatggcaaatggaacaaagtgatcattaagaaggaaggctccttcattagtgcctcggtgaacggattgatgaagcatgcatccgaatctggtgatcaacccttggtggttaattcacccgtttacgtgggcggcatcccacaggaactcctgaattcataccagcacctctgcttagaacagggcttcgggggatgcatgaaggacgttaagtttacccgcggcgctgtcgtgaacctcgcatcggtctccagcggagcagttagggtcaatctggacggttgtttgagcaccgattccgctgtcaactgtagaggaaacgacagcattctggtttaccaaggaaaggaacagagcgtgtatgaggggggcttgcagcccttcaccgaatatctctatcgcgtgatcgccagccatgaaggaggcagcgtctattcggactggtctagggggaggacaaccggggctgcgccacagtccgtgcctacccccagtcgcgtcagaagtctcaacggctattcaatcgaagtcacttgggacgaacctgtcgttcgcggtgtaatcgaaaaatacattctgaaagcctactcagaggattctacgcgacccccgaggatgcccagcgcgtctgctgagttcgtcaataccagcaatttgaccggaatcctcaccggcctcttgcctttcaagaattatgctgtgaccctgaccgcatgcacgctggcaggttgcactgaatccagccatgctctaaatatttcgacacctcaggaggctcctcaggaagtccagcctccagttgcaaagtctctgcctagttcccttctgctgagttggaacccacctaaaaaagctaatggaatcattacacagtactgcctgtatatggacggacgtctgatttactccggttccgaggagaactacattgttactgatctagcagtgtttacgccgcaccaattcctcctgtctgcctgcacccatgtaggatgcaccaatagttcatgggtccttctgtatacagcgcaactgcctcctgagcacgttgactctccagtactgaccgtactggattcacggacgattcatatccagtggaaacagcctcgaaagatttccggcattctggaacgctacgtgctgtatatgtctaatcacactcatgattttacaatctggagtgtgatctacaattctacagagctttttcaggatcatatgttgcagtacgtgctgcccggcaacaagtatcttatcaaacttggggcgtgtactggcggaggatgtaccgtgagcgaggcatcagaggccctgacagatgaggacattcccgagggtgtacctgccccaaaagctcattcttactcacccgattcatttaatgtgtcatggacagagcctgaatatccaaacggcgtaataacctcctatggactctatctggatggcatcctgatacacaattcctctgagctctcctacagagcttacggattcgctccatggtcgcttcattctttccgggtccaggcttgtacggccaaaggctgtgctcttggtcctctggtggaaaaccgaactctggaggccccaccggagggtaccgttaacgtctttgtgaaaacccagggtagccgaaaagcacacgttaggtgggaagccccgtttcgcccaaatggattacttacccactctgtattattcaccggcatcttttatgtcgaccccgtcggtaataattatacactgcttaatgtgaccaaggtcatgtattctggcgaggagaccaacctgtgggtcttaatcgacggactcgtccctttcaccaattacactgtacaggttaacatcagcaattctcagggtagcctgatcactgacccaatcaccatcgccatgccaccgggtgccccagatggagtattgcccccacggctatctagcgccactcccacctcgttgcaggttgtctggtcaacccctgccagaaacaatgctcctggctccccgcgctatcagttgcagatgcgttcgggcgactcaactcacggttttcttgagctgttcagtaatcctagcgcctcgcttagctacgaagtgtccgatctgcagccctacactgaatatatgtttcgtcttgtggcatccaatggatttgggtctgctcactcaagctggatcccatttatgacagctgaggataagcctgggccagtcgttccccctatcttgctcgacgttaagtcgcgtatgatgctcgtcacatggcagcatcctcgaaagtcaaacggtgtaattactcactacaatatttacttacatggtcgcttatatctgcgcacaccaggaaacgtgaccaactgcaccgtcatgcacctacacccttataccgcatataaattccaagtggaggcctgtacatctaaaggctgtagtctctctcccgagtcacagactgtgtggacacttcctggagcacctgaaggaattccctctcccgaactgtttagcgatacccctaccagcgtgataatcagctggcagcctcccacgcaccccaatgggctagtggagaacttcacgatcgagagacgggttaaaggaaaggaggaggtgaccacgctggtaactctcccgagaagccattccatgagattcatcgacaagacgagtgctcttagcccgtggaccaagtatgagtaccgggtcctcatgtccactctacacgggggcaccaactcctccgcttgggtggaggtgacgacacgtccgagtcggcccgccggagtccagccaccagttgttactgtcttggaacctgacgcagttcaagtcacatggaagccgcccctgattcagaacggtgacattctcagctatgagatccatatgcccgaccctcatataaccctaaccaacgtgaccagcgcagtgctctcccagaaggtgacgcatctgataccatttactaattacagtgtgactattgtcgcctgctctggcggaaacggatacctcggaggatgtacagaaagcctgcccacgtatgtgacgacacaccccacggtaccccagaacgtgggcccgttgtctgtcattccactctctgagagctacgttgtgatatcctggcagcctccatccaagcctaacgggccgaacctcaggtacgaactgttacgccggaaaatacaacagcctctggcttcgaacccaccagaggacctgaataggtggcataatatatacagcgggacacagtggctatacgaggataagggactgagcaggtttaccacgtacgagtatatgctgttcgttcataattctgtgggcttcaccccttctcgcgaggtcacggttactaccctggctggtctgccagaaaggggcgctaatctcaccgcctctgttctcaaccatacggctattgacgttcggtgggcaaaaccaactgtgcaggatctgcagggggaagtggagtactacactctgttttggagttccgccacatctaacgattccctgaagattctgcccgatgtaaacagtcatgtaatcgggcaccttaagcctaatacagagtattggatttttatctccgtgttcaacggagttcacagtattaattccgcaggactgcacgccaccacctgtgatggggaaccccaaggaatgctgccacccgaggtagtcattatcaatagtactgcagtgagggtgatttggactagtccctctaaccccaacggcgtcgtcaccgagtacagcatttacgtgaacaataagctatacaaaacgggaatgaatgttccagggtccttcatcttaagagatctctcaccgttcaccatttacgatattcaagtggaagtgtgtaccatttacgcttgcgtcaagtctaatggcacccaaattacaaccgtagaagataccccatctgatatcccgactccgacgataagaggcataacaagcaggagtctgcagattgactgggtgtcccctcgcaagcctaatggcatcatcttagggtacgatctcctctggaagacctggtacccttgtgctaaaacacaaaagttagtgcaggaccagagcgacgagctgtgtaaggcagtccgttgtcagaagcctgagagcatttgcggccatatctgctactcttctgaggctaaggtgtgttgcaatggggtgctgtataaccctaagccgggacatcggtgttgcgaggagaaatacatcccatttgtccttaacagtacaggtgtttgttgcggcggtagaatccaggaggctcagcccaatcatcagtgttgctctggttattatgcccgcatcctaccaggtgaagtttgctgtcctgacgaacagcacaacagggttagcgtgggaataggagattcctgttgtggcagaatgccatactccacatccgggaatcagatttgctgcgccggacgtcttcacgacggccacgggcaaaagtgttgcggtcgccagatcgtatctaacgacctggaatgttgcggaggcgaggagggggtggtgtacaaccgcctccccgggatgttttgctgtggccaggattacgtcaatatgtccgacaccatttgttgctcagctagtagtggcgagtcaaaagcccatattaagaagaatgacccagtgccagtgaaatgctgtgaaaccgagcttattccgaagtcacagaagtgctgtaacggagtgggctacaaccctctgaaatacgtctgctctgataaaatcagtacgggtatgatgatgaaggaaaccaaagaatgtcgaatcctctgccccgcctcaatggaagcgactgaacactgtggccggtgcgattttaactttacttcacatatctgcacggtgatacggggaagccacaacagcacaggcaaggccagtatcgaggaaatgtgtagctcagccgaggaaacgattcataccggctcagtcaatacctactcctatacagacgtgaacctgaagccttatatgacatacgaataccggatatcagcatggaactcctatggccgtggcctgtcaaaagcagttcgggcaagaacaaaggaggatgtgccacagggcgtgagtcccccgacttggaccaaaatagacaatttggaagataccattgtcctgaactggcgaaaaccaatacagtcaaatggccctatcatttattacattctgctgagaaatggaatagagcgcttccggggtaccagtctgagcttctccgataaggagggaatccagccgttccaggagtacagctatcagctcaaggcctgcacggtggccgggtgcgcaacaagctcgaaggtggtggcggccaccacccagggagttccagaatctatactgcccccaagtatcacagccctgtccgcagtggccctacatctctcatggagcgtgcctgagaaatcaaacggcgttattaaggagtaccaaattagacaggtcggcaaaggtctcattcatacggataccactgatcggcgccaacacacggtgaccggactgcaaccttatacaaattactcatttaccctgaccgcatgcacctccgctggctgcacaagtagcgagcccttcttaggtcagacactgcaagccgcacccgagggggtgtgggtaacgccccgccacattattataaactcaacgaccgtcgaactttactggagtctgcctgagaagcctaacggcctcgtctcacagtatcagttatcccgtaacggcaacctcctcttcctgggcggctcagaggagcagaatttcacagacaaaaacctggaaccaaattctcggtatacttataagctggaggtgaagacaggcggcggcagcagcgcttcagacgattacattgtgcagactccaatgtccacccctgaggaaatttacccgccctacaatataaccgtgatagggccatattcgatctttgtggcctggataccacccggcatactgatccctgagatcccagtggagtacaatgtgctgctcaatgatggttcggtcactcccctggccttctcagtgggccaccaccagagtacactcctggagaatctgaccccatttactcagtatgaaatccgtattcaggcctgccagaatggatcatgtggggtgtcgtcacgcatgttcgtaaagacaccagaagcggcacctatggatctgaactcacctgtgttgaaagcactcggctccgcttgtatcgaaattaagtggatgcctccagaaaaaccgaatggaattataatcaattactttatctataggcgccccgccggtatcgaggaggagtctgtcttgtttgtgtggtctgaaggcgctctagaattcatggacgagggagatacgctgcgaccatttacactttatgaatatcgtgtgagagcttgtaactctaaggggtcagtcgagagcctttggagcctcactcagaccttagaagctcccccacaagatttcccagctccttgggctcaggccacgtcagcccattcggttctactaaactggactaagcctgagtcccccaacggcattatctcacattaccgcgtggtgtatcaggagcgtccagacgacccaacttttaattcacccaccgtgcatgcctttaccgtaaagggaaccagtcaccaggcccacctgtacggcctggagcccttcacaacatatagaataggagtggtagccgcaaatcacgccggtgaaattctgtccccttggaccctgatccaaaccctagagtcaagtcctagcggcctacgtaacttcatagtggaacagaaggaaaatgggcgagctcttttgctgcagtggagtgaaccaatgcggacaaatggcgtgatcaaaacttataatattttttctgatgggtttctggagtatagcggccttaacaggcagttcttatttagacgactcgatccattcacgctctatactctgacactagaggcatgcacccgagccgggtgtgcccatagcgctccccaacccctgtggacagacgaggcacctccagattctcagcttgcaccaaccgttcactccgtgaaaagcaccagtgtggagctctcttggagtgagccagtcaacccgaatgggaagattatccgctatgaagtgatccgcaggtgcttcgaggggaaggcttgggggaaccagacgatccaggcggatgagaaaatagtgttcactgaatataatacagaaaggaacacatttatgtataatgacaccggcctccaaccttggactcagtgcgaatacaagatatatacgtggaattccgcgggccatacctgctcttcttggaatgtagtgcgaaccctccaggctcctcctgagggtctgtccccaccagttatatcctatgtgagtatgaatcctcaaaaactgctgatctcctggatcccccccgagcagtcaaacgggatcattcaaagctaccgcttgcagcgaaatgaaatgctgtatcctttttcttttgacccagtcacattcaactatacagatgaggaattactgcctttttcaacatactcttacgctctacaggcctgtaccagcggaggttgtagcaccagcaaaccaaccagcatcaccacacttgaagcggcgccgtctgaagtgagtccacctgatctgtgggccgtgtctgccactcagatgaacgtatgttggtctccaccaaccgtgcaaaatgggaagataacaaagtatttggtgcgatatgacaataaagagtcactcgcagggcaggggctgtgtttactcgtgtctcacctgcagccgtattcccagtataacttcagcctggtggcatgcacaaatggaggatgtaccgctagcgtcagtaaaagtgcctggactatggaggccctgccagagaacatggactctcctaccctgcaggtaacgggctcagagtccattgaaatcacatggaagccccctcgtaacccaaacgggcagatccgatcctatgaactgcggagagatgggacaatcgtctatactggcctggagacaagataccgtgactttactcttacccccggggtggagtatagttacacagtgacggcctctaattctcaaggcggaatcctcagccccttagtaaaagaccgtaccagtccgtccgcccccagtggcatggaacctccaaagctccaagcgaggggaccccaggaaattctggtaaactgggaccctcctgtgcggacgaacggcgatattattaactacacactatttatcagggaacttttcgagcgagaaactaagatcattcacattaataccacccacaactccttcggtatgcagagctacattgtcaaccaactcaaacctttccatagatatgagattaggatccaggcctgcaccaccctggggtgtgcgtctagcgattggactttcatccaaacccccgagatcgcccccctaatgcaaccaccccctcatctcgaagtccagatggccccaggaggattccagcccactgtgtctctgctgtggaccggcccactccagccaaatggaaaagtgctttactatgaattgtaccggaggcagatcgcaacccaacctcggaagagcaacccggtcctgatctacaacggatcctccacatcctttatcgactctgagctcctcccatttaccgagtatgagtatcaggtgtgggctgttaactccgcagggaaagccccttcctcttggacctggtgtaggaccggacctgctccccccgagggtctgagagccccaacgttccatgttatctctagcacccaggcagtggtcaatatctccgcccccgggaaacccaatgggatcgttagcttgtaccgtttatttagttcgtccgcccatggagccgagaccgtgctgagcgagggtatggcaactcagcaaacccttcatggactccaagcgtttactaattattctattggcgtggaggcctgtacatgttttaactgttgttcaaagggaccaacagccgagcttcgcacgcaccccgctccaccttcagggctgtctagtccacagatcggcaccttggcttctcggactgccagttttagatggtcaccccctatgttccccaatggcgtgattcatagctacgaactgcaatttcatgtggcctgtcccccagactccgctctgccctgcacaccctctcaaatcgaaacaaaatacaccggcttgggtcagaaagctagcctagggggtctgcagccatataccacttacaaactgcgggtggtcgcacacaatgaggttgggtccacagcctctgagtggatctcattcaccactcagaaggaattaccacagtacagagcccctttcagtgttgacagtaacctgagtgtggtgtgtgtgaactggagcgatacatttctattgaacggacagctgaaggaatacgtgctgacagacggagggcgccgcgtgtacagtggcctcgacaccacactgtatattcctcgcactgccgataaaacgttctttttccaggtcatttgcacaaccgatgagggctctgttaaaactcctctgatacagtatgatacaagtacaggtctgggcctcgtactgacaactccagggaagaagaagggctctcggagcaaatctactgagttttatagtgagctctggttcatcgtgctgatggccatgctggggctcattctgctggctattttcctctcgcttatccttcagagaaaaattcacaaagagccctatattagagagagaccccctctggtccccctccagaaacgcatgtcacccctcaacgtgtatcctccgggtgagaatcacatgtttgactccgtggccgacatctctgatgtttcttccaacgttacgctgaagagttatacaatgcactttgaggggcttgcggataccaaaattccccgcagtgggaccccagtttctattcggtccaatcgtagcgcttgcgtactccgcatcccctcacagaaccagaccagccttacttacagccagggcagcctgcatcggagcgtgtcacagttgatggatatccaggacaaaaaagtgctaatggataattcactctgggaagctattatgggacataattcagggctctatgtggacgaggaagacctgatgaatgccatcaaggatttcagctctgtgaccaaagagcgcactactttcacggacacccacctttag

SEQ ID NO: 264657 - DNA, 15609 bp, Artificial Sequence
  derived and/or modified sequence
atgaactgccctgtgctgagcctgggcagcggcttcctgttccaggtgattgagatgctgatctttgcctactttgccagcatcagcctgacagagagccggggcctcttcccccggctggagaatgtgggcgccttcaagaaggtgtccatcgtgcccacccaggccgtgtgtggcctgcctgacaggagcaccttctgccacagcagcgctgctgctgagagcatccagttctgcacccagcgcttctgcatccaggactgcccctaccgcagcagccaccccacctacacagccctcttctctgctggcctgagcagctgcatcaccccagacaagaatgacctgcaccccaatgcccacagcaacagcgccagcttcatctttggaaaccacaagagctgcttcagcagcccccccagccccaagctgatggccagcttcaccctggccgtgtggctgaagccagagcagcagggcgtgatgtgtgtgattgagaagacagtggatggccagatcgtgttcaagctgaccatcagcgagaaggagaccatgttctactacagaacagtgaatggcctgcagccccccatcaaggtgatgaccctgggccgcatcctggtgaagaagtggatccacctgtctgtgcaggtgcaccagaccaagatctccttcttcatcaacggggtggagaaggaccacacccccttcaatgcccggaccctgagcggcagcatcacagactttgccagcggcaccgtgcagatcggccagagcctgaatggcctggagcagtttgtgggccgcatgcaggacttccggctgtaccaggtggccctgaccaaccgggagatcctggaggtgttcagcggggacctgctgcggctgcacgcccagagccactgccgctgccccggcagccacccccgggtgcaccccctggcccagcgctactgcatccccaatgatgctggggacacagctgacaacagagtgtcccggctgaaccctgaggcccaccccctgagctttgtgaatgacaatgatgtgggcacctcctgggtgtccaatgtgttcaccaacatcacccagctgaaccagggcgtgaccatctctgtggacctggagaatggccagtaccaggtgttctacatcatcatccagttcttcagcccccagcccacagagatccgcatccagaggaagaaggagaacagcctggactgggaggactggcagtactttgccaggaactgtggggccttcggcatgaagaacaatggagacctggagaagccagattctgtgaactgcctgcagctgagcaacttcaccccctacagcagaggaaatgtgaccttcagcatcctgaccccaggccccaactacagacctggctacaacaacttctacaacacccccagcctgcaggagtttgtgaaggccacccagatccgcttccacttccacggccagtactacaccacagaaacagctgtgaacctgcggcaccgctactatgctgtggatgagatcaccatcagcggccgctgccagtgccacggccacgccgacaactgtgacaccaccagccagccctaccgctgcctgtgcagccaggagagcttcacagagggcctgcactgtgaccgctgcctgcccctgtacaatgacaagcccttccggcagggcgaccaggtgtatgccttcaactgcaagccctgccagtgcaacagccacagcaagagctgccactacaacatctctgtggaccccttcccctttgagcacttccggggcggcggcggcgtgtgtgatgactgtgagcacaacaccactggaagaaactgtgagctgtgcaaggactacttcttccggcaggtgggcgctgaccccagcgccattgatgtgtgcaagccctgtgactgtgacacagtgggcaccagaaatggcagcatcctgtgtgaccagatcggcggccagtgcaactgcaagagacatgtgtctggccggcagtgcaaccagtgccagaatggcttctacaacctgcaggagctggaccctgatggctgcagcccctgcaactgcaacaccagcggcaccgtggatggagacatcacctgccaccagaacagcggccagtgcaagtgcaaggccaacgtcatcggcctgcgctgtgaccactgcaactttggcttcaagttcctgcggagcttcaatgatgtgggctgtgagccctgccagtgcaacctgcacggctctgtgaacaagttctgcaacccccacagcggccagtgtgagtgcaagaaggaggccaagggcctgcagtgtgacacctgccgggagaacttctacggcctggatgtgaccaactgcaaggcctgtgactgtgacacagctggcagcctgcccggcaccgtgtgcaatgccaagacaggccagtgcatctgcaagcccaacgtggagggccggcagtgcaacaagtgcctggagggcaacttctacctgcggcagaacaacagcttcctgtgcctgccctgcaactgtgacaagacaggcaccatcaatggcagcctgctgtgcaacaagagcacaggccagtgcccctgcaagctgggcgtgacaggcctgcgctgcaaccagtgtgagccccaccgctacaacctgaccatcgacaacttccagcactgccagatgtgtgaatgtgacagcctgggcaccctgcccggcaccatctgtgaccccatcagcggccagtgcctgtgtgtgcccaaccggcagggccgccgctgcaaccagtgccagcccggcttctacatcagccctggaaatgccaccggctgcctgccctgcagctgccacaccaccggggctgtgaaccacatctgcaacagcctgaccggccagtgtgtgtgccaggatgccagcattgctggccagagatgtgaccagtgcaaggaccactacttcggctttgacccccagacaggccgctgccagccctgcaactgccacctgagcggggccctgaatgagacctgccacctggtgacaggccagtgcttctgcaagcagtttgtgacaggcagcaaatgtgatgcctgtgtgcccagcgccagccacctggatgtgaacaacctgctgggctgcagcaagacccccttccagcagcccccaccccggggccaggtgcagagcagcagcgccatcaacctgtcctggagccccccagacagccccaatgcccactggctgacctacagcctgctgagagatggctttgagatctacaccacagaggaccagtacccctacagcatccagtacttcctggacacagacctgctgccctacaccaagtacagctactacatcgagaccaccaacgtgcacggcagcaccaggtctgtggccgtgacctacaagaccaagccaggagtgcctgagggcaacctgaccctgagctacatcatccccatcggcagtgacagcgtgaccctgacctggaccaccctgagcaaccagagcggccccatcgagaagtacatcctgagctgtgcccccctggccggcggccagccctgtgtgtcctatgagggccacgagaccagcgccaccatctggaacctggtgccctttgccaagtatgacttctctgtgcaggcctgcaccagcggcggctgcctgcacagcctgcccatcaccgtgaccacagcccaggccccaccccagaggctgagcccccccaagatgcagaagatcagcagcacagagctgcacgtggagtggagccccccagctgagctgaatggcatcatcatccgctatgagctgtacatgaggcggctgcggagcaccaaggagaccaccagcgaggagagcagggtcttccagagcagcggctggctgagcccccacagctttgtggagagcgccaatgaaaatgccctgaagccaccccagaccatgaccaccatcaccggcctggagccctacaccaagtatgagttccgggtgctggccgtgaacatggccggctctgtgagcagcgcctgggtgtctgagaggactggagagagcgcccctgtgttcatgatccccccatctgtgttccccctgagcagctacagcctgaacatctcctgggagaagccagctgacaacgtgacccggggcaaggtggtgggctatgacatcaacatgctgtctgagcagagcccccagcagagcatccccatggccttcagccagctgctgcacacagccaagagccaggagctgagctacacagtggagggcctgaagccctaccgcatctatgagttcaccatcaccctgtgcaacagcgtgggctgtgtgaccagcgccagcggggccggccagaccctggccgccgccccagcccagctgcggccccccctggtgaagggcatcaacagcaccaccatccacctgcgctggttccccccagaggagctgaatggccccagccccatctaccagctggagcggcgggagagcagcctgcctgccctgatgaccaccatgatgaagggcatccgcttcatcggaaatggctactgcaagttccccagcagcacccaccctgtgaacacagacttcaccggcatcaaggccagcttccgcaccaaggtgcctgagggcctgattgtgtttgctgccagccctggcaaccaggaggagtactttgccctgcagctgaagaagggccgcctgtacttcctgtttgacccccagggcagccctgtggaggtgaccaccaccaatgaccacggcaagcagtacagtgatggcaagtggcatgagatcatcgccatccgccaccaggccttcggccagatcaccctggatggcatctacacaggcagcagcgccatcctgaatggcagcaccgtcatcggggacaacacaggagtcttcctgggcggcctgcccaggagctacaccatcctgaggaaggaccctgagatcatccagaagggctttgtgggctgcctgaaggatgtgcacttcatgaagaactacaaccccagcgccatctgggagcccctggactggcagagcagcgaggagcagatcaacgtgtacaacagctgggagggctgcccagccagcctgaatgaaggagcccagttcctgggcgccggcttcctggagctgcacccctacatgtttcatggaggcatgaactttgagatctccttcaagttcagaacagaccagctgaatggcctgctgctgtttgtgtacaacaaggatggccctgacttcctggccatggagctgaagagcggcatcctgaccttccggctgaacaccagcctggccttcacccaggtggacctgctgctgggcctgagctactgcaatggcaagtggaacaaggtgatcatcaagaaggagggcagcttcatcagcgcctctgtgaatggcctgatgaagcacgccagcgagagcggggaccagcccctggtggtgaacagccctgtgtatgtgggcggcatcccccaggagctgctgaacagctaccagcacctgtgcctggagcagggctttggaggctgcatgaaggatgtgaagttcaccagaggagctgtggtgaacctggcctctgtgtcctctggagctgtgcgggtgaacctggatggctgcctgagcacagacagcgctgtgaactgcagaggaaatgacagcatcctggtgtaccagggcaaggagcagagcgtgtatgaaggaggcctgcagcccttcacagagtacctgtacagagtcatcgccagccatgaaggaggctctgtgtacagcgactggagccggggccgcaccaccggggccgccccccagagcgtgcccacccccagccgggtgcgcagcctgaatggctacagcattgaggtgacctgggatgagcctgtggtgcggggcgtcatcgagaagtacatcctgaaggcctacagcgaggacagcaccaggcctcccaggatgcccagcgccagcgctgagtttgtgaacaccagcaacctgaccggcatcctgaccggcctgctgcccttcaagaactatgctgtgaccctgacagcctgcaccctggccggctgcacagagagcagccacgccctgaacatcagcaccccccaggaggccccccaggaggtgcagccccctgtggccaagagcctgcccagcagcctgctgctgtcctggaacccccccaagaaggccaacggcatcatcacccagtactgcctgtacatggatggccgcctcatctacagcggcagcgaggagaactacatcgtgacagacctggccgtgttcaccccccaccagttcctgctgagcgcctgcacccacgtgggctgcaccaacagctcctgggtgctgctgtacacagcccagctgcccccagagcacgtggacagccctgtgctgactgtgctggacagcaggaccatccacatccagtggaagcagcccaggaagatcagcggcatcctggagcgctacgtgctgtacatgagcaaccacacccatgacttcaccatctggagcgtcatctacaacagcacagagctgttccaggaccacatgctgcagtatgtgctgcccggcaacaagtacctgatcaagctgggcgcctgcaccggcggcggctgcaccgtgtctgaggccagcgaggccctgacagatgaggacatccctgagggcgtgcctgcccccaaggcccacagctacagcccagacagcttcaacgtgtcctggacagagcctgagtaccccaacggggtcatcaccagctatggcctgtacctggatggcatcctgatccacaacagcagcgagctgagctaccgggcctacggctttgccccctggagcctgcacagcttccgggtgcaggcctgcacagccaagggctgtgccctgggccccctggtggagaacagaaccctggaggcccctcctgagggcaccgtgaatgtgtttgtgaagacccagggcagcaggaaggcccacgtgcgctgggaggcccccttccggcccaacggcctgctgacccacagcgtgctcttcaccggcatcttctacgtggaccctgtgggcaacaactacaccctgctgaatgtgaccaaggtgatgtacagcggggaggagaccaacctgtgggtgctgattgatggcctggtgcccttcaccaactacacagtgcaggtgaacatcagcaacagccagggcagcctcatcacagaccccatcaccatcgccatgcctcctggggccccagatggagtgctgcccccccggctgagcagcgccacccccaccagcctgcaggtggtgtggagcaccccagccaggaacaatgcccctggcagcccccgctaccagctgcagatgaggtctggggacagcacccacggcttcctggagctgttcagcaaccccagcgccagcctgtcctatgaggtgtctgacctgcagccctacacagagtacatgttccggctggtggccagcaatggcttcggcagcgcccacagctcctggatccccttcatgacagctgaggacaagccaggccctgtggtgccccccatcctgctggatgtgaagagcaggatgatgctggtgacctggcagcaccccaggaagagcaatggagtcatcacccactacaacatctacctgcacggccgcctgtacctgcggaccccaggaaatgtgaccaactgcaccgtgatgcacctgcacccctacacagcctacaagttccaggtggaggcctgcaccagcaagggctgcagcctgagccctgagagccagacagtgtggaccctgcccggggcccctgagggcatccccagccctgagctgttcagtgacacccccaccagcgtcatcatctcctggcagccccccacccaccccaacggcctggtggagaacttcaccattgaaagaagagtgaagggcaaggaggaggtgaccaccctggtgaccctgcccaggagccacagcatgaggttcatcgacaagaccagcgccctgagcccctggaccaagtatgagtacagagtgctgatgagcaccctgcacggcggcaccaacagcagcgcctgggtggaggtgaccacccggcccagcaggcctgctggggtgcagccccctgtggtgacagtgctggagccagatgctgtgcaggtgacctggaagccacccctcatccagaatggagacatcctgtcctatgagatccacatgccagacccccacatcaccctgaccaacgtgaccagcgctgtgctgagccagaaggtgacccacctgatccccttcaccaactacagcgtgaccatcgtggcctgcagcggcggcaatggctacctgggcggctgcacagagagcctgcccacctacgtgaccacccaccccaccgtgccccagaatgtgggccccctgagcgtcatccccctgtctgagagctatgtggtgatctcctggcagccccccagcaagcccaacggccccaacctgcgctatgagctgctgcggaggaagatccagcagcccctggccagcaaccccccagaggacctgaaccgctggcacaacatctacagcggcacccagtggctgtatgaggacaagggcctgagccgcttcaccacctatgagtacatgctgtttgtgcacaacagcgtgggcttcacccccagccgggaggtgacagtgaccaccctggccggcctgcctgagcggggggccaacctgacagcctctgtgctgaaccacacagccattgatgtgcgctgggccaagcccaccgtgcaggacctgcagggcgaggtggagtactacaccctcttctggagcagcgccaccagcaatgacagcctgaagatcctgcctgatgtgaacagccacgtgattggccacctgaagcccaacacagagtactggatcttcatcagcgtcttcaatggagtgcacagcatcaacagcgctggcctgcacgccaccacctgtgatggagagccccagggcatgctgcccccagaggtggtgatcatcaacagcacagctgtgcgggtcatctggaccagccccagcaaccccaatggagtggtgacagagtacagcatctacgtgaacaacaagctgtacaagacaggcatgaatgtgcccggcagcttcatcctgcgggacctgagccccttcaccatctatgacatccaggtggaggtgtgcaccatctatgcctgtgtgaagagcaatggcacccagatcaccaccgtggaggacacccccagcgacatccccacccccaccatccggggcatcaccagccgcagcctgcagattgactgggtgagccccaggaagcccaacggcatcatcctgggctatgacctgctgtggaagacctggtacccctgtgccaagacccagaagctggtgcaggaccagagtgatgagctgtgcaaggctgtgcgctgccagaagccagagagcatctgtggccacatctgctacagcagcgaggccaaggtgtgctgcaatggagtgctgtacaaccccaagccaggccaccgctgctgtgaggagaagtacatcccctttgtgctgaacagcactggagtgtgctgcggcggccgcatccaggaggcccagcccaaccaccagtgctgcagcggctactatgcccgcatcctgcccggggaggtgtgctgcccagatgagcagcacaacagagtgtctgtgggcattggagacagctgctgcggccgcatgccctacagcaccagcggcaaccagatctgctgtgccggccgcctgcatgatggccacggccagaagtgctgcggccggcagatcgtgtccaatgacctggagtgctgcggcggggaggagggcgtggtgtacaaccggctgcccggcatgttctgctgcggccaggactatgtgaacatgtctgacaccatctgctgcagcgccagcagtggagagagcaaggcccacatcaagaagaatgaccctgtgcctgtgaagtgctgtgaaacagagctgatccccaagagccagaagtgctgcaatggagtgggctacaaccccctgaagtatgtgtgcagcgacaagatcagcacaggcatgatgatgaaggagaccaaggagtgccgcatcctgtgcccagcctccatggaggccacagagcactgcggccgctgtgacttcaacttcaccagccacatctgcaccgtcatccggggcagccacaacagcacaggcaaggccagcattgaggagatgtgcagcagcgctgaggagaccatccacactggatctgtgaacacctacagctacacagatgtgaacctgaagccctacatgacctatgagtaccgcatcagcgcctggaacagctatggccggggcctgagcaaggctgtgcgggcccggaccaaggaggatgtgccccagggcgtgagcccccccacctggaccaagattgacaacctggaggacaccatcgtgctgaactggaggaagcccatccagagcaatggccccatcatctactacatcctgctgagaaatggaattgagcgcttccggggcaccagcctgtccttcagtgacaaggagggcatccagcccttccaggagtacagctaccagctgaaggcctgcaccgtggccggctgtgccaccagcagcaaggtggtggccgccaccacccagggcgtgcctgagagcatcctgcccccatccatcacagccctgtctgctgtggccctgcacctgtcctggagcgtgcctgagaagagcaatggagtcatcaaggagtaccagatccggcaggtgggcaagggcctcatccacacagacaccacagaccggcggcagcacacagtgacaggcctgcagccctacaccaactacagcttcaccctgacagcctgcaccagcgctggctgcaccagcagcgagcccttcctgggccagaccctgcaggccgcccctgagggcgtgtgggtgacccccaggcacatcatcatcaacagcaccaccgtggagctgtactggagcctgcctgagaagcccaacggcctggtgtcccagtaccagctgagcagaaatggaaacctgctcttcctgggcggcagcgaggagcagaacttcacagacaagaacctggagcccaacagccgctacacctacaagctggaggtgaagacaggaggcggcagcagcgccagtgatgactacatcgtgcagacccccatgagcaccccagaggagatctacccaccctacaacatcaccgtcatcggcccctacagcatctttgtggcctggatccccccaggcatcctgatccctgagatccctgtggagtacaacgtgctgctgaatgatggctctgtgacccccctggccttctctgtgggccaccaccagagcaccctgctggagaacctgacccccttcacccagtatgagatccgcatccaggcctgccagaatggcagctgtggggtgagcagcaggatgtttgtgaagaccccagaggccgcccccatggacctgaacagccctgtgctgaaggccctgggcagcgcctgcatcgagatcaagtggatgcctcctgagaagcccaacggcatcatcatcaactacttcatctacagaagacctgctggcatcgaggaggagagcgtgctgtttgtgtggagcgagggcgccctggagttcatggatgaaggagacaccctgcggcccttcaccctgtatgagtacagagtgcgggcctgcaacagcaagggctctgtggagagcctgtggagcctgacccagaccctggaggccccaccccaggacttccctgccccctgggcccaggccaccagcgcccacagcgtgctgctgaactggaccaagccagagagccccaacggcatcatcagccactacagagtggtgtaccaggagaggccagatgaccccaccttcaacagccccaccgtgcacgccttcaccgtgaagggcaccagccaccaggcccacctgtatggcctggagcccttcaccacctacagaattggagtggtggccgccaaccacgccggggagatcctgagcccctggaccctcatccagaccctggagagcagccccagcggcctgaggaacttcatcgtggagcagaaggaaaatggccgggccctgctgctgcagtggagcgagcccatgaggaccaacggggtcatcaagacctacaacatcttcagtgatggcttcctggagtacagcggcctgaaccggcagttcctgttccggcggctggaccccttcaccctgtacaccctgaccctggaggcctgcacccgggccggctgtgcccacagcgccccccagcccctgtggacagatgaggcccccccagacagccagctggcccccaccgtgcacagcgtgaagagcacctctgtggagctgtcctggagcgagcctgtgaaccccaacgggaagatcatccgctatgaggtgatccgccgctgctttgagggcaaggcctggggcaaccagaccatccaggctgatgagaagatcgtgttcacagagtacaacacagagaggaacaccttcatgtacaatgacaccggcctgcagccctggacccagtgtgagtacaagatctacacctggaacagcgctggccacacctgcagctcctggaatgtggtgaggaccctgcaggcccctcctgagggcctgagcccccctgtgatctcctatgtgtccatgaacccccagaagctgctgatctcctggatccccccagagcagagcaatggcatcatccagagctaccgcctgcagagaaatgagatgctgtaccccttctcctttgatcctgtgaccttcaactacacagatgaggagctgctgcccttcagcacctacagctatgccctgcaggcctgcaccagcggcggctgcagcaccagcaagcccaccagcatcaccaccctggaggccgcccccagcgaggtgtccccaccagacctgtgggccgtgtctgccacccagatgaatgtgtgctggagcccccccaccgtgcagaatggcaagatcaccaagtacctggtgcgctatgacaacaaggagagcctggccggccagggcctgtgcctgctggtgagccacctgcagccctacagccagtacaacttcagcctggtggcctgcaccaacggcggctgcacagcctctgtgtccaagagcgcctggaccatggaggccctgcctgagaacatggacagccccaccctgcaggtgactggaagtgagagcattgagatcacctggaagccacccaggaaccccaacggccagatccgctcctatgagctgcggagagatggcaccatcgtgtacacaggcctggagacccgctacagagacttcaccctgaccccaggagtggagtacagctacacagtgacagccagcaacagccagggcggcatcctgagccccctggtgaaggacaggaccagccccagcgcccccagcggcatggagccccccaagctgcaggcccggggcccccaggagatcctggtgaactgggacccccctgtgaggaccaatggagacatcatcaactacaccctcttcatccgggagctgtttgagcgggagaccaagatcatccacatcaacaccacccacaacagctttggcatgcagagctacatcgtgaaccagctgaagcccttccacagatatgagatccgcatccaggcctgcaccaccctgggctgtgccagcagtgactggaccttcatccagaccccagagatcgcccccctgatgcagcccccaccccacctggaggtgcagatggcccctgggggcttccagcccaccgtgtccctgctgtggacaggccccctgcagcccaacgggaaggtgctgtactatgagctgtaccgccggcagatcgccacccagcccaggaagagcaaccctgtgctgatctacaacggcagcagcaccagcttcatcgacagcgagctgctgcccttcacagaatatgagtaccaggtgtgggccgtgaacagcgctgggaaggcccccagctcctggacctggtgcaggacaggccctgcccctcctgagggcctgcgggcccccaccttccacgtgatcagcagcacccaggccgtggtgaacatcagcgcccctgggaagcccaacggcatcgtgtccctgtaccgcctcttcagcagcagcgcccacggggctgagaccgtgctgtctgagggcatggccacccagcagaccctgcacggcctgcaggccttcaccaactacagcattggagtggaggcctgcacctgcttcaactgctgcagcaagggccccacagctgagctgcggacccacccagccccacccagcggcctgagcagcccccagatcggcaccctggccagcaggacagccagcttccgctggagcccccccatgttccccaacggggtcatccacagctatgagctgcagttccacgtggcctgccccccagacagcgccctgccctgcacccccagccagatcgagaccaagtacacaggcctgggccagaaggccagcctgggcggcctgcagccctacaccacctacaagctgcgggtggtggcccacaatgaggtgggcagcacagccagcgagtggatctccttcaccacccagaaggagctgccccagtaccgggcccccttctctgtggacagcaacctgtctgtggtgtgtgtgaactggagcgacaccttcctgctgaatggccagctgaaggagtatgtgctgacagatggcggcagaagagtgtacagcggcctggacaccaccctgtacatccccaggacagctgacaagaccttcttcttccaggtgatctgcaccacagatgagggctctgtgaagacccccctcatccagtatgacaccagcacaggcctgggcctggtgctgaccacccctgggaagaagaagggcagccgcagcaagagcacagagttctacagcgagctgtggttcatcgtgctgatggccatgctgggcctcatcctgctggccatcttcctgagcctcatcctgcagaggaagatccacaaggagccctacatccgggagaggcctcccctggtgcccctgcagaagaggatgagccccctgaatgtgtacccacctggagagaaccacatgggcctggccgacaccaagatccccaggagcggcacccctgtgtccatccgcagcaacagaagtgcctgtgtgctgcgcatccccagccagaaccagaccagcctgacctacagccagggcagcctgcacaggtctgtgtcccagctgatggacatccaggacaagaaggtgctgatggacaacagcctgtgggaggccatcatgggccacaacagcggcctgtatgtggatgaggaggacctgatgaatgccatcaaggacttcagctctgtgaccaaggagaggaccaccttcacagacacccacctgtag

SEQ ID NO: 264658 - DNA, 15681 bp, Artificial Sequence
  derived and/or modified sequence
atgaactgccctgtgctgagcctgggcagcggcttcctgttccaggtgattgagatgctgatctttgcctactttgccagcatcagcctgacagagagccggggcctcttcccccggctggagaatgtgggcgccttcaagaaggtgtccatcgtgcccacccaggccgtgtgtggcctgcctgacaggagcaccttctgccacagcagcgctgctgctgagagcatccagttctgcacccagcgcttctgcatccaggactgcccctaccgcagcagccaccccacctacacagccctcttctctgctggcctgagcagctgcatcaccccagacaagaatgacctgcaccccaatgcccacagcaacagcgccagcttcatctttggaaaccacaagagctgcttcagcagcccccccagccccaagctgatggccagcttcaccctggccgtgtggctgaagccagagcagcagggcgtgatgtgtgtgattgagaagacagtggatggccagatcgtgttcaagctgaccatcagcgagaaggagaccatgttctactacagaacagtgaatggcctgcagccccccatcaaggtgatgaccctgggccgcatcctggtgaagaagtggatccacctgtctgtgcaggtgcaccagaccaagatctccttcttcatcaacggggtggagaaggaccacacccccttcaatgcccggaccctgagcggcagcatcacagactttgccagcggcaccgtgcagatcggccagagcctgaatggcctggagcagtttgtgggccgcatgcaggacttccggctgtaccaggtggccctgaccaaccgggagatcctggaggtgttcagcggggacctgctgcggctgcacgcccagagccactgccgctgccccggcagccacccccgggtgcaccccctggcccagcgctactgcatccccaatgatgctggggacacagctgacaacagagtgtcccggctgaaccctgaggcccaccccctgagctttgtgaatgacaatgatgtgggcacctcctgggtgtccaatgtgttcaccaacatcacccagctgaaccagggcgtgaccatctctgtggacctggagaatggccagtaccaggtgttctacatcatcatccagttcttcagcccccagcccacagagatccgcatccagaggaagaaggagaacagcctggactgggaggactggcagtactttgccaggaactgtggggccttcggcatgaagaacaatggagacctggagaagccagattctgtgaactgcctgcagctgagcaacttcaccccctacagcagaggaaatgtgaccttcagcatcctgaccccaggccccaactacagacctggctacaacaacttctacaacacccccagcctgcaggagtttgtgaaggccacccagatccgcttccacttccacggccagtactacaccacagaaacagctgtgaacctgcggcaccgctactatgctgtggatgagatcaccatcagcggccgctgccagtgccacggccacgccgacaactgtgacaccaccagccagccctaccgctgcctgtgcagccaggagagcttcacagagggcctgcactgtgaccgctgcctgcccctgtacaatgacaagcccttccggcagggcgaccaggtgtatgccttcaactgcaagccctgccagtgcaacagccacagcaagagctgccactacaacatctctgtggaccccttcccctttgagcacttccggggcggcggcggcgtgtgtgatgactgtgagcacaacaccactggaagaaactgtgagctgtgcaaggactacttcttccggcaggtgggcgctgaccccagcgccattgatgtgtgcaagccctgtgactgtgacacagtgggcaccagaaatggcagcatcctgtgtgaccagatcggcggccagtgcaactgcaagagacatgtgtctggccggcagtgcaaccagtgccagaatggcttctacaacctgcaggagctggaccctgatggctgcagcccctgcaactgcaacaccagcggcaccgtggatggagacatcacctgccaccagaacagcggccagtgcaagtgcaaggccaacgtcatcggcctgcgctgtgaccactgcaactttggcttcaagttcctgcggagcttcaatgatgtgggctgtgagccctgccagtgcaacctgcacggctctgtgaacaagttctgcaacccccacagcggccagtgtgagtgcaagaaggaggccaagggcctgcagtgtgacacctgccgggagaacttctacggcctggatgtgaccaactgcaaggcctgtgactgtgacacagctggcagcctgcccggcaccgtgtgcaatgccaagacaggccagtgcatctgcaagcccaacgtggagggccggcagtgcaacaagtgcctggagggcaacttctacctgcggcagaacaacagcttcctgtgcctgccctgcaactgtgacaagacaggcaccatcaatggcagcctgctgtgcaacaagagcacaggccagtgcccctgcaagctgggcgtgacaggcctgcgctgcaaccagtgtgagccccaccgctacaacctgaccatcgacaacttccagcactgccagatgtgtgaatgtgacagcctgggcaccctgcccggcaccatctgtgaccccatcagcggccagtgcctgtgtgtgcccaaccggcagggccgccgctgcaaccagtgccagcccggcttctacatcagccctggaaatgccaccggctgcctgccctgcagctgccacaccaccggggctgtgaaccacatctgcaacagcctgaccggccagtgtgtgtgccaggatgccagcattgctggccagagatgtgaccagtgcaaggaccactacttcggctttgacccccagacaggccgctgccagccctgcaactgccacctgagcggggccctgaatgagacctgccacctggtgacaggccagtgcttctgcaagcagtttgtgacaggcagcaaatgtgatgcctgtgtgcccagcgccagccacctggatgtgaacaacctgctgggctgcagcaagacccccttccagcagcccccaccccggggccaggtgcagagcagcagcgccatcaacctgtcctggagccccccagacagccccaatgcccactggctgacctacagcctgctgagagatggctttgagatctacaccacagaggaccagtacccctacagcatccagtacttcctggacacagacctgctgccctacaccaagtacagctactacatcgagaccaccaacgtgcacggcagcaccaggtctgtggccgtgacctacaagaccaagccaggagtgcctgagggcaacctgaccctgagctacatcatccccatcggcagtgacagcgtgaccctgacctggaccaccctgagcaaccagagcggccccatcgagaagtacatcctgagctgtgcccccctggccggcggccagccctgtgtgtcctatgagggccacgagaccagcgccaccatctggaacctggtgccctttgccaagtatgacttctctgtgcaggcctgcaccagcggcggctgcctgcacagcctgcccatcaccgtgaccacagcccaggccccaccccagaggctgagcccccccaagatgcagaagatcagcagcacagagctgcacgtggagtggagccccccagctgagctgaatggcatcatcatccgctatgagctgtacatgaggcggctgcggagcaccaaggagaccaccagcgaggagagcagggtcttccagagcagcggctggctgagcccccacagctttgtggagagcgccaatgaaaatgccctgaagccaccccagaccatgaccaccatcaccggcctggagccctacaccaagtatgagttccgggtgctggccgtgaacatggccggctctgtgagcagcgcctgggtgtctgagaggactggagagagcgcccctgtgttcatgatccccccatctgtgttccccctgagcagctacagcctgaacatctcctgggagaagccagctgacaacgtgacccggggcaaggtggtgggctatgacatcaacatgctgtctgagcagagcccccagcagagcatccccatggccttcagccagctgctgcacacagccaagagccaggagctgagctacacagtggagggcctgaagccctaccgcatctatgagttcaccatcaccctgtgcaacagcgtgggctgtgtgaccagcgccagcggggccggccagaccctggccgccgccccagcccagctgcggccccccctggtgaagggcatcaacagcaccaccatccacctgcgctggttccccccagaggagctgaatggccccagccccatctaccagctggagcggcgggagagcagcctgcctgccctgatgaccaccatgatgaagggcatccgcttcatcggaaatggctactgcaagttccccagcagcacccaccctgtgaacacagacttcaccggcatcaaggccagcttccgcaccaaggtgcctgagggcctgattgtgtttgctgccagccctggcaaccaggaggagtactttgccctgcagctgaagaagggccgcctgtacttcctgtttgacccccagggcagccctgtggaggtgaccaccaccaatgaccacggcaagcagtacagtgatggcaagtggcatgagatcatcgccatccgccaccaggccttcggccagatcaccctggatggcatctacacaggcagcagcgccatcctgaatggcagcaccgtcatcggggacaacacaggagtcttcctgggcggcctgcccaggagctacaccatcctgaggaaggaccctgagatcatccagaagggctttgtgggctgcctgaaggatgtgcacttcatgaagaactacaaccccagcgccatctgggagcccctggactggcagagcagcgaggagcagatcaacgtgtacaacagctgggagggctgcccagccagcctgaatgaaggagcccagttcctgggcgccggcttcctggagctgcacccctacatgtttcatggaggcatgaactttgagatctccttcaagttcagaacagaccagctgaatggcctgctgctgtttgtgtacaacaaggatggccctgacttcctggccatggagctgaagagcggcatcctgaccttccggctgaacaccagcctggccttcacccaggtggacctgctgctgggcctgagctactgcaatggcaagtggaacaaggtgatcatcaagaaggagggcagcttcatcagcgcctctgtgaatggcctgatgaagcacgccagcgagagcggggaccagcccctggtggtgaacagccctgtgtatgtgggcggcatcccccaggagctgctgaacagctaccagcacctgtgcctggagcagggctttggaggctgcatgaaggatgtgaagttcaccagaggagctgtggtgaacctggcctctgtgtcctctggagctgtgcgggtgaacctggatggctgcctgagcacagacagcgctgtgaactgcagaggaaatgacagcatcctggtgtaccagggcaaggagcagagcgtgtatgaaggaggcctgcagcccttcacagagtacctgtacagagtcatcgccagccatgaaggaggctctgtgtacagcgactggagccggggccgcaccaccggggccgccccccagagcgtgcccacccccagccgggtgcgcagcctgaatggctacagcattgaggtgacctgggatgagcctgtggtgcggggcgtcatcgagaagtacatcctgaaggcctacagcgaggacagcaccaggcctcccaggatgcccagcgccagcgctgagtttgtgaacaccagcaacctgaccggcatcctgaccggcctgctgcccttcaagaactatgctgtgaccctgacagcctgcaccctggccggctgcacagagagcagccacgccctgaacatcagcaccccccaggaggccccccaggaggtgcagccccctgtggccaagagcctgcccagcagcctgctgctgtcctggaacccccccaagaaggccaacggcatcatcacccagtactgcctgtacatggatggccgcctcatctacagcggcagcgaggagaactacatcgtgacagacctggccgtgttcaccccccaccagttcctgctgagcgcctgcacccacgtgggctgcaccaacagctcctgggtgctgctgtacacagcccagctgcccccagagcacgtggacagccctgtgctgactgtgctggacagcaggaccatccacatccagtggaagcagcccaggaagatcagcggcatcctggagcgctacgtgctgtacatgagcaaccacacccatgacttcaccatctggagcgtcatctacaacagcacagagctgttccaggaccacatgctgcagtatgtgctgcccggcaacaagtacctgatcaagctgggcgcctgcaccggcggcggctgcaccgtgtctgaggccagcgaggccctgacagatgaggacatccctgagggcgtgcctgcccccaaggcccacagctacagcccagacagcttcaacgtgtcctggacagagcctgagtaccccaacggggtcatcaccagctatggcctgtacctggatggcatcctgatccacaacagcagcgagctgagctaccgggcctacggctttgccccctggagcctgcacagcttccgggtgcaggcctgcacagccaagggctgtgccctgggccccctggtggagaacagaaccctggaggcccctcctgagggcaccgtgaatgtgtttgtgaagacccagggcagcaggaaggcccacgtgcgctgggaggcccccttccggcccaacggcctgctgacccacagcgtgctcttcaccggcatcttctacgtggaccctgtgggcaacaactacaccctgctgaatgtgaccaaggtgatgtacagcggggaggagaccaacctgtgggtgctgattgatggcctggtgcccttcaccaactacacagtgcaggtgaacatcagcaacagccagggcagcctcatcacagaccccatcaccatcgccatgcctcctggggccccagatggagtgctgcccccccggctgagcagcgccacccccaccagcctgcaggtggtgtggagcaccccagccaggaacaatgcccctggcagcccccgctaccagctgcagatgaggtctggggacagcacccacggcttcctggagctgttcagcaaccccagcgccagcctgtcctatgaggtgtctgacctgcagccctacacagagtacatgttccggctggtggccagcaatggcttcggcagcgcccacagctcctggatccccttcatgacagctgaggacaagccaggccctgtggtgccccccatcctgctggatgtgaagagcaggatgatgctggtgacctggcagcaccccaggaagagcaatggagtcatcacccactacaacatctacctgcacggccgcctgtacctgcggaccccaggaaatgtgaccaactgcaccgtgatgcacctgcacccctacacagcctacaagttccaggtggaggcctgcaccagcaagggctgcagcctgagccctgagagccagacagtgtggaccctgcccggggcccctgagggcatccccagccctgagctgttcagtgacacccccaccagcgtcatcatctcctggcagccccccacccaccccaacggcctggtggagaacttcaccattgaaagaagagtgaagggcaaggaggaggtgaccaccctggtgaccctgcccaggagccacagcatgaggttcatcgacaagaccagcgccctgagcccctggaccaagtatgagtacagagtgctgatgagcaccctgcacggcggcaccaacagcagcgcctgggtggaggtgaccacccggcccagcaggcctgctggggtgcagccccctgtggtgacagtgctggagccagatgctgtgcaggtgacctggaagccacccctcatccagaatggagacatcctgtcctatgagatccacatgccagacccccacatcaccctgaccaacgtgaccagcgctgtgctgagccagaaggtgacccacctgatccccttcaccaactacagcgtgaccatcgtggcctgcagcggcggcaatggctacctgggcggctgcacagagagcctgcccacctacgtgaccacccaccccaccgtgccccagaatgtgggccccctgagcgtcatccccctgtctgagagctatgtggtgatctcctggcagccccccagcaagcccaacggccccaacctgcgctatgagctgctgcggaggaagatccagcagcccctggccagcaaccccccagaggacctgaaccgctggcacaacatctacagcggcacccagtggctgtatgaggacaagggcctgagccgcttcaccacctatgagtacatgctgtttgtgcacaacagcgtgggcttcacccccagccgggaggtgacagtgaccaccctggccggcctgcctgagcggggggccaacctgacagcctctgtgctgaaccacacagccattgatgtgcgctgggccaagcccaccgtgcaggacctgcagggcgaggtggagtactacaccctcttctggagcagcgccaccagcaatgacagcctgaagatcctgcctgatgtgaacagccacgtgattggccacctgaagcccaacacagagtactggatcttcatcagcgtcttcaatggagtgcacagcatcaacagcgctggcctgcacgccaccacctgtgatggagagccccagggcatgctgcccccagaggtggtgatcatcaacagcacagctgtgcgggtcatctggaccagccccagcaaccccaatggagtggtgacagagtacagcatctacgtgaacaacaagctgtacaagacaggcatgaatgtgcccggcagcttcatcctgcgggacctgagccccttcaccatctatgacatccaggtggaggtgtgcaccatctatgcctgtgtgaagagcaatggcacccagatcaccaccgtggaggacacccccagcgacatccccacccccaccatccggggcatcaccagccgcagcctgcagattgactgggtgagccccaggaagcccaacggcatcatcctgggctatgacctgctgtggaagacctggtacccctgtgccaagacccagaagctggtgcaggaccagagtgatgagctgtgcaaggctgtgcgctgccagaagccagagagcatctgtggccacatctgctacagcagcgaggccaaggtgtgctgcaatggagtgctgtacaaccccaagccaggccaccgctgctgtgaggagaagtacatcccctttgtgctgaacagcactggagtgtgctgcggcggccgcatccaggaggcccagcccaaccaccagtgctgcagcggctactatgcccgcatcctgcccggggaggtgtgctgcccagatgagcagcacaacagagtgtctgtgggcattggagacagctgctgcggccgcatgccctacagcaccagcggcaaccagatctgctgtgccggccgcctgcatgatggccacggccagaagtgctgcggccggcagatcgtgtccaatgacctggagtgctgcggcggggaggagggcgtggtgtacaaccggctgcccggcatgttctgctgcggccaggactatgtgaacatgtctgacaccatctgctgcagcgccagcagtggagagagcaaggcccacatcaagaagaatgaccctgtgcctgtgaagtgctgtgaaacagagctgatccccaagagccagaagtgctgcaatggagtgggctacaaccccctgaagtatgtgtgcagcgacaagatcagcacaggcatgatgatgaaggagaccaaggagtgccgcatcctgtgcccagcctccatggaggccacagagcactgcggccgctgtgacttcaacttcaccagccacatctgcaccgtcatccggggcagccacaacagcacaggcaaggccagcattgaggagatgtgcagcagcgctgaggagaccatccacactggatctgtgaacacctacagctacacagatgtgaacctgaagccctacatgacctatgagtaccgcatcagcgcctggaacagctatggccggggcctgagcaaggctgtgcgggcccggaccaaggaggatgtgccccagggcgtgagcccccccacctggaccaagattgacaacctggaggacaccatcgtgctgaactggaggaagcccatccagagcaatggccccatcatctactacatcctgctgagaaatggaattgagcgcttccggggcaccagcctgtccttcagtgacaaggagggcatccagcccttccaggagtacagctaccagctgaaggcctgcaccgtggccggctgtgccaccagcagcaaggtggtggccgccaccacccagggcgtgcctgagagcatcctgcccccatccatcacagccctgtctgctgtggccctgcacctgtcctggagcgtgcctgagaagagcaatggagtcatcaaggagtaccagatccggcaggtgggcaagggcctcatccacacagacaccacagaccggcggcagcacacagtgacaggcctgcagccctacaccaactacagcttcaccctgacagcctgcaccagcgctggctgcaccagcagcgagcccttcctgggccagaccctgcaggccgcccctgagggcgtgtgggtgacccccaggcacatcatcatcaacagcaccaccgtggagctgtactggagcctgcctgagaagcccaacggcctggtgtcccagtaccagctgagcagaaatggaaacctgctcttcctgggcggcagcgaggagcagaacttcacagacaagaacctggagcccaacagccgctacacctacaagctggaggtgaagacaggaggcggcagcagcgccagtgatgactacatcgtgcagacccccatgagcaccccagaggagatctacccaccctacaacatcaccgtcatcggcccctacagcatctttgtggcctggatccccccaggcatcctgatccctgagatccctgtggagtacaacgtgctgctgaatgatggctctgtgacccccctggccttctctgtgggccaccaccagagcaccctgctggagaacctgacccccttcacccagtatgagatccgcatccaggcctgccagaatggcagctgtggggtgagcagcaggatgtttgtgaagaccccagaggccgcccccatggacctgaacagccctgtgctgaaggccctgggcagcgcctgcatcgagatcaagtggatgcctcctgagaagcccaacggcatcatcatcaactacttcatctacagaagacctgctggcatcgaggaggagagcgtgctgtttgtgtggagcgagggcgccctggagttcatggatgaaggagacaccctgcggcccttcaccctgtatgagtacagagtgcgggcctgcaacagcaagggctctgtggagagcctgtggagcctgacccagaccctggaggccccaccccaggacttccctgccccctgggcccaggccaccagcgcccacagcgtgctgctgaactggaccaagccagagagccccaacggcatcatcagccactacagagtggtgtaccaggagaggccagatgaccccaccttcaacagccccaccgtgcacgccttcaccgtgaagggcaccagccaccaggcccacctgtatggcctggagcccttcaccacctacagaattggagtggtggccgccaaccacgccggggagatcctgagcccctggaccctcatccagaccctggagagcagccccagcggcctgaggaacttcatcgtggagcagaaggaaaatggccgggccctgctgctgcagtggagcgagcccatgaggaccaacggggtcatcaagacctacaacatcttcagtgatggcttcctggagtacagcggcctgaaccggcagttcctgttccggcggctggaccccttcaccctgtacaccctgaccctggaggcctgcacccgggccggctgtgcccacagcgccccccagcccctgtggacagatgaggcccccccagacagccagctggcccccaccgtgcacagcgtgaagagcacctctgtggagctgtcctggagcgagcctgtgaaccccaacgggaagatcatccgctatgaggtgatccgccgctgctttgagggcaaggcctggggcaaccagaccatccaggctgatgagaagatcgtgttcacagagtacaacacagagaggaacaccttcatgtacaatgacaccggcctgcagccctggacccagtgtgagtacaagatctacacctggaacagcgctggccacacctgcagctcctggaatgtggtgaggaccctgcaggcccctcctgagggcctgagcccccctgtgatctcctatgtgtccatgaacccccagaagctgctgatctcctggatccccccagagcagagcaatggcatcatccagagctaccgcctgcagagaaatgagatgctgtaccccttctcctttgatcctgtgaccttcaactacacagatgaggagctgctgcccttcagcacctacagctatgccctgcaggcctgcaccagcggcggctgcagcaccagcaagcccaccagcatcaccaccctggaggccgcccccagcgaggtgtccccaccagacctgtgggccgtgtctgccacccagatgaatgtgtgctggagcccccccaccgtgcagaatggcaagatcaccaagtacctggtgcgctatgacaacaaggagagcctggccggccagggcctgtgcctgctggtgagccacctgcagccctacagccagtacaacttcagcctggtggcctgcaccaacggcggctgcacagcctctgtgtccaagagcgcctggaccatggaggccctgcctgagaacatggacagccccaccctgcaggtgactggaagtgagagcattgagatcacctggaagccacccaggaaccccaacggccagatccgctcctatgagctgcggagagatggcaccatcgtgtacacaggcctggagacccgctacagagacttcaccctgaccccaggagtggagtacagctacacagtgacagccagcaacagccagggcggcatcctgagccccctggtgaaggacaggaccagccccagcgcccccagcggcatggagccccccaagctgcaggcccggggcccccaggagatcctggtgaactgggacccccctgtgaggaccaatggagacatcatcaactacaccctcttcatccgggagctgtttgagcgggagaccaagatcatccacatcaacaccacccacaacagctttggcatgcagagctacatcgtgaaccagctgaagcccttccacagatatgagatccgcatccaggcctgcaccaccctgggctgtgccagcagtgactggaccttcatccagaccccagagatcgcccccctgatgcagcccccaccccacctggaggtgcagatggcccctgggggcttccagcccaccgtgtccctgctgtggacaggccccctgcagcccaacgggaaggtgctgtactatgagctgtaccgccggcagatcgccacccagcccaggaagagcaaccctgtgctgatctacaacggcagcagcaccagcttcatcgacagcgagctgctgcccttcacagaatatgagtaccaggtgtgggccgtgaacagcgctgggaaggcccccagctcctggacctggtgcaggacaggccctgcccctcctgagggcctgcgggcccccaccttccacgtgatcagcagcacccaggccgtggtgaacatcagcgcccctgggaagcccaacggcatcgtgtccctgtaccgcctcttcagcagcagcgcccacggggctgagaccgtgctgtctgagggcatggccacccagcagaccctgcacggcctgcaggccttcaccaactacagcattggagtggaggcctgcacctgcttcaactgctgcagcaagggccccacagctgagctgcggacccacccagccccacccagcggcctgagcagcccccagatcggcaccctggccagcaggacagccagcttccgctggagcccccccatgttccccaacggggtcatccacagctatgagctgcagttccacgtggcctgccccccagacagcgccctgccctgcacccccagccagatcgagaccaagtacacaggcctgggccagaaggccagcctgggcggcctgcagccctacaccacctacaagctgcgggtggtggcccacaatgaggtgggcagcacagccagcgagtggatctccttcaccacccagaaggagctgccccagtaccgggcccccttctctgtggacagcaacctgtctgtggtgtgtgtgaactggagcgacaccttcctgctgaatggccagctgaaggagtatgtgctgacagatggcggcagaagagtgtacagcggcctggacaccaccctgtacatccccaggacagctgacaagaccttcttcttccaggtgatctgcaccacagatgagggctctgtgaagacccccctcatccagtatgacaccagcacaggcctgggcctggtgctgaccacccctgggaagaagaagggcagccgcagcaagagcacagagttctacagcgagctgtggttcatcgtgctgatggccatgctgggcctcatcctgctggccatcttcctgagcctcatcctgcagaggaagatccacaaggagccctacatccgggagaggcctcccctggtgcccctgcagaagaggatgagccccctgaatgtgtacccacctggagagaaccacatgtttgacagcgtggccgacatcagtgatgtgagcagcaatgtgaccctgaagagctacaccatgcactttgagggcctggccgacaccaagatccccaggagcggcacccctgtgtccatccgcagcaacagaagtgcctgtgtgctgcgcatccccagccagaaccagaccagcctgacctacagccagggcagcctgcacaggtctgtgtcccagctgatggacatccaggacaagaaggtgctgatggacaacagcctgtgggaggccatcatgggccacaacagcggcctgtatgtggatgaggaggacctgatgaatgccatcaaggacttcagctctgtgaccaaggagaggaccaccttcacagacacccacctgtag

SEQ ID NO: 264659 - DNA, 15609 bp, Artificial Sequence
  derived and/or modified sequence
atgaactgccccgtgctgagcctgggcagcggcttcctgttccaggtgattgaaatgctaattttcgcctatttcgcctccatatcgctgactgaatcacggggcttatttcccaggttggagaatgtcggtgcttttaagaaagtgagcattgtccctacccaggccgtttgcgggctgcctgaccgtagtaccttctgtcatagcagcgccgcagccgagtccatacagttttgcacacagcgattctgcattcaggattgcccatacaggtccagccaccccacctacaccgccttgttctctgcgggcctttcaagttgtattacaccagataaaaatgatctccatcccaacgctcacagtaactcagcctcctttattttcggtaatcataagagctgtttcagttcgcctccatctcctaagctgatggcttcttttacgctggctgtttggctgaagccggagcaacaaggagtgatgtgtgtaatcgagaaaacagtagacggccaaatagtctttaagctcaccatctcagagaaagagactatgttttactacaggacagtgaatggcctgcagcctcccatcaaagtgatgactctgggaagaatactggttaaaaaatggatccatctgtccgtgcaagtccatcagacaaaaatttcattcttcatcaacggggtggaaaaagatcataccccatttaatgcgagaaccctctctggttcgatcactgactttgcttcaggaacggtccaaattggccagtctttgaatggcctagaacagtttgtgggcaggatgcaggatttccgcctttaccaggttgccctcaccaatcgtgagattttggaggtgttctctggcgaccttcttcggctgcatgcccagtctcactgtagatgtcccggctctcatccaagggttcacccgcttgcccagaggtattgtatccccaacgacgccggagatacagccgataacagggtctctaggcttaatcccgaggctcacccgttatcctttgtaaacgacaatgatgtggggacctcatgggtttccaacgtgttcactaacattacgcagctcaatcagggagtcaccatttcagtggatttagaaaatggacagtaccaggtgttttatataatcatccaattctttagcccacagcctactgaaatccggatccaacgcaagaaagaaaatagcctggattgggaggattggcagtatttcgcccggaattgcggggcctttgggatgaaaaataacggcgacctggaaaaacctgattcagtaaactgcctgcagttatcgaacttcactccgtacagccggggcaatgtgacctttagcattttgactcccgggccaaattaccgtcctggctacaataatttttacaacacaccttctctccaagaatttgtgaaggctacacaaattagattccacttccacggccagtactatactacggagacggcagtgaacctacgccacagatactacgcagtcgatgagataacaattagcggacgttgtcagtgtcatggccacgctgataattgcgacactacgagtcagccctataggtgtctatgttctcaggagtctttcactgaaggcctgcattgcgatcggtgcctgcctctgtacaatgataaaccatttaggcagggagaccaggtatacgcatttaattgtaaaccttgccagtgcaattcccacagcaagtcatgccactacaacatcagcgttgacccatttccattcgagcatttcagaggaggagggggtgtttgcgatgattgcgaacacaatactactggcagaaattgtgagctctgtaaggactatttcttcagacaggtgggtgcagatccaagcgctatcgatgtgtgcaagccctgcgactgcgatacagtcgggaccagaaatgggtcgatcctgtgcgatcagatcggtggccagtgtaactgcaaaagacatgtgtcaggtagacaatgcaatcagtgtcagaatgggttctacaacctgcaagagctggatccagacggctgctcaccctgtaattgtaacactagcggaaccgtcgacggagatattacatgtcatcaaaacagcggacaatgtaaatgcaaggccaatgtcattggcctccggtgcgaccattgtaactttggcttcaaattcctgagatcctttaacgacgtaggctgcgaaccctgtcagtgtaaccttcacggcagtgtgaataaattctgcaacccgcactccgggcagtgcgagtgtaagaaagaggcaaaaggcctccagtgtgatacttgccgtgaaaacttctacggcctcgatgtcaccaactgtaaggcatgcgattgtgacacagccggatctctgccaggaaccgtgtgtaatgcaaagaccggccaatgcatatgcaaacctaacgtcgagggccggcagtgcaacaaatgtctcgagggaaacttctatcttagacagaataactcattcctgtgcctcccctgcaactgcgacaagactggaacaatcaatggctccttgctttgtaataaaagtaccggtcaatgcccttgcaaactgggggtcactggcctacggtgtaaccaatgcgagccacacagatataaccttacgatagacaacttccagcactgtcagatgtgtgagtgcgatagcttgggcacgttgcctgggacaatttgtgatcccatctccgggcagtgcttatgtgtcccgaaccgacagggccgtagatgtaatcagtgccagcccggcttttatatctccccaggtaatgcgacggggtgtcttccttgtagctgccacacgacgggcgcagtgaaccacatctgtaactcactgacagggcagtgcgtttgccaggacgctagcatcgccggtcaaagatgcgaccagtgcaaagatcattatttcggcttcgatcctcagacaggccgatgccagccctgtaactgccacctctccggcgctctcaatgaaacctgtcatcttgttactggtcaatgcttttgcaaacagtttgtcactggaagcaagtgcgacgcctgcgttccgagcgcgtctcaccttgacgtcaataatctgctcgggtgcagcaagactccatttcagcagccacctccaagaggccaggtacaatcctcatcagctataaacctgtcgtggagcccccctgactcccccaatgcccactggctcacttactctcttttacgggatggcttcgaaatctacactacagaggatcagtatccgtatagcatacagtacttcctggacactgacctgctcccctacacgaagtacagctactacattgaaacgaccaatgtgcatggaagcacacgaagcgtagccgtaacctacaaaactaaacccggcgtgcccgagggtaacctgaccctctcctacattattccaattggatcagattctgtgacccttacttggactaccctttcaaatcagagcggcccgatcgaaaagtacatcctcagctgcgcaccgctggctgggggccagccctgtgtctcttatgaaggccacgagactagcgccaccatctggaatctggtgcccttcgccaaatatgactttagcgtgcaggcctgcaccagcggagggtgccttcactcccttcccataacggtgaccacggcacaggcacctcctcagaggctgtctccacctaagatgcagaaaatctcctcaacagaacttcatgtggaatggtctccaccagctgaactgaatggcatcatcatccgatatgaactgtatatgaggcggctcagaagcaccaaggaaacaacatctgaggaatctcgagtatttcagtcttccggttggttgtctccgcattcttttgtcgaatccgctaacgaaaatgcccttaagccccctcaaaccatgacgacaatcaccggcttggagccctacacaaagtatgagtttcgagtgctggccgtaaatatggcaggctctgtgtcttccgcctgggttagtgaaagaaccggagaatccgcaccggtcttcatgataccaccctcagtgtttccattgtcttcttatagcttgaatatctcatgggagaaaccggccgataacgtgacccggggaaaggtggttggctacgacataaacatgctaagcgagcagagccctcagcaatctattcccatggcattttcacaacttctgcataccgccaagagtcaggaactgtcatatacagttgagggtctcaaaccttaccgaatctatgaattcaccattactttatgcaactccgtagggtgtgtgacaagtgccagcggcgcaggacagacgctggccgcagctcctgcccaactccgcccacctctagtgaaaggcattaattctactactatccacctcagatggtttccccccgaagagctgaacgggccgtctcctatttaccagctggaacgacgggaatcctcactcccagccttgatgaccacaatgatgaaggggatcaggttcataggaaacggttactgtaaattcccctcttcgacccatccagtcaatactgattttactggaataaaggcgtcttttcgcacaaaagtgcctgagggcctcatcgtctttgctgcttctcccggcaaccaggaggagtactttgcccttcaactgaagaagggccggctatattttctgtttgatccgcagggatcacctgtcgaggttactacgactaatgaccacgggaagcagtactctgacgggaaatggcatgaaattatcgccatacgccatcaggcttttggacagataactcttgacggaatctacaccggcagtagtgcaatcctgaatggcagtacagtgattggcgataacaccggagtgttcctgggtggacttccccgctcatacaccatcttgagaaaggaccctgagatcattcaaaaggggttcgtggggtgtctgaaggacgtgcacttcatgaaaaattataatccctcggccatttgggagcctttggactggcagtcaagcgaggaacagatcaatgtgtacaactcttgggaggggtgccctgcctctttgaatgaaggcgcacaatttttgggggccggctttcttgagctccatccttacatgttccacggcgggatgaatttcgagatctcttttaaatttagaaccgaccagctgaacggtctcctcctcttcgtttacaataaggatggccccgacttcctcgccatggaactaaaatcaggaatattgacctttcggctgaacacctctttggcgtttacccaagtcgatttacttctaggcctatcctactgcaacggtaaatggaacaaggtcattattaagaaggagggcagtttcattagtgcaagtgttaacggattaatgaaacatgcatctgaatcaggagaccagcctctcgtggttaatagtccagtatacgtcggtggtatcccccaggagctgctgaacagttatcagcacctgtgtctggaacagggctttgggggatgcatgaaggacgtgaagttcacgcgtggcgccgtggtgaatctcgcatccgtctcttccggggccgtccgggtcaatttggatgggtgcctctccaccgactcagctgtgaattgcagaggaaatgattcgatcctggtataccagggaaaggaacagagtgtgtatgaggggggtctccagccatttactgagtacctgtacagggtgatcgcctctcatgagggcgggagcgtgtactccgactggagccgggggagaacgaccggtgcagcacctcagtccgtgcctactccgtctcgtgtgagatcacttaacggttacagtattgaggtcacttgggatgagcccgtggtgcggggggtgatcgagaagtacattttgaaagcttattcggaagacagtacacgacctcctcggatgccgagcgcgtcggccgaattcgtgaatacctctaacctgacagggatcctcactggactcctgccttttaaaaactacgcggtcacgctgaccgcttgcaccctggcaggctgcacggaaagtagtcatgccctgaacatcagtacgccccaggaggcaccccaagaggtccagccccctgtcgcaaaatccctcccaagcagcctgctactgtcatggaaccccccgaagaaggcaaatgggatcatcacccagtactgcctttacatggatgggcgactgatttattctgggtcagaggagaattatatcgtgaccgatcttgccgtgtttaccccacatcagttcctgctcagtgcttgtacacatgtgggatgcactaactcctcttgggtccttctgtacaccgcccagttgccccccgaacacgttgattcccccgtgttgacagtacttgactcacgcactatccatatccaatggaagcaacctaggaagatatccggaatactagagcgctacgtcctctatatgtccaatcacacgcatgacttcacaatttggagtgtgatttataattctacagagctttttcaggatcacatgctgcagtatgtcctacctggaaataaatacctgattaaactgggtgcgtgtacaggcggaggctgcactgtgagcgaggcttctgaagccctgaccgatgaggacatacctgaaggggtaccggcccctaaagcccacagctacagtcctgattcgtttaacgtgtcctggacagagcccgagtaccctaatggggtgattacttcttacggcctttacttagatgggattcttatacataactcatccgagctcagctaccgtgcctacggctttgcaccttggtcgttacacagttttcgtgtccaagcatgtactgctaaaggttgcgccctcggcccattagttgagaataggacgctggaagcaccccccgaaggaaccgtgaatgtcttcgtaaaaactcaaggatcccgcaaagctcatgttcgctgggaggcacctttccggcccaacggcctgctcacccactccgttctgttcactgggatcttttacgtagatcctgtcggcaataattacacacttttgaatgtcactaaagtaatgtattcaggcgaggagacaaacttgtgggtgttaatcgatggattggttcccttcacgaactataccgttcaggtgaacattagtaattcacagggctccttgataacggatcccatcacaattgccatgcccccaggggcacctgatggtgtgctaccgcctcggctctccagtgccactcctacctcactgcaggttgtgtggtcgacacccgctcgtaataatgctcctggaagtccaaggtaccagcttcaaatgcgatctggcgattcaacccacggcttcctcgaactcttctccaacccatcagcaagcctgagttacgaagtgtcagatcttcagccctacaccgaatatatgtttcgtcttgtcgcttccaatgggtttgggagcgcccactcatcatggattccatttatgactgccgaggataaacccggacccgtagtgcctcccattctgttagatgttaagtcacgcatgatgctcgtaacctggcagcaccctcggaagtctaatggggtgatcacccactacaatatttatctccatggaaggctgtacctgcgcacaccaggtaatgtgaccaattgtactgttatgcatctgcacccttataccgcctacaaattccaggttgaggcttgcacctctaagggttgcagcctgtcccctgaaagccaaactgtgtggacactgccaggggcacctgagggcataccaagccctgagttgttcagcgacactcccacctcagtgataatctcatggcagccgcccacccatcctaacggtctggtggagaactttaccattgagcgccgggtgaagggaaaagaagaagtcactactttggttacattgccccgctcccacagcatgcggtttatcgataagacctcagctctttctccctggacaaaatacgagtatcgcgtgctgatgtcaactctacatggcggaaccaactcttctgcttgggttgaagtgaccaccaggccttcgagacccgccggggtgcagccccctgtggtaacagttctggaacccgatgctgtccaggtgacatggaaaccccccctgattcagaacggggatattctgtcctatgaaattcacatgcctgatccacatatcacactaaccaacgttacctcagctgtgctttcccaaaaagttactcacttaataccctttaccaactactctgttacgattgtcgcctgcagcgggggcaacggctatctgggaggatgtacggagagtctgcccacctatgtgactactcaccctactgtacctcaaaatgttgggccactgtctgttatccccctcagtgagtcctacgtagtgatcagctggcagccgcctagcaagccgaacgggccaaacctgagatatgagctgctgcggagaaagatccagcagcccttggctagcaaccctccggaggacttgaatcggtggcataatatctactcaggaactcaatggctctatgaagacaaaggactctctagattcaccacctacgagtacatgttgttcgtccataatagtgtgggtttcacaccaagccgggaagtgaccgtaacaactttagcggggctgcccgagcggggagctaacctgactgccagcgtcctgaaccacaccgccatcgacgtgaggtgggccaaacctacagtgcaggacctacagggggaggtggagtactatactctcttctggtcctccgccacaagcaatgacagcctcaaaattttgcccgatgtaaacagccatgttatagggcacctcaagcccaataccgagtactggatttttattagcgtctttaatggagtgcatagtataaatagtgccggcctccacgccaccacctgtgacggagaacctcaggggatgcttccacccgaagtggtaatcatcaactcgaccgcagtgcgggtcatttggacgtccccctccaatccaaacggggtggtcacagaatactccatctacgtaaataataaactgtacaaaactggcatgaacgtcccagggagctttattctgcgagatctctcccccttcaccatctatgatatccaagtggaagtatgtactatttatgcctgcgtgaagtccaatggtacacaaattactactgtggaagatactccatcagacatacctacgccaactatcagaggaatcaccagcaggtctcttcagatcgattgggtgagcccccggaagcccaatggtatcattttaggatacgaccttctatggaaaacatggtacccgtgtgcaaagacccaaaaacttgtacaagaccagagtgacgaactgtgtaaagctgttcggtgtcagaagccagagtcaatctgtggccatatatgctacagctctgaggctaaggtctgctgcaatggtgtcctgtacaacccaaagcctggccaccggtgttgcgaagaaaagtatattccatttgtactgaactccaccggggtttgctgtggtggcaggatccaggaggcacaacctaaccaccagtgctgttcaggctactacgctcggatcctaccgggggaggtctgctgcccagatgagcaacacaatcgtgtctctgttggcatcggggacagctgttgcgggcgaatgccctacagtacgtccggcaatcagatctgctgcgcaggacgtctgcacgacggccacggtcagaagtgctgcggaaggcagattgtgtcaaatgatttagagtgttgcggcggagaagaaggagtggtgtataaccgactccccggcatgttttgttgtggccaggactacgtcaatatgtcagatacgatatgttgttccgccagttcaggggaaagcaaagcccatattaagaaaaacgacccagtgcctgtgaaatgctgcgagacagagcttatcccgaaatctcagaagtgctgcaacggcgtgggatacaatccactcaagtatgtgtgttccgacaaaattagcacagggatgatgatgaaggagacaaaggagtgccggatcctgtgtcccgcctcaatggaggccacggagcattgcggacgctgtgacttcaacttcacaagtcacatctgcacggttatacgcggttcccataattccacaggcaaagcctccattgaagagatgtgttcaagcgcggaagagaccatccacactggcagtgtgaatacgtattcttacacggatgttaacctcaaaccctacatgacgtacgagtataggatctccgcctggaactcttatggccgcggattatctaaggctgtgcgggctaggacaaaggaagacgtgccccagggggtgtcgcctccaacttggaccaagattgacaatctggaggacaccatagttctgaactggcgtaagcctatccaaagcaatgggcccataatttattacattctcttgagaaacggtatagagcggttccggggcacctctttatctttctcggataaggaaggcatccagccttttcaagagtacagctaccagctgaaggcttgcacggtggccggatgcgcaaccagcagcaaggttgtggccgcaaccactcagggtgtgccagagtctattctaccaccttccatcacagccttgtccgcggtggcccttcacctgtcttggagcgtccccgagaaaagtaacggcgtaatcaaggaataccaaattcgccaggtgggtaaagggctgattcatacagatacaaccgaccgtcgccagcataccgtcaccggcctgcagccctacaccaactattcctttaccctgactgcctgcacatcagcaggttgcaccagctcagagccctttctgggacagactctccaggctgcacctgagggcgtgtgggttaccccccgccacattataattaactctacaacagtggagctttattggtcactcccagagaaacccaatgggctggtgagccagtaccagctgtcacgtaacggcaatcttctgttcctcgggggtagcgaagaacagaatttcacagacaagaaccttgagcccaacagccgatacacgtataagctcgaagtgaagaccggggggggttcctccgcaagtgatgattatatcgtacagactcccatgtcaacacctgaagagatctaccccccttacaacattaccgttataggtccttattcaatttttgtagcctggatcccacccgggatcctgatcccagaaatcccagtggagtacaatgtgctattaaatgacggatctgtaactcctctcgcctttagtgttggccaccatcagtccactcttttagagaacctgaccccattcactcagtatgagatcaggattcaggcatgccagaacgggagctgcggggtctcttccagaatgtttgtgaagacacccgaagccgcacccatggacctgaattcaccagtgctcaaggcattaggctccgcttgcatagagattaaatggatgcctcctgagaagcctaacggcatcatcatcaactacttcatctacaggagacctgcaggcatcgaggaggaatcggtgctgttcgtgtggtccgagggggcactggaattcatggacgagggcgatacgctgcgccccttcactctttacgaatacagagtccgcgcatgcaattcgaagggcagcgtcgaatcactgtggagcctgacgcagaccctggaagcacctcctcaagatttcccagctccctgggcccaagccacttcagcccacagcgtcttactcaactggaccaaacccgagtctcctaatggaatcatctcgcattatagggtggtgtaccaggaaaggccagatgaccccactttcaatagccccaccgtgcacgcatttactgtgaaagggacgtctcaccaagcccacctgtacggccttgagcccttcaccacatacaggatcggagtggtggctgccaatcacgcgggcgagatcctgtcaccatggacactaattcaaactttagaatcctctccttccggcctgcggaatttcatagtggagcagaaagaaaatggacgcgccctgctcctgcagtggagtgagcctatgagaacaaacggagttatcaaaacatataatatctttagcgacggcttcctggaatattccggtctgaatcgccagtttcttttcaggcgactggatccgtttaccctatatacactgaccttggaagcctgcaccagggccgggtgtgctcattcggcccctcagccactttggactgacgaagccccgcctgactcccaactggctcctacagtacattctgtgaaatccacctccgtggagttgagctggtccgagccagttaaccctaatgggaagatcattagatatgaagtgatcagaaggtgtttcgagggtaaagcctggggaaaccagactatccaggccgatgaaaaaattgttttcaccgagtataatacggagaggaacacatttatgtacaacgataccggtctacagccttggacgcagtgtgagtataaaatatatacttggaactctgcggggcatacctgttcatcatggaatgtggtgaggacccttcaggccccccccgaggggctttcgccaccagtgatcagttatgtgtccatgaatcctcagaagctgcttatttcttggatcccaccagagcagtccaacggaatcatacaatcttaccgtttgcagcggaatgagatgctgtatccattctcctttgaccctgtcacatttaactacaccgatgaggagcttctccccttctccacctactcttatgccctacaagcgtgtacgagcggaggctgtagcacctccaagcccacatcaattaccaccttagaagctgcgcccagcgaagtctcaccgcccgacctgtgggccgtgtccgccacccagatgaacgtgtgctggtcccctcccactgttcaaaatggaaagatcactaaatatctagttcgctatgacaacaaggaaagcctggctggccagggattgtgcttactcgtgtcccatctgcagccttattcacaatataatttttctttagtggcctgcaccaatgggggctgcacagctagcgtcagtaagtccgcatggacgatggaagctctccccgaaaacatggatagtcctaccctacaggtgacaggatccgaatccatagaaattacatggaaaccaccgagaaaccctaacggacaaatacgctcctacgaacttcggcgcgatggcacgatcgtgtatactggactggaaacccggtatcgggatttcacacttacaccaggggtggaatattcttatacagtaacagcttcgaactcccaagggggaattttgagtccactggtaaaagacagaacctcacctagcgccccatccggcatggaacccccgaaattacaagcccgtggaccacaggagattctagtgaactgggacccaccagtgaggactaatggggacatcattaattacacgctgttcattcgggaactgttcgagagggagactaaaattatccacattaacaccacccataactcattcggtatgcagagttacatcgtgaaccagctgaagccgtttcaccgatacgagattcggatccaggcctgtacaacactgggttgcgcctcttcagactggacgtttattcaaactcctgaaattgctcccttaatgcagcccccaccgcacctggaagttcagatggcccccgggggcttccagcctaccgtgtctctcttatggacaggtcctctgcagcctaatggcaaagtcctctactatgaattatatcgtcgacagattgccacacagcctcggaaatctaaccctgtcttaatttacaatggatcctctacaagcttcatcgacagcgagctattgccgttcacggaatatgaatatcaagtgtgggcggtcaacagcgctggtaaagccccatcatcctggacctggtgtcgcacaggacctgcccccccggaggggctgcgggccccaacattccacgtgattagctcaactcaggcagtggtcaacatatcagcgcctggcaagccaaacggtatcgtgagcctatatcgtctgtttagctcctctgcgcacggtgccgagaccgtcctatcggaaggcatggccactcagcagaccttacacggcctgcaggccttcactaattatagcattggcgtagaagcctgtacttgcttcaactgttgttctaaggggcctactgctgaactgagaacccaccccgcaccaccaagtgggctgtcctccccacaaataggcacgcttgctagcaggaccgcgagcttccgatggtcccccccgatgttccctaatggcgtgatacatagctatgagctgcaattccatgtcgcctgcccccctgattcagcactcccttgcaccccttcacaaattgagacgaagtacacagggctgggtcagaaggcctccctaggtgggcttcaaccttatactacatataaactacgggttgtggcccacaatgaggtgggatccaccgctagcgagtggataagtttcacgacccagaaggaactgccacagtaccgcgctccattctccgtggatagcaatctctccgttgtatgtgtgaactggtccgacacatttttactgaacggccagttaaaggagtacgttcttacagacggcggacgaagggtttattcaggcctggatactaccctctatattccccgaacggctgacaaaaccttcttcttccaggtaatatgtacaacagacgagggcagtgtaaagactcctctcatacagtacgacacatcaactggccttgggttagtgttaactacgcccgggaaaaaaaagggatcacgaagcaagtcaacagaattctatagcgaactatggtttatcgtgttgatggctatgctaggcctcattcttctcgcaatcttcctgtccctgatccttcagcgaaagatccacaaggagccatacatccgggagcgaccaccactggtccctctgcagaagcggatgtcaccacttaacgtctaccctcccggcgaaaatcacatgggacttgctgacaccaaaatccccaggtctggaacccctgtgtctatcaggtctaaccgatccgcttgcgtgctgcgaatcccatcgcaaaatcagacctctctgacatattcacagggcagtctgcatagatccgtcagccagctcatggatattcaagataagaaggtgctaatggacaacagcttatgggaagccataatgggccataattccggtctgtacgtcgacgaagaggatctcatgaacgcaattaaagacttttcgagcgtaaccaaggaacgtaccaccttcacagatacccacctgtag

SEQ ID NO: 264660 - DNA, 15681 bp, Artificial Sequence
  derived and/or modified sequence
atgaactgccccgtgctgagcctgggcagcggcttcctgttccaggtgattgagatgcttatttttgcttattttgccagcatctccctgacagaatcacgcgggctgttcccaaggctggagaatgtgggagcctttaagaaggtgagcatcgtgcccacccaagccgtttgcggcctgccagacaggagtactttttgtcattcttccgcagctgctgagtccatacaattctgcactcagcggttctgtattcaggactgcccctacagaagtagtcaccctacctacaccgccctattttccgctggcctcagctcctgtattacccctgataagaacgacctccaccccaatgcccattcgaattctgcatccttcatcttcggaaatcacaagtcctgtttcagttcgcccccctcccctaagctgatggcctcctttacactggctgtctggttaaaacccgaacagcagggagttatgtgcgttattgagaagaccgtcgacggccagattgttttcaagctgactatctccgaaaaagagaccatgttttattaccgaaccgtgaacggacttcagccacccatcaaagtgatgaccctcggtagaatcctcgtaaagaaatggatccacctctcggttcaggtacaccagactaagatcagcttttttatcaatggcgtagaaaaggaccacactccatttaatgctcggaccctgtccgggagcatcacagattttgcctccggaactgtgcagattgggcagagtttaaatgggctcgagcagtttgtcgggagaatgcaagactttcggctgtatcaggtagctttgactaatagagaaatcttggaagtattttcaggggatctgctaaggctgcatgctcagtcacattgcaggtgcccaggttcgcaccctagggtgcaccctttagctcagaggtactgcatacctaacgacgccggcgataccgccgacaacagagtgtctcgcttaaatcctgaggcgcatccactttcgtttgtgaacgacaacgatgttggcacctcttgggtgtcaaacgtgttcacgaacatcacccagctgaaccagggcgtgaccatttctgtggacctggaaaatgggcagtaccaggtgttttatataataatccaattcttcagtccgcaacctactgaaattcgtatccagcggaaaaaagaaaacagtctggattgggaggactggcagtatttcgcacggaattgcggtgcttttggcatgaagaacaacggcgacttagaaaagcctgatagtgtgaattgcctccagctgtccaacttcacaccctacagtcggggtaacgttacatttagcatcctgaccccagggccaaactaccgtcccggatacaacaacttttataacacaccttctcttcaggagttcgtcaaggcaacgcagattaggttccactttcacggccagtattataccacagagactgccgtgaacctccggcacaggtactatgccgtagacgagatcaccatttcaggacggtgccagtgtcacggccacgcagacaattgcgataccacctcccagccctatcgctgtttatgcagtcaggaaagctttactgaggggctgcactgcgaccgctgcctccccttgtataatgataaaccgtttcggcagggggaccaggtatatgctttcaattgtaaaccatgccagtgtaattcacactccaagtcatgccactacaacatctctgtggacccctttcctttcgaacacttcaggggcggtggcggggtttgcgatgattgtgaacataataccacaggacgaaattgtgagttgtgcaaggactacttcttccggcaggtcggagcggatcctagtgcgatagatgtgtgtaagccatgcgattgtgacaccgtggggacccggaatgggtccatcctgtgtgatcagatcggaggccaatgcaactgcaaacgccacgtgagcggacgacagtgcaatcagtgccagaacggcttctataatctccaggagctggaccccgacggctgctccccatgcaattgcaacacctccggaaccgtcgacggagatattacctgccatcagaattccggacaatgcaaatgcaaggcgaatgtgattggactgaggtgtgaccactgcaatttcggcttcaagtttctgcgtagctttaatgacgtgggatgtgagccatgtcaatgcaatctgcatgggtcagtgaacaaattctgtaacccacatagcggccagtgtgaatgtaagaaggaagccaagggtctacagtgcgacacttgccgtgagaatttttacggactggacgtcacaaactgcaaggcatgtgactgcgacactgctggctccctgcccggcacagtttgcaacgccaagacgggtcagtgcatttgcaaacccaacgtggaaggcagacaatgtaataagtgtttagagggaaatttctacctaagacagaacaacagttttctgtgcctgccatgcaattgtgataaaaccggtacgatcaatggcagcctcctgtgcaacaaaagcacaggtcagtgcccttgcaaactcggagtgacgggattgaggtgtaatcaatgcgagcctcacagatataatttaacaattgacaactttcaacattgccaaatgtgtgaatgtgactctctgggaaccctgcccggtaccatttgcgatcccatctcggggcaatgcctctgcgtaccgaaccggcagggccgcagatgtaatcaatgtcaaccagggttttatataagccccggcaatgccacgggatgtctgccgtgctcctgtcacaccaccggagccgtaaaccatatttgcaactctttgacgggacagtgtgtctgccaggatgcctctatcgctggtcaacggtgtgatcaatgcaaagatcactattttgggtttgacccacagacgggtaggtgccagccctgcaactgccatctttctggtgctctgaacgagacctgtcacctggtgaccggacaatgcttttgtaagcagttcgtgaccggttctaaatgcgatgcatgcgtaccctcagcctctcatcttgatgttaataatctgctcgggtgctccaaaactccctttcagcagccacccccccgcggccaggtgcaaagttcaagcgctatcaatctctcttggagtcccccggatagtccgaacgctcactggctgacctattctcttttaagagatggcttcgagatatatactactgaggatcagtacccatactctatccagtactttctggatacggacttgctgccttacacgaagtattcgtactacattgaaaccacaaatgtccatgggagcacaagatctgtggctgtaacttataagaccaaaccgggcgttcccgagggaaacttaaccttgagctacataatccccattggtagcgactccgtgactcttacttggaccactctgtctaaccagagtggacctatcgaaaagtacatactgagttgtgctccattagccggcggccagccatgcgtgtcatacgaagggcatgaaacctcagctaccatctggaatctggtgccttttgctaagtatgatttctcagtgcaggcctgcacatctggcggatgtcttcactccctccccatcactgtgaccaccgcccaggctcctccacagagactctcccctcccaaaatgcagaaaatcagtagtactgagttacacgtggagtggtcgccccccgctgagctgaatggtataattattaggtatgagctgtacatgagaaggctccggtctacaaaagagaccacgtccgaggaatctagggtctttcagtcgtctggatggttgtctccgcattcattcgttgaatctgccaacgagaatgccttgaagcctccccagactatgacaaccatcaccgggctggagccgtacaccaagtatgaattccgtgtgttggctgtcaatatggccggttccgtaagctcagcttgggtttcagaacggacgggagaatccgctcctgtgttcatgatcccgccaagcgtgtttcccctttcatcttatagcctgaacatttcctgggaaaagcccgctgacaacgtgacaagaggcaaggtggtggggtacgacattaacatgctgtccgaacaaagtcctcaacagagcataccaatggcttttagccagctgctgcacactgccaaatcacaagagctctcttacacagtcgagggactgaaaccgtacaggatttacgagtttacaatcaccttgtgtaattccgtcgggtgcgttaccagtgcctccggtgccggccaaaccctagccgctgctcctgcccaactcagaccccctttagtgaaaggcataaattcaacaacaatccacctccgctggttcccacctgaggagctgaatggccctagcccaatttaccagttagagcgaagggaatccagcttgccagccttgatgaccacaatgatgaagggtatcagattcataggcaacggatattgtaaatttccatccagtacgcatcccgtcaacaccgatttcaccggcattaaggcgtcctttagaaccaaggtgccggaaggtctgattgtcttcgcagcctcccctgggaatcaggaggagtattttgcactacaactgaagaagggtcgattgtacttcctcttcgacccacagggatcccccgttgaggtcactactaccaacgatcacggtaaacagtacagtgacggaaagtggcatgaaataatcgcaattaggcaccaggctttcggccaaataactctcgatggtatttacacgggttcatctgccatccttaacggttcgactgtgattggagataacacaggcgtctttttagggggactcccacggtcctacactatcctaagaaaggatcccgaaattattcagaaaggcttcgtgggttgcctcaaagacgttcattttatgaagaattataacccgtctgcaatttgggagccactcgactggcaatcttccgaggaacagatcaacgtatataacagctgggaggggtgtcccgcgtccctcaatgaaggggcccagttcctgggcgctggctttctggagttgcatccatacatgtttcacggcgggatgaatttcgagatcagctttaagtttcgcacagaccagctcaatggcttgctgctgttcgtgtacaacaaagatggaccggatttcctggccatggaactcaaatctggcatcttgaccttccgactgaatacctctctcgcatttactcaggtcgacctgcttctgggcctgtcctactgcaatgggaaatggaataaagtgattattaaaaaagaaggaagcttcattagcgctagtgtgaatggcctgatgaagcatgctagcgaaagcggagaccagcccctggtggtgaattcccccgtctacgtgggcggaatcccccaggaactgctgaacagctaccagcatctttgcctggagcagggctttggtggctgcatgaaagatgtgaaatttacacggggggccgtagttaatttggcgagcgtaagcagcggcgctgtgcgagtgaatctggacgggtgtctgtccactgatagcgccgttaattgcaggggtaatgactccatcctggtctatcaggggaaagaacagtccgtgtacgagggaggcctgcagccattcactgagtatctgtacagggtgatcgcctcccacgaaggaggcagcgtgtattctgattggtctcgcggacggaccactggcgcagcaccccagtccgtccctactcctagtagggtgcggagcctgaatgggtactccatagaagttacatgggatgagcctgtggtgcggggtgttatcgaaaagtatatacttaaagcatactccgaggatagcacacggccacccaggatgcctagtgcctcagctgagttcgtgaacactagcaatttgaccggaatcttgaccggcctgctcccgtttaaaaactacgcagtaactctcactgcttgcaccctcgctggctgcactgagtcttctcacgcactgaacatttctacgcctcaagaggccccccaagaagttcaacctccagttgctaaatccctaccctcctctttactgctgtcctggaaccctcccaagaaggccaatggaattataactcaatactgcctttatatggacggcaggcttatttattccggttcagaggagaattacattgtgaccgatctggccgtgttcactccacatcaattcttgctgtccgcttgcacccacgtcgggtgtacaaactctagctgggtcctcctgtatactgctcaacttccaccggaacatgtcgattcaccggtgctgaccgtgctagattctcggactattcacattcaatggaaacaaccaaggaagatctctggcattcttgaacggtacgtcttgtacatgtccaaccacacccacgacttcacaatctggagtgttatttacaatagtaccgagctatttcaagaccatatgcttcagtacgtgttacctgggaacaaatatctgattaaattaggagcctgcactggggggggctgcacggtgtctgaggcctccgaagccctaaccgatgaagatatccccgaaggcgtccccgccccgaaggctcacagttactccccagacagcttcaatgtgagctggaccgagcccgagtacccaaacggcgtgatcactagctacggattgtatttagatgggattctaatccataactcatccgaactcagctaccgcgcctacggtttcgctccttggagcttacacagctttcgagtgcaggcttgcaccgccaagggctgtgccctgggccccctcgtcgaaaacaggacccttgaagccccgcctgagggcaccgttaacgtgttcgtgaagacacagggaagtcgaaaggcccacgttcgatgggaggccccatttcgaccgaacgggcttcttacacacagcgtgcttttcaccggaatattttatgtggatcccgttggcaacaactataccctactgaacgtgactaaggtcatgtatagcggcgaggaaacaaatttgtgggtcttaattgacgggttagtaccatttacaaattatacagtacaggtcaatatctccaactcacagggctccctgattaccgaccctattaccatcgccatgccccccggggcaccggatggggtgctccccccaagactcagttctgccactcccacatcgctgcaagtggtgtggagtacacctgctagaaataatgctcctgggagccctaggtatcagttgcagatgaggtcaggggactccacccatggttttctggaactcttttcgaacccatctgcttcattgtcgtacgaagtgtccgacttgcaaccttatacagaatacatgtttcggttagtggcttctaacgggtttggtagcgcgcactctagttggatacccttcatgacggcagaggacaaaccagggcctgtcgtgccccccatccttctggatgtgaagagtaggatgatgctagttacgtggcaacacccacggaagagcaacggcgtgataactcactacaatatctacctgcacggacgcctctacctcaggacgccaggcaatgtgacaaattgtaccgtaatgcacttgcacccatatacagcctacaagttccaggttgaagcgtgtacctcaaaaggatgcagtctcagtcccgaaagtcaaactgtgtggacccttcctggcgcacccgaaggtatcccatcccctgagttgttcagtgacactcccaccagtgttatcatcagctggcagcctcctacacaccccaatggtctcgtagagaatttcaccatagaacggcgcgtcaagggcaaagaagaggtgacgacccttgtgaccctgcccaggagtcacagcatgcgcttcatcgataaaaccagtgcattaagtccttggacaaagtacgagtatcgcgtgctgatgtccacactgcacggcggcactaatagtagtgcctgggtagaggtgaccacgcgcccctcacgacctgccggcgtgcaacccccagtggtgaccgtgctggagcctgacgcagttcaggtcacgtggaagccacctttaattcaaaacggggacattctgtcatacgaaatccacatgcctgaccctcacatcacgctgacaaatgtaacgtcagctgttctcagccagaaagtcacccatctcatcccatttaccaactacagcgttactattgtggcctgctccggagggaacggctatctcggcggttgtacagagtctctgccaacatacgtgaccacccacccaacagtgccacaaaatgtgggcccactgtccgtgatccctcttagtgaatcttatgtagtgattagctggcagcccccgtccaaaccaaacggacctaacctgcgttacgaactgcttagaaggaaaatacagcagccgctcgcatccaacccccccgaagacctgaatagatggcataacatatattccggcacccaatggctgtacgaggataaggggctcagtcggtttaccacatacgagtacatgttgttcgttcacaacagcgtcggcttcactccatctcgtgaagtgaccgtgacaaccctggcggggcttccagaacgcggcgcaaatctaaccgcaagtgtgttaaaccatacagctattgacgttagatgggctaaacccacagttcaagatcttcagggcgaagtggagtattataccctgttttggtcctcggctacatcaaatgatagcctgaaaatcctcccagacgtgaacagccatgttatcggtcatttgaagcctaacaccgaatactggatctttatatctgtgtttaatggagttcactcaattaattcggctggcctgcatgcaacaacatgcgacggagagcctcagggcatgctgccccccgaggtcgtcatcataaatagcacagctgtacgcgtgatttggactagcccttctaatcctaatggcgtcgtgacagagtacagcatctacgttaacaataagttatataagaccggcatgaacgtgccgggatcttttattcttagggacctgagccccttcactatctacgacatacaggtcgaggtgtgtacaatttatgcctgcgtcaaaagcaatggcacgcagatcaccaccgtcgaggacactccctctgatattcctacccctacaattcgcggaattacttcgaggtccttgcagatcgactgggtcagccctagaaagcccaatgggattatactgggctatgatctcctgtggaaaacttggtacccctgcgccaagactcagaaactcgttcaagatcagtccgacgagctctgtaaggcggtccgttgccagaagccagagagcatctgtggacatatctgctatagctccgaggcaaaggtgtgttgcaacggcgtcctctacaatccgaagccaggtcacagatgctgtgaagagaaatatattccattcgtgctcaatagcacaggcgtttgctgcggaggacgcattcaagaggctcaacctaaccatcaatgttgctctggatattatgcgcgcatccttccaggagaagtgtgttgcccggatgagcagcacaacagggtatccgtgggcattggcgactcttgttgcgggaggatgccttatagtacatccgggaaccaaatttgttgcgccggcagattgcatgacggtcatggccaaaagtgttgcggtagacagatcgtgagcaatgacctcgagtgttgcggcggcgaagagggcgtagtgtataaccgcctgcccggcatgttttgctgcggacaggactatgtgaatatgtctgataccatttgctgttccgcttcctctggagagtccaaggctcacatcaaaaagaacgacccagtcccagtaaagtgttgcgaaactgaactgatcccaaagtcccagaaatgctgtaatggtgttggctataaccccttgaagtatgtgtgttcagataaaatctctaccgggatgatgatgaaagaaaccaaggagtgcaggatactctgcccagctagtatggaggccactgagcattgcggacgctgcgacttcaattttaccagccatatctgtaccgtgattcgcggcagccacaattccactggcaaggcttctatcgaggaaatgtgcagctccgctgaggaaactatccacaccgggagtgtaaacacctatagctacaccgacgtgaacctgaaaccctacatgacctatgaataccgtattagcgcgtggaacagttacggtcggggcttgagcaaagcagtgcgcgcccgcacaaaggaggacgtccctcaaggagtgtcaccgccgacatggacaaaaatagacaacctcgaggataccatcgtcctgaactggagaaagccgatccagagcaacggacctattatctattatattttgctgcgcaatggtattgagcggttccgagggacatcactctcgtttagcgacaaggaaggcatacagccttttcaggaatactcctaccaactgaaggcatgcaccgtggcagggtgtgccacgtctagcaaagtggttgctgccaccacccagggcgtacctgagtctatcttgccaccatccattacggcgttgtcagccgttgcgctacatttatcttggtcggtgccagaaaaatccaacggcgttattaaggaatatcagatccgccaggtcgggaagggcctcattcacaccgacaccaccgaccgccggcaacacacagtgacagggctgcagccatacaccaactactcctttaccttgacagcctgtacgtcagcaggatgcacttccagcgaaccgtttctcggtcaaaccttacaggccgcacccgagggcgtgtgggttactccaagacacatcatcattaatagcacaacggtcgaactgtactggtcattacctgagaagccaaacggcctggtctctcagtatcagctgtccaggaatggtaacctgctattcctcggaggatctgaagaacagaacttcacggacaaaaatctggaacctaattctaggtacacttataaactggaggtgaaaaccgggggcggctctagtgcttccgacgactacatcgttcagaccccaatgtcaaccccagaggaaatttatcccccatataacatcacagttatcggcccctattcaatcttcgtggcgtggataccccctggtattctgatcccggagatacccgtggagtacaatgtcctgctaaatgacgggtcagttactcccttggccttcagtgtggggcatcaccagagtactctcctggagaatcttaccccatttactcagtacgaaatcagaatacaggcatgccaaaacgggagctgcggagtgagctctcgcatgttcgtcaaaactcccgaagctgcccccatggatctgaacagccccgtgctgaaagccctggggagcgcttgcatcgaaatcaaatggatgccacctgagaagcctaatggtatcattataaactacttcatttaccgcagaccagcgggaatagaggaagagtcagtcctttttgtctggtccgagggtgccctggagttcatggacgagggggatacactccggccctttaccctgtacgaatatcgggttcgggcgtgcaactctaaggggagtgtcgaaagtttgtggagtctcacccagacacttgaggcacccccacaggacttccccgcgccatgggcgcaggccaccagcgcccacagtgtcttactgaactggaccaaaccagagtcaccaaacggcatcataagtcactacagagttgtttaccaggaacgcccggatgaccctacctttaactcacccaccgtccacgccttcactgtaaaaggaacttctcaccaagcccacttatacggtctcgaaccattcacaacataccggatcggagttgtggctgcaaaccacgcaggcgagatcctttccccatggaccctgatacagacactcgagtcctcaccttccggccttcgtaattttatcgttgaacagaaggagaacggcagagccttactgctgcagtggagcgaacccatgcgcactaacggcgtgatcaagacatacaatattttttcagacggctttcttgagtactctggacttaataggcaattcttgtttcggcgcctcgaccctttcacgctgtacactcttactctggaggcttgtacacgggcggggtgcgcacattcagcccctcagcctctctggacagacgaggcccctccagactctcagctagcccctacagtgcattccgtgaagtcaacgtcagttgaattaagttggtctgagcctgtgaaccctaacgggaagatcatcaggtatgaggttatcagaaggtgttttgagggtaaagcctggggcaaccagactattcaggccgacgaaaagattgtttttactgagtacaacaccgagcggaatacctttatgtacaacgataccggactacagccatggacccaatgcgaatacaaaatttatacatggaacagtgctggccatacttgtagttcctggaacgtcgtgagaaccttacaggcgcccccagaaggactctcacctcctgtgattagctacgtgtctatgaatcctcaaaagctgctgattagctggataccaccagagcagagcaatggtatcatccagtcatacagattgcaaagaaacgagatgctgtatcctttttcttttgatcccgttacctttaactacactgacgaagaactgctgcccttttctacttatagttatgcactgcaagcctgcaccagcgggggctgctcaactagcaagccaactagcataacgaccctggaggccgccccttcagaggtgtctcccccggacctgtgggccgtgtcggctacacagatgaacgtgtgttggtccccgccaacggtccagaatggcaaaatcacaaaatatctcgtaaggtacgataacaaagaatcccttgcgggacaagggttatgtctactagtctcccacttgcaaccatacagccaatacaatttttcgttggttgcttgcacaaatggcggttgcaccgcttctgtgtccaagtcagcctggaccatggaggcgctccccgaaaatatggacagcccgactctacaggtgactgggtccgagagcatcgaaattacctggaagcctcctaggaaccccaacggccagatccgcagctacgagctgaggcgggatggcacgattgtctacacgggactagagacacgatacagagacttcaccctcacaccaggggtggaatactcgtacacggttactgcatctaactcacagggtgggattctgtcacctctggtaaaggaccgtacttcgccaagcgctccctctgggatggaaccaccaaaacttcaggctcgtggacctcaagaaatcctggtcaattgggatccgccagttaggacaaatggggatattattaattacaccctgtttatccgtgagctgttcgagcgagaaactaaaatcattcacattaataccacccataacagctttgggatgcagtcatacatcgttaatcagctgaagccctttcatcgctatgaaattcgaattcaagcctgtactacattgggatgcgccagctccgactggacctttatccagacacctgaaatcgcacctctcatgcagccccctccccaccttgaggtgcaaatggcccccggcggattccaaccaacagtgagtcttttgtggaccggcccacttcaacccaacggtaaggtgctctactacgaactctacaggagacagatcgcaacgcagcccagaaagtctaatccagtactaatatacaatggatcttcgacttcgttcatcgattcagaattactaccattcaccgaatacgaatatcaggtctgggccgttaactccgcgggcaaagctcccagtagctggacatggtgtcgcactggacccgcacctcctgaagggctgcgggctccaacgtttcacgtgattagttctacacaagctgtggtgaatatatcagccccaggcaagcctaatggcattgtgtctctatacagactgttctcatcatccgctcatggagcggaaactgtgctctctgaaggaatggccacccaacagactctccatggactgcaggccttcacaaattattccatcggtgtcgaagcatgtacatgctttaattgctgctcaaagggccccacagctgagcttcgaacccatcctgccccgccgtctggcctcagcagcccgcagattggaaccctggctagccggacagcctccttccggtggagcccgcccatgttccctaacggcgtgatccacagctatgagcttcaatttcacgtcgcctgtcctcctgattctgcgttaccctgcacaccaagccagatcgaaacaaagtacaccgggctagggcagaaagctagtcttggcggattacagccgtacaccacgtacaagctacgcgtggtcgctcataatgaggtgggttccactgcatctgaatggatctcttttactacgcaaaaagagctcccccaatatcgagctcctttctcagtcgactctaatctctcagttgtttgtgtgaattggtcagacacctttcttctgaacggccaacttaaagaatacgttctcaccgacgggggtcgaagggtgtatagtggactcgacacaacattatatattcccaggactgcagataagacctttttcttccaagtgatttgtaccacagatgagggatctgttaagactccacttattcagtacgataccagcaccggactgggcctggtactcactacacccggcaagaaaaagggatcccgcagcaaatctacggagttttacagtgagctgtggttcatcgtcttgatggcaatgctcggactgatcctgctggcgatatttctgtcgctaattttgcagcgtaaaattcacaaagagccatatatccgggagcggccaccacttgtccctctgcaaaaaaggatgagcccactcaacgtataccctccgggggagaatcacatgttcgactcagtggctgatattagcgacgtcagctccaacgtcacattgaagtcatacacgatgcatttcgaaggactggcagataccaagatcccaaggtccggcacaccagtgagcatccggagcaatcgttcagcatgcgtgttaagaattcccagtcagaatcagacatccctgacttattctcagggctctcttcaccggagtgtcagccaactgatggatatccaggataaaaaggtgctgatggataattccctctgggaagccataatggggcataactcaggcctttacgtggacgaagaggatctgatgaacgctattaaagatttctcgagcgttaccaaagaaagaactaccttcactgatacgcacttatag

SEQ ID NO: 264661 - DNA, 15609 bp, Artificial Sequence
  derived and/or modified sequence
atgaactgtccagtcctgagtctgggctcgggttttctttttcaggttatcgaaatgctgatattcgcttactttgccagtatttctctgacggagtccaggggactcttcccgaggctggagaacgtgggggcttttaaaaaggtaagcatcgttcctacgcaggcggtgtgtggcttgcctgataggagcactttttgtcacagttctgccgcagccgaaagtatacaattttgcacacagcggttctgtattcaggactgcccataccggtcctcacatcccacctacaccgctttgttctctgcagggttatcgagctgcatcacacccgacaaaaatgatctccaccctaatgcccactctaattcagctagctttatcttcgggaaccacaagagctgctttagttcccctccctcccctaagctcatggcttctttcacgctggccgtgtggctgaagcccgaacagcaaggagtgatgtgcgtgatcgagaaaacagtcgatggtcaaattgtttttaagttgaccatctcagaaaaggagactatgttctattacaggaccgtaaatgggctccaacctccgataaaggttatgaccctgggcagaattctagtgaagaagtggattcatctaagtgtacaggtgcaccagactaagattagtttcttcatcaacggggtggagaaggaccacaccccattcaatgccaggacgctgtccggttctattacagactttgcatcagggacagtgcagattgggcagtcactcaatggtctggaacagtttgtgggtcgaatgcaggacttccgactgtaccaggtggctctcactaatagagagatcctcgaggtcttctctggcgacctgcttaggctccatgcgcagtcgcactgccggtgtcccggtagtcatcctagggtgcatcctctggcccagcggtattgcattcctaatgacgcaggggataccgcggataaccgagttagccgcctgaaccccgaggctcaccctctatctttcgtcaacgataatgacgttggaacctcttgggtgtccaatgtgttcaccaacataacccagctcaatcagggtgtgaccataagtgtggaccttgaaaatggacagtatcaagttttctacataatcatccagttcttttctccccagcctaccgaaatcagaattcagcggaaaaaagagaattccctagattgggaggactggcagtattttgctagaaattgtggtgctttcggaatgaagaataatggggacctcgagaagccggattccgtgaattgtcttcaactgtcgaactttacaccttacagcagaggcaatgtaacattcagtatacttacccccggacccaactacaggcctgggtacaacaacttctataacacaccctctctgcaggagttcgttaaagcaacccaaataagatttcacttccacggccagtattacactacagagacagccgtgaacttgcgccatcggtactacgctgttgatgagataaccatctccggaagatgtcagtgccacggacatgcggataactgtgacacaacctcacagccttatcgctgcctttgttcccaggaatcttttactgaaggcctgcactgcgaccggtgtctgccactgtacaatgacaagccattcagacaaggggaccaagtgtacgcatttaactgcaagccgtgccaatgcaacagtcacagcaagtcctgccactataacatctccgtcgatccttttccattcgaacactttcggggagggggaggcgtctgcgatgactgtgagcacaatactactgggagaaactgtgagctctgcaaggattacttcttccgtcaggtgggcgctgacccctctgctatcgatgtgtgtaagccttgtgactgcgacacggtcggaacacgaaatggaagtatcctatgtgatcaaataggagggcagtgcaactgcaagcgtcatgtatctggacgacaatgcaaccagtgtcaaaatggtttctacaacctgcaggagctcgacccagacggttgctcaccttgcaattgtaacacaagtggtacagtggacggcgacattacttgccatcagaactccgggcaatgtaagtgtaaggcaaacgtaatcggtttacgctgcgaccattgtaatttcggcttcaagttcctgagatcatttaacgacgtgggctgcgaaccttgtcagtgcaatctacacggctcagtaaacaagttttgcaatccccacagtggccagtgtgagtgtaagaaagaggcaaaagggttgcaatgcgacacttgcagagaaaatttttatggccttgacgtgacaaactgtaaagcgtgcgactgtgacactgcgggttccttgccgggaactgtctgcaatgccaaaactgggcaatgtatttgcaagcctaacgttgagggcaggcaatgcaataaatgcctggaggggaacttctatctaaggcagaataacagctttttgtgccttccttgcaactgcgataaaacaggaaccatcaacggcagcctcctttgtaataagtcaaccgggcaatgtccatgtaagttgggggtcacgggactgagatgcaaccagtgcgagccccaccgatataatctcaccatcgacaatttccagcactgccaaatgtgcgagtgtgatagcctggggacactgccaggaacaatttgcgatcccatctccggccagtgcctgtgtgtgcccaaccgacaaggtcgcaggtgtaaccagtgccagcccggattttatataagccccggaaacgcaaccggttgcctaccatgttcatgccacaccacgggcgcagtcaaccacatatgcaacagtttgacaggccagtgtgtgtgccaggacgcctccatcgcaggacagagatgtgaccagtgtaaggatcattacttcggattcgatcctcaaactggacggtgtcaaccatgtaactgtcaccttagtggcgctttgaatgagacatgccaccttgtcactggccagtgcttttgtaagcagttcgtgacaggaagcaaatgtgacgcctgtgtgccgtcagcctcccatctcgatgtaaataacctgctgggatgtagcaagacccccttccaacaacccccaccccgtggccaggtgcagtcttcttccgcaataaatctatcctggtcgccccctgattcacctaatgcccactggctgacttatagcctgcttcgggatggattcgagatatacactactgaagatcaatacccgtattcgattcagtatttcctggatactgatttactgccatataccaagtacagctactacattgagacaaccaatgttcacggtagtacacgttctgtggcagtcacttacaaaaccaagccaggagtgcccgaagggaatctgacgttaagctacataattccaatcggcagtgattccgtgactctcacatggactacactgtccaatcagtccggacccattgagaaatacattctgagctgcgctcctctcgccggaggtcagccctgtgtgagttacgaggggcatgaaacttcggccactatctggaatctggtaccctttgccaagtacgactttagcgtgcaagcatgtacctcaggcggatgtctccactccctgcccatcactgttaccaccgcccaggctccacctcagaggttgtccccacctaaaatgcaaaagattagctctaccgagctgcacgtggaatggtccccacctgccgagctgaacggcataataatccggtacgagctgtacatgaggcggctgcgaagtaccaaggaaactactagtgaagagagcagggtcttccagtcctctgggtggctgtcgcctcacagctttgtggagagcgctaatgagaacgctttgaaacctccgcagacaatgactacgatcaccggcctcgaaccctacacaaaatacgagtttcgagttttggccgtcaatatggccggaagtgtgtccagtgcttgggtatccgagaggacaggcgaaagtgcaccagtgttcatgatcccaccctcggttttcccactcagcagctatagcttgaatataagttgggaaaaacccgctgataacgtgacccgaggcaaggtcgttggctatgacatcaacatgttatccgagcaatctccacagcagtcaatccctatggcattctctcagctactgcacacagccaagagtcaggaactgtcctacacagtggaaggactgaaaccttaccggatttacgagttcactataaccctatgtaactccgtcgggtgcgtcacgagcgcctccggggcaggacagaccctcgccgcagccccagctcagttacggccacctctagtgaaaggtatcaactcgaccacaatccatctgagatggttcccgcctgaggagctaaatggtcccagtccaatttatcagttggagcggagagagtccagccttccggcactcatgaccacgatgatgaaagggatacgttttatagggaacggctactgtaaatttccttccagcacgcaccctgtgaataccgacttcacagggattaaggcttccttccggaccaaagtacccgaaggattgatcgtgttcgccgcttcgcctggcaaccaagaagagtacttcgccctccagctcaaaaaggggagactctacttcttgttcgatccccaaggtagccccgtggaggtaaccacgactaacgatcacggaaagcagtacagcgacggcaagtggcacgaaatcatagccattaggcaccaggccttcgggcaaattacactggacggcatttacactggttcctccgcaatcctgaatggttcaaccgtaattggcgataatactggggtgtttcttggagggctccctagatcgtataccattctgaggaaggatccggagatcattcaaaagggatttgtcggatgcctcaaggatgtccactttatgaaaaattataacccatctgccatctgggagcccctagactggcagtcttccgaagaacaaataaatgtgtataacagctgggagggttgccccgctagcctaaacgagggggctcagtttctgggagcaggttttctcgaactgcacccgtatatgttccatggcggtatgaacttcgagatctcatttaaattccggaccgaccagcttaacgggcttctgttgtttgtatacaacaaagacggcccagatttcctcgccatggaactgaaaagcggtatcctcacgttcagacttaatacttccctggccttcacacaggttgatcttttactggggttgtcttattgtaacgggaaatggaacaaggtcataataaagaaggaggggtccttcatctctgccagtgtgaatggcttaatgaaacatgcctccgagtctggtgaccagcctttggtggtgaactccccagtctatgtcggcggaataccacaagaactcctgaacagttatcagcatctctgcctggagcagggcttcggagggtgcatgaaggacgttaaattcacccgaggcgctgtggttaaccttgcatcagtgtcaagcggagcagtccgcgtgaacttggacggttgcttaagcacagactccgctgttaattgccggggaaacgacagtattcttgtctatcagggcaaagagcagtcagtttacgaaggcggtcttcagcccttcaccgaatatctgtatcgtgtaatagcctcacatgagggtggcagtgtgtatagcgattggtctcggggtcgtactactggcgctgctccacagtccgtaccgacgccttcaagagtccgctctttgaatggatacagcattgaggttacttgggacgaacctgttgtgcggggagtcattgagaagtacattttaaaggcctatagcgaagactcaactaggccgcctcggatgccaagtgcctcagctgaatttgtgaacacttccaatctgactggaatcctcaccgggctgctcccatttaagaactacgccgtgacactcaccgcctgcacacttgctgggtgtacagagagctctcacgcgctaaatatttcaaccccccaagaagccccacaggaggtgcagccaccggtggccaaatctctgccatcttccctcttactttcatggaatcctccaaagaaggcaaacggcatcattacacagtactgtctctacatggacggcaggctcatctattccgggtcagaagaaaactatatcgtcactgaccttgcagtgtttactccccaccagttccttcttagtgcctgcacccacgtggggtgtacgaattcctcctgggtgctgttatatacagcccaactgccaccggaacacgttgactccccagtgctcacagttttagacagccgaaccattcatattcagtggaaacagcccagaaagatctctggtatcctggagaggtatgtgctgtacatgagtaaccatacacatgattttacgatttggagtgtgatttataacagcacagagctgttccaggaccacatgctgcagtacgtcctcccaggaaataaatacttgatcaagttaggtgcgtgcacggggggaggttgtacagtgtccgaagcaagcgaggctttaaccgatgaagatatccctgagggagttccagcgcctaaagcacattcttatagccccgattcctttaacgtaagctggacagaaccagagtaccccaacggggtcattacttcctatggcctttatcttgatggcatcctgatacataacagcagtgagttgagttacagggcctatggctttgcaccctggagtctgcacagttttcgggtccaagcatgcaccgccaaagggtgtgcgcttggacctctcgtagaaaaccgtaccctggaggctccacctgaggggacagtgaacgtttttgtaaagacccagggctcccggaaggcccacgtgcgatgggaggccccattcaggcccaatggcctgctcacccactccgttctattcaccggaatcttttatgtggacccagttggaaacaattacactctcctaaacgtgaccaaggtgatgtatagcggtgaggagacaaatctatgggtgctgatcgacggactggttcctttcaccaactatacagtccaggtaaacatcagcaatagccaaggtagtctgattactgatccaataaccatcgccatgccgcctggagcacctgacggtgtgcttcctcctcgcttatccagtgccacgcctaccagtctgcaggtcgtttggagcactcctgcccgtaacaacgctccagggtctcctaggtaccagctgcagatgcggagtggcgacagcacccacgggtttctagagcttttcagtaatccatcagcgtctctttcttatgaggtgtcagacttgcagccatatacagaatacatgtttaggctcgtcgcctcgaacggatttggtagtgcccactctagctggattccttttatgacagccgaagataaacccggacctgttgtgcccccaatcctgctggacgtgaagtccagaatgatgctagtcacgtggcaacatcccaggaagtcaaatggcgtcattacacattacaacatctacctgcacggcagactgtacttgaggacaccaggaaatgtcacaaattgtaccgtgatgcacctgcacccttatacggcgtataagttccaagtagaggcatgtacctcgaagggctgctccctgtcgcctgaatctcagactgtgtggactttgcccggagccccagaagggatcccttcacctgagctgtttagcgacacacctacatctgtgataatatcatggcagccaccaacccacccaaatgggctagtagagaattttacaatcgagcggcgtgtgaaaggaaaggaggaggtcaccacgctggtcacactgcccaggtcccattccatgcggttcatcgataagacctcggccctcagcccttggaccaagtacgaataccgagtcttaatgagcaccctgcacgggggtacgaactcatcagcttgggtggaggtgaccacgcgccctagtcgaccagctggagtgcaacctccagtcgtgactgtgttagagcctgatgctgttcaggtgacgtggaaacctcccctgattcagaatggtgatatcctttcttatgagatacatatgccagacccccatatcacattaaccaatgtaaccagtgctgtgctttctcagaaagtgactcacctgataccctttacaaactattctgtcacaatagttgcctgttccggcggaaatggctatctcggaggatgcacagaatcactccctacatatgttaccactcatcccactgtcccccagaacgtaggccctttgtccgtcatccctttgtcggaaagttatgtagtgatcagttggcaaccgcctagcaagccaaacggacccaacctcaggtatgagctcctccggcgaaaaattcagcagcccctcgcctcgaatccgcctgaagatctgaacaggtggcacaacatttactctggaacacaatggctgtatgaagacaagggactctctaggttcacaacttatgagtatatgctgttcgtacacaatagcgtgggctttactccatcccgtgaggtaactgtgaccactctggccggtttaccggaacgtggtgccaacctaacagcgagtgtgcttaaccacaccgccatagacgtgagatgggccaagccaaccgttcaggatctgcagggcgaagtcgaatattataccctattttggtctagcgctacatctaatgattcactgaagattctgccagacgtcaattcacacgtcattggccatctgaaacccaacaccgaatattggatttttattagcgtgttcaatggggtgcactctatcaacagcgccggactgcacgctactacatgtgacggagagccacaaggaatgttacctccagaagttgtcatcattaatagtaccgctgtgagagtgatatggacctcaccaagcaacccaaatggagtagttactgagtatagtatttacgtgaacaacaagctttataagactggaatgaatgttcccggaagctttattctcagggatctgtcaccattcactatctatgacatacaggtggaagtgtgcacaatatatgcctgtgtgaaatctaatggcacccagattactaccgtggaagacacaccatcagacatcccgacaccaactatccgaggcataacatcacggagcctccagatcgattgggtgtcccctcgcaagccaaacggcatcattcttggatacgacctgctctggaagacctggtacccctgtgctaaaacccagaagctggtacaggatcaatccgacgaactgtgcaaggcagtcaggtgtcagaaacccgaaagtatctgcggtcacatatgctattcatctgaggccaaagtgtgctgcaatggtgtactgtacaacccaaagccaggacatcgatgctgcgaagagaagtacatacctttcgtgttgaatagtacaggcgtatgctgcggtggaagaatacaggaagcccaacccaatcaccagtgctgctcggggtactatgctcggatcctccctggtgaagtctgctgtcctgacgaacagcacaatagggtgtccgtaggtataggcgactcttgctgcgggaggatgccctattcaacatcaggaaatcaaatttgttgtgctggcagacttcacgatgggcatggacagaaatgttgtgggagacaaatcgtctcgaatgacctagagtgttgtggcggagaagagggggtggtgtacaaccgtcttcctggaatgttttgttgcggccaggactacgtgaacatgtccgatacaatctgttgttctgcttcctcaggcgaaagcaaagcgcatatcaagaaaaacgaccctgtgccagttaaatgctgcgaaaccgagctgattccaaagtctcagaaatgctgcaacggggtggggtataaccctctgaagtacgtgtgtagcgacaaaatttcaactggaatgatgatgaaggaaacaaaggagtgccggatcctgtgtcccgcaagcatggaagctacagagcactgtggtagatgtgacttcaacttcacatcccacatttgcacagtgataagggggtctcacaactctacaggaaaagcttcaatcgaggaaatgtgttccagcgcggaggagacaatccacaccggctctgtgaacacatatagttatacagacgtgaatctgaagccttatatgacttatgaatacaggatctccgcctggaatagttacggcagagggctgtccaaggcagtccgcgctcgaaccaaggaggatgtgccccagggcgtaagcccacccacatggaccaagattgacaatctggaggacacaattgtcctgaattggcgaaagcccattcagagcaacggtcccataatctattatatccttctgcgaaacgggatcgaacgctttcgcggaacatcactcagtttttccgataaagaagggattcagccctttcaggagtatagttatcaactgaaggcttgtaccgtcgccggatgcgcaacttccagcaaagtggtggccgcaactacgcaaggcgtcccagaaagcatacttccgccaagtattaccgctctgtccgctgtggcactgcacctctcttggtccgtgccagagaaatcgaacggtgtcattaaggagtaccaaatcaggcaggttggcaagggactgattcacacagacacaaccgataggaggcagcacacagtcaccggcctccagccctatactaactactctttcaccctcacagcctgtacctccgccggatgtacatcctcagagcctttcctgggtcaaaccctccaggccgctcccgagggcgtgtgggtcacccccaggcatattataatcaattcaacgactgtggaactatattggtctttgccagaaaagcctaacgggctcgtatctcagtaccagctgagccggaacggcaatctcctatttctcggtggatcagaggagcagaactttacggataaaaacctcgaacctaactccaggtacacatacaagcttgaggtcaaaacaggcggtggctcttcagcctccgatgattacattgtccaaacccctatgtcaacacccgaggagatataccccccttacaacattaccgtcattggcccttattcaatcttcgtggcttggataccccctggaatattgatccctgaaatccccgtggagtataatgtcctcctcaacgatggaagcgtaacaccacttgcattcagtgtgggacaccaccaatccacactgttggaaaacctgacaccttttacccaatacgagatcaggatacaagcctgccaaaacggttcctgcggagtctcaagccggatgtttgtgaagacgcctgaggcagcacctatggacctcaacagtcctgtgctgaaagccctgggatccgcatgtattgagataaagtggatgcccccagagaaaccgaatggcatcatcataaattattttatatatcggcgaccagcaggtatagaagaagagagtgtgctgttcgtatggtccgagggcgctctggaatttatggacgagggcgatacactgcgtcctttcaccttgtatgagtaccgcgtgcgggcatgtaattccaaagggagcgttgagtctctgtggtccttaacacaaaccctcgaggcccctcctcaagactttccagccccatgggctcaggctacttctgctcacagtgtgctgctgaattggaccaagccagagagccccaatgggataattagccactatagagtcgtgtaccaagagcggcctgatgacccgacctttaattctccaaccgtacacgcatttaccgtgaagggcaccagtcaccaggcacacctgtacgggttagagcccttcacaacctataggatcggtgtggtggctgcaaaccacgccggagagattctctctccttggacactgatccaaacactggaaagctccccctctgggctgagaaacttcatcgtggaacaaaaggaaaatggacgtgccttgctcctgcagtggagcgagcccatgagaactaacggagttatcaaaacatacaacattttctccgacggcttcttagaatactcggggttgaatagacagttcctgttcaggagactggacccatttacgctttacacgctcaccttagaggcttgcactcgcgcaggctgtgcgcattctgcccctcaaccactgtggactgatgaagcccctcccgattcacagctggccccaacagtgcatagtgtgaagtcaacctccgtggagctgtcctggagtgaacccgtgaacccgaacggcaagatcattaggtacgaagtgatccgtaggtgctttgaaggtaaggcatggggaaaccaaaccattcaggcggacgaaaagatcgtcttcacggagtacaacacagaaagaaacactttcatgtacaatgatacaggactccaaccttggacacagtgtgagtataagatttatacatggaatagtgctgggcacacctgctcctcatggaatgtggttaggacgcttcaggcccctcctgaggggctcagtccaccagtgatctcatacgtctctatgaatccacaaaagctattgatctcctggatcccccctgagcagagcaatgggatcatccagtcctatcgcttacagcgaaacgagatgctatacccgtttagctttgatccagtaacgtttaattatacagatgaagagctgttgccttttagtacatattcctacgcccttcaggcatgcacatctggtggctgttccacctctaaaccaacttccatcaccacgctggaagctgcaccatcggaggtgtcacctcctgatctgtgggccgtttcagctacacagatgaacgtgtgctggagtccaccgactgtgcagaatggtaaaatcaccaagtacctcgttaggtacgacaacaaggagtcgctcgccggacaaggactgtgtcttctggtgagccatctgcagccctactcacagtataacttttctctcgtggcttgcaccaatggtgggtgcaccgcaagtgtgagcaagagtgcatggacgatggaagctctaccggaaaatatggattcccccactctgcaggtgactgggagcgaatcaatcgaaatcacttggaaaccacctagaaaccccaatggccaaatccgctcgtatgagcttaggagggacgggaccatcgtttacacgggcttggagacgcgttacagggactttactctaaccccaggagtggagtacagctacacagtcactgcctccaattcccagggtggaattctgtccccactggttaaagaccgcaccagcccgtcagcccctagcggaatggagccaccaaaattgcaagcgcgaggccctcaggagatcctggtgaactgggatcccccagtgaggaccaacggtgatataatcaactacacgctatttattagggagcttttcgagagagagactaagatcatacatatcaataccacacacaattctttcggcatgcaaagttatatagttaaccagttgaagccattccacaggtacgagattcgtatccaagcctgcaccaccctaggctgtgcatcttccgattggactttcatccagacccctgagatcgcacctctgatgcagcccccaccacacctggaagttcagatggctccgggaggctttcagccaaccgtctcgctactgtggaccggccctctccagccaaacggcaaagtattgtactacgagctttatagacggcagattgcaacgcaaccgcgaaaatcaaaccccgtcctgatctacaatggtagcagcacctcttttattgattccgagctgctgcccttcaccgaatacgagtaccaggtgtgggccgtcaacagcgctgggaaagcgcctagctcatggacttggtgcagaacaggtcctgcccctcctgaaggcctcagggcaccaacatttcatgtaatttcgagcacccaggccgtggtgaatatcagcgcccctggaaagcccaacggcattgtttcattgtatcgtctcttttcttcttcagcccacggagcagagaccgtgctgtctgagggcatggccactcagcagacactgcacggtctgcaggcattcacaaactattctatcggagtggaagcatgcacatgttttaactgctgtagtaaaggcccaactgcggagctgaggactcatccagctccaccttctggtctcagttctccgcagataggtacccttgcctcacggaccgccagttttagatggtccccacccatgttccccaacggagtaatccactcatatgaattgcagtttcatgtcgcttgtccaccagacagcgcactcccctgtacaccatctcagatcgagacgaaatatacagggctcgggcagaaggccagcctcgggggactgcagccctatactacatacaaactgagagttgtggcccacaacgaggtgggctctactgcctccgagtggatcagctttacgacccaaaaggagctgcctcagtacagggccccattttctgtggattccaatttgagcgtagtgtgcgtgaactggtcagatacttttctgctgaatggccaactgaaggagtatgtgctcacagatgggggtcgcagggtatattctggccttgacacaaccctatatatcccgaggacagcagataagacatttttctttcaagttatatgcactaccgatgagggttcagtcaagacacccctgattcagtatgacaccagcacaggactggggctggttttaaccaccccagggaagaagaaaggctcgcggtcaaaaagtacggagttttacagcgaattgtggttcattgttcttatggctatgctcggcttaattttgctggccatctttctgtccctgatcttgcaaaggaagatccacaaggagccctacattcgggagcgcccacctttggtgcccctgcagaagagaatgagccctcttaatgtgtaccccccaggcgaaaaccacatgggcctggccgataccaagatccccaggagcggcacgcctgttagtatccgaagcaaccgaagcgcttgtgtgctgagaatcccttctcagaaccagaccagccttacatactcccagggctcgttgcataggtctgtctctcaattgatggacatccaggacaagaaggtactgatggacaatagtttatgggaagcaatcatgggccacaactctggcttgtacgtggacgaagaagatctgatgaacgctataaaggatttctcttcagttacaaaagagagaaccactttcaccgatacacacctctac

SEQ ID NO: 264662 - DNA, 15681 bp, Artificial Sequence
  derived and/or modified sequence
atgaactgccctgtgctcagcctggggagcggctttctattccaggtaattgagatgctgattttcgcctatttcgccagcattagcctgacagaatcaagaggcttatttcccaggttggagaacgtcggtgctttcaaaaaggtgtctattgtacctacccaggcggtttgcgggttgcctgaccggagcacattctgccactcatccgctgccgcagaaagtattcagttttgcacccagcggttttgtattcaggattgcccctaccgatcaagccaccccacatatacggccttattttcagcaggtctatcctcatgtatcacccccgataagaacgatctccatcctaacgctcacagtaactccgcctcctttattttcggaaaccataagtcttgtttctcatcacctcccagtcctaaattaatggctagttttactctggcagtgtggctgaagcccgaacaacagggcgttatgtgcgtcattgagaagaccgtggacggccagatagtgtttaagcttaccatttccgagaaagagactatgttttattatagaactgtgaacggcctccagcccccaattaaggtgatgacactgggtaggattctggttaaaaaatggattcatctgtccgtgcaagtacatcagaccaaaatatcctttttcataaatggtgtggaaaaggatcataccccatttaatgccagaacactatcaggtagtatcacggatttcgcgagcggaaccgttcaaatcggccagtcattaaacgggcttgaacagttcgttggtcgcatgcaggattttaggttgtatcaagtcgcgctgaccaatcgagagatccttgaagtgttctcaggtgaccttctaagactccacgcacagagtcactgtagatgtcctgggtcacatcctagggtgcatccactcgcacagcggtattgtattcccaatgatgccggtgatacagccgataacagggtctcacggctcaaccctgaagctcatccactgtcattcgtcaatgataacgacgtgggaaccagttgggtaagtaacgtcttcacgaacatcacccagttaaatcagggagtcactatcagcgtagacttagaaaacgggcagtatcaggttttttacattatcatacagtttttctccccacagcctactgagatacgaattcagcggaaaaaggagaacagtctggactgggaggattggcaatacttcgcacgtaactgtggtgcctttggtatgaaaaataacggcgatctcgagaaacctgattcagtgaactgtcttcaattatccaattttactccatattcccggggaaacgtgactttctctatcctgacccctggccctaactaccggcctgggtacaataatttttataatacccccagcttgcaggaatttgtgaaagctacccagattagatttcacttccacggccagtactatacaaccgaaacggcagtgaacctgcgtcacagatattatgcagttgatgaaattaccatttctggcagatgccagtgtcacggacacgccgacaattgtgatactacgtctcagccatatcgatgcctctgctctcaggaaagcttcactgagggactccactgtgatcgttgcttgcccctctacaatgacaaaccttttagacaaggcgatcaagtctacgcgtttaactgcaagccttgtcagtgtaactcccactcaaaatcatgtcactacaacatatctgtggatccattccccttcgagcattttagagggggagggggtgtctgtgatgactgcgaacacaacaccacaggacgaaattgcgagctctgtaaggactatttttttcgccaagttggcgcagacccaagcgcaatcgatgtgtgtaagccctgcgattgtgatactgtaggaaccagaaatggtagcatcctttgtgatcaaatcggcggacagtgcaattgcaaacgccatgtgagtggtagacaatgtaaccaatgccagaatggtttctataatctgcaggaactggaccctgacggctgttcaccatgtaactgtaacacctccggaaccgttgacggagacattacatgtcatcagaattcaggacagtgtaagtgcaaagctaatgttataggtctccgctgtgaccattgcaactttggatttaagtttctaagaagttttaatgacgtagggtgcgaaccgtgtcaatgtaatcttcacggctccgtgaataaattctgcaacccccactccggacagtgcgagtgtaaaaaggaggcgaagggccttcagtgcgacacgtgccgggaaaatttctacgggttggatgtgacaaattgcaaggcctgtgactgcgacactgccggatccctgccgggaacagtttgcaatgcaaaaacgggccagtgcatttgcaaacctaatgtcgagggacgacagtgcaacaaatgtttggaaggcaacttctacctgcggcagaataacagctttctttgtctgccttgtaactgcgataaaacaggcaccattaatgggagccttctttgtaataaatccactggccagtgcccatgtaaactcggagtgactggcctgaggtgcaaccaatgtgagcctcaccgatataacctgaccatcgataatttccaacactgccagatgtgtgagtgcgattctcttggaacactgcctggcaccatctgtgatccaatatccgggcagtgtctctgtgtgcctaacagacaggggagacgatgtaaccagtgccaaccgggtttttatatatcccctggcaacgccaccggctgtctcccctgctcctgccataccaccggggctgtgaatcatatctgcaattccttaactggacagtgtgtatgccaggacgcctcaatcgccggacagcgctgcgatcagtgcaaagatcactatttcgggtttgatcctcagactggacggtgtcagccatgtaattgccacctgtccggtgccttaaacgagacatgtcatctggtcacagggcagtgcttctgtaagcaattcgttactgggtccaagtgcgatgcttgtgttccatccgcatcacatttagacgtgaacaatctgctgggttgcagcaaaaccccattccagcagcctcctcctcgtggtcaggtccaatcatcctctgccattaacctgtcttggagtccacctgattcccccaatgcccattggctaacatacagcctgctgcgcgatgggttcgagatttatactaccgaggatcagtatccatattctattcaatacttcttggacacagacttgttgccttatacaaagtacagttattacatcgagacaaccaatgtacacggttctacacgaagtgtcgctgtgacatataaaactaagcctggtgttcctgaaggcaacctcactctgtcatacattataccgattggtagcgattctgtcaccctgacttggacaaccctgtccaatcaatccggacctattgaaaaatacattcttagctgtgctccgctggctggtggccagccttgtgtgtcatacgaaggacacgagactagtgcaacaatttggaacctcgttcctttcgccaaatatgactttagcgtgcaggcttgcaccagtgggggatgcctgcattctctccccataactgtcaccactgctcaggctccccctcagagactgagcccaccaaaaatgcaaaaaatctcttccactgaactccatgttgagtggtcacctcctgctgagttaaatggcattatcatccggtacgaactttacatgagaagactaagatccaccaaagagacgaccagcgaagaaagccgagttttccagagcagcggatggctgtccccgcactcctttgtcgaatcagctaacgaaaatgctttaaagcctccccaaaccatgacaactatcactggactggaaccttacacaaagtacgagtttcgcgtcctggccgtgaacatggcgggatcggtctcttctgcctgggtctcagaacgtaccggggaatctgctcctgtgtttatgatccctcctagcgtgttccctctgagcagctatagcctgaacatcagctgggagaaaccagccgataacgtgacgagagggaaggttgtgggttacgacataaatatgctgagtgaacaaagtcctcagcaaagtataccaatggctttttctcagctgcttcatacagcgaagtcacaggaactaagctacaccgttgaggggctaaaaccgtatcggatctacgagtttacaattactctgtgcaattctgtcggttgcgtgacatcggctagtggcgcaggacaaaccctcgccgcagcccctgcccagcttagacctccactggtaaaggggatcaattccacaaccatccatctccgatggttcccgcctgaggaactgaacgggccaagccctatttatcagctcgagcgtcgtgagtcttcccttccggctcttatgaccacaatgatgaaagggatcaggttcatcggaaacggatactgcaagtttccatcatccacacaccctgtaaatacagattttacaggaattaaggctagtttccggacgaaggtgcctgaggggctgattgttttcgccgcttcgcccggaaaccaggaagagtacttcgcgttgcaactgaaaaaggggagactgtacttcctgttcgatccacaaggctcgcccgtggaagtgacaactacgaatgaccatggcaagcagtactccgatggaaaatggcacgaaatcatcgctataagacatcaggcctttggacagatcactctggatggaatatatacgggctccagtgccattctcaacggatcaacagtaattggggataatacaggtgtgtttctgggtggactccccaggagctatacaattctacggaaggaccccgaaattattcagaaagggtttgttggttgcttaaaggatgtacactttatgaaaaactataatccatcagctatttgggaaccactagactggcagtctagtgaggaacaaataaacgtgtacaacagctgggaggggtgtcctgccagtttgaacgaaggggctcaattcctaggggcaggctttctggagttacatccctatatgttccacggaggcatgaattttgaaatctcttttaaatttaggacggatcagctgaatggtctgcttctcttcgtgtacaacaaggacgggccagacttcctggctatggagttgaagagtggcattctgactttcaggctgaacaccagtctcgcatttactcaggtggatctgctgctgggactgtcctattgcaatggtaaatggaataaggtgataattaagaaggagggctctttcatttcagcatcagtgaatggcttgatgaaacacgcatccgagagtggcgatcagccactggtcgtaaatagcccagtgtatgtgggaggaatcccccaggaacttctcaactcataccagcatctgtgcctggagcagggtttcgggggttgcatgaaagacgtgaagtttacaaggggagccgtggtaaatctggcgagcgtatcttctggggctgtccgggtcaatttggatggctgcttatcaaccgactcggcagtaaactgtcgaggcaacgacagcattctcgtctaccaggggaaagaacagtctgtgtacgaaggagggctgcagccttttaccgagtacttgtacagggttattgcgtcacatgaaggcggaagcgtgtatagtgactggtcacgaggtcgcaccacaggcgctgctccacaatccgtgcccactccctcaagggttcgctccctcaacgggtattccatcgaagtgacttgggatgaaccagtcgtgagaggcgtgattgaaaaatacattctgaaggcctattccgaggactcaacccggcctcctcgaatgccctcagcaagcgctgagttcgtgaatacatccaatctgaccgggatcctgactgggctactgccctttaagaattacgccgttacactgactgcatgtaccttagcgggttgcacagagagctctcacgctctgaacatcagtactccccaagaggcccctcaagaggttcaaccacccgtcgctaaatcattgcctagcagtcttcttctgagctggaaccctcccaagaaagcaaacggcatcataacacaatactgtttatatatggacgggagactgatttactcaggtagtgaagagaactacatcgtcaccgacctcgccgtgttcactccacaccagtttctgctatctgcttgcacccatgttgggtgcactaactcttcctgggtactgctttataccgcacagttacctcctgaacacgtggattcgccggtgttgactgtactcgactcgagaacgatccacattcaatggaaacagccccgtaagatcagtggcattctggagcgctatgtactttacatgtctaaccacactcacgacttcacaatctggtcagtgatatataactctaccgagctgttccaagatcatatgcttcaatacgtcctccccggtaataaatacttgatcaaactgggcgcttgtacgggaggcggttgcacagttagtgaggcgagtgaggcactgactgacgaggatattccagaaggagtacccgcacctaaagcgcattcctattcgccggattcttttaacgtatcctggacggagcctgaatatcccaatggagtaattaccagttacggcttgtacctcgatggcatcctgatacacaattcatcagagctgagctaccgggcttatggttttgcaccttggtcattgcatagctttcgagtacaagcctgtaccgccaagggttgcgctttgggccctctcgttgagaatcgtacacttgaggccccaccagagggtacggttaatgtcttcgtgaagactcagggaagccgcaaggctcacgtgagatgggaggccccattccgtccaaacggactcctgacccactcagttctctttaccggtattttctatgtagaccccgtcggtaacaattacacgctgctgaatgtgactaaagtcatgtattctggggaggagaccaatctgtgggtactgatagacgggctggttccctttacaaactacacagtgcaggttaacatctccaacagccagggcagtctgattacagatcccatcaccatcgctatgccccctggcgctccagatggagttctgccccctcgtctttcttcagccacacccacttctttacaggtcgtgtggtctactccagcacggaacaacgcgccaggctctccaagatatcagctgcagatgcgcagtggggatagcacgcacggattcctcgaactatttagcaacccctctgcatcactgagttacgaagtttcagacctgcaaccttataccgagtacatgttccgcttggttgcttccaatggatttgggtctgcacactccagttggatcccatttatgactgccgaggataagcccggacctgtcgtcccccctatcctgctggatgtgaaaagccgaatgatgctcgtcacctggcagcacccacggaagagtaacggagttataacacactataacatatatctccacggacgactttatctccggacccccggaaatgttaccaattgtaccgtcatgcacctgcacccgtatactgcgtataagtttcaggttgaagcgtgtacttcaaaaggctgtagcttgagcccggagagccagactgtttggacattaccaggggcacccgagggcatcccttcaccggagctgttcagcgataccccgacttccgtgattatctcatggcagccccctacacatcctaacggactggtggagaatttcacaatcgaacgcagggtaaagggtaaggaggaggtgactacgcttgttactctcccgagaagtcactccatgagatttatcgataagacctcagccctgtctccgtggaccaagtatgagtatagggtcctgatgagcacccttcacggcggaactaactcctctgcttgggtggaagtaacgacccgccctagcaggcctgcgggagtgcaacctcctgtcgtcacagtgttagaaccagatgctgtgcaggttacttggaagccccctctgatccagaacggagacattttaagttatgagatccatatgcctgatccccatatcactcttacaaacgtcacatctgccgtcctctctcaaaaggtgacccacctcattccctttaccaattatagcgtaactatcgtggcttgttccggtggaaatgggtacctggggggatgcacagaaagcctgcccacatacgtcacaacccatcccaccgtgccacagaatgttggtcccctgtctgttatccccctttccgaatcctacgtggttatctcctggcaacccccatcaaagcctaacggcccaaacctccgctatgagctgctgaggcgcaagattcaacagcccctcgcttctaatccacccgaagatctgaaccggtggcacaacatttattcgggcacacaatggttgtatgaggacaagggtttatcgcgattcacaacctatgagtatatgttattcgtccataactcagtggggttcacaccaagccgggaggtgactgtgaccacactggccggactccccgaacgcggagcgaacctgacagcatctgtgcttaaccacaccgcaatcgatgtcaggtgggccaagcccacagtccaggacctgcagggcgaagtcgaatactatactctcttttggtcatctgccacctctaatgactcactcaagattctgccagacgtgaacagtcacgtcatcgggcatctgaagcccaatactgaatactggattttcatttccgtcttcaatggtgttcatagcatcaactctgccggactgcatgcaaccacctgtgatggggaaccccagggcatgctcccccctgaggtcgtgattatcaatagcaccgccgtccgggtgatctggacttcacccagtaatccgaacggagttgtcacggagtactctatatatgtaaataataagttgtacaaaacagggatgaacgtaccaggctcgttcatcctcagggatttatccccttttacaatctatgatatccaggtggaggtttgcaccatatacgcatgtgtgaaatcgaatggcactcagatcaccaccgtggaagacacccccagtgacattccaacaccgaccataagaggcatcacgtcaaggtcccttcagatagactgggtttctccccgaaagccaaatggaatcattcttgggtatgacctactctggaaaacatggtacccctgcgccaagacccagaagctggtgcaggaccagtctgatgaactctgtaaggccgttaggtgccagaaaccggagagcatctgcggccacatatgttatagctccgaggcaaaagtctgctgcaacggcgtgctttacaatcctaaacccggacataggtgttgcgaggaaaagtacatcccattcgtgttgaactcaactggagtttgttgcggcggtaggattcaggaggcacagccaaaccatcaatgttgttcaggttactatgccagaattttgcctggagaagtctgttgcccggatgagcagcataacagagtttcagttggtatcggggactcctgttgtgggagaatgccttattctacctctggtaaccagatttgttgcgctgggaggctacacgatggccatggccaaaagtgctgtggacgacagatagtgtccaatgacctggagtgttgtggcggagaagaaggtgttgtgtataacagactaccaggcatgttctgctgcggccaggattacgttaatatgagcgatacgatttgttgcagcgcttcctctggggagagcaaggcccatatcaagaagaacgaccctgtgccggtgaagtgttgcgaaaccgaactcataccaaagagccagaagtgttgcaacggagtgggctacaaccctctgaaatatgtctgcagcgataaaatcagcacagggatgatgatgaaagaaacgaaagagtgtcggatcctatgccctgcctctatggaggctaccgaacattgtgggcgatgcgactttaactttaccagtcatatctgtaccgtgattcggggtagccataattcaacgggcaaagcctctatcgaagagatgtgttcatccgcagaggagacaatccacaccggatcagtaaatacctattcctatacagatgtgaacctgaagccatatatgacttatgaataccgaatatccgcctggaatagttatgggaggggccttagcaaagctgtccgtgctagaacaaaggaggacgtgccgcagggtgtcagccctcccacctggacaaagatcgataacctggaagacaccattgtgctgaattggcgcaagccaattcagtctaatggaccaataatctattatatccttcttaggaacggcatagaaagattccgcggtacttctctcagcttcagtgacaaggagggcatccaaccttttcaagagtactcgtatcagctgaaggcttgtaccgtggcaggatgtgctactagttccaaagttgtagctgcaaccacccagggggtacccgaatccatcctccccccttcaattactgctttgagtgctgtggccctacacctctcctggtcagtcccggagaagtccaacggggtgatcaaagagtaccagatcaggcaggttgggaaaggcctgatccataccgataccactgaccgaagacagcatacagtgactggccttcagccctacaccaattacagcttcactcttaccgcctgcacgtccgcgggttgtacatcctccgaaccattccttggtcagacattgcaggctgcccctgagggcgtgtgggtgactcctcgccatatcataatcaacagcacaacggtggagctatactggagtttgccagagaagcccaacggtctggtgtctcagtaccagctatcaagaaatggcaatctgttattcttagggggaagtgaggagcaaaattttaccgataagaacctggagccgaacagccggtacacttataagctcgaggttaagaccgggggaggttcctccgcgtcggatgattacatagtgcagaccccaatgtctacgcctgaggagatttaccccccatataacatcactgtgataggcccttatagcatctttgttgcgtggatcccgccaggcatactcataccagagattcccgtagaatataacgtcctgctgaacgatggttccgtgacaccgctggcttttagtgtaggacaccaccagtccacactcctggagaacctcaccccgtttacacagtacgaaattcggatccaggcttgtcagaacgggtcgtgcggggtctcaagtcggatgtttgttaaaaccccagaggccgctcccatggatttaaattcccctgtcctgaaagcgctcggcagcgcctgtatcgagatcaagtggatgcctccagagaaacctaatggcataatcatcaactacttcatctaccgaagacctgcaggtatcgaggaagagtctgtgctcttcgtatggagtgagggagccctcgagtttatggatgagggcgataccctccgaccctttactctgtacgagtatagagtcagggcatgcaattcgaaaggatccgtggaaagcctgtggtccttgacgcagactttggaagctcctccgcaggattttccagcgccttgggcgcaggctacatcagcccactccgtgttgctgaattggacgaagcccgaatccccaaatggaatcatcagtcattacagagtggtgtaccaagagaggcccgacgaccccacgtttaactctccaacagtccatgcttttacagtgaagggaactagtcatcaggcacatctgtacgggctagagccatttactacctaccgcataggagtggtggccgcaaaccatgctggagagatcctcagtccctggacattgatccagacgctggaatcttctcccagtggcctgcggaactttatcgtggagcagaaagagaacggcagggcccttctcctgcagtggtcagagccaatgcgcacaaacggagtgatcaaaacttataatatcttcagcgatggctttctggagtactcaggtctaaatcggcagttcttgtttcggcgactcgacccttttaccctatacactctgactcttgaagcttgcacccgggcagggtgtgcacatagcgcaccgcaacccttgtggactgacgaagccccacctgactcacaattggccccaacagtgcactccgtcaaatctactagtgtggagctctcatggtcggagcctgtgaaccctaacggcaagattattcggtacgaggtgatcaggcgctgtttcgaaggcaaggcatggggaaatcaaacgatacaggcagacgaaaaaatcgtcttcacagagtataacacagagcgtaacacattcatgtataatgatacgggattgcaaccatggacacaatgcgaatataagatatatacctggaactccgcaggccacacgtgttcctcatggaacgtcgtcaggactctgcaggccccacccgaagggctgtcaccccctgtgattagttacgtgagcatgaatccccaaaaactgttaatttcttggatccctcccgaacaatcaaacggcattatccaatcctacagactgcagcgcaacgaaatgctgtaccccttctccttcgaccccgtgacctttaactacacagacgaggagctgctgccattttcaacatacagctatgccctgcaggcgtgtacatctggcggttgctctacatcaaagcccacaagcatcacgacactggaggccgcacctagcgaggtatctccacccgatctgtgggcagtcagcgcaacacagatgaatgtctgctggagtccaccaacagtacaaaatggcaaaattaccaaatacctcgtgagatatgataacaaagagagcctggctggccagggcctctgcctcttagtgtcacatcttcaaccgtattcccagtataacttttcactcgtggcttgtaccaatggtggctgtaccgcttccgtctctaagtctgcctggaccatggaggctctccctgaaaatatggactcgcccactcttcaggtcaccggcagcgagagtatcgagatcacatggaagccccctcgtaatcccaacggacagattagatcttacgagcttagaagggacggtactattgtatacaccgggctcgagacccggtacagagactttactcttacacctggggtggagtactcttacacagtgacagcatcaaattctcagggcggaatactcagccccttggttaaagatcgtacaagccctagcgccccaagtggaatggagccccctaaactgcaagccagagggcctcaggagatcctcgtgaattgggaccctccggttagaactaatggggacattattaactacaccctctttatcagagagctgttcgagcgggaaactaaaataatccatattaataccacccacaactcgttcggcatgcagtcctacatcgtgaatcaactgaaacctttccacaggtatgaaattagaattcaggcctgcactaccttagggtgtgcttccagcgattggaccttcatccaaacccccgagatcgccccactgatgcagcccccaccccatttagaggtgcaaatggcgccaggcggattccaacctacagtcagtctgctgtggactggacccctacaacctaatgggaaggtgctgtattatgagctgtataggcggcaaatagcgacgcaaccaaggaagagcaatccagtactgatttataatgggagttcaacatccttcatagattctgagctcctgccgttcacggaatacgagtatcaagtgtgggctgtaaactctgcagggaaagctccaagtagctggacatggtgcaggactggtccggctccaccggagggcctccgtgcaccaacttttcatgtgatctccagcacgcaagctgtggtgaacatttccgcccctggtaaaccaaatggaatcgtgagtttatatcggctcttttcttcctctgcacacggagcagagacagtcttaagtgaaggtatggctactcagcagacactccacgggttgcaggcctttacaaattactctattggcgtcgaggcgtgcacttgtttcaactgttgctcaaagggccctaccgccgagctgcggacccaccccgcacctccttccggactgtcatcaccgcaaatcggcacacttgcctcccgcaccgcctcatttaggtggagccccccaatgttccctaatggtgtgattcacagttatgaactgcagttccatgtggcctgccccccagactccgccttgccatgtacgcctagccagatagagacaaagtatacaggcctggggcaaaaggcctctttgggtggtttgcagccatacacaacctacaaactgagggtcgttgcccacaatgaggtagggtcaaccgcgtcagagtggatttcttttactacacagaaagagctcccgcaatatagagctccttttagcgtagacagcaatttgtcagtggtctgtgttaattggtctgatactttccttctaaacggccagttgaaggagtacgtgttgaccgatggcggacggagggtttactccgggttggatacaactttgtatattcctagaacagccgacaagaccttcttcttccaggtgatctgcaccacagacgaaggatctgttaagacccctctgatccagtacgacacaagcactgggctcggcctggtgctcaccactcccggaaaaaaaaaggggtcccggtccaagagtaccgaattctattcagaactgtggttcatcgtcctcatggctatgttgggactaatcctgctcgcaatttttctgagtctcattctgcagagaaagatccacaaggaaccctacatacgggaacgacccccactggtaccactccagaaacggatgtcaccgctcaatgtgtatcccccaggcgagaatcacatgttcgattccgtagcagacatctctgacgtgagtagcaacgttaccctgaaatcctacacgatgcattttgaagggttagcagacactaagatacccagatctggcacacccgtttctatccgtagcaatcggtccgcgtgtgtactgcgcattccctctcaaaaccaaacttcgttgacttactcacaggggtccctgcatcggagcgtgtctcaacttatggatatccaggacaaaaaagtcctgatggacaattctctgtgggaagccatcatggggcacaactcaggtctgtatgtggatgaggaggatctaatgaacgccattaaggatttttcgtcagtgaccaaggaacggactacgttcaccgatactcacctgtaa

SEQ ID NO: 264663 - DNA, 18883 bp, Artificial Sequence
  derived and/or modified sequence
tgtttgctctgcagaatactttacctgggcacccaagtcttccttccagcattcctgctgctacagcctatttgctgagtaaccaggggttacagcagcgttgccaggcaacgagggacagcggtcctgttgaagagccatttgtcacactgaggggactggttgaaatgcaataaagaaatgataccagcagctactcatgtcttcgccattgctaagaacgtcgttggtattaccttactctgagaacgtgtctgcagtttccagaaaatggagtatcgcaacatcacttaaagtaccctgcttcaaagtattgctggcaagtggcgtgggcctgattatttatttagaaatgctttatcaggaggagaatgcttttttgtaaacatgaattgcccagttctttcattgggctctggcttcttgtttcaggtcattgaaatgttgatctttgcctattttgcttcaatatccttgactgagtcacgaggtcttttcccaaggctggagaacgtgggagctttcaagaaagtttccatcgtgccaacccaagcagtatgtggactcccagaccgaagcactttttgtcacagctctgctgctgctgaaagtattcagttctgtacccagcggttttgtattcaggattgcccatacagatcttcacaccctacctacactgcccttttctcagcaggcctcagtagctgcatcacaccagacaagaatgatctgcatcctaacgcccatagcaattctgcaagttttatttttggaaatcacaagagctgcttttcttctcctccttctccaaagctgatggcatcatttaccttagctgtatggctgaaacctgagcaacaaggtgtaatgtgtgttatagaaaagacagtagatgggcagattgtgttcaaacttacaatatctgagaaagagaccatgttttattatcgcacagtaaatggtttgcaacctccaataaaagtaatgacactggggagaattcttgtgaagaaatggattcatcttagtgtgcaggtgcatcagacaaaaatcagcttctttatcaatggcgtggagaaggatcatacacctttcaatgcaagaactctaagtggttcaattacagattttgcatctggtactgtgcaaataggacagagtttaaatggtttagagcagtttgtcggaagaatgcaagattttcgattataccaagtggcacttacaaacagagagattctggaagtcttctctggagatcttctcagattgcatgcccaatcacattgccgttgccctggcagccacccgcgggtccaccctttggcacagcggtactgcattcctaatgatgcaggagacacagctgataatagagtgtcacggttgaatcctgaagcccatcctctctcttttgtcaatgataatgatgttggtacttcatgggtttcaaatgtgtttacaaacattacacagcttaatcaaggagtgactatttcagttgatttggaaaatggacagtatcaggtgttttatattatcattcagttctttagtccacaaccaacggaaataaggattcaaaggaagaaggaaaatagtttagattgggaggactggcaatattttgccaggaattgtggtgcttttggaatgaaaaacaatggagatttggaaaaacctgattctgtcaactgtcttcagctttccaattttactccatattcccgtggcaatgtcacatttagcatcctgacacctggaccaaattatcgtcctggatacaataacttctataataccccatctcttcaagagttcgtaaaagccacgcaaataaggtttcattttcatgggcagtactatacaactgagactgctgttaacctcagacacagatattatgcagtggacgaaatcaccattagtgggagatgtcagtgccatggtcatgccgataactgcgacacaacaagccagccatatagatgcctctgctcccaggagagcttcactgaaggacttcattgtgatcgctgcttgcctctttataatgacaagcctttccgccaaggtgatcaagtttacgctttcaattgtaaaccttgtcaatgcaacagccattccaaaagctgccattacaacatctctgtagacccatttccttttgagcacttcagagggggaggaggagtttgtgatgattgtgagcataacactacaggaaggaactgtgagctgtgcaaggattactttttccgacaagttggtgcagatccttcggccatagatgtttgcaaaccctgtgactgtgatacagttggcactagaaatggtagcattctttgtgatcagattggaggacagtgtaattgtaagagacacgtgtctggcaggcagtgcaatcagtgccagaatggattctacaatctacaagagttggatcctgatggctgcagtccctgtaactgcaatacctctgggacagtggatggagatattacctgtcaccaaaattcaggccagtgcaagtgcaaagcaaacgttattgggcttaggtgtgatcattgcaattttggatttaaatttctccgaagctttaatgatgttggatgtgagccctgccagtgtaacctccatggctcagtgaacaaattctgcaatcctcactctgggcagtgtgagtgcaaaaaagaagccaaaggacttcagtgtgacacctgcagagaaaacttttatgggttagatgtcaccaattgtaaggcctgtgactgtgacacagctggatccctccctgggactgtctgtaatgctaagacagggcagtgcatctgcaagcccaatgttgaagggagacagtgcaataaatgtttggagggaaacttctacctacggcaaaataattctttcctctgtctgccttgcaactgtgataagactgggacaataaatggctctctgctgtgtaacaaatcaacaggacaatgtccttgcaaattaggggtaacaggtcttcgctgtaatcagtgtgagcctcacaggtacaatttgaccattgacaattttcaacactgccagatgtgtgagtgtgattccttggggacattacctgggaccatttgtgacccaatcagtggccagtgcctgtgtgtgcctaatcgtcaaggaagaaggtgtaatcagtgtcaaccaggtttttatatttctccaggcaatgccactggctgcctgccatgctcatgccatacaactggtgcagttaatcacatctgtaatagcctgactggtcagtgtgtttgccaagatgcttccattgctgggcaacgttgtgaccaatgcaaagaccattactttggatttgatcctcagactggaagatgtcagccttgtaattgtcatctctcaggagccttgaatgaaacctgtcacttggtcacaggccagtgtttctgtaaacaatttgtcactggctcaaagtgtgatgcttgtgttcccagtgcaagccacttggatgtcaacaatctattgggttgcagcaaaactccattccagcaacctccgcccagaggacaagttcaaagttcttctgctatcaatctctcctggagtccacctgattctccaaatgcccactggcttacttacagtttactcagggatggttttgaaatctacacaacagaggatcaatacccatacagtattcaatacttcttagacacagacctgttaccatataccaaatattcctattacattgagaccaccaatgtgcatggttcaacaaggagtgtagctgtcacttacaagacaaaaccaggggtcccagagggaaacttgactttaagttatatcattcctattggctcagactctgtgacacttacctggacaacactctcaaatcaatctggtcccatagagaaatatattttgtcctgtgcccctttggctggtggtcagccatgtgtttcctacgaaggtcatgaaacctcagctaccatctggaatctggttccatttgccaagtacgatttttctgtacaggcgtgtactagcgggggctgtttacacagcttgcccattacagtgaccacagcccaggcccctccccaaagactaagtccacctaagatgcagaaaatcagttctacagaacttcatgtagaatggtctccaccagcggaactaaatggaataattataagatatgaactatacatgagaagactgagatctactaaagaaaccacatctgaggaaagtcgagtttttcagagcagtggttggctcagtcctcattcatttgtagaatcggccaatgaaaatgcattaaaacctcctcaaacaatgacaaccatcactggcttggagccatacaccaagtatgagttcagagtcttagctgtgaatatggctggaagtgtgtcttctgcctgggtctcagaaagaacgggagaatcagcacctgtattcatgatccctccttcagtctttcccctctcttcgtactctctcaatatctcctgggagaagccagcagataatgttacaagaggaaaagttgtggggtatgacatcaatatgctttctgaacaatcacctcaacagtctattcccatggcgttttcacagctgttgcacactgctaaatcccaagaactatcttacactgtagaaggactgaaaccttataggatatatgagtttactattactctctgcaattcagttggttgtgtgaccagtgcttcgggagcaggacaaactttagcagcagcaccagcacaactgaggccacctctggttaaaggaatcaacagcacaacaatccatcttaggtggtttccacctgaagaactgaatggaccctctcctatatatcagctggaaaggagagagtcatctctaccagctctgatgaccacgatgatgaaaggaatccgtttcataggaaatgggtattgtaaatttcccagctccactcacccagtcaatacagacttcactggcattaaggccagctttcgaacaaaagtgcctgaaggtttgattgtctttgcagcatcacctggcaatcaggaagagtattttgcacttcagttgaagaagggacgtctttattttctttttgatcctcaggggtcaccagtggaagtaactacaactaatgatcatggcaaacaatatagtgatggaaaatggcatgaaataattgctattaggcatcaggcttttggccaaatcactctggatgggatatatacaggttcctctgccatcctgaatggtagtactgttattggagataacacaggagtctttctgggagggctcccgcgaagttataccatcctcaggaaggatcctgagataatccaaaaaggttttgtgggctgtctcaaggatgtacattttatgaagaattacaatccgtcagctatttgggaacctctggattggcagagttctgaagaacaaatcaacgtgtataacagctgggagggatgtcccgcttcattaaatgagggagctcagttcctaggagcagggttcctggaacttcatccatatatgtttcatggtggaatgaactttgagatttcctttaagttcagaactgaccaattaaatggattgcttcttttcgtttataacaaagatggacctgattttcttgctatggagctgaaaagtggaatattgaccttccggttaaataccagtcttgcctttacacaagtggatctattgctggggctatcctattgtaatggaaagtggaataaagtcattattaaaaaggaaggctctttcatatcagcaagtgtgaatggactgatgaagcatgcatcggagtccggagaccagccactggtggtgaattcaccagtttatgtgggaggaatcccacaggaactgctgaactcttatcaacatttgtgtttggaacaaggtttcggtggttgcatgaaggatgttaaatttacacggggtgctgtcgttaacttggcatctgtgtccagcggtgctgtcagagtcaatctggatggatgcctatcaactgacagtgctgttaactgcaggggaaatgactccatcctggtttaccagggaaaagagcagagtgtttacgagggtggtctccagccttttacagaatacctgtatcgagtgatagcctcgcatgaaggaggttcagtatatagtgattggagtcgaggacgtacaacaggagcagctccacaaagtgtgccaactccctcaagagtccgcagcttaaatggatacagcattgaggtgacctgggatgaacctgttgtcagaggtgtaattgagaagtacattctgaaagcctatagtgaggacagcacccgtccaccccgcatgccctctgccagtgctgaatttgtcaatacaagcaacctcacaggcatattgacaggcttgctacccttcaaaaactatgcagtaaccctaactgcttgcactttggctggctgtactgagagctcacatgcattgaacatctctactccacaagaagccccacaagaggttcagccaccagtagccaaatcccttcccagttctttgctgctctcctggaacccacccaaaaaggcaaatggtattataactcagtactgtttatacatggatgggaggctgatctattcaggcagtgaggagaactacatagtcacagatttagcagtatttacaccccaccagtttctactaagtgcatgcacacatgtgggctgtacaaacagttcctgggtcctactgtacacagcacagctgccaccagaacacgtggattccccagttctgactgtcctggattctagaactatacacatacagtggaaacaaccaagaaaaataagtgggattctggaacgctatgtattatatatgtcaaaccatacacatgattttacaatttggagtgtcatctataacagtacagaacttttccaggatcatatgctacaatacgttttacctggtaataaatatctcatcaagctgggagcttgcacaggtggtgggtgcacagtgagtgaggccagtgaggccctaactgacgaggacatacccgaaggcgtgccagcccccaaagcccactcatattcacctgactcctttaatgtctcctggactgagcctgaatatccgaatggtgttatcacgagttatggattatatctagatggtatattaatccacaattcctcagaactcagctatcgtgcttacggatttgctccttggagtttacattccttcagagtccaagcatgcacggccaaaggttgtgctctgggcccactggtggaaaatcgaactctagaagctcctcctgaaggaacagtaaatgtgtttgtcaaaacacagggatcccggaaagcccacgtgaggtgggaagcaccttttcgccctaatggactcttaacacactcagtccttttcactgggatattctatgtagacccagtaggtaataactacacccttctgaatgtcacaaaagtcatgtacagcggagaagagacaaacctttgggtgctcatcgatgggctggttccttttaccaactatactgtacaagtgaatatttcaaatagccaaggcagcttgataactgatcctataacaattgcaatgcctccaggagctccagatggcgtgctgcctcccaggctttcatctgccactccaaccagtcttcaggttgtctggtctacaccagctcgtaataacgctcctggctctcccagataccaactccagatgaggtctggcgactccacccatggatttctagagttattttccaatccttctgcatcgttaagctatgaagtgagtgatctccaaccgtacacagagtatatgtttcggttggttgcctccaatggatttggcagtgcacatagttcttggattccattcatgaccgcagaggacaaacctggacctgtagttcctccgattcttctggatgtgaagtcaagaatgatgttggtcacctggcagcatcctagaaaatccaatggggttattacccattataacatttatctacatggccgtctatacttgagaactcctggaaatgtcactaattgcacagtgatgcatttacacccatacactgcctataagtttcaggtagaagcctgcacttcaaaaggatgttccctttcaccagagtcccagactgtatggacactcccaggggcaccggaagggatcccaagtccagagctgttctctgatactccaacatctgtgattatatcttggcaaccccctacccaccccaatggcttggtggagaatttcacaattgagagaagagtcaaaggaaaggaagaagttactaccctggtgactctcccgaggagtcattccatgaggtttattgacaagacttctgctcttagcccatggacaaaatatgaatatcgggtactgatgagcactcttcatggaggcacaaacagcagtgcttgggtagaagttaccacaagaccctcacgacctgctggggtgcagccacctgtggtgacagtgctggaacccgatgcagtccaggtcacttggaaacccccactcatccagaacggagacatacttagctatgagattcacatgcctgaccctcacatcactttaaccaatgtgacttccgcagtgttaagtcaaaaagttactcatctgattcctttcactaattattctgtcaccattgttgcttgctcagggggtaatgggtaccttggagggtgcacagagagtttacctacctatgttaccactcaccccaccgtacctcagaatgttggcccattgtctgtgattccactaagtgaatcatatgttgtgatttcttggcaaccaccatccaagccaaatggacctaatttgagatatgagcttctgagacgtaaaatccagcagccacttgcatcaaatcccccagaagatttaaatcggtggcacaatatttattcaggaactcagtggctttatgaagataagggtcttagcaggtttacaacctatgaatatatgctcttcgtacacaacagtgtgggttttacaccgagccgagaagtgactgtgacaacgttagctggtcttccagagagaggagccaatctcactgcgagtgtccttaaccacacagccatcgacgtgaggtgggctaaaccaactgttcaagacctacaaggtgaagttgaatattacacacttttttggagttctgctacctcaaacgactctctaaaaatcttgccagatgtaaactctcatgtcattggccacctaaagccaaacacagagtattggatctttatctctgtcttcaatggagtccacagcatcaacagtgcaggacttcatgcaaccacttgcgatggggagcctcagggcatgcttcctccagaggttgtcatcatcaacagtacagctgtacgtgtcatctggacatctccttcaaacccaaatggtgttgtcactgagtattctatctatgtaaataataagctctacaagactggaatgaatgtgcctgggtcgtttattctgagagacctgtctcccttcactatctatgacattcaggttgaagtctgcacaatatatgcctgcgtgaaaagcaatggaacccaaattaccactgtggaagacactccaagtgatataccaacacccacaattcgtggcatcacttcaagatctcttcaaattgattgggtgtctccacggaagccaaatggcatcattcttggatatgatctcctatggaaaacatggtatccatgcgctaaaactcaaaagttagtgcaggatcagagtgatgagctctgcaaggcagtgaggtgtcaaaaacctgaatctatctgtggacacatttgctattcttctgaagctaaggtttgttgtaacggagtgctctataaccccaagcctggacatcgctgttgtgaagaaaagtatatcccgtttgttctgaattctactggagtttgttgtggtggccgaatacaggaggcacaaccaaatcatcagtgctgctctgggtattacgctagaattctaccaggtgaagtatgctgtccagatgaacagcacaatcgggtttctgttggcattggtgattcctgctgtggcagaatgccgtactccacctcaggaaaccagatttgctgtgctgggaggcttcatgatggccatggccagaagtgctgtggcagacagattgtgagcaacgatttagagtgttgtggtggagaagaaggagtggtgtacaatcgccttccaggtatgttctgttgtgggcaggattatgtgaatatgtcagataccatatgctgctcagcttccagtggagagtctaaagcacatattaaaaagaatgacccggtgccagtaaaatgctgtgagactgaacttattccaaagagccagaaatgctgtaatggagttggatataatcctttgaaatatgtttgctctgacaagatttcaactggaatgatgatgaaggaaaccaaagagtgcaggatcctctgcccagcatctatggaagccacagaacattgtggcaggtgtgacttcaactttaccagccacatttgcactgtgataagagggtctcacaattccacagggaaggcatcaattgaagaaatgtgttcatctgccgaagaaaccattcatacagggagtgtaaacacgtactcttacacagatgtgaacctcaagccctacatgacatatgagtacaggatttctgcctggaacagctatgggcgaggactcagcaaagctgtgagagccagaacaaaagaagatgtgcctcaaggagtgagtccccctacgtggaccaaaatagacaatcttgaagatacaattgtcttaaactggagaaaacctatacaatcaaatggtcctattatttactacatccttcttcgaaatggaattgaacgttttcggggaacatcactgagcttctctgataaagagggaattcaaccatttcaggaatattcatatcagctgaaagcttgcacggttgctggctgtgccaccagtagcaaggtagttgcagctactacccaaggagttccggagagcatcctgccaccaagcatcacagccctaagtgcagtggctctgcatctgagctggagtgtccctgagaaatcaaacggcgtcattaaagagtaccagatcaggcaggttgggaaaggtctcatccacactgacaccactgacaggagacagcatacggtcacaggtctccagccatacaccaactacagcttcactcttacagcttgtacatctgctgggtgcacttcaagcgagccttttctaggtcagacactgcaggcagctcctgaaggagtttgggtgacacctcgacacattatcatcaattctacaacagtggaattatattggagtctgccagaaaagcccaatggcctcgtttctcaatatcaattgagtcgtaatggaaacttgcttttcctgggtggcagtgaggagcagaatttcactgataaaaacctggagcccaatagcagatacacttacaagttagaagtcaaaactggaggtggcagcagtgctagtgatgattacattgttcaaacacctatgtcaacaccagaagaaatctatcctccatataatatcacagtaattgggccttattctatatttgtagcttggataccaccagggatcctcatccccgaaattcctgtggagtacaatgtcttactcaatgatggaagtgtaacacctctggccttctccgttggtcatcatcaatccacccttctggaaaatttgactccattcacacagtatgagataaggatacaagcatgtcaaaatggaagttgtggagttagcagtaggatgtttgtcaaaacacctgaagcagccccaatggatcttaattctcctgttcttaaggcactggggtcagcttgcatagagattaagtggatgccacctgaaaaaccaaatggaatcatcatcaactactttatttacagacgccctgctggcattgaagaggagtctgttttatttgtctggtcagaaggagcccttgaatttatggatgaaggagacaccctgaggcctttcacactctacgaatatcgggtcagagcctgtaactccaagggttcagtggagagtctgtggtcattaacacaaactctggaagctccacctcaagattttccagctccttgggctcaagccacgagtgctcattcagttctgttgaattggacaaagccagaatctcccaatggcattatctcccattaccgtgtggtctaccaggagagacccgacgatcctacatttaacagccctaccgtgcatgctttcacagtgaagggaacaagccatcaagcccacctgtacgggttagaaccattcacaacatatcgcattggtgttgtggctgcaaaccatgcaggagaaattttaagcccttggactctgattcaaaccttagaatcttccccaagtggactgagaaactttatagtagaacagaaagagaatggccgggcattgctactacagtggtcagaacctatgagaaccaatggtgtgattaagacatacaacatcttcagtgacgggttcctggagtactctggtttgaatcgtcagtttctcttccgccgcctggatcctttcactctctacacactgaccctggaggcctgcaccagagcaggttgtgcacactcggcgcctcagcctctgtggacagatgaagcccctccagactctcagctggctcctactgtccactctgtgaagtccaccagtgttgagctgagctggtctgagcctgttaacccaaatggaaaaataattcgctatgaagtgattcgcagatgcttcgagggaaaagcttggggaaatcagacaatccaggccgacgagaaaattgttttcacagaatataacactgaaaggaatacatttatgtataatgacacaggtttgcaaccatggacgcagtgtgaatataaaatctacacttggaattcagctgggcatacctgtagctcttggaatgtggtgaggacattgcaagcacctccagaaggtctctctccacctgtgatatcctatgtttctatgaatccccaaaaactgctgatttcctggatcccaccagaacagtctaatggtattatccagtcctataggcttcaaaggaatgaaatgctctatccttttagctttgatcctgtgactttcaattacactgatgaagagcttcttcctttttccacctatagctatgcactccaagcctgcacgagtggaggatgctccaccagcaaacccaccagcatcacaactctggaggctgctccatcagaagtcagccctccagatctttgggccgtcagtgccactcaaatgaatgtatgttggtcaccgcccacagtgcaaaatggaaagattactaaatatttagttagatatgataataaagagtcccttgctggccagggcctgtgcctgctggtttcccacctgcagccttactctcagtataacttctcccttgtagcctgcacgaatggaggttgcacagctagtgtgtcaaaatctgcctggacaatggaggccctgccagagaacatggactctccaacattgcaagtcacaggctcagaatcaatagaaatcacctggaaacctccaagaaacccaaatggccagatcagaagttatgaacttaggagggatggaaccattgtatatacaggcttggaaacacgctatcgtgattttactctcaccccaggtgtggagtatagctacacagtaactgccagcaacagccaagggggtattttgagtcctcttgtcaaagatcgaaccagcccctcagcaccctcagggatggaacctccaaaattgcaggccaggggtcctcaggagatcttagtgaactgggaccctccagtgagaacaaatggtgatatcatcaattataccctcttcatccgtgaactatttgaaagagaaactaaaatcatacacataaacacaactcataattcttttggtatgcagtcatatatagtaaaccagctgaagccatttcacaggtatgaaatacgaattcaagcgtgcaccaccctgggatgtgcatcaagtgactggacattcatacagacccctgagattgcacctttgatgcaaccccctccacatctggaggtacaaatggctccaggaggattccagccaactgtttctcttttgtggacaggaccgctgcagccaaatggaaaagttttgtattacgaattatacagaagacaaatagcaactcagcctagaaaatccaatccagtcctaatctataacggaagctcaacatcttttatagattccgaactattgcctttcacagagtatgagtatcaggtctgggcagtgaattctgcaggaaaagcccccagtagctggacatggtgcagaaccgggccagccccaccagaaggtctcagagcccccacgttccatgtgatctcttctacccaagcagtggtcaacatcagtgcccctgggaagcccaacgggatcgtcagtctctacaggctgttctccagcagcgcccatggggctgagacagtgctatccgaaggcatggccacccagcagactctccatggccttcaagccttcactaactactctattggagtagaggcctgcacctgcttcaactgttgcagcaaaggaccgacagctgaactgagaacccatcctgccccaccctcaggactgtcctctccacaaatcgggacgctggcctcaaggacggcctccttccggtggagtccccccatgttccccaatggtgtcattcacagctatgaactccaattccacgtggcttgccctcctgactcagccctcccctgtactcccagccaaatagaaacaaagtacacggggctggggcagaaagccagccttgggggtctccagccctacaccacatacaagctgagagtggtggcacacaacgaggtgggcagtacggcttccgagtggatcagtttcaccacccaaaaagaattgcctcagtaccgagccccattttcggtggacagcaatttgtctgtggtgtgtgtgaactggagtgacaccttcctcctgaacggccaactgaaggagtacgtgttaaccgacggagggcgacgcgtgtacagcggcttggacaccaccctctacataccgagaacggcggacaaaaccttctttttccaggtcatctgcacgactgacgaaggaagtgttaagacgccgttgatccaatatgatacctctactggacttggcttggtcctaacaactcctgggaaaaagaagggatcgcggagcaaaagcacagagttctacagcgagctgtggttcatagtgttaatggcgatgctgggcttgatcttgttggccatttttctgtccctgatactacaaagaaaaatccacaaagagccatatatcagagaaagacctcccttggtacctcttcagaagaggatgtctccattgaatgtttacccaccgggggaaaaccatatggggttagccgataccaaaattccccggtctgggacacctgtgagtatccgcagcaaccggagtgcatgtgtcctgcgcatcccgagtcaaaaccaaaccagcctaacctactcccagggttctcttcaccgcagcgtcagccagctcatggacattcaagacaagaaagtcttgatggacaactcactgtgggaagccatcatgggccacaacagtggactgtatgtggatgaagaggacctgatgaacgccatcaaggatttcagctcagtgactaaggaacgcaccacattcacagacacccacctgtaaaggatggaaacccagaagacgtaaccctggaatgcaaggtctgcacccatttcctcctgggttatcactcacacatcataaatgctgaaaagccattgtttattatcctataattctttaaagaaatgatgactgtttttgaaagtgttccttcctaatagaggtctaagaaatgatatttttctcatcttaaatgagagagaatattcatatgaaaatacttgatttgctcttattttgtagaagacaaagaagtatgtaattgtcacttggttctgtttggcagtgatgctcctggttaactgaataatcagtggcaatttcaagatggctcacagttgttagaagtagtaagttagttactggctcaaaaatgattctgttgaaaggatgtcactgctgttcatttctatctgccatttctgtcagggttgacacaatcctgcaagaatagttattctaatgatcacagctgctaaatgaatcccaaactttgcaccaggtcgacaaacttttctgaaggttctatttatttaccatacatagggttacttaccaaactttttgacaaggctgaaggttctatttatttacaatacatagggttactcaccaaactttttgacaaggcaacacataacttacacataaatgtctctgttcttgcatttatgaattttccaaaaatctaaggagtaaacagcttatttatacattttgaggagaaaacaaagtgtttcactaggaacacctctacttgaaccaatgtttttatttcatatattttatagttttgaaactagtttctcataaaattctgtcaattcactgaatatcagagaatactgacatcttcaacctagcacatttcaaatggaaactactgttctatttgcaatattaggctgcgtgaaattttaaaaggaaaaatgtatctgttccttctagcattaacatatatacatgtagagacaagactatacctatgtgtatatatatgtatatcatgtatatattactctgcactatatcccttctttttggagaactagccattattttagccacagaatcagtaagaacagatgatatgcaacagtaccaattacggttcaaaaatgtctgtcacctgctctagttggattacaaagtcattggtgaaagtcctatggcaagaaaaattttcttgcaaatcatccacataaaatcagatatttaaatttgttcttcatggaaaacagagtaagaaaacctcttgtcttccttcatccttaaaggtctttgtgaccccaggaaaatattgactctgtctaacacacaatagtcacaatactttttgtgaatctacaaccagagacaggcaaaaacttgtaaagtaagggatagtcttacttattctgcctgaaaacaatgtattaccccagggcccaacagtaaaagattgtggactttttgggtattgagatttcatctagctctgtgagagagcagctcctcagactgaccaactcctagacaaagtttgccaaccataagtgtcaaaagcacaggccagtattaagcagaagttctaccaccttattagaactgctataaacaaaagcatctgaaataattgtgcacatctggcagtgactgtagaaaatacgaaatatatatttctcgccaagtttttatactttctgaaatgaaaacataggattgactagtttactggtttttattcccatatgccgattctgggacaataaagttgtttaaagctggcacaaataagcattaaccaaggctgtgtccaccttctgtgagctacttaaggtatataggaaaggagtggtcacaaacttgcatcctaatccttggtggactcttctaagaatacagtttgctagtcacaaagaatagtctacaaatatgctttgctaggttcagaagattgagtttatcctgatttttgaaaaattaaccaggtatctttatcactgtgtatttttccaagcacagtataaaattttaacaacgcacaaaaaaatacagaactgcaggggattttatcttggatcattatccatttaatcatctaattagacatgaactcagttagctgaatcatttacattttgactccatagcttagggcagacagaagcctgtatggcttctgcccagaactctgtcccctgctacatgtctaagtttacttgtatttatttcagagaagaactctaagatgttgctttgctactttaagtggtattgcgtgccaagcctctattatacaaaccatgcagactcgcctctagagattctgattcggttgatctggggtgtgtggctgaggcatcagtactttttaaagcttccaggtgttctaatgttgagacccactgatgttccacaatctggaagaaatcatgtacaggaataatatgctatgcacagggactatgctccttggctcaccccttctcccttataaacaatgagcagttcttgatgaacctctttaaatttaaatctcctgactcacattttaccaattgtacatgccacattctcagcttacgaactaccatgttttgttattcttaatatcaactgtttggtaagagtacagttgtttttatacactctaagaaatgtgtttataatctactgtaatttccactaaatggaacccaaatattaatgttatggtaccatatactgatgtaaaaatcatgctggcatccatgaacacaccggtaaataaaacatagtccaagtggaagaattcattaataaggaacttttaattatgtcacaaatgaatagttggtttccaatgcacaaatatcatgtaaactaatctaaagatggtttgcttaataaatatttgaatgtgacc

SEQ ID NO: 264664 - DNA, 18955 bp, Artificial Sequence
  derived and/or modified sequence
tgtttgctctgcagaatactttacctgggcacccaagtcttccttccagcattcctgctgctacagcctatttgctgagtaaccaggggttacagcagcgttgccaggcaacgagggacagcggtcctgttgaagagccatttgtcacactgaggggactggttgaaatgcaataaagaaatgataccagcagctactcatgtcttcgccattgctaagaacgtcgttggtattaccttactctgagaacgtgtctgcagtttccagaaaatggagtatcgcaacatcacttaaagtaccctgcttcaaagtattgctggcaagtggcgtgggcctgattatttatttagaaatgctttatcaggaggagaatgcttttttgtaaacatgaattgcccagttctttcattgggctctggcttcttgtttcaggtcattgaaatgttgatctttgcctattttgcttcaatatccttgactgagtcacgaggtcttttcccaaggctggagaacgtgggagctttcaagaaagtttccatcgtgccaacccaagcagtatgtggactcccagaccgaagcactttttgtcacagctctgctgctgctgaaagtattcagttctgtacccagcggttttgtattcaggattgcccatacagatcttcacaccctacctacactgcccttttctcagcaggcctcagtagctgcatcacaccagacaagaatgatctgcatcctaacgcccatagcaattctgcaagttttatttttggaaatcacaagagctgcttttcttctcctccttctccaaagctgatggcatcatttaccttagctgtatggctgaaacctgagcaacaaggtgtaatgtgtgttatagaaaagacagtagatgggcagattgtgttcaaacttacaatatctgagaaagagaccatgttttattatcgcacagtaaatggtttgcaacctccaataaaagtaatgacactggggagaattcttgtgaagaaatggattcatcttagtgtgcaggtgcatcagacaaaaatcagcttctttatcaatggcgtggagaaggatcatacacctttcaatgcaagaactctaagtggttcaattacagattttgcatctggtactgtgcaaataggacagagtttaaatggtttagagcagtttgtcggaagaatgcaagattttcgattataccaagtggcacttacaaacagagagattctggaagtcttctctggagatcttctcagattgcatgcccaatcacattgccgttgccctggcagccacccgcgggtccaccctttggcacagcggtactgcattcctaatgatgcaggagacacagctgataatagagtgtcacggttgaatcctgaagcccatcctctctcttttgtcaatgataatgatgttggtacttcatgggtttcaaatgtgtttacaaacattacacagcttaatcaaggagtgactatttcagttgatttggaaaatggacagtatcaggtgttttatattatcattcagttctttagtccacaaccaacggaaataaggattcaaaggaagaaggaaaatagtttagattgggaggactggcaatattttgccaggaattgtggtgcttttggaatgaaaaacaatggagatttggaaaaacctgattctgtcaactgtcttcagctttccaattttactccatattcccgtggcaatgtcacatttagcatcctgacacctggaccaaattatcgtcctggatacaataacttctataataccccatctcttcaagagttcgtaaaagccacgcaaataaggtttcattttcatgggcagtactatacaactgagactgctgttaacctcagacacagatattatgcagtggacgaaatcaccattagtgggagatgtcagtgccatggtcatgccgataactgcgacacaacaagccagccatatagatgcctctgctcccaggagagcttcactgaaggacttcattgtgatcgctgcttgcctctttataatgacaagcctttccgccaaggtgatcaagtttacgctttcaattgtaaaccttgtcaatgcaacagccattccaaaagctgccattacaacatctctgtagacccatttccttttgagcacttcagagggggaggaggagtttgtgatgattgtgagcataacactacaggaaggaactgtgagctgtgcaaggattactttttccgacaagttggtgcagatccttcggccatagatgtttgcaaaccctgtgactgtgatacagttggcactagaaatggtagcattctttgtgatcagattggaggacagtgtaattgtaagagacacgtgtctggcaggcagtgcaatcagtgccagaatggattctacaatctacaagagttggatcctgatggctgcagtccctgtaactgcaatacctctgggacagtggatggagatattacctgtcaccaaaattcaggccagtgcaagtgcaaagcaaacgttattgggcttaggtgtgatcattgcaattttggatttaaatttctccgaagctttaatgatgttggatgtgagccctgccagtgtaacctccatggctcagtgaacaaattctgcaatcctcactctgggcagtgtgagtgcaaaaaagaagccaaaggacttcagtgtgacacctgcagagaaaacttttatgggttagatgtcaccaattgtaaggcctgtgactgtgacacagctggatccctccctgggactgtctgtaatgctaagacagggcagtgcatctgcaagcccaatgttgaagggagacagtgcaataaatgtttggagggaaacttctacctacggcaaaataattctttcctctgtctgccttgcaactgtgataagactgggacaataaatggctctctgctgtgtaacaaatcaacaggacaatgtccttgcaaattaggggtaacaggtcttcgctgtaatcagtgtgagcctcacaggtacaatttgaccattgacaattttcaacactgccagatgtgtgagtgtgattccttggggacattacctgggaccatttgtgacccaatcagtggccagtgcctgtgtgtgcctaatcgtcaaggaagaaggtgtaatcagtgtcaaccaggtttttatatttctccaggcaatgccactggctgcctgccatgctcatgccatacaactggtgcagttaatcacatctgtaatagcctgactggtcagtgtgtttgccaagatgcttccattgctgggcaacgttgtgaccaatgcaaagaccattactttggatttgatcctcagactggaagatgtcagccttgtaattgtcatctctcaggagccttgaatgaaacctgtcacttggtcacaggccagtgtttctgtaaacaatttgtcactggctcaaagtgtgatgcttgtgttcccagtgcaagccacttggatgtcaacaatctattgggttgcagcaaaactccattccagcaacctccgcccagaggacaagttcaaagttcttctgctatcaatctctcctggagtccacctgattctccaaatgcccactggcttacttacagtttactcagggatggttttgaaatctacacaacagaggatcaatacccatacagtattcaatacttcttagacacagacctgttaccatataccaaatattcctattacattgagaccaccaatgtgcatggttcaacaaggagtgtagctgtcacttacaagacaaaaccaggggtcccagagggaaacttgactttaagttatatcattcctattggctcagactctgtgacacttacctggacaacactctcaaatcaatctggtcccatagagaaatatattttgtcctgtgcccctttggctggtggtcagccatgtgtttcctacgaaggtcatgaaacctcagctaccatctggaatctggttccatttgccaagtacgatttttctgtacaggcgtgtactagcgggggctgtttacacagcttgcccattacagtgaccacagcccaggcccctccccaaagactaagtccacctaagatgcagaaaatcagttctacagaacttcatgtagaatggtctccaccagcggaactaaatggaataattataagatatgaactatacatgagaagactgagatctactaaagaaaccacatctgaggaaagtcgagtttttcagagcagtggttggctcagtcctcattcatttgtagaatcggccaatgaaaatgcattaaaacctcctcaaacaatgacaaccatcactggcttggagccatacaccaagtatgagttcagagtcttagctgtgaatatggctggaagtgtgtcttctgcctgggtctcagaaagaacgggagaatcagcacctgtattcatgatccctccttcagtctttcccctctcttcgtactctctcaatatctcctgggagaagccagcagataatgttacaagaggaaaagttgtggggtatgacatcaatatgctttctgaacaatcacctcaacagtctattcccatggcgttttcacagctgttgcacactgctaaatcccaagaactatcttacactgtagaaggactgaaaccttataggatatatgagtttactattactctctgcaattcagttggttgtgtgaccagtgcttcgggagcaggacaaactttagcagcagcaccagcacaactgaggccacctctggttaaaggaatcaacagcacaacaatccatcttaggtggtttccacctgaagaactgaatggaccctctcctatatatcagctggaaaggagagagtcatctctaccagctctgatgaccacgatgatgaaaggaatccgtttcataggaaatgggtattgtaaatttcccagctccactcacccagtcaatacagacttcactggcattaaggccagctttcgaacaaaagtgcctgaaggtttgattgtctttgcagcatcacctggcaatcaggaagagtattttgcacttcagttgaagaagggacgtctttattttctttttgatcctcaggggtcaccagtggaagtaactacaactaatgatcatggcaaacaatatagtgatggaaaatggcatgaaataattgctattaggcatcaggcttttggccaaatcactctggatgggatatatacaggttcctctgccatcctgaatggtagtactgttattggagataacacaggagtctttctgggagggctcccgcgaagttataccatcctcaggaaggatcctgagataatccaaaaaggttttgtgggctgtctcaaggatgtacattttatgaagaattacaatccgtcagctatttgggaacctctggattggcagagttctgaagaacaaatcaacgtgtataacagctgggagggatgtcccgcttcattaaatgagggagctcagttcctaggagcagggttcctggaacttcatccatatatgtttcatggtggaatgaactttgagatttcctttaagttcagaactgaccaattaaatggattgcttcttttcgtttataacaaagatggacctgattttcttgctatggagctgaaaagtggaatattgaccttccggttaaataccagtcttgcctttacacaagtggatctattgctggggctatcctattgtaatggaaagtggaataaagtcattattaaaaaggaaggctctttcatatcagcaagtgtgaatggactgatgaagcatgcatcggagtccggagaccagccactggtggtgaattcaccagtttatgtgggaggaatcccacaggaactgctgaactcttatcaacatttgtgtttggaacaaggtttcggtggttgcatgaaggatgttaaatttacacggggtgctgtcgttaacttggcatctgtgtccagcggtgctgtcagagtcaatctggatggatgcctatcaactgacagtgctgttaactgcaggggaaatgactccatcctggtttaccagggaaaagagcagagtgtttacgagggtggtctccagccttttacagaatacctgtatcgagtgatagcctcgcatgaaggaggttcagtatatagtgattggagtcgaggacgtacaacaggagcagctccacaaagtgtgccaactccctcaagagtccgcagcttaaatggatacagcattgaggtgacctgggatgaacctgttgtcagaggtgtaattgagaagtacattctgaaagcctatagtgaggacagcacccgtccaccccgcatgccctctgccagtgctgaatttgtcaatacaagcaacctcacaggcatattgacaggcttgctacccttcaaaaactatgcagtaaccctaactgcttgcactttggctggctgtactgagagctcacatgcattgaacatctctactccacaagaagccccacaagaggttcagccaccagtagccaaatcccttcccagttctttgctgctctcctggaacccacccaaaaaggcaaatggtattataactcagtactgtttatacatggatgggaggctgatctattcaggcagtgaggagaactacatagtcacagatttagcagtatttacaccccaccagtttctactaagtgcatgcacacatgtgggctgtacaaacagttcctgggtcctactgtacacagcacagctgccaccagaacacgtggattccccagttctgactgtcctggattctagaactatacacatacagtggaaacaaccaagaaaaataagtgggattctggaacgctatgtattatatatgtcaaaccatacacatgattttacaatttggagtgtcatctataacagtacagaacttttccaggatcatatgctacaatacgttttacctggtaataaatatctcatcaagctgggagcttgcacaggtggtgggtgcacagtgagtgaggccagtgaggccctaactgacgaggacatacccgaaggcgtgccagcccccaaagcccactcatattcacctgactcctttaatgtctcctggactgagcctgaatatccgaatggtgttatcacgagttatggattatatctagatggtatattaatccacaattcctcagaactcagctatcgtgcttacggatttgctccttggagtttacattccttcagagtccaagcatgcacggccaaaggttgtgctctgggcccactggtggaaaatcgaactctagaagctcctcctgaaggaacagtaaatgtgtttgtcaaaacacagggatcccggaaagcccacgtgaggtgggaagcaccttttcgccctaatggactcttaacacactcagtccttttcactgggatattctatgtagacccagtaggtaataactacacccttctgaatgtcacaaaagtcatgtacagcggagaagagacaaacctttgggtgctcatcgatgggctggttccttttaccaactatactgtacaagtgaatatttcaaatagccaaggcagcttgataactgatcctataacaattgcaatgcctccaggagctccagatggcgtgctgcctcccaggctttcatctgccactccaaccagtcttcaggttgtctggtctacaccagctcgtaataacgctcctggctctcccagataccaactccagatgaggtctggcgactccacccatggatttctagagttattttccaatccttctgcatcgttaagctatgaagtgagtgatctccaaccgtacacagagtatatgtttcggttggttgcctccaatggatttggcagtgcacatagttcttggattccattcatgaccgcagaggacaaacctggacctgtagttcctccgattcttctggatgtgaagtcaagaatgatgttggtcacctggcagcatcctagaaaatccaatggggttattacccattataacatttatctacatggccgtctatacttgagaactcctggaaatgtcactaattgcacagtgatgcatttacacccatacactgcctataagtttcaggtagaagcctgcacttcaaaaggatgttccctttcaccagagtcccagactgtatggacactcccaggggcaccggaagggatcccaagtccagagctgttctctgatactccaacatctgtgattatatcttggcaaccccctacccaccccaatggcttggtggagaatttcacaattgagagaagagtcaaaggaaaggaagaagttactaccctggtgactctcccgaggagtcattccatgaggtttattgacaagacttctgctcttagcccatggacaaaatatgaatatcgggtactgatgagcactcttcatggaggcacaaacagcagtgcttgggtagaagttaccacaagaccctcacgacctgctggggtgcagccacctgtggtgacagtgctggaacccgatgcagtccaggtcacttggaaacccccactcatccagaacggagacatacttagctatgagattcacatgcctgaccctcacatcactttaaccaatgtgacttccgcagtgttaagtcaaaaagttactcatctgattcctttcactaattattctgtcaccattgttgcttgctcagggggtaatgggtaccttggagggtgcacagagagtttacctacctatgttaccactcaccccaccgtacctcagaatgttggcccattgtctgtgattccactaagtgaatcatatgttgtgatttcttggcaaccaccatccaagccaaatggacctaatttgagatatgagcttctgagacgtaaaatccagcagccacttgcatcaaatcccccagaagatttaaatcggtggcacaatatttattcaggaactcagtggctttatgaagataagggtcttagcaggtttacaacctatgaatatatgctcttcgtacacaacagtgtgggttttacaccgagccgagaagtgactgtgacaacgttagctggtcttccagagagaggagccaatctcactgcgagtgtccttaaccacacagccatcgacgtgaggtgggctaaaccaactgttcaagacctacaaggtgaagttgaatattacacacttttttggagttctgctacctcaaacgactctctaaaaatcttgccagatgtaaactctcatgtcattggccacctaaagccaaacacagagtattggatctttatctctgtcttcaatggagtccacagcatcaacagtgcaggacttcatgcaaccacttgcgatggggagcctcagggcatgcttcctccagaggttgtcatcatcaacagtacagctgtacgtgtcatctggacatctccttcaaacccaaatggtgttgtcactgagtattctatctatgtaaataataagctctacaagactggaatgaatgtgcctgggtcgtttattctgagagacctgtctcccttcactatctatgacattcaggttgaagtctgcacaatatatgcctgcgtgaaaagcaatggaacccaaattaccactgtggaagacactccaagtgatataccaacacccacaattcgtggcatcacttcaagatctcttcaaattgattgggtgtctccacggaagccaaatggcatcattcttggatatgatctcctatggaaaacatggtatccatgcgctaaaactcaaaagttagtgcaggatcagagtgatgagctctgcaaggcagtgaggtgtcaaaaacctgaatctatctgtggacacatttgctattcttctgaagctaaggtttgttgtaacggagtgctctataaccccaagcctggacatcgctgttgtgaagaaaagtatatcccgtttgttctgaattctactggagtttgttgtggtggccgaatacaggaggcacaaccaaatcatcagtgctgctctgggtattacgctagaattctaccaggtgaggtatgctgtccagatgaacagcacaatcgggtttctgttggcattggtgattcctgctgtggcagaatgccgtactccacctcaggaaaccagatttgctgtgctgggaggcttcatgatggccatggccagaagtgctgtggcagacagattgtgagcaacgatttagagtgttgtggtggagaagaaggagtggtgtacaatcgccttccaggtatgttctgttgtgggcaggattatgtgaatatgtcagataccatatgctgctcagcttccagtggagagtctaaagcacatattaaaaagaatgacccggtgccagtaaaatgctgtgagactgaacttattccaaagagccagaaatgctgtaatggagttggatataatcctttgaaatatgtttgctctgacaagatttcaactggaatgatgatgaaggaaaccaaagagtgcaggatcctctgcccagcatctatggaagccacagaacattgtggcaggtgtgacttcaactttaccagccacatttgcactgtgataagagggtctcacaattccacagggaaggcatcaattgaagaaatgtgttcatctgccgaagaaaccattcatacagggagtgtaaacacgtactcttacacagatgtgaacctcaagccctacatgacatatgagtacaggatttctgcctggaacagctatgggcgaggactcagcaaagctgtgagagccagaacaaaagaagatgtgcctcaaggagtgagtccccctacgtggaccaaaatagacaatcttgaagatacaattgtcttaaactggagaaaacctatacaatcaaatggtcctattatttactacatccttcttcgaaatggaattgaacgttttcggggaacatcactgagcttctctgataaagagggaattcaaccatttcaggaatattcatatcagctgaaagcttgcacggttgctggctgtgccaccagtagcaaggtagttgcagctactacccaaggagttccggagagcatcctgccaccaagcatcacagccctaagtgcagtggctctgcatctgagctggagtgtccctgagaaatcaaacggcgtcattaaagagtaccagatcaggcaggttgggaaaggtctcatccacactgacaccactgacaggagacagcatacggtcacaggtctccagccatacaccaactacagcttcactcttacagcttgtacatctgctgggtgcacttcaagcgagccttttctaggtcagacactgcaggcagctcctgaaggagtttgggtgacacctcgacacattatcatcaattctacaacagtggaattatattggagtctgccagaaaagcccaatggcctcgtttctcaatatcaattgagtcgtaatggaaacttgcttttcctgggtggcagtgaggagcagaatttcactgataaaaacctggagcccaatagcagatacacttacaagttagaagtcaaaactggaggtggcagcagtgctagtgatgattacattgttcaaacacctatgtcaacaccagaagaaatctatcctccatataatatcacagtaattgggccttattctatatttgtagcttggataccaccagggatcctcatccccgaaattcctgtggagtacaatgtcttactcaatgatggaagtgtaacacctctggccttctccgttggtcatcatcaatccacccttctggaaaatttgactccattcacacagtatgagataaggatacaagcatgtcaaaatggaagttgtggagttagcagtaggatgtttgtcaaaacacctgaagcagccccaatggatcttaattctcctgttcttaaggcactggggtcagcttgcatagagattaagtggatgccacctgaaaaaccaaatggaatcatcatcaactactttatttacagacgccctgctggcattgaagaggagtctgttttatttgtctggtcagaaggagcccttgaatttatggatgaaggagacaccctgaggcctttcacactctacgaatatcgggtcagagcctgtaactccaagggttcagtggagagtctgtggtcattaacacaaactctggaagctccacctcaagattttccagctccttgggctcaagccacgagtgctcattcagttctgttgaattggacaaagccagaatctcccaatggcattatctcccattaccgtgtggtctaccaggagagacccgacgatcctacatttaacagccctaccgtgcatgctttcacagtgaagggaacaagccatcaagcccacctgtacgggttagaaccattcacaacatatcgcattggtgttgtggctgcaaaccatgcaggagaaattttaagcccttggactctgattcaaaccttagaatcttccccaagtggactgagaaactttatagtagaacagaaagagaatggccgggcattgctactacagtggtcagaacctatgagaaccaatggtgtgattaagacatacaacatcttcagtgacgggttcctggagtactctggtttgaatcgtcagtttctcttccgccgcctggatcctttcactctctacacactgaccctggaggcctgcaccagagcaggttgtgcacactcggcgcctcagcctctgtggacagatgaagcccctccagactctcagctggctcctactgtccactctgtgaagtccaccagtgttgagctgagctggtctgagcctgttaacccaaatggaaaaataattcgctatgaagtgattcgcagatgcttcgagggaaaagcttggggaaatcagacaatccaggccgacgagaaaattgttttcacagaatataacactgaaaggaatacatttatgtataatgacacaggtttgcaaccatggacgcagtgtgaatataaaatctacacttggaattcagctgggcatacctgtagctcttggaatgtggtgaggacattgcaagcacctccagaaggtctctctccacctgtgatatcctatgtttctatgaatccccaaaaactgctgatttcctggatcccaccagaacagtctaatggtattatccagtcctataggcttcaaaggaatgaaatgctctatccttttagctttgatcctgtgactttcaattacactgatgaagagcttcttcctttttccacctatagctatgcactccaagcctgcacgagtggaggatgctccaccagcaaacccaccagcatcacaactctggaggctgctccatcagaagtcagccctccagatctttgggccgtcagtgccactcaaatgaatgtatgttggtcaccgcccacagtgcaaaatggaaagattactaaatatttagttagatatgataataaagagtcccttgctggccagggcctgtgcctgctggtttcccacctgcagccttactctcagtataacttctcccttgtagcctgcacgaatggaggttgcacagctagtgtgtcaaaatctgcctggacaatggaggccctgccagagaacatggactctccaacattgcaagtcacaggctcagaatcaatagaaatcacctggaaacctccaagaaacccaaatggccagatcagaagttatgaacttaggagggatggaaccattgtatatacaggcttggaaacacgctatcgtgattttactctcaccccaggtgtggagtatagctacacagtaactgccagcaacagccaagggggtattttgagtcctcttgtcaaagatcgaaccagcccctcagcaccctcagggatggaacctccaaaattgcaggccaggggtcctcaggagatcttagtgaactgggaccctccagtgagaacaaatggtgatatcatcaattataccctcttcatccgtgaactatttgaaagagaaactaaaatcatacacataaacacaactcataattcttttggtatgcagtcatatatagtaaaccagctgaagccatttcacaggtatgaaatacgaattcaagcgtgcaccaccctgggatgtgcatcaagtgactggacattcatacagacccctgagattgcacctttgatgcaaccccctccacatctggaggtacaaatggctccaggaggattccagccaactgtttctcttttgtggacaggaccgctgcagccaaatggaaaagttttgtattacgaattatacagaagacaaatagcaactcagcctagaaaatccaatccagtcctaatctataacggaagctcaacatcttttatagattccgaactattgcctttcacagagtatgagtatcaggtctgggcagtgaattctgcaggaaaagcccccagtagctggacatggtgcagaaccgggccagccccaccagaaggtctcagagcccccacgttccatgtgatctcttctacccaagcagtggtcaacatcagtgcccctgggaagcccaacgggatcgtcagtctctacaggctgttctccagcagcgcccatggggctgagacagtgctatccgaaggcatggccacccagcagactctccatggccttcaagccttcactaactactctattggagtagaggcctgcacctgcttcaactgttgcagcaaaggaccgacagctgaactgagaacccatcctgccccaccctcaggactgtcctctccacaaatcgggacgctggcctcaaggacggcctccttccggtggagtccccccatgttccccaatggtgtcattcacagctatgaactccaattccacgtggcttgccctcctgactcagccctcccctgtactcccagccaaatagaaacaaagtacacggggctggggcagaaagccagccttgggggtctccagccctacaccacatacaagctgagagtggtggcacacaacgaggtgggcagtacggcttccgagtggatcagtttcaccacccaaaaagaattgcctcagtaccgagccccattttcggtggacagcaatttgtctgtggtgtgtgtgaactggagtgacaccttcctcctgaacggccaactgaaggagtacgtgttaaccgacggagggcgacgcgtgtacagcggcttggacaccaccctctacataccgagaacggcggacaaaaccttctttttccaggtcatctgcacgactgacgaaggaagtgttaagacgccgttgatccaatatgatacctctactggacttggcttggtcctaacaactcctgggaaaaagaagggatcgcggagcaaaagcacagagttctacagcgagctgtggttcatagtgttaatggcgatgctgggcttgatcttgttggccatttttctgtccctgatactacaaagaaaaatccacaaagagccatatatcagagaaagacctcccttggtacctcttcagaagaggatgtctccattgaatgtttacccaccgggggaaaaccatatgtttgactctgtggctgatatatctgatgtgtcaagcaatgtcaccctaaaaagttacaccatgcactttgaggggttagccgataccaaaattccccggtctgggacacctgtgagtatccgcagcaaccggagtgcatgtgtcctgcgcatcccgagtcaaaaccaaaccagcctaacctactcccagggttctcttcaccgcagcgtcagccagctcatggacattcaagacaagaaagtcttgatggacaactcactgtgggaagccatcatgggccacaacagtggactgtatgtggatgaagaggacctgatgaacgccatcaaggatttcagctcagtgactaaggaacgcaccacattcacagacacccacctgtaaaggatggaaacccagaagacgtaaccctggaatgcaaggtctgcacccatttcctcctgggttatcactcacacatcataaatgctgaaaagccattgtttattatcctataattctttaaagaaatgatgactgtttttgaaagtgttccttcctaatagaggtctaagaaatgatatttttctcatcttaaatgagagagaatattcatatgaaaatacttgatttgctcttattttgtagaagacaaagaagtatgtaattgtcacttggttctgtttggcagtgatgctcctggttaactgaataatcagtggcaatttcaagatggctcacagttgttagaagtagtaagttagttactggctcaaaaatgattctgttgaaaggatgtcactgctgttcatttctatctgccatttctgtcagggttgacacaatcctgcaagaatagttattctaatgatcacagctgctaaatgaatcccaaactttgcaccaggtcgacaaacttttctgaaggttctatttatttaccatacatagggttacttaccaaactttttgacaaggctgaaggttctatttatttacaatacatagggttactcaccaaactttttgacaaggcaacacataacttacacataaatgtctctgttcttgcatttatgaattttccaaaaatctaaggagtaaacagcttatttatacattttgaggagaaaacaaagtgtttcactaggaacacctctacttgaaccaatgtttttatttcatatattttatagttttgaaactagtttctcataaaattctgtcaattcactgaatatcagagaatactgacatcttcaacctagcacatttcaaatggaaactactgttctatttgcaatattaggctgcgtgaaattttaaaaggaaaaatgtatctgttccttctagcattaacatatatacatgtagagacaagactatacctatgtgtatatatatgtatatcatgtatatattactctgcactatatcccttctttttggagaactagccattattttagccacagaatcagtaagaacagatgatatgcaacagtaccaattacggttcaaaaatgtctgtcacctgctctagttggattacaaagtcattggtgaaagtcctatggcaagaaaaattttcttgcaaatcatccacataaaatcagatatttaaatttgttcttcatggaaaacagagtaagaaaacctcttgtcttccttcatccttaaaggtctttgtgaccccaggaaaatattgactctgtctaacacacaatagtcacaatactttttgtgaatctacaaccagagacaggcaaaaacttgtaaagtaagggatagtcttacttattctgcctgaaaacaatgtattaccccagggcccaacagtaaaagattgtggactttttgggtattgagatttcatctagctctgtgagagagcagctcctcagactgaccaactcctagacaaagtttgccaaccataagtgtcaaaagcacaggccagtattaagcagaagttctaccaccttattagaactgctataaacaaaagcatctgaaataattgtgcacatctggcagtgactgtagaaaatacgaaatatatatttctcgccaagtttttatactttctgaaatgaaaacataggattgactagtttactggtttttattcccatatgccgattctgggacaataaagttgtttaaagctggcacaaataagcattaaccaaggctgtgtccaccttctgtgagctacttaaggtatataggaaaggagtggtcacaaacttgcatcctaatccttggtggactcttctaagaatacagtttgctagtcacaaagaatagtctacaaatatgctttgctaggttcagaagattgagtttatcctgatttttgaaaaattaaccaggtatctttatcactgtgtatttttccaagcacagtataaaattttaacaacgcacaaaaaaatacagaactgcaggggattttatcttggatcattatccatttaatcatctaattagacatgaactcagttagctgaatcatttacattttgactccatagcttagggcagacagaagcctgtatggcttctgcccagaactctgtcccctgctacatgtctaagtttacttgtatttatttcagagaagaactctaagatgttgctttgctactttaagtggtattgcgtgccaagcctctattatacaaaccatgcagactcgcctctagagattctgattcggttgatctggggtgtgtggctgaggcatcagtactttttaaagcttccaggtgttctaatgttgagacccactgatgttccacaatctggaagaaatcatgtacaggaataatatgctatgcacagggactatgctccttggctcaccccttctcccttataaacaatgagcagttcttgatgaacctctttaaatttaaatctcctgactcacattttaccaattgtacatgccacattctcagcttacgaactaccatgttttgttattcttaatatcaactgtttggtaagagtacagttgtttttatacactctaagaaatgtgtttataatctactgtaatttccactaaatggaacccaaatattaatgttatggtaccatatactgatgtaaaaatcatgctggcatccatgaacacaccggtaaataaaacatagtccaagtggaagaattcattaataaggaacttttaattatgtcacaaatgaatagttggtttccaatgcacaaatatcatgtaaactaatctaaagatggtttgcttaataaatatttgaatgtgacc

SEQ ID NO: 264665 - protein, 1721 aa, Artificial Sequence
  derived and/or modified sequence
MAGAWLRWGLLLWAGLLASSAHGRLRRITYVVHPGPGLAAGALPLSGPPRSRTFNVALNARYSRSSAAAGAPSRASPGVPSERTRRTSKPGGAALQGLRPPPPPPPEPARPAVPGGQLHPNPGGHPAAAPFTKQGRQVVRSKVPQETQSGGGSRLQVHQKQQLQGVNVCGGRCCHGWSKAPGSQRCTKPSCVPPCQNGGMCLRPQLCVCKPGTKGKACETIAAQDTSSPVFGGQSPGAASSWGPPEQAAKHTSSKKADTLPRVSPVAQMTLTLKPKPSVGLPQQIHSQVTPLSSQSVVIHHGQTQEYVLKPKYFPAQKGISGEQSTEGSFPLRYVQDQVAAPFQLSNHTGRIKVVFTPSICKVTCTKGSCQNSCEKGNTTTLISENGHAADTLTATNFRVVICHLPCMNGGQCSSRDKCQCPPNFTGKLCQIPVHGASVPKLYQHSQQPGKALGTHVIHSTHTLPLTVTSQQGVKVKFPPNIVNIHVKHPPEASVQIHQVSRIDGPTGQKTKEAQPGQSQVSYQGLPVQKTQTIHSTYSHQQVIPHVYPVAAKTQLGRCFQETIGSQCGKALPGLSKQEDCCGTVGTSWGFNKCQKCPKKPSYHGYNQMMECLPGYKRVNNTFCQDINECQLQGVCPNGECLNTMGSYRCTCKIGFGPDPTFSSCVPDPPVISEEKGPCYRLVSSGRQCMHPLSVHLTKQLCCCSVGKAWGPHCEKCPLPGTAAFKEICPGGMGYTVSGVHRRRPIHHHVGKGPVFVKPKNTQPVAKSTHPPPLPAKEEPVEALTFSREHGPGVAEPEVATAPPEKEIPSLDQEKTKLEPGQPQLSPGISTIHLHPQFPVVIEKTSPPVPVEVAPEASTSSASQVIAPTQVTEINECTVNPDICGAGHCINLPVRYTCICYEGYRFSEQQRKCVDIDECTQVQHLCSQGRCENTEGSFLCICPAGFMASEEGTNCIDVDECLRPDVCGEGHCVNTVGAFRCEYCDSGYRMTQRGRCEDIDECLNPSTCPDEQCVNSPGSYQCVPCTEGFRGWNGQCLDVDECLEPNVCANGDCSNLEGSYMCSCHKGYTRTPDHKHCRDIDECQQGNLCVNGQCKNTEGSFRCTCGQGYQLSAAKDQCEDIDECQHRHLCAHGQCRNTEGSFQCVCDQGYRASGLGDHCEDINECLEDKSVCQRGDCINTAGSYDCTCPDGFQLDDNKTCQDINECEHPGLCGPQGECLNTEGSFHCVCQQGFSISADGRTCEDIDECVNNTVCDSHGFCDNTAGSFRCLCYQGFQAPQDGQGCVDVNECELLSGVCGEAFCENVEGSFLCVCADENQEYSPMTGQCRSRTSTDLDVDVDQPKEEKKECYYNLNDASLCDNVLAPNVTKQECCCTSGVGWGDNCEIFPCPVLGTAEFTEMCPKGKGFVPAGESSSEAGGENYKDADECLLFGQEICKNGFCLNTRPGYECYCKQGTYYDPVKLQCFDMDECQDPSSCIDGQCVNTEGSYNCFCTHPMVLDASEKRCIRPAESNEQIEETDVYQDLCWEHLSDEYVCSRPLVGKQTTYTECCCLYGEAWGMQCALCPLKDSDDYAQLCNIPVTGRRQPYGRDALVDFSEQYTPEADPYFIQDRFLNSFEELQAEECGILNGCENGRCVRVQEGYTCDCFDGYHLDTAKMTCVDVNECDELNNRMSLCKNAKCINTDGSYKCLCLPGYVPSDKPNYCTPLNTALNLEKDSDLE

SEQ ID NO: 264666 - DNA, 5166 bp, Artificial Sequence
  derived and/or modified sequence
atggctggcgcttggctccgttggggcctgttattgtgggcaggactgttagcttcaagcgcccacggtcgtctgaggaggatcacctacgtcgtccatcctggtccgggcctcgcagccggggcactccccctcagcggcccaccgagaagcagaactttcaatgttgcactcaacgcacgctactcacggtcgagcgccgccgcgggcgccccatctagagcttcccctggcgtacccagcgaaaggacacgaagaacatctaaaccagggggtgctgccctccaaggcctccgaccaccccctccacccccaccagagcccgctaggcccgcagtgcctggcgggcaacttcacccaaatcctgggggccacccagccgcggctccttttacaaagcagggtcgccaagtggtgagatcaaaagtcccgcaggagacccaatctggcggtggtagccgcttgcaggtgcatcaaaaacaacaactgcagggcgtaaatgtctgcgggggaagatgctgccacggctggtccaaagcgccagggtctcagagatgtacaaaaccctcttgtgtgccaccctgtcagaatggcggtatgtgccttcgaccacaactatgtgtgtgtaagcccggcacgaagggaaaggcttgcgagactatcgccgcccaagacaccagctcccccgtgttcgggggacagtcccccggtgcagccagtagctgggggcccccagaacaggccgccaaacatacgtcgtctaagaaggccgatactctccctcgggtctctccagtggcacagatgactttgactctgaaacctaagccatcagttggcctcccccagcagattcattcacaggtgacccccctgtcttcacaatccgttgttattcaccatgggcagacccaggagtacgtactgaagccaaaatacttcccagcgcagaagggcatttcaggagaacaaagcactgagggatccttcccactgagatacgtgcaggaccaggtggccgcccctttccagctctccaaccatacaggcagaatcaaagtcgtgttcacaccaagtatttgcaaagtaacctgcacaaaaggatcctgtcagaatagctgtgagaaagggaatactacaaccttgatttcagaaaacggacacgctgcggacacactgactgctacaaatttccgcgtggtgatttgccatttaccatgtatgaacggaggccaatgctctagccgcgataaatgtcagtgccctccgaatttcacgggtaagctctgccagatccctgtacatggtgcgagcgtcccaaaactgtaccagcactcacagcagcccgggaaagcactcggaacccacgtcatccactcgactcatacgctgccactcaccgtgacctcacaacagggggtcaaggttaagttccccccgaatatcgtgaatatacacgttaaacatccccccgaggccagcgtgcaaatccatcaagtgagccgcatcgatgggcccacagggcagaagacaaaagaagcccagccgggacagtcacaggtctcctatcagggccttccagtccagaagactcagaccattcattccacttactcccatcaacaggtcatccctcacgtctacccagtggccgcaaagacccagttaggacgctgctttcaggaaactatcgggagccaatgtggtaaagctcttcccggcctgtcgaagcaagaggattgctgcggaaccgtcggtactagttgggggtttaataaatgtcagaaatgccctaaaaagcccagctaccacggatacaaccagatgatggagtgtctcccaggctataaacgtgtcaacaataccttttgtcaggatataaacgaatgccagttacagggagtgtgtcctaatggggaatgtctgaacaccatgggttcctatcgctgtacatgcaaaattggattcggcccagaccctaccttctcctcttgcgtcccagacccgcccgtgatttccgaagaaaagggtccttgctataggctcgtgagcagcggtcgccagtgtatgcatccccttagcgtccatctgactaagcagctgtgttgttgtagcgtgggcaaggcttgggggccacactgtgaaaagtgtcccttgcccgggactgccgcatttaaagaaatctgtcccggcggtatgggctatacagtgagcggagttcacaggcgacggccaattcatcaccacgtggggaaaggcccagtgtttgtaaaacccaaaaatacacagccagtagctaaatcaacacaccctcctccattgcccgctaaggaggaacccgtagaggccctcactttcagtagggaacatggacctggagtagcagaacctgaagtcgctaccgcgcctcctgaaaaggaaatcccctctctggatcaggaaaaaactaaactggaacccgggcagccacaactgagcccgggcatctctaccatccacctgcacccccaattccccgtggtcatcgaaaagacatccccaccagtcccggtggaagtggcaccagaagctagtacaagtagtgcgtctcaagtgatagcaccaacccaagtaacagagataaatgaatgtacagtgaaccccgatatatgcggcgctggccattgtattaatctgcccgtaagatatacttgtatatgctatgagggttatcgcttctcagagcagcagcgtaaatgtgtcgacatcgatgaatgcacacaagtgcagcatctctgcagccaagggcggtgcgaaaacactgagggctctttcctttgcatctgccccgctggctttatggcttccgaggaaggcaccaattgtatcgatgttgatgaatgcctgcggcctgatgtgtgcggggaaggtcattgtgttaacaccgtcggagcctttagatgcgagtattgcgatagcggctatcgaatgactcaaagggggcggtgtgaggacattgacgagtgcctgaatccgtccacatgtccagatgaacagtgtgttaactctccaggcagctaccagtgtgttccgtgcaccgaagggtttcgagggtggaacgggcagtgcttagacgtcgacgaatgcctcgaacccaacgtatgtgctaatggcgattgcagcaatttagagggctcctacatgtgttcctgtcacaaagggtatacacgtaccccagatcacaagcactgcagggacatcgatgagtgccagcagggtaatctgtgcgtgaacggccagtgtaagaacaccgaaggatcctttcgctgcacctgcggacaaggataccaattatcggcagctaaagaccagtgcgaggatattgacgaatgccaacaccgccatctgtgcgctcacggccagtgcaggaacaccgagggctcgttccaatgcgtttgcgatcagggttatagggcaagcggattaggagaccactgcgaagacattaacgagtgcctcgaggacaaatcagtttgtcagagaggagactgtatcaatacagccggcagctacgattgcacatgcccagatggattccagctagacgacaacaagacgtgccaggacattaacgaatgcgagcaccctggcctgtgtggcccacagggagagtgtttaaacacagaaggcagcttccactgcgtatgccagcaaggttttagtataagcgcagacgggagaacttgtgaggacattgacgaatgcgtcaataacacagtgtgcgacagccacggcttctgtgacaacacggccggctcattccggtgtttgtgttatcagggctttcaggccccacaggacggccagggatgcgttgatgttaatgaatgtgaactgctgtccggagtgtgcggcgaggccttctgcgaaaacgtggagggcagctttttgtgcgtatgtgccgatgaaaatcaggaatacagccccatgacaggtcagtgcagatcccgcactagtacggatctggatgttgacgtcgaccagcccaaagaggagaaaaaggaatgctactacaacctcaacgacgcatctctgtgcgacaatgtgctagcacctaatgtgacaaaacaggaatgttgttgtaccagcggagtggggtggggcgacaactgtgaaattttcccttgtccagtcctgggaaccgcagaatttacggagatgtgtcctaaggggaaggggtttgttcctgcaggggaatcaagcagtgaagctggcggcgaaaactataaggatgccgacgagtgcctgttgtttggacaagagatctgcaagaatggtttttgtctgaatacaaggccaggctacgaatgttactgcaaacaagggacttattatgatcccgtgaaacttcagtgctttgatatggatgaatgtcaagaccccagctcctgcatcgacggccaatgcgttaatacagaagggagttacaactgtttctgcacacatccgatggtgttagacgccagcgagaagagatgcatccggcccgccgagtccaacgaacagatcgaagagacagacgtataccaggacctctgctgggagcacttgagcgacgaatacgtgtgttccaggccactcgtgggcaagcagacgacctacactgaatgctgctgcctctatggggaggcctgggggatgcagtgcgccctctgtccactcaaagattccgatgattacgcacaactgtgcaatatccctgtgaccggtaggagacaaccttatgggcgcgatgctctggtggattttagcgagcagtacaccccagaggcagacccttacttcattcaagatcggtttctgaactcattcgaagagctgcaggctgaagaatgtggaattctcaatggctgcgagaatgggcggtgtgtaagggttcaggagggatacacctgcgactgctttgacgggtaccatctagatactgctaagatgacgtgtgtggacgttaatgaatgcgacgagctcaacaacaggatgtcactgtgcaagaatgcaaaatgtatcaatacggatggtagttataagtgtctgtgtctgccaggctacgttccctccgacaagcctaattactgtacgccactgaataccgccctgaatctggagaaggatagcgatttagagtag

SEQ ID NO: 264667 - DNA, 6333 bp, Artificial Sequence
  derived and/or modified sequence
cgctcgctctcggccaccctcgccgggccccgctgcggcgcgcgctgcaacccccggccggacgcgcggaccctcaccttgcgcggcccgctcccctcgcccctccccgctccccgggctccgcgctccccacccccacgccctcctcctgctcccagccacaatcggccggggtctggggccgctcagctgcccgcagagcctcctccctcgccaccgacttggtctcctcccgcctttcccgggctctcggcagctctcgggggagcccgaacgcgcggggaaaggcgagccgcacggccgggggagggggccggaccgcgcgcgaccggtcgcgcccgctggggcccgcgatggcgggggcctggctcaggtgggggctcctgctctgggcagggctcctcgcgtcctcggcgcacggccggctgcggaggatcacctacgtggtgcacccgggccccggcctggcagccggcgccttgcccctgagcgggcccccgcgttcgcggacattcaacgtcgcgctcaacgccaggtacagccgcagctcggcggctgccggcgcccccagccgtgcctcccccggggtcccctcggagaggacccggcgcacgagcaagccgggcggcgcggccctgcaggggctcagaccgccgccgccgccgccgccggagcctgcgcgtcccgcggtccccggcgggcagctccaccccaatcccggcggccacccggcagccgccccgttcaccaaacaaggcaggcaagttgtgcgctccaaggtgccgcaggagacccagagcggcggaggctctaggctgcaggttcaccagaagcagcagctgcagggggtcaatgtctgtggagggcggtgctgtcatggctggagtaaggcccctggctcccagaggtgcaccaaacctagctgtgttccgccatgtcagaatggagggatgtgtctccggccacaactctgtgtgtgtaaaccagggaccaagggcaaagcctgtgaaacaatagctgcccaggacacctcgtcaccagtctttggagggcagagtcctggggctgcttcctcgtggggccctcctgagcaagcagcaaagcatacttcatctaagaaggcagacactctaccaagagtcagccctgtggcccagatgaccttaaccctcaagccgaagccttcagtgggactcccccagcagatacattctcaagtgactcctctttcttcccagagtgtggtgattcaccatggccagacccaggaatacgtgctcaagcccaagtactttccagcccagaaggggatttcaggagagcagtccactgaaggttctttccctttaagatatgtgcaggatcaagttgcggcaccttttcagctgagtaaccacactggccgcatcaaggtggtctttactccgagcatctgtaaagtgacctgcaccaagggcagctgtcagaacagctgtgagaaggggaacaccaccactctcattagtgagaatggtcatgctgccgacaccctgacggccacgaacttccgagtggtaatttgccatcttccatgtatgaatggtggccagtgcagttcaagggacaaatgtcagtgccctccaaatttcacaggaaaactttgtcagatcccagtccatggtgccagcgtgcctaaactttatcagcattcccagcagccaggcaaggcgttggggacgcatgtcatccattcaacacataccttgcctctgaccgtgactagccagcaaggagtcaaagtgaaatttcctcctaacatagtcaatatccatgtgaaacatcctcctgaagcttccgtccagatacatcaggtttcaagaattgatggcccaacaggccagaagacaaaagaagctcaaccaggccaatcccaagtctcgtaccaagggcttcctgtccagaagacccagaccatacattccacatactcccaccagcaggtcattcctcacgtctaccccgtggctgctaagacacagcttggccggtgcttccaggaaaccattgggtcacagtgtggcaaagcgctccctggcctttcaaagcaagaggactgctgtggaactgtgggtacctcctggggctttaacaaatgccagaaatgccccaagaaaccatcttatcatggatacaaccaaatgatggaatgcctaccgggttataagcgggttaacaacaccttttgccaagatattaatgaatgtcagctacaaggtgtatgccctaatggtgagtgtttgaataccatgggcagctatcgatgtacctgcaaaataggatttgggccggatcctaccttttcaagttgtgttcctgatccccctgtgatctcggaagagaaagggccctgttaccgacttgtcagttctggaagacagtgtatgcaccctctgtctgttcacctcaccaagcagctctgctgttgtagtgtgggcaaggcctggggcccacactgtgagaaatgtccccttccaggcacagctgcttttaaggaaatctgtcctggtggaatgggttatacggtttctggcgttcatagacgcaggccaatccatcaccatgtaggtaaaggacctgtatttgtcaagccaaagaacactcaacctgttgctaaaagtactcatcctccacctctcccagccaaggaagagccagtggaggccctgaccttctcccgggaacacgggccaggagtggcggagccagaagtggcaactgcaccccctgaaaaggaaataccttcattggatcaagagaaaaccaaacttgagcctggtcaaccccagctgtctccaggcatttccactattcatctgcatccacagtttccagtagtgattgaaaaaacatcacctcctgtgcctgttgaagtagctcctgaagcttctacgtctagtgccagccaagtgattgctcctactcaagtgacagaaatcaatgaatgtactgtgaaccctgatatctgtggagcaggacactgcattaacctaccagtgagatatacctgtatatgctacgagggctacaggttcagtgaacaacagaggaaatgtgtggatattgatgagtgtactcaggtccaacacctctgctcccagggccgctgtgaaaacaccgagggaagtttcttgtgcatttgcccagcaggatttatggccagtgaggagggtactaactgcatagatgttgacgaatgcctgaggccggacgtctgtggggaggggcactgtgtcaatactgtgggggccttccggtgtgaatactgtgacagcgggtaccgcatgactcagagaggccgttgtgaggatattgatgaatgtttgaatccaagcacttgtccagatgagcagtgtgtgaattctcctggatcttaccagtgcgttccctgcacagaaggattccgaggctggaatggacagtgccttgatgtggacgagtgcctggaaccaaacgtctgcgcaaatggtgattgttccaaccttgaaggctcctacatgtgttcatgccacaaaggctatacccggactccggaccacaagcactgtagagatattgatgaatgtcagcaagggaatctatgtgtaaacgggcagtgcaaaaataccgagggctccttcaggtgcacctgtggacaggggtaccagctgtcggcagctaaagaccagtgtgaagacattgatgaatgccagcaccgtcatctctgtgctcatgggcagtgcaggaacactgagggctcttttcaatgtgtgtgtgaccagggttacagagcatctgggcttggagaccactgtgaagatatcaatgaatgcttggaggacaagagtgtttgccagagaggagactgcattaatactgcagggtcctatgattgtacttgtccggatggatttcagctagatgacaataaaacatgtcaagatattaatgaatgtgaacatccagggctctgtggtccgcaaggggagtgcctaaacacagagggttctttccattgtgtctgccagcagggtttctcaatctctgcagatggccgtacgtgtgaagatattgatgaatgtgtaaacaacactgtttgtgacagtcacgggttttgtgacaatacagctggctccttccgctgcctctgttatcagggctttcaagccccacaggatgggcaagggtgtgtggatgtgaatgaatgtgaactgctcagtggggtgtgtggtgaagccttctgtgaaaacgtggaagggtccttcctgtgcgtgtgtgctgatgaaaaccaagagtacagccccatgactgggcagtgccgctcccggacctccacagatttagatgtagatgtagatcaacccaaagaagaaaagaaagaatgctactataatctcaatgacgccagtctctgtgataatgtgttggcccccaatgtcacgaaacaagaatgctgctgtacatcaggcgtgggatggggagataactgcgaaatcttcccctgcccggtcttgggaactgctgagttcactgaaatgtgtcccaaagggaaaggttttgtgcctgctggagaatcatcttctgaagctggtggtgagaactataaagatgcagatgaatgcctactttttggacaagaaatctgcaaaaatggtttctgtttgaacactcggcctgggtatgaatgctactgtaagcaagggacgtactatgatcctgtgaaactgcagtgctttgatatggatgaatgtcaagaccccagtagttgtattgatggccagtgtgttaatacagagggctcttacaactgcttctgtactcaccccatggtcctggatgcgtcagaaaaaagatgtatacgaccggctgagtcaaacgaacaaatagaagaaactgatgtctaccaagatttgtgctgggaacatctgagtgatgaatacgtgtgtagccggcctcttgtgggcaagcagacaacgtacactgagtgctgctgtctgtatggagaggcctggggcatgcagtgtgccctctgccccctgaaggattcagatgactatgctcagctgtgtaacatccccgtgacgggacgccggcagccatatggacgggacgccttggttgacttcagtgaacagtatactccagaagccgatccctacttcatccaagaccgttttctaaatagctttgaggagttacaggctgaggaatgcggcatcctcaatggatgtgaaaatggtcgctgtgtgagggtccaggaaggttacacctgcgattgctttgatgggtatcacttggatacggccaagatgacctgtgtcgatgtaaatgaatgcgatgagttgaacaaccggatgtctctctgcaagaatgccaagtgcattaacaccgatggttcctacaagtgtttgtgtctgccaggctacgtgccttctgacaagccaaactactgcactccgttgaataccgccttgaatttagagaaagacagtgacctggagtgaaacagaatctacataacctaagcccatatactctgcactgtgtaaaggaaaagggagaaatgtattatacttgagacattgcacctaccccggaaggctggaaatacagaaacagcatggaattgcaagtcctctgaagacaatgagaggatttaggatgagcccgataggtgtggcagaccaaatggacatttctctaaaaaaccagtatatatagtctgttcatatgtaaaattcaatggaagagaggtggaacagtgctgttattttaaacagaaggttgtattattatgttgttttgtttttttactattgcttgattaaatttggcatttaaatagtggtggaaatattttatataattttcattttttggttgtgcagttccttggctactgtttttcttttacttcagttttttaaaaatctcaaatgaaaaagtcttcgatacaatattgttaagctgtattataagtattgttacacagggttatgcaattcccggcctggagcatttttgaaattcaaattgtctgtcctgtggagcaggcagtgattttgttccaaaactttgtatacacatttggagaaaagtactttatattttcagtgttttgtctgattttaatgtccgttcttagccaagctgctagcaggtgttaattggatccctttccttcactgaaatggaagagtttataagcttacgttagtattgtaatatgtaaagtaagcccaacaaaaatttttaaaaatttgatgatccccaatatatctaccattgtatgttaaataaatcaccatttttgtagaa

SEQ ID NO: 264668 - DNA, 5166 bp, Artificial Sequence
  derived and/or modified sequence
atggccggggcctggctgcgctggggcctgctgctgtgggccggcctgctggccagcagcgcccacggccgcctgcggcgcatcacctacgtggtgcaccctggccctggcctggccgccggggccctgcccctgagcggcccccccaggagcaggaccttcaacgtggccctgaatgcccgctacagccgcagcagcgctgctgctggggcccccagccgggccagccctggggtgcccagcgagaggaccaggaggaccagcaagccaggaggagctgccctgcagggcctgcggcccccacctcctcctcctcctgagcccgcccggcctgctgtgcctgggggccagctgcaccccaaccctgggggccaccctgctgctgcccccttcaccaagcagggccggcaggtggtgcgcagcaaggtgccccaggagacccagagcggcggcggcagccggctgcaggtgcaccagaagcagcagctgcagggcgtgaatgtgtgtggcggccgctgctgccacggctggagcaaggcccctggcagccagcgctgcaccaagcccagctgtgtgcccccctgccagaatggaggcatgtgcctgcggccccagctgtgtgtgtgcaagccaggcaccaagggcaaggcctgtgagaccatcgccgcccaggacaccagcagccctgtgtttggaggccagagccctggggccgccagctcctggggccccccagagcaggccgccaagcacaccagcagcaagaaggctgacaccctgccccgggtgtcccctgtggcccagatgaccctgaccctgaagcccaagcccagcgtgggcctgccccagcagatccacagccaggtgacccccctgagcagccagagcgtggtgatccaccacggccagacccaggagtatgtgctgaagcccaagtacttccctgcccagaagggcatctctggagagcagagcacagagggcagcttccccctgcgctacgtgcaggaccaggtggccgcccccttccagctgagcaaccacacaggccgcatcaaggtggtgttcacccccagcatctgcaaggtgacctgcaccaagggcagctgccagaacagctgtgagaagggcaacaccaccaccctcatcagtgaaaatggacatgctgctgacaccctgacagccaccaacttccgggtggtgatctgccacctgccctgcatgaatggaggccagtgcagcagccgggacaagtgccagtgcccccccaacttcaccgggaagctgtgccagatccctgtgcatggagcctctgtgcccaagctgtaccagcacagccagcagcccgggaaggccctgggcacccacgtgatccacagcacccacaccctgcccctgactgtgaccagccagcagggcgtgaaggtgaagtttcctcccaacatcgtgaacatccacgtgaagcaccccccagaggcctctgtgcagatccaccaggtgtccagaattgatggccccaccggccagaagaccaaggaggcccagcccggccagagccaggtgtcctaccagggcctgcctgtgcagaagacccagaccatccacagcacctacagccaccagcaggtgatcccccacgtgtaccctgtggccgccaagacccagctgggccgctgcttccaggagaccatcggcagccagtgtgggaaggccctgcccggcctgagcaagcaggaggactgctgcggcaccgtgggcacctcctggggcttcaacaagtgccagaagtgccccaagaagcccagctaccacggctacaaccagatgatggagtgcctgcccggctacaagagggtgaacaacaccttctgccaggacatcaatgaatgccagctgcagggcgtgtgccccaacggggagtgcctgaacaccatgggcagctaccgctgcacctgcaagattggcttcggccctgaccccaccttcagcagctgtgtgcctgacccccctgtgatcagcgaggagaagggcccctgctaccgcctggtgagcagcggccggcagtgcatgcaccccctgtctgtgcacctgaccaagcagctgtgctgctgcagcgtgggcaaggcctggggcccccactgtgagaagtgccccctgcccggcacagctgccttcaaggagatctgccctgggggcatgggctacacagtgtctggagtgcacagaagaagacccatccaccaccacgtgggcaagggccctgtgtttgtgaagcccaagaacacccagcctgtggccaagagcacccaccccccacccctgcctgccaaggaggagcctgtggaggccctgaccttcagccgggagcacggccctggggtggccgagcctgaggtggccacagcccctcctgagaaggagatccccagcctggaccaggagaagaccaagctggagcccggccagccccagctgagccctggcatcagcaccatccacctgcacccccagtttcctgtggtgattgagaagaccagcccccctgtgcctgtggaggtggcccctgaggccagcaccagcagcgccagccaggtgattgcccccacccaggtgacagagatcaatgaatgtactgtgaacccagacatctgtggggccggccactgcatcaacctgcctgtgcgctacacctgcatctgctatgagggctaccgcttcagcgagcagcagaggaaatgtgtggacattgatgagtgcacccaggtgcagcacctgtgcagccagggccgctgtgagaacacagagggcagcttcctgtgcatctgcccagctggcttcatggccagcgaggagggcaccaactgcattgatgtggatgagtgcctgcggccagatgtgtgtggggagggccactgtgtgaacacagtgggcgccttccgctgtgagtactgtgacagcggctacaggatgacccagaggggccgctgtgaagatattgatgaatgtctgaaccccagcacctgcccagatgagcagtgtgtgaacagccctggcagctaccagtgtgtgccctgcacagagggcttccggggctggaatggccagtgcctggatgtggatgaatgtctggagcccaacgtgtgtgccaacggggactgcagcaacctggagggcagctacatgtgcagctgccacaagggctacaccaggaccccagaccacaagcactgccgggacattgatgagtgccagcagggcaacctgtgtgtgaatggccagtgcaagaacacagagggcagcttccgctgcacctgtggccagggctaccagctgtctgctgccaaggaccagtgtgaagatattgatgagtgccagcaccgccacctgtgtgcccacggccagtgcaggaacacagagggcagcttccagtgtgtgtgtgaccagggctaccgggccagcggcctgggggaccactgtgaggacatcaatgaatgtctggaggacaagtctgtgtgccagagaggagactgcatcaacacagctggcagctatgactgcacctgcccagatggcttccagctggatgacaacaagacctgccaggacatcaatgaatgtgagcaccctggcctgtgtggcccccagggagaatgtctgaacacagagggcagcttccactgtgtgtgccagcagggcttcagcatctctgcagatggccgcacctgtgaagatattgatgaatgtgtgaacaacacagtgtgtgacagccacggcttctgtgacaacacagctggcagcttccgctgcctgtgctaccagggcttccaggccccccaggacggccagggctgtgtggatgtgaatgaatgtgagctgctgagcggcgtgtgtggggaggccttctgtgaaaatgtggagggcagcttcctgtgtgtgtgtgctgatgagaaccaggagtacagccccatgacaggccagtgccgcagcaggaccagcacagacctggatgtggatgtggaccagcccaaggaggagaagaaggagtgctactacaacctgaatgatgccagcctgtgtgacaacgtgctggcccccaacgtgaccaagcaggagtgctgctgcaccagcggcgtgggctggggagacaactgtgagatcttcccctgccctgtgctgggcacagctgagttcacagagatgtgccccaagggcaaaggatttgtgcctgctggggagagcagcagcgaggccggcggggagaactacaaggatgctgatgaatgtctgctgtttggccaggagatctgcaagaatggcttctgcctgaacacccggcccggctatgagtgctactgcaagcagggcacctactatgaccctgtgaagctgcagtgctttgacatggatgagtgccaggaccccagcagctgcattgatggccagtgtgtgaacacagagggcagctacaactgcttctgcacccaccccatggtgctggatgccagcgagaagcgctgcatccggcctgctgagagcaatgagcagatcgaggagacagatgtgtaccaggacctgtgctgggagcacctgagtgatgaatatgtgtgcagccggcccctggtgggcaagcagaccacctacacagagtgctgctgcctgtatggagaggcctggggcatgcagtgtgccctgtgccccctgaaggacagtgatgattatgcccagctgtgcaacatccctgtgacaggccggcggcagccctacggcagagatgccctggtggacttcagcgagcagtacaccccagaggccgacccctacttcatccaggaccgcttcctgaacagctttgaggagctgcaggccgaggagtgtggcatcctgaatggctgtgaaaatggccgctgtgtgcgggtgcaggagggctacacctgtgactgctttgatggctaccacctggacacagccaagatgacctgtgtggatgtgaatgaatgtgatgagctgaacaacaggatgagcctgtgcaagaatgccaagtgcatcaacacagatggcagctacaagtgcctgtgcctgcccggctacgtgcccagcgacaagcccaactactgcacccccctgaacacagccctgaacctggagaaggacagcgacctggagtag

SEQ ID NO: 264669 - DNA, 5166 bp, Artificial Sequence
  derived and/or modified sequence
atggccggcgcctggctgcggtggggcctgctgctgtgggccggccttttagctagtagcgcacacggaagactacggcggatcacctacgtggtgcaccccgggcctggcctggcagccggagctcttccactgtccggtcctccccgcagccgcacatttaatgtggcactcaacgccagatattccaggtcgagtgcagcggcgggtgcccccagccgggcatcgcctggggtgccgtcggagcggacgaggagaaccagcaagccgggcggcgctgctctgcagggcctgagacccccacctccccctcctcctgagccggcccggccagcagtcccaggcggccaacttcaccccaaccccggagggcatccagccgctgccccttttaccaaacagggaaggcaagtggtgcgctctaaagtcccacaagaaacccagagtggcggcggatcgagactccaggtacatcaaaaacaacagctgcagggtgtgaacgtttgcggcggacgctgttgccatggttggtcaaaagcaccgggtagccagaggtgtacaaagccttcatgtgtgcccccctgccagaatgggggtatgtgcctccggcctcagttgtgtgtttgcaagcccggaaccaaaggaaaggcttgtgagaccatcgcagcccaggacacatccagccccgtgttcggtgggcagagtcctggcgcagcgtcctcctggggtcctccagagcaggccgccaagcatacaagcagcaaaaaagccgacaccctccctagagtgtctcctgtcgcccagatgacactcacgttaaaacctaagccaagcgttggcctgcctcaacagatccactcacaagtgacccccctatcttctcagagcgtagtgatacatcacggccagacacaggaatacgtgctgaaacctaagtacttcccggcccagaaggggatctctggagaacaatctaccgaaggtagtttccctctgcggtacgtacaggatcaagttgcagcgccctttcagctcagcaatcacaccggaagaatcaaagtcgtattcaccccctccatatgtaaagtgacctgcaccaagggctcgtgccaaaatagctgtgagaaaggtaatacaactacattgatctcagagaacgggcatgctgccgatacactaactgccaccaatttccgtgttgtcatatgccacctgccctgtatgaatggagggcaatgctctagcagagataaatgccagtgcccccctaactttactgggaagctgtgccagattcctgtgcacggagcgtctgtgccaaagctgtatcaacattcacaacagcccggaaaagcacttggtacccatgtgattcacagcacccatacgctgcccctaacggttacgtcacagcaaggcgtgaaagtaaaattcccaccaaatatcgttaacatacatgtgaaacatcctccagaggcctcagtacagatccaccaggtgtccagaattgatggtcccacaggacagaaaacaaaggaagcacagccaggacaaagtcaagtgtcgtatcagggtctacctgtgcaaaagacgcagacaatccacagtacgtacagccatcagcaggtcattccacacgtttatcctgtggcagcaaaaactcagctggggcggtgctttcaagagactatcggttcacagtgcggcaaggccctgcctggactgtccaaacaggaggactgttgcggcacggtggggaccagctggggttttaacaagtgtcagaagtgccccaagaaacccagctatcacggatataaccaaatgatggaatgcctgcctggctacaaacgagtgaacaacacgttctgtcaggacattaatgagtgccagcttcagggggtgtgtccaaacggggagtgcctaaataccatggggtcttaccgctgcacctgtaagatcgggtttggcccagacccgactttctcctcctgcgtgccagatccaccagtcatttcagaagagaaaggtccttgttatcggcttgtgtcctcaggccggcagtgtatgcatcccctttccgtgcacctgacgaaacaactatgctgctgttcagtagggaaagcatggggccctcattgcgagaagtgccccctgcccggaaccgctgcattcaaggaaatctgtcctggtggcatgggctataccgtgtccggagtacaccgtagacgccccattcatcatcacgtcggcaagggacccgtcttcgtcaagccaaagaacactcagcccgtcgctaagtcaacgcaccctcctccccttcccgcgaaggaggaacccgttgaggcgctgaccttttccagggaacacgggccaggggtggccgaacccgaggttgccaccgcgccacccgaaaaggaaatcccatccctggaccaggagaagaccaagctggagcccgggcagccgcaactcagtccaggcatcagcacaatccatctgcacccacagtttcctgtggtgatcgagaaaacctcacctcccgttcccgtcgaggtggcgcccgaagcatccacctccagtgcaagtcaagtaattgccccaacccaggtcacagaaatcaatgagtgtacggtaaatcctgatatttgtggcgccggtcactgtattaatttgcccgtgcgctacacctgcatttgctatgaggggtacagattttccgaacaacagcgcaaatgcgtggatatcgacgagtgtacacaggttcagcacctctgttcccaggggaggtgcgaaaacactgaggggagttttctttgcatctgcccagctgggttcatggcatccgaggagggcactaattgtatcgatgtggatgagtgtctgcggcctgatgtgtgtggcgagggacactgtgtgaacacagtcggcgctttccgatgcgagtattgcgacagcggctataggatgactcaaagaggacgctgcgaagacatagatgagtgcctgaatccctctacatgccccgacgaacagtgtgtgaacagtccagggtcatatcagtgcgttccttgtaccgaaggtttcagaggttggaacggtcagtgcctcgacgtagacgaatgtctcgaacccaatgtgtgcgcgaacggtgattgttccaatcttgagggctcatacatgtgtagctgtcataaaggatacacacggacacctgatcataagcactgtcgagatatcgatgagtgtcagcaaggcaatttgtgtgttaacggccagtgcaagaacaccgagggctcctttagatgcacctgtgggcaggggtaccaactgtccgcagctaaagatcaatgtgaggacatcgacgagtgtcaacacaggcatctgtgtgcgcatgggcagtgccggaacacagagggttcattccagtgcgtgtgcgaccagggctatcgtgcaagcggactcggggaccactgcgaagacataaacgaatgcttagaagacaaatctgtctgtcaaagaggcgactgcatcaacacagcgggatcatatgactgcacttgtccagacggtttccagttggatgataacaagacatgtcaggatattaacgaatgcgaacaccccggtttatgtggaccacaaggcgagtgcctgaacactgaaggtagcttccactgtgtatgccagcaggggttttctatctccgctgatggtaggacatgtgaggacatcgacgaatgcgtcaacaatacagtttgcgacagccacggtttttgcgacaacacagctggaagctttaggtgtctctgttatcagggcttccaggcaccacaggacggacagggatgtgtcgacgtaaatgagtgtgaacttctcagtggagtttgcggggaagccttctgcgagaatgtcgaggggtcattcttatgcgtgtgcgccgatgagaatcaggagtatagccctatgacaggccagtgtcgcagtcgtaccagtacagacttagatgttgacgtggaccagcccaaagaggagaagaaagaatgttattataacttgaatgatgcatccctttgtgacaatgtactggccccgaacgtaacgaagcaggaatgttgctgtacatccggggtgggctggggcgacaattgtgagattttcccgtgtcccgtgctcggcacagccgaattcaccgagatgtgcccaaagggcaaagggttcgtccccgctggagaatcttcctccgaggccggcggagagaactacaaggacgctgatgagtgtctgctcttcggacaagaaatctgcaagaacggattctgtttgaacacccgtcccggttacgagtgctactgtaagcagggcacttactatgacccagtaaaactgcagtgcttcgacatggacgaatgccaggatccttccagctgtatagatggtcagtgcgtaaatacggaaggaagctataactgcttctgtactcaccctatggttttggatgcaagcgaaaaacggtgtatccggcccgcagaaagcaacgaacagatcgaggaaactgatgtgtatcaggacttgtgctgggagcacctttctgacgagtatgtgtgttctaggccactggtcggcaagcagacaacctacaccgagtgctgttgtctgtatggagaggcatgggggatgcagtgcgcgctgtgccctcttaaagactcggatgactatgcccagctgtgtaatattcccgtgaccgggcggcgccagccatatggccgcgatgcgctggtcgatttttctgagcagtatacgccagaggcggacccatactttatccaggacagattcctcaacagcttcgaggagctgcaagcagaggaatgcggaatcttgaacggctgcgaaaacggccgctgcgtgcgagtacaggaaggctatacatgcgattgtttcgacggttatcaccttgatacggcgaagatgacctgtgtggatgtgaatgagtgcgatgagctcaataacaggatgtcgctatgcaagaacgcaaaatgcatcaatactgacgggagctacaagtgcctctgcctgcctggatatgttccttctgacaagcctaattactgtacccctctcaataccgcactcaatctggagaaagactccgacttggaatag

SEQ ID NO: 264670 - DNA, 5165 bp, Artificial Sequence
  derived and/or modified sequence
atggccggagcctggctgagatgggggctcctgctatgggccggtttgttggcctcttccgcccacggtcggttgcgacggatcacatacgtggtccatccaggcccaggcctggccgcaggcgctctgccgcttagtgggcctccacgctcgaggaccttcaatgtggccctgaatgcacgatactccagatcctcggccgctgccggagccccttcccgcgcatcacctggcgtaccaagcgaacgtacccgtagaacttcaaagcctggaggggctgccctccaaggcctgcgacctccacctccacccccaccggagccagccaggccagcagtccctggcggtcaacttcatccaaatcccggaggccacccggctgcggctcccttcacaaaacagggtaggcaggtggtacgatcaaaggtgccccaggagacccaatctggagggggaagtcggctgcaagtgcaccaaaaacagcaattacagggagtgaacgtatgcggcggacgctgttgtcacggttggtcaaaagccccagggtcacagagatgtacgaagccaagctgtgtgcctccgtgtcaaaacggcggaatgtgtctcaggccacagctctgtgtttgtaagcccggtacaaagggaaaggcatgcgaaaccatcgctgcgcaagatacctcttcccctgtctttggcggacaatcccctggcgcagctagctcgtggggaccacctgagcaggcagcaaaacatacttccagtaagaaggctgataccctgcctcgcgtgtcgccagttgctcaaatgacacttacactgaaacctaagccatcagtgggtctacctcagcaaatccatagccaagtaacccccctgtcttcccagtctgtcgtcatccaccatggtcagacacaggaatacgtgctgaaaccgaagtacttccccgctcagaaaggcatcagcggtgaacagtccaccgaaggatctttccccctaaggtatgttcaggatcaggtcgctgcacccttccagttgagcaatcatactggtcgaatcaaggtagtcttcacgccctcaatctgtaaagtcacatgcacaaagggctcctgtcagaattcttgcgaaaaaggcaataccactacactgatctcggagaatggccacgccgctgacactctgaccgccacaaatttccgcgtggtcatttgccacctgccctgtatgaatggtgggcagtgctcatcacgcgacaaatgtcagtgtccacccaactttaccgggaagctctgccaaatccctgtccatggggcttcggtaccgaagctgtaccaacactctcaacagccagggaaagcactcggtacacacgtgatccattccacacataccctgccccttacagttacgtcacagcagggcgtgaaagtgaaatttcctcccaatatcgtgaatatccatgtgaagcatccacctgaggccagcgtacagatccatcaggtctcccgcatcgacggcccaaccggccaaaaaaccaaggaggcccagcctggccagtcccaggtatcgtatcaaggtctgcctgtgcagaaaacacagaccatacattcaacctacagtcaccagcaggtgatacctcacgtgtaccccgtcgccgctaagactcagctcggtcgctgctttcaggagactatcggcagtcagtgcggaaaagcccttccaggcttgagcaaacaggaggattgttgcgggacagttggtacctcctgggggttcaataaatgccagaagtgcccgaaaaagccgagctaccacggatacaaccagatgatggaatgcctcccagggtataaaagagtgaataataccttctgtcaggatatcaatgagtgccagcttcagggagtgtgcccaaacggtgagtgtctgaatactatgggtagctaccgctgtacctgtaagatcggtttcggccctgatcctacattttcaagctgtgtgcctgatcctcccgttattagcgaggagaaagggccttgttacagactggtgtcttcaggaaggcagtgcatgcacccactttcagtccacctcaccaaacagttatgctgttgcagtgtcgggaaagcctggggtccccattgcgagaaatgcccattgcctgggaccgctgcgtttaaagagatttgtccaggcggtatgggctataccgtcagtggtgtccataggcgtagaccaatacaccatcatgtgggcaagggcccagtttttgtgaaacctaaaaatacgcagcccgtggcgaagtctacccatcctccacctctgccagcaaaagaagagcctgttgaagccctgacgttctcgcgggagcacggcccaggggtggcagaaccagaggtcgcgactgctccccctgagaaggaaataccatccctcgatcaggagaaaacaaagctggaaccgggacagccccagcttagcccgggtatatccacaatccatttacatcctcaatttcctgttgtgattgaaaaaacctcaccacccgtgcctgtcgaagtggccccagaagcttccacgagttcagcatcacaggtgatcgcccctacgcaggtcacagaaattaacgagtgcactgtgaacccagatatttgcggggctggacactgtatcaacctccctgtaagatacacttgcatctgttatgaaggataccgcttctcagagcaacagcggaagtgtgtggatattgatgagtgcacacaagttcagcatctatgctcccagggcagatgcgagaatacggaaggtagctttctttgcatttgccccgcaggattcatggccagcgaagaaggcacaaactgcattgacgtggacgagtgtctacggcctgatgtctgcggagaaggacactgcgtaaacactgtgggcgcttttagatgtgagtactgtgattctggctacaggatgactcagcgcggtaggtgtgaggacatcgatgagtgcctgaaccccagcacatgtcctgacgagcagtgcgtgaactcaccaggctcctaccagtgcgtcccctgtaccgagggtttcagaggctggaatggacagtgcttagacgtggacgaatgcctggaacccaacgtctgtgctaatggcgattgtagcaatttggaaggaagctatatgtgtagctgccacaagggatacactcgcacgcccgaccacaagcactgcagagatattgacgagtgccagcaaggcaacctgtgtgtgaacggccagtgtaaaaatactgaaggctcttttagatgtacgtgtggtcagggataccagctgagtgccgcaaaagatcaatgcgaggacattgatgaatgtcagcatagacacctgtgtgcccacggccaatgtcggaataccgagggatcctttcagtgcgtatgtgatcagggctatcgggcttccggtctgggagaccattgcgaagacatcaacgagtgtctcgaagataagtccgtgtgccaacgaggtgactgcataaatacagcgggatcctatgattgcacctgccctgatgggttccagctggacgacaacaagacgtgtcaggatatcaacgagtgtgagcaccccggactgtgtggaccccagggggaatgcctcaacacggaaggatctttccactgtgtgtgccagcaggggttttcaatctccgccgacggtcgcacatgcgaagacatcgatgaatgtgttaataatactgtgtgtgactcccacggattctgcgataacaccgctgggtcttttcgatgtctctgctatcagggttttcaggcccctcaagatggtcaggggtgtgtggatgtgaatgaatgtgagttattgtccggcgtgtgcggggaggctttctgtgagaacgtagagggcagctttctgtgcgtgtgtgccgacgaaaaccaggaatatagccccatgactggccagtgtcgaagtcgaactagcacggacctggacgttgacgtcgatcaacctaaagaggagaagaaggagtgttattataacctgaacgatgccagcctctgtgataatgttttagcccctaacgtaaccaaacaggaatgctgctgtactagcggcgtgggatggggagacaactgtgaaatttttccttgccctgtactgggcactgccgagttcacagagatgtgtcccaaggggaaaggattcgtccccgcaggggaaagctctagcgaggcgggaggcgaaaactacaaggacgccgatgagtgcttactgtttggccaggagatctgcaaaaatggtttttgtctgaataccaggccgggttacgaatgttattgtaagcagggaacctattacgaccccgtgaaacttcagtgctttgacatggatgagtgccaggacccttcctcctgcatcgacgggcaatgtgtgaacaccgagggctcctataattgcttctgcacccatcccatggttttggatgcgtcggaaaagcgatgcatacggcctgcagaaagtaacgagcagatcgaagaaacagatgtctaccaggatctgtgttgggaacacctttccgatgaatacgtgtgcagccgtccactggtgggtaagcaaaccacttacaccgaatgttgctgcctctacggtgaggcttggggaatgcagtgcgccctgtgtcctcttaaggactcagacgattatgctcagctatgtaacatacccgtaactggccgacgacagccgtatggcagagatgccctcgtggacttctccgagcagtacacccctgaagctgatccctacttcatacaagaccggttcctcaacagctttgaggagctccaagcagaggagtgcgggattctgaatggatgcgagaacggcaggtgcgtccgcgttcaggaaggatacacatgcgactgtttcgatgggtatcacttggatacagccaagatgacatgcgtcgacgttaacgagtgtgacgagctgaataacagaatgtctttgtgcaagaatgcaaagtgcattaataccgacggcagttacaagtgcctgtgtctgcctggctacgtacccagcgataagccgaactactgtacaccacttaatactgctctgaatttagaaaaagatagcgatctcgagta

SEQ ID NO: 264671 - DNA, 5166 bp, Artificial Sequence
  derived and/or modified sequence
atggccggcgcctggctgagatggggcctgctgctgtgggccggcctgctggccagcagcgcccacggcagactgagaagaatcacctacgtggtgcaccccggccccggcctggccgccggcgccctgcccctgagcggcccccccagaagcagaaccttcaacgtggccctgaacgccagatacagcagaagcagcgccgccgccggcgcccccagcagagccagccccggcgtgcccagcgagagaaccagaagaaccagcaagcccggcggcgccgccctgcagggcctgagacccccccccccccccccccccgagcccgccagacccgccgtgcccggcggccagctgcaccccaaccccggcggccaccccgccgccgcccccttcaccaagcagggcagacaggtggtgagaagcaaggtgccccaggagacccagagcggcggcggcagcagactgcaggtgcaccagaagcagcagctgcagggcgtgaacgtgtgcggcggcagatgctgccacggctggagcaaggcccccggcagccagagatgcaccaagcccagctgcgtgcccccctgccagaacggcggcatgtgcctgagaccccagctgtgcgtgtgcaagcccggcaccaagggcaaggcctgcgagaccatcgccgcccaggacaccagcagccccgtgttcggcggccagagccccggcgccgccagcagctggggcccccccgagcaggccgccaagcacaccagcagcaagaaggccgacaccctgcccagagtgagccccgtggcccagatgaccctgaccctgaagcccaagcccagcgtgggcctgccccagcagatccacagccaggtgacccccctgagcagccagagcgtggtgatccaccacggccagacccaggagtacgtgctgaagcccaagtacttccccgcccagaagggcatcagcggcgagcagagcaccgagggcagcttccccctgagatacgtgcaggaccaggtggccgcccccttccagctgagcaaccacaccggcagaatcaaggtggtgttcacccccagcatctgcaaggtgacctgcaccaagggcagctgccagaacagctgcgagaagggcaacaccaccaccctgatcagcgagaacggccacgccgccgacaccctgaccgccaccaacttcagagtggtgatctgccacctgccctgcatgaacggcggccagtgcagcagcagagacaagtgccagtgcccccccaacttcaccggcaagctgtgccagatccccgtgcacggcgccagcgtgcccaagctgtaccagcacagccagcagcccggcaaggccctgggcacccacgtgatccacagcacccacaccctgcccctgaccgtgaccagccagcagggcgtgaaggtgaagttcccccccaacatcgtgaacatccacgtgaagcacccccccgaggccagcgtgcagatccaccaggtgagcagaatcgacggccccaccggccagaagaccaaggaggcccagcccggccagagccaggtgagctaccagggcctgcccgtgcagaagacccagaccatccacagcacctacagccaccagcaggtgatcccccacgtgtaccccgtggccgccaagacccagctgggcagatgcttccaggagaccatcggcagccagtgcggcaaggccctgcccggcctgagcaagcaggaggactgctgcggcaccgtgggcaccagctggggcttcaacaagtgccagaagtgccccaagaagcccagctaccacggctacaaccagatgatggagtgcctgcccggctacaagagagtgaacaacaccttctgccaggacatcaacgagtgccagctgcagggcgtgtgccccaacggcgagtgcctgaacaccatgggcagctacagatgcacctgcaagatcggcttcggccccgaccccaccttcagcagctgcgtgcccgacccccccgtgatcagcgaggagaagggcccctgctacagactggtgagcagcggcagacagtgcatgcaccccctgagcgtgcacctgaccaagcagctgtgctgctgcagcgtgggcaaggcctggggcccccactgcgagaagtgccccctgcccggcaccgccgccttcaaggagatctgccccggcggcatgggctacaccgtgagcggcgtgcacagaagaagacccatccaccaccacgtgggcaagggccccgtgttcgtgaagcccaagaacacccagcccgtggccaagagcacccaccccccccccctgcccgccaaggaggagcccgtggaggccctgaccttcagcagagagcacggccccggcgtggccgagcccgaggtggccaccgccccccccgagaaggagatccccagcctggaccaggagaagaccaagctggagcccggccagccccagctgagccccggcatcagcaccatccacctgcacccccagttccccgtggtgatcgagaagaccagcccccccgtgcccgtggaggtggcccccgaggccagcaccagcagcgccagccaggtgatcgcccccacccaggtgaccgagatcaacgagtgcaccgtgaaccccgacatctgcggcgccggccactgcatcaacctgcccgtgagatacacctgcatctgctacgagggctacagattcagcgagcagcagagaaagtgcgtggacatcgacgagtgcacccaggtgcagcacctgtgcagccagggcagatgcgagaacaccgagggcagcttcctgtgcatctgccccgccggcttcatggccagcgaggagggcaccaactgcatcgacgtggacgagtgcctgagacccgacgtgtgcggcgagggccactgcgtgaacaccgtgggcgccttcagatgcgagtactgcgacagcggctacagaatgacccagagaggcagatgcgaggacatcgacgagtgcctgaaccccagcacctgccccgacgagcagtgcgtgaacagccccggcagctaccagtgcgtgccctgcaccgagggcttcagaggctggaacggccagtgcctggacgtggacgagtgcctggagcccaacgtgtgcgccaacggcgactgcagcaacctggagggcagctacatgtgcagctgccacaagggctacaccagaacccccgaccacaagcactgcagagacatcgacgagtgccagcagggcaacctgtgcgtgaacggccagtgcaagaacaccgagggcagcttcagatgcacctgcggccagggctaccagctgagcgccgccaaggaccagtgcgaggacatcgacgagtgccagcacagacacctgtgcgcccacggccagtgcagaaacaccgagggcagcttccagtgcgtgtgcgaccagggctacagagccagcggcctgggcgaccactgcgaggacatcaacgagtgcctggaggacaagagcgtgtgccagagaggcgactgcatcaacaccgccggcagctacgactgcacctgccccgacggcttccagctggacgacaacaagacctgccaggacatcaacgagtgcgagcaccccggcctgtgcggcccccagggcgagtgcctgaacaccgagggcagcttccactgcgtgtgccagcagggcttcagcatcagcgccgacggcagaacctgcgaggacatcgacgagtgcgtgaacaacaccgtgtgcgacagccacggcttctgcgacaacaccgccggcagcttcagatgcctgtgctaccagggcttccaggccccccaggacggccagggctgcgtggacgtgaacgagtgcgagctgctgagcggcgtgtgcggcgaggccttctgcgagaacgtggagggcagcttcctgtgcgtgtgcgccgacgagaaccaggagtacagccccatgaccggccagtgcagaagcagaaccagcaccgacctggacgtggacgtggaccagcccaaggaggagaagaaggagtgctactacaacctgaacgacgccagcctgtgcgacaacgtgctggcccccaacgtgaccaagcaggagtgctgctgcaccagcggcgtgggctggggcgacaactgcgagatcttcccctgccccgtgctgggcaccgccgagttcaccgagatgtgccccaagggcaagggcttcgtgcccgccggcgagagcagcagcgaggccggcggcgagaactacaaggacgccgacgagtgcctgctgttcggccaggagatctgcaagaacggcttctgcctgaacaccagacccggctacgagtgctactgcaagcagggcacctactacgaccccgtgaagctgcagtgcttcgacatggacgagtgccaggaccccagcagctgcatcgacggccagtgcgtgaacaccgagggcagctacaactgcttctgcacccaccccatggtgctggacgccagcgagaagagatgcatcagacccgccgagagcaacgagcagatcgaggagaccgacgtgtaccaggacctgtgctgggagcacctgagcgacgagtacgtgtgcagcagacccctggtgggcaagcagaccacctacaccgagtgctgctgcctgtacggcgaggcctggggcatgcagtgcgccctgtgccccctgaaggacagcgacgactacgcccagctgtgcaacatccccgtgaccggcagaagacagccctacggcagagacgccctggtggacttcagcgagcagtacacccccgaggccgacccctacttcatccaggacagattcctgaacagcttcgaggagctgcaggccgaggagtgcggcatcctgaacggctgcgagaacggcagatgcgtgagagtgcaggagggctacacctgcgactgcttcgacggctaccacctggacaccgccaagatgacctgcgtggacgtgaacgagtgcgacgagctgaacaacagaatgagcctgtgcaagaacgccaagtgcatcaacaccgacggcagctacaagtgcctgtgcctgcccggctacgtgcccagcgacaagcccaactactgcacccccctgaacaccgccctgaacctggagaaggacagcgacctggagtag

SEQ ID NO: 264672 - protein, 214 aa, Artificial Sequence
  derived and/or modified sequence
MYVRVSFDTKPDLLLHLMTKEWQLELPKLLISVHGGLQNFELQPKLKQVFGKGLIKAAMTTGAWIFTGGVNTGVIRHVGDALKDHASKSRGKICTIGIAPWGIVENQEDLIGRDVVRPYQTMSNPMSKLTVLNSMHSHFILADNGTTGKYGAEVKLRRQLEKHISLQKINTSFHSYKTAHVDLQDKRQVKTALEQAEWQPGRGMFDHDNLMQST

SEQ ID NO: 264673 - protein, 1556 aa, Artificial Sequence
  derived and/or modified sequence
  misc_feature (1)..(1): Xaa can be any naturally occurring amino acid
XYVRVSFDTKPDLLLHLMTKEWQLELPKLLISVHGGLQNFELQPKLKQVFGKGLIKAAMTTGAWIFTGGVNTGVIRHVGDALKDHASKSRGKICTIGIAPWGIVENQEDLIGRDVVRPYQTMSNPMSKLTVLNSMHSHFILADNGTTGKYGAEVKLRRQLEKHISLQKINTRIGQGVPVVALIVEGGPNVISIVLEYLRDTPPVPVVVCDGSGRASDILAFGHKYSEEGGLINESLRDQLLVTIQKTFTYTRTQAQHLFIILMECMKKKELITVFRMGSEGHQDIDLAILTALLKGANASAPDQLSLALAWNRVDIARSQIFIYGQQWPVGSLEQAMLDALVLDRVDFVKLLIENGVSMHRFLTISRLEELYNTRHGPSNTLYHLVRDVKKREYPGFGWIYFKGNLPPDYRISLIDIGLVIEYLMGGAYRCNYTRKRFRTLYHNLFGPKRDDIPLRRGRKTTKKREEEVDIDLDDPEINHFPFPFHELMVWAVLMKRQKMALFFWQHGEEAMAKALVACKLCKAMAHEASENDMVDDISQELNHNSRDFGQLAVELLDQSYKQDEQLAMKLLTYELKNWSNATCLQLAVAAKHRDFIAHTCSQMLLTDMWMGRLRMRKNSGLKVILGILLPPSILSLEFKNKDDMPYMSQAQEIHLQEKEAEEPEKPTKEKEEEDMELTAMLGRNNGESSRKKDEEEVQSKHRLIPLGRKIYEFYNAPIVKFWFYTLAYIGYLMLFNYIVLVKMERWPSTQEWIVISYIFTLGIEKMREILMSEPGKLLQKVKVWLQEYWNVTDLIAILLFSVGMILRLQDQPFRSDGRVIYCVNIIYWYIRLLDIFGVNKYLGPYVMMIGKMMIDMMYFVIIMLVVLMSFGVARQAILFPNEEPSWKLAKNIFYMPYWMIYGEVFADQIDPPCGQNETREDGKIIQLPPCKTGAWIVPAIMACYLLVANILLVNLLIAVFNNTFFEVKSISNQVWKFQRYQLIMTFHERPVLPPPLIIFSHMTMIFQHLCCRWRKHESDPDERDYGLKLFITDDELKKVHDFEEQCIEEYFREKDDRFNSSNDERIRVTSERVENMSMRLEEVNEREHSMKASLQTVDIRLAQLEDLIGRMATALERLTGLERAESNKIRSRTSSDCTDAAYIVRQSSFNSQEGNTFKLQESIDPAGEETMSPTSPTLMPRMRSHSFYSVNMKDKGGIEKLESIFKERSLSLHRATSSHSVAKEPKAPAAPANTLAIVPDSRRPSSCIDIYVSAMDELHCDIDPLDNSVNILGLGEPSFSTPVPSTAPSSSAYATLAPTDRPPSRSIDFEDITSMDTRSFSSDYTHLPECQNPWDSEPPMYHTIERSKSSRYLATTPFLLEEAPIVKSHSFMFSPSRSYYANFGVPVKTAEYTSITDCIDTRCVNAPQAIADRAAFPGGLGDKVEDLTCCHPEREAELSHPSSDSEENEAKGRRATIAISSQEGDNSERTLSNNITVPKIERANSYSAEEPSAPYAHTRKSFSISDKLDRQRNTASLRNPFQRSKSSKPEGRGDSLSMRRLSRTSAFQSFESKHN

SEQ ID NO: 264674 - protein, 1579 aa, Artificial Sequence
  derived and/or modified sequence
MYVRVSFDTKPDLLLHLMTKEWQLELPKLLISVHGGLQNFELQPKLKQVFGKGLIKAAMTTGAWIFTGGVNTGVIRHVGDALKDHASKSRGKICTIGIAPWGIVENQEDLIGRDVVRPYQTMSNPMSKLTVLNSMHSHFILADNGTTGKYGAEVKLRRQLEKHISLQKINTRCLPFFSLDSRLFYSFWGSCQLDSVGIGQGVPVVALIVEGGPNVISIVLEYLRDTPPVPVVVCDGSGRASDILAFGHKYSEEGGLINESLRDQLLVTIQKTFTYTRTQAQHLFIILMECMKKKELITVFRMGSEGHQDIDLAILTALLKGANASAPDQLSLALAWNRVDIARSQIFIYGQQWPVGSLEQAMLDALVLDRVDFVKLLIENGVSMHRFLTISRLEELYNTRHGPSNTLYHLVRDVKKGNLPPDYRISLIDIGLVIEYLMGGAYRCNYTRKRFRTLYHNLFGPKRPKALKLLGMEDDIPLRRGRKTTKKREEEVDIDLDDPEINHFPFPFHELMVWAVLMKRQKMALFFWQHGEEAMAKALVACKLCKAMAHEASENDMVDDISQELNHNSRDFGQLAVELLDQSYKQDEQLAMKLLTYELKNWSNATCLQLAVAAKHRDFIAHTCSQMLLTDMWMGRLRMRKNSGLKVILGILLPPSILSLEFKNKDDMPYMSQAQEIHLQEKEAEEPEKPTKEKEEEDMELTAMLGRNNGESSRKKDEEEVQSKHRLIPLGRKIYEFYNAPIVKFWFYTLAYIGYLMLFNYIVLVKMERWPSTQEWIVISYIFTLGIEKMREILMSEPGKLLQKVKVWLQEYWNVTDLIAILLFSVGMILRLQDQPFRSDGRVIYCVNIIYWYIRLLDIFGVNKYLGPYVMMIGKMMIDMMYFVIIMLVVLMSFGVARQAILFPNEEPSWKLAKNIFYMPYWMIYGEVFADQIDPPCGQNETREDGKIIQLPPCKTGAWIVPAIMACYLLVANILLVNLLIAVFNNTFFEVKSISNQVWKFQRYQLIMTFHERPVLPPPLIIFSHMTMIFQHLCCRWRKHESDPDERDYGLKLFITDDELKKVHDFEEQCIEEYFREKDDRFNSSNDERIRVTSERVENMSMRLEEVNEREHSMKASLQTVDIRLAQLEDLIGRMATALERLTGLERAESNKIRSRTSSDCTDAAYIVRQSSFNSQEGNTFKLQESIDPAGEETMSPTSPTLMPRMRSHSFYSVNMKDKGGIEKLESIFKERSLSLHRATSSHSVAKEPKAPAAPANTLAIVPDSRRPSSCIDIYVSAMDELHCDIDPLDNSVNILGLGEPSFSTPVPSTAPSSSAYATLAPTDRPPSRSIDFEDITSMDTRSFSSDYTHLPECQNPWDSEPPMYHTIERSKSSRYLATTPFLLEEAPIVKSHSFMFSPSRSYYANFGVPVKTAEYTSITDCIDTRCVNAPQAIADRAAFPGGLGDKVEDLTCCHPEREAELSHPSSDSEENEAKGRRATIAISSQEGDNSERTLSNNITVPKIERANSYSAEEPSAPYAHTRKSFSISDKLDRQRNTASLRNPFQRSKSSKPEGRGDSLSMRRLSRTSAFQSFESKHN

SEQ ID NO: 264675 - protein, 1569 aa, Artificial Sequence
  derived and/or modified sequence
MYVRVSFDTKPDLLLHLMTKEWQLELPKLLISVHGGLQNFELQPKLKQVFGKGLIKAAMTTGAWIFTGGVNTGVIRHVGDALKDHASKSRGKICTIGIAPWGIVENQEDLIGRDVVRPYQTMSNPMSKLTVLNSMHSHFILADNGTTGKYGAEVKLRRQLEKHISLQKINTRCLPFFSLDSRLFYSFWGSCQLDSVGIGQGVPVVALIVEGGPNVISIVLEYLRDTPPVPVVVCDGSGRASDILAFGHKYSEEGGLINESLRDQLLVTIQKTFTYTRTQAQHLFIILMECMKKKELITVFRMGSEGHQDIDLAILTALLKGANASAPDQLSLALAWNRVDIARSQIFIYGQQWPVGSLEQAMLDALVLDRVDFVKLLIENGVSMHRFLTISRLEELYNTRHGPSNTLYHLVRDVKKGNLPPDYRISLIDIGLVIEYLMGGAYRCNYTRKRFRTLYHNLFGPKRDDIPLRRGRKTTKKREEEVDIDLDDPEINHFPFPFHELMVWAVLMKRQKMALFFWQHGEEAMAKALVACKLCKAMAHEASENDMVDDISQELNHNSRDFGQLAVELLDQSYKQDEQLAMKLLTYELKNWSNATCLQLAVAAKHRDFIAHTCSQMLLTDMWMGRLRMRKNSGLKVILGILLPPSILSLEFKNKDDMPYMSQAQEIHLQEKEAEEPEKPTKEKEEEDMELTAMLGRNNGESSRKKDEEEVQSKHRLIPLGRKIYEFYNAPIVKFWFYTLAYIGYLMLFNYIVLVKMERWPSTQEWIVISYIFTLGIEKMREILMSEPGKLLQKVKVWLQEYWNVTDLIAILLFSVGMILRLQDQPFRSDGRVIYCVNIIYWYIRLLDIFGVNKYLGPYVMMIGKMMIDMMYFVIIMLVVLMSFGVARQAILFPNEEPSWKLAKNIFYMPYWMIYGEVFADQIDPPCGQNETREDGKIIQLPPCKTGAWIVPAIMACYLLVANILLVNLLIAVFNNTFFEVKSISNQVWKFQRYQLIMTFHERPVLPPPLIIFSHMTMIFQHLCCRWRKHESDPDERDYGLKLFITDDELKKVHDFEEQCIEEYFREKDDRFNSSNDERIRVTSERVENMSMRLEEVNEREHSMKASLQTVDIRLAQLEDLIGRMATALERLTGLERAESNKIRSRTSSDCTDAAYIVRQSSFNSQEGNTFKLQESIDPAGEETMSPTSPTLMPRMRSHSFYSVNMKDKGGIEKLESIFKERSLSLHRATSSHSVAKEPKAPAAPANTLAIVPDSRRPSSCIDIYVSAMDELHCDIDPLDNSVNILGLGEPSFSTPVPSTAPSSSAYATLAPTDRPPSRSIDFEDITSMDTRSFSSDYTHLPECQNPWDSEPPMYHTIERSKSSRYLATTPFLLEEAPIVKSHSFMFSPSRSYYANFGVPVKTAEYTSITDCIDTRCVNAPQAIADRAAFPGGLGDKVEDLTCCHPEREAELSHPSSDSEENEAKGRRATIAISSQEGDNSERTLSNNITVPKIERANSYSAEEPSAPYAHTRKSFSISDKLDRQRNTASLRNPFQRSKSSKPEGRGDSLSMRRLSRTSAFQSFESKHN

SEQ ID NO: 264676 - DNA, 693 bp, Artificial Sequence
  derived and/or modified sequence
atgtacgtgagagtgagcttcgacaccaagcccgacctgctgctgcacctgatgaccaaggagtggcagctggagctgcccaagctgctgatcagcgtgcacggcggcctgcagaacttcgagctgcagcccaagctgaagcaggtgttcggcaagggcctgatcaaggccgccatgaccaccggcgcctggatcttcaccggcggcgtgaacaccggcgtgatcagacacgtgggcgacgccctgaaggaccacgccagcaagagcagaggcaagatctgcaccatcggcatcgccccctggggcatcgtggagaaccaggaggacctgatcggcagagacgtggtgagaccctaccagaccatgagcaaccccatgagcaagctgaccgtgctgaacagcatgcacagccacttcatcctggccgacaacggcaccaccggcaagtacggcgccgaggtgaagctgagaagacagctggagaagcacatcagcctgcagaagatcaacaccagaatcggccagggcgtgcccgtggtggccctgatcgtggagggcggccccaacgtgatcagcatcgtgctggagtacctgagagacaccccccccgtgcccgtggtggtgtgcgacggcagcggcagagccagcgacatcctggccttcggccacaagtacagcgaggagggcggctag

SEQ ID NO: 264677 - DNA, 645 bp, Artificial Sequence
  derived and/or modified sequence
atgtacgtgagagtgagcttcgacaccaagcccgacctgctgctgcacctgatgaccaaggagtggcagctggagctgcccaagctgctgatcagcgtgcacggcggcctgcagaacttcgagctgcagcccaagctgaagcaggtgttcggcaagggcctgatcaaggccgccatgaccaccggcgcctggatcttcaccggcggcgtgaacaccggcgtgatcagacacgtgggcgacgccctgaaggaccacgccagcaagagcagaggcaagatctgcaccatcggcatcgccccctggggcatcgtggagaaccaggaggacctgatcggcagagacgtggtgagaccctaccagaccatgagcaaccccatgagcaagctgaccgtgctgaacagcatgcacagccacttcatcctggccgacaacggcaccaccggcaagtacggcgccgaggtgaagctgagaagacagctggagaagcacatcagcctgcagaagatcaacaccagcttccacagctacaagaccgcccacgtggacctgcaggacaagagacaggtgaagaccgccctggagcaggccgagtggcagcccggcagaggcatgttcgaccacgacaacctgatgcagagcacctag

SEQ ID NO: 264678 - DNA, 693 bp, Artificial Sequence
  derived and/or modified sequence
atgtatgtgcgggtgagcttcgataccaaaccagacctccttctccacctaatgacaaaggagtggcagctggagttgcccaagttgctgatatctgtacacggggggctgcagaattttgagttacaacctaaactgaaacaggtatttggaaagggcctaataaaggccgcaatgactactggagcctggatctttaccggtggagttaacacaggcgtgatccggcatgtcggggacgccttaaaggaccatgctagtaaatcccgtgggaagatttgcactattggcatcgctccatgggggatcgtagagaatcaggaggatcttatcggccgggacgtagttcgcccctatcagaccatgagcaaccctatgagtaaactcaccgtgctgaacagtatgcatagccatttcatcctcgccgataacgggactaccggcaagtatggcgctgaagttaaactccgtcgccagcttgaaaagcacatttctttgcaaaaaatcaatacaagaataggccagggtgtgcctgtagtagctctgatcgtggagggcggcccaaatgtaatcagtattgtcctagaataccttagagacactccaccggttccagtggtcgtgtgtgacggatcggggagggcctcagacatccttgccttcggccacaagtactccgaagagggaggttag

SEQ ID NO: 264679 - DNA, 645 bp, Artificial Sequence
  derived and/or modified sequence
atgtatgtgcgggtctctttcgatactaagccagatctgctgcttcatcttatgacaaaggagtggcagttagagttacctaagttgttaatatccgtccatggaggactccaaaacttcgaactgcagcccaaactaaaacaggtatttgggaagggactcatcaaggccgccatgactaccggagcgtggattttcacaggtggggtgaacactggtgtcatcaggcacgtcggagacgccctgaaggatcacgctagtaagagcagggggaagatctgtactattggtatcgcaccctggggaatcgttgagaaccaggaggacctgataggtagggacgttgtcaggccctatcaaaccatgagtaaccctatgtccaagttgactgtgctgaattcaatgcactcacattttatactggcggataacggcactaccggcaagtatggcgccgaagtcaaactgcgcagacaattggaaaagcacatatcactgcagaagataaacacatcgttccattcctacaagaccgcccatgttgacttacaggataagcggcaggtaaaaaccgccctggaacaggctgagtggcagcccggacggggcatgtttgatcacgacaacctgatgcagagcacctag

SEQ ID NO: 264680 - DNA, 693 bp, Artificial Sequence
  derived and/or modified sequence
atgtatgtgcgggtgtcctttgacaccaagccagacctgctgctgcacctgatgaccaaggagtggcagctggagctgcccaagctgctgatctctgtgcacggcggcctgcagaactttgagctgcagcccaagctgaagcaggtgtttgggaagggcctcatcaaggccgccatgaccactggagcctggatcttcaccggaggagtgaacacaggagtcatcagacatgtgggagatgccctgaaggaccacgccagcaagagccggggcaagatctgcaccatcggcatcgccccctggggcatcgtggagaaccaggaggacctgattggaagagatgtggtgcggccctaccagaccatgagcaaccccatgagcaagctgactgtgctgaacagcatgcacagccacttcatcctggccgacaatggcaccaccgggaagtacggggctgaggtgaagctgcggcggcagctggagaagcacatcagcctgcagaagatcaacaccagaattggccagggcgtgcctgtggtggccctgattgtggagggcggccccaacgtcatcagcatcgtgctggagtacctgcgggacaccccacctgtgcctgtggtggtgtgtgatggcagcggccgggccagtgacatcctggccttcggccacaagtacagcgaggagggcggctag

SEQ ID NO: 264681 - DNA, 645 bp, Artificial Sequence
  derived and/or modified sequence
atgtatgtgcgggtgtcctttgacaccaagccagacctgctgctgcacctgatgaccaaggagtggcagctggagctgcccaagctgctgatctctgtgcacggcggcctgcagaactttgagctgcagcccaagctgaagcaggtgtttgggaagggcctcatcaaggccgccatgaccactggagcctggatcttcaccggaggagtgaacacaggagtcatcagacatgtgggagatgccctgaaggaccacgccagcaagagccggggcaagatctgcaccatcggcatcgccccctggggcatcgtggagaaccaggaggacctgattggaagagatgtggtgcggccctaccagaccatgagcaaccccatgagcaagctgactgtgctgaacagcatgcacagccacttcatcctggccgacaatggcaccaccgggaagtacggggctgaggtgaagctgcggcggcagctggagaagcacatcagcctgcagaagatcaacaccagcttccacagctacaagacagcccacgtggacctgcaggacaagaggcaggtgaagacagccctggagcaggccgagtggcagcccggccggggcatgtttgaccatgacaacctgatgcagagcacctag

SEQ ID NO: 264682 - DNA, 693 bp, Artificial Sequence
  derived and/or modified sequence
atgtacgtgcgggtgagcttcgacaccaagcccgacctgctgctgcaccttatgaccaaggaatggcagctggaactgcccaagttgcttatcagcgtgcacggaggcctgcagaattttgaattgcagccaaagctcaaacaggtctttgggaaaggtcttataaaggctgctatgacaaccggagcctggatctttactggaggagtcaacactggggtaattagacacgtgggggatgcactcaaggaccacgcttcaaaaagtcggggcaagatctgcaccatcggaatcgctccgtggggtatcgtcgagaaccaggaggacctgattggtagagatgttgtgcgcccctaccaaaccatgagcaaccccatgtcgaaactaaccgtccttaacagtatgcattctcactttattctggccgacaacggaaccactggaaaatatggcgccgaggtgaagcttagaagacagctggaaaagcacatcagcttgcaaaagatcaacactcgaatcgggcagggggtacccgtggtcgccctcattgttgagggagggcccaatgtcatcagcatcgtattggaatatctccgtgatactccacctgtgcccgtcgtcgtgtgcgacggatctgggcgggcctcggacatactagctttcggccacaaatattccgaagagggaggctag

SEQ ID NO: 264683 - DNA, 645 bp, Artificial Sequence
  derived and/or modified sequence
atgtacgtgcgggtgagcttcgacaccaagcccgacctgctgctgcatctgatgaccaaagaatggcaactagagttgccaaaactgctgatttcggtccatggaggcttgcagaatttcgagctccaaccaaagctcaaacaggttttcggcaaagggttgataaaggctgcaatgaccacaggtgcttggatctttacaggaggtgtcaacactggagtaatccggcacgtgggggacgcgctgaaggatcacgcctcaaagagccgaggcaagatttgcactatcggaattgctccctgggggattgttgagaaccaagaagatctcatcgggcgagatgtggttcggccataccagaccatgtcaaatcctatgtccaaactgacagtgctgaattctatgcacagccatttcatcttagctgataacggcaccaccggtaaatatggggctgaggtcaaactcaggcgccagctagagaagcacatcagcctccaaaagatcaatactagctttcactcatataaaactgcccatgtagacttacaggacaaacgtcaagtaaaaacagcacttgaacaggctgaatggcagcccggtagaggaatgttcgaccatgacaatctaatgcaaagcacatag

SEQ ID NO: 264684 - DNA, 693 bp, Artificial Sequence
  derived and/or modified sequence
atgtatgtgagagtttcctttgatacaaaacctgatttgttgttgcacctgatgaccaaggaatggcagctcgaactccctaagttgctgatcagcgtccatggtggtcttcagaacttcgaactccagcctaaactcaaacaggtgttcggcaaagggttaatcaaagcagccatgacgaccggcgcttggatcttcactggcggagtcaacactggggtaatacggcacgtgggcgacgccctgaaggaccatgctagtaaaagcaggggcaagatctgtacaattggcatcgcaccctggggcatcgtggagaaccaggaggatctaatcggccgagacgtcgtccggccttaccagacaatgagtaaccccatgtctaagttaaccgtgctaaactccatgcattcccactttatccttgcagataacggaactactgggaagtacggcgcagaggtgaagctgcgtaggcagctggaaaagcacatcagcttgcaaaagataaatactagaattgggcagggcgtgccggtggttgcactgatcgttgagggagggcctaacgtgatctctatcgtgctcgaatacctccgggacactcccccagtgccagtcgtcgtctgtgacgggtccgggcgtgcatcagacatcctggctttcggacataaatactccgaggaaggcggttag

SEQ ID NO: 264685 - DNA, 645 bp, Artificial Sequence
  derived and/or modified sequence
atgtacgtaagggtctcattcgacacaaagcccgatctgctcctgcatctgatgactaaagaatggcaactggagctgcccaaactcttaattagtgtacacggcggtctccagaatttcgaacttcagcccaagctcaaacaggtgtttgggaaggggttgatcaaagcggctatgacaacaggagcatggattttcacaggtggcgtgaacacgggtgtaattagacacgtcggggacgcattaaaggatcatgcgagtaaaagccgcggaaagatatgcacgatcgggatcgccccatggggaatcgtggaaaatcaggaggatcttatcggcagagatgtagtgaggccgtaccagacaatgtctaacccaatgagtaaacttaccgtccttaacagcatgcacagccacttcattctcgctgacaacgggaccacaggaaaatacggggctgaggtcaagctgcgccgtcagctggagaaacacatatcactccagaaaattaacacgtcctttcatagctacaaaaccgctcatgttgacctgcaagacaaaagacaggtaaagactgcattagaacaggcggagtggcagcccggtagaggcatgtttgaccatgacaacttgatgcagagcacctag

SEQ ID NO: 264686 - protein, 509 aa, Artificial Sequence
  derived and/or modified sequence
MERRRLWGSIQSRYISMSVWTSPRRLVELAGQSLLKDEALAIAALELLPRELFPPLFMAAFDGRHSQTLKAMVQAWPFTCLPLGVLMKGQHLHLETFKAVLDGLDVLLAQEVRPRRWKLQVLDLRKNSHQDFWTVWSGNRASLYSFPEPEAAQPMTKKRKVDGLSTEAEQPFIPVEVLVDLFLKEGACDELFSYLIEKVKRKKNVLRLCCKKLKIFAMPMQDIKMILKMVQLDSIEDLEVTCTWKLPTLAKFSPYLGQMINLRRLLLSHIHASSYISPEKEEQYIAQFTSQFLSLQCLQALYVDSLFFLRGRLDQLLRHVMNPLETLSITNCRLSEGDVMHLSQSPSVSQLSVLSLSGVMLTDVSPEPLQALLERASATLQDLVFDECGITDDQLLALLPSLSHCSQLTTLSFYGNSISISALQSLLQHLIGLSNLTHVLYPVPLESYEDIHGTLHLERLAYLHARLRELLCELGRPSMVWLSANPCPHCGDRTFYDPEPILCPCFMPN

SEQ ID NO: 264687 - protein, 86 aa, Artificial Sequence
  derived and/or modified sequence
MERRRLWGSIQSRYISMSVWTSPRRLVELAGQSLLKDEALAIAALELLPRELFPPLFMAAFDGRHSQTLKAMVQAWPFTCLPLGVL

SEQ ID NO: 264688 - protein, 115 aa, Artificial Sequence
  derived and/or modified sequence
MERRRLWGSIQSRYISMSVWTSPRRLVELAGQSLLKDEALAIAALELLPRELFPPLFMAAFDGRHSQTLKAMVQAWPFTCLPLGVLMKGQHLHLETFKAVLDGLDVLLAQEVRPR

SEQ ID NO: 264689 - protein, 152 aa, Artificial Sequence
  derived and/or modified sequence
MERRRLWGSIQSRYISMSVWTSPRRLVELAGQSLLKDEALAIAALELLPRELFPPLFMAAFDGRHSQTLKAMVQAWPFTCLPLGVLMKGQHLHLETFKAVLDGLDVLLAQEVRPRRWKLQVLDLRKNSHQDFWTVWSGNRASLYSFPEPEAA

SEQ ID NO: 264690 - protein, 493 aa, Artificial Sequence
  derived and/or modified sequence
MSVWTSPRRLVELAGQSLLKDEALAIAALELLPRELFPPLFMAAFDGRHSQTLKAMVQAWPFTCLPLGVLMKGQHLHLETFKAVLDGLDVLLAQEVRPRRWKLQVLDLRKNSHQDFWTVWSGNRASLYSFPEPEAAQPMTKKRKVDGLSTEAEQPFIPVEVLVDLFLKEGACDELFSYLIEKVKRKKNVLRLCCKKLKIFAMPMQDIKMILKMVQLDSIEDLEVTCTWKLPTLAKFSPYLGQMINLRRLLLSHIHASSYISPEKEEQYIAQFTSQFLSLQCLQALYVDSLFFLRGRLDQLLRHVMNPLETLSITNCRLSEGDVMHLSQSPSVSQLSVLSLSGVMLTDVSPEPLQALLERASATLQDLVFDECGITDDQLLALLPSLSHCSQLTTLSFYGNSISISALQSLLQHLIGLSNLTHVLYPVPLESYEDIHGTLHLERLAYLHARLRELLCELGRPSMVWLSANPCPHCGDRTFYDPEPILCPCFMPN

SEQ ID NO: 264691 - protein, 201 aa, Artificial Sequence
  derived and/or modified sequence
MERRRLWGSIQSRYISMSVWTSPRRLVELAGQSLLKDEALAIAALELLPRELFPPLFMAAFDGRHSQTLKAMVQAWPFTCLPLGVLMKGQHLHLETFKAVLDGLDVLLAQEVRPRRWKLQVLDLRKNSHQDFWTVWSGNRASLYSFPEPEAAQPMTKKRKVDGLSTEAEQPFIPVEVLVDLFLKEGACDELFSYLIEKVKR

SEQ ID NO: 264692 - DNA, 1530 bp, Artificial Sequence
  derived and/or modified sequence
atggagaggaggcgattgtgggggagtattcagagcaggtacatctcaatgtcagtctggacatcccccaggcggcttgtggaactggcagggcagagcctgttgaaggatgaggctctcgcaatcgccgccctggaactcctgcctagagagttattccctccactattcatggcggcatttgatggtcggcattctcagacgctgaaagcaatggtgcaagcctggcccttcacatgtctcccgcttggcgttctaatgaaaggccagcatctacatcttgagacatttaaagctgtattggatggactggacgttcttctggcccaagaagttagaccccgtcgatggaagctgcaggttcttgacctccggaaaaactcacatcaggacttctggaccgtgtggagtggtaatcgggcatctctctacagcttccccgaaccagaagctgcacagccgatgaccaagaagagaaaggtcgacggcctgagcacagaggctgaacagccctttattcccgttgaagtgcttgtggatctattcctcaaggagggtgcctgcgatgagctctttagttacctcattgaaaaggtgaagcggaagaagaacgtgttgcgtctttgctgtaagaaattgaaaatattcgccatgcccatgcaagatattaagatgatactgaagatggtgcagcttgactctattgaggatctggaggtgacttgcacatggaagcttcccactctggccaagtttagcccttatttgggccagatgatcaatctgcgccgtttgctgttaagtcatatccatgctagttcctacatcagtcccgagaaagaggagcaatacattgcacagtttacttcccagtttctctccctgcagtgcctacaagctctgtacgtcgacagcctgttctttctacgaggacgtctcgaccagctgctacgacatgtaatgaatcccctcgagaccttgagcattacaaactgtcgcttgtctgagggcgatgtgatgcacctctcccagtctccttccgtctcgcagctgagcgtgttgagtttaagcggcgtcatgctaacagatgtgtcaccagaacctcttcaggccttgcttgagagagcatccgcaactcttcaggacctcgtgttcgacgaatgcggaatcacagatgatcaattattggccctgttgcctagcctgtcccattgtagccagctgactaccctttccttttatgggaattctatcagcatatccgccttacagagtttattgcagcacctaatcgggttgtcgaacctgactcatgtcctttaccctgtgcctctcgagtcttatgaagatatccacggtacccttcacctggagcgcctcgcttatctgcacgcccgcttacgcgaactgttatgtgagctgggacgtccctcaatggtttggttgagtgctaatccctgcccccactgtggggataggacattctacgatcctgaaccaattctgtgtccctgcttcatgccaaactag

SEQ ID NO: 264693 - DNA, 1530 bp, Artificial Sequence
  derived and/or modified sequence
atggagagacgtcggctgtgggggagtatccaatctcgatacattagtatgagcgtatggacatcacctcgccgactggtcgagctggcggggcaatcactgctgaaggacgaagccctcgctatagctgccttggaactcttgccccgcgaactgtttccacctctgttcatggccgccttcgatggccgacattctcagacactgaaagcaatggttcaggcatggccctttacttgcctaccactgggcgtcttgatgaagggtcagcatctccatctggaaaccttcaaggcagtgctggacggactcgacgttctgctggcacaagaagtccggccccgcaggtggaaactccaagtcctggatctacgtaagaactcacaccaggatttttggaccgtgtggtcaggtaaccgagccagcctgtactcatttcctgaaccggaggccgctcagcctatgactaaaaaaaggaaggtagatgggctgagtactgaggcagagcagccgtttatacctgtggaagtgctagtcgacctattcctaaaggagggagcctgtgatgaactcttctcttatctcatcgaaaaggtgaagcgaaaaaaaaacgtgctcaggctatgctgtaagaaattgaaaatctttgctatgcctatgcaggatattaaaatgatcctgaaaatggtgcagttggactccatagaggacctggaggtgacctgcacctggaagctccccactcttgctaaattttcgccttatctgggacagatgattaacctgagaagactgctgttgtcccacatccacgcctcttcttacatttcacccgaaaaagaggagcagtacatcgcccaatttaccagccaatttctcagcttacagtgccttcaggctctgtacgtcgactctttattcttcctgagggggaggttggaccaactgctccggcacgtcatgaatccgcttgagactctgtccattactaattgtcgcttgagcgaaggagatgttatgcacctgagtcaatcccctagtgtgagccagctcagtgtcctatcactgtcaggagttatgcttaccgatgtgtcccctgagcctcttcaagctctcctcgaaagagcaagcgcgactctccaagatttagtattcgacgagtgtggcattacggatgatcagttgctggccctcctgcccagtctgtctcactgtagccagctgacaacgcttagtttctacggaaacagtattagtattagtgctctccagtcactcttgcagcacctgatcgggctctccaatctcactcacgtgctctatccagtgcccctggagtcttatgaagacattcacggaacattacacttggagaggctggcatacctgcatgccaggcttcgagagctcctatgtgagcttgggcggccaagcatggtctggctcagtgccaacccgtgccctcactgcggggataggacattctacgatccggagcctattttgtgtccatgcttcatgcccaattag

SEQ ID NO: 264694 - DNA, 1530 bp, Artificial Sequence
  derived and/or modified sequence
atggaacgcaggcgtttgtggggcagcatccagtcccggtatattagtatgagcgtgtggacgtcgccaagaaggcttgtggaactagccgggcagtcactcctgaaggatgaagcgcttgctatagccgcacttgaactgttaccgcgagaactgttccccccgctcttcatggcggcttttgacgggaggcatagtcagacactgaaggctatggtccaagcctggccatttacgtgccttcctctgggagtgctgatgaaaggacagcacttacatctcgaaaccttcaaggccgtgttggacggccttgacgtgcttctggcacaggaagtcagacctaggcgatggaaactccaagttttggatctaagaaaaaatagccatcaggatttttggacagtctggtccggcaatcgtgcctccctttactcattcccagaacccgaagcagctcagcccatgacgaagaagagaaaagtcgatgggctttccacagaagcagagcagcctttcattccagtcgaggtgctggtcgatctctttctgaaagagggggcttgtgacgagttgttctcttatctgatcgagaaagtgaagagaaaaaaaaatgttctgcggctgtgctgtaaaaagctcaagattttcgcaatgccaatgcaggacatcaaaatgattcttaaaatggtccagctagattctattgaggacctggaagtcacttgcacatggaaattgccgaccctggcgaagttttctccctatctggggcaaatgattaatctccggagattgttgctgagccatattcatgcatccagctatatatccccagagaaagaagaacagtacattgcgcagttcactagtcaattcctttctcttcaatgtttgcaagctctttatgtggactcccttttcttcctccgaggccggctggaccagctgctgcgacacgtgatgaaccccctcgagaccttgtcaatcaccaactgtagactgagcgagggagatgtgatgcacctatcccaatcaccatcagtcagccagctgagcgtcctgagtttatcaggcgtcatgcttacggacgtttccccggaacccctgcaagccctgctcgaacgggcatcggcaactttacaggatcttgtctttgatgagtgcggcatcaccgatgatcaacttttggccttgctgccaagcctgtcccactgctctcaattgaccacattgagtttctacggcaacagtattagcatcagtgctcttcaatcactactccagcacttgatcggcttatctaacctgacccacgtgttataccccgttccgctcgagtcttacgaggatatacacggaactttgcacctcgagcgactggcgtacttacacgctagactgagggagctgttatgtgagctcggaagaccgtcaatggtttggctcagcgccaacccatgtcctcactgtggagaccgcaccttctacgaccctgagccgattctttgtccttgttttatgcctaactag

SEQ ID NO: 264695 - DNA, 261 bp, Artificial Sequence
  derived and/or modified sequence
atggagagaagaagactatgggggagtatccagtccaggtatataagtatgtcagtatggactagtcctcggaggctggtcgagcttgctggacagagcctcctgaaagacgaagcgctggctattgccgcgctggagctgttgccgagggagctgttcccccctctttttatggcggcctttgacggcaggcactcacagaccctgaaggccatggtccaggcatggccattcacatgtttgcctttaggagtgttgtag

SEQ ID NO: 264696 - DNA, 1530 bp, Artificial Sequence
  derived and/or modified sequence
atggagcgcaggcgtctgtggggttcaatacagtcccgctatatttcaatgtcagtatggacatcacctcggaggctagtagaactggccggacagagtctgctcaaggatgaagccctggccatagctgcactggagttgctccctagagaactttttccacctttgttcatggctgcctttgatggacgccacagccagacgctgaaggcaatggtgcaggcctggcctttcacatgtttgcctcttggggttttgatgaagggccaacacttgcacctggagaccttcaaggcggtgttggatgggctcgatgtactgctggctcaggaggtgcgtcctaggagatggaagctccaggtactggacctcagaaagaattcgcatcaggacttttggacagtatggagcggaaacagagcaagcctgtatagttttcctgagccagaagccgcccagccgatgacgaaaaagcgaaaggtggatggtctgtccaccgaagccgaacagcctttcatcccggtggaagtcctagtcgacctgttcctgaaggaaggtgcatgcgacgagctgttcagttatctcatcgagaaggttaaaaggaagaagaatgtgctgagactctgttgcaagaaactgaagatcttcgccatgcccatgcaggatatcaagatgattctaaagatggtgcaactcgattcaatcgaagacctggaggttacatgcacctggaaactgcctacattagcgaaattctctccctatctcggccagatgattaacctgcgccgccttctgctttctcatattcacgcttccagctacatcagtcccgagaaggaggaacagtacatcgcacagtttacgtcccagttcttatcactccagtgcttgcaggcgttgtacgtagacagtctgtttttcctacgggggaggctggaccaattacttaggcacgtgatgaatcctttggaaaccttaagcatcacaaactgtcggctaagcgagggggacgttatgcacttgtctcagtcaccttccgtgagtcagctgtccgtcttatcactaagcggcgttatgctgactgatgtttcgcctgagcccctccaggctttgttggaacgtgcttcagccaccctccaggatctcgttttcgatgaatgcgggattaccgatgaccaactcttggcccttctcccgtctttgagtcactgctctcagttgacgacgttgagcttctacggcaacagcattagtatctccgctctgcagtccctgttacaacatctcattggcctgagcaatctcacacacgtattgtaccctgtgcccctcgagtcgtatgaagacattcacgggactctgcacctggagcggttggcatatctccacgcgagactgcgcgagctgctgtgtgaattaggcaggccttctatggtttggttaagcgccaacccgtgtcctcactgtggagaccgtacgttctacgaccccgagccaatactgtgtccatgttttatgcctaattag

SEQ ID NO: 264697 - DNA, 348 bp, Artificial Sequence
  derived and/or modified sequence
atggagagaagacgtctatgggggagcattcagtcgcggtatatttccatgagtgtgtggacctccccaaggcgtctagtcgaactcgccggccaatcactgctgaaggacgaggccctcgccatcgccgctctggagttgctcccgcgcgagctgttccctcctcttttcatggccgccttcgatggacgccactcccagacccttaaggctatggtgcaggcctggcctttcacgtgcctccccttgggtgtcttgatgaaaggccaacatctccacttggagacctttaaagcagttttggacggattggatgtactcctggcccaggaagtgcggccacggtag

SEQ ID NO: 264698 - DNA, 459 bp, Artificial Sequence
  derived and/or modified sequence
atggaaagaaggcgtctttggggtagcattcagtcgcgttatataagcatgtccgtgtggacatcgcccagaagactagtggagctggccggtcagagcttactcaaggacgaagccctcgctattgctgctctggagctgcttccgcgggagctttttcctcctcttttcatggcggcctttgacgggcggcattctcagaccctcaaagcaatggtgcaggcgtggccgttcacctgcctcccactgggtgtactgatgaagggacaacaccttcatctcgagacgtttaaggcggtcctggacgggctcgatgtgttgctggcacaagaagtaaggccaagacggtggaagctccaggtgctggacttgcggaaaaacagccaccaggatttctggacggtgtggtccggaaaccgtgcctccctctatagcttccccgaacccgaagccgcttag

SEQ ID NO: 264699 - DNA, 1482 bp, Artificial Sequence
  derived and/or modified sequence
atgagcgtctggactagccctagaaggctcgtagagctggccgggcaatcactgttgaaggatgaggcgttggccattgccgcactggagctcctgcccagggagcttttcccccctctatttatggctgctttcgacggaaggcactcccagaccctcaaagctatggtgcaagcttggcctttcacttgtctgcccctcggcgtgctgatgaagggtcagcacttacacttagaaacatttaaagccgtgctcgacggtctggacgtgctcctcgcacaggaggtgagaccacgtagatggaagctgcaggtactggacctgcggaaaaatagtcaccaggacttctggaccgtctggtcgggaaaccgggcgtcactgtattcctttcctgagcctgaggcagctcaacccatgaccaagaagaggaaggtagatggactctcgactgaagctgagcaaccatttattcctgttgaagtgctggtcgacctcttcttgaaggagggagcctgtgatgagctgttctcctacctgatagagaaagttaaacggaagaaaaacgttttgcgtctgtgctgcaagaagctcaaaatcttcgccatgcccatgcaggacatcaagatgatcctgaagatggtgcagcttgactcgatcgaggacctggaggtcacctgtacttggaagctgccaacccttgcaaagttttccccgtatctgggccagatgatcaacctgagaagactcttgttgtctcacatccatgcatccagctatattagccccgaaaaggaagaacagtacattgctcagttcacaagccagtttctctcactgcaatgccttcaagccctgtatgtggattcattgttttttctgagggggcggttggaccaactcttacgacacgtcatgaaccctttagaaaccctgtccatcactaactgcagactctcagaaggtgacgtgatgcacctcagtcagagcccatcagtgagtcagctgtctgtactatctctgagcggggtcatgttgaccgacgtgtccccagagcccttgcaggctctgctggaacgcgcttcagctaccctgcaggatctggtgtttgatgaatgtgggatcaccgacgatcagctgttggccttgctcccctccctgagccattgctctcaactcacgaccttaagtttctatggcaactctatcagcatttctgccttacagtccctactccagcacctgatagggctcagcaatctaacccacgtgctgtatcctgtaccgctggagtcctacgaggacatccatgggaccctgcacctggaaaggctggcatacctgcatgcgcggctcagagagctcttatgtgagttaggtcggccaagcatggtgtggctttctgccaatccctgcccccactgtggtgatcgcacgttttacgaccccgagccaattctgtgtccgtgctttatgcccaattag

SEQ ID NO: 264700 - DNA, 606 bp, Artificial Sequence
  derived and/or modified sequence
atggagcgcaggcgactctggggatcaattcaaagcaggtatatttcaatgagcgtgtggacttctcctagacgcctcgtggagttggcgggccagtccctactgaaggatgaggcgttggccatcgccgccctggaactcctgccccgggaactgttcccaccgctatttatggccgccttcgatgggagacattcccaaacccttaaggctatggtgcaggcatggccatttacttgcctccccctcggggtgctcatgaagggacaacacctgcacctggagacctttaaagcggtcttggatggcctcgacgtgctcctggcccaagaagtgcgcccccgtcgctggaaactgcaggtgctcgatctgagaaagaactcccatcaggacttttggacagtgtggtccggtaaccgcgcaagcctatactcttttccagagcctgaggccgcacaacctatgacaaaaaaaaggaaggttgacggactgagcaccgaggctgaacagccctttatcccagtcgaggttctcgtcgacctgttcctgaaagagggcgcttgtgatgaactgttctcatatttaattgagaaggtgaaaagatag

SEQ ID NO: 264701 - DNA, 1482 bp, Artificial Sequence
  derived and/or modified sequence
atgtccgtctggactagcccgaggcgcctggtggaactcgccgggcagtcgctgttgaaggacgaggccctggcaatcgccgccttagaactgcttccccgagagctctttccgcctctgttcatggccgctttcgatggccggcacagccagactctgaaggcaatggtgcaggcatggccattcacctgtctgcccctcggtgtcctcatgaaggggcagcatctgcacctggagacctttaaagccgtcctggatggcttagatgttctccttgcgcaggaagttaggccgaggcggtggaaactgcaggtcctggacctgaggaaaaatagccaccaggacttctggacggtgtggtcgggtaacagagcaagcctatactcgttcccagagccagaggctgcccagccaatgacgaaaaaaaggaaggtagacggcctgtccaccgaggccgagcagccatttattcctgtcgaggtgctggttgacctatttctgaaagagggggcctgcgatgagcttttcagctatctcattgagaaggtcaagaggaagaagaacgttctgcgactgtgttgtaagaaattgaaaatttttgctatgccaatgcaggacataaagatgattcttaagatggtgcagctggattcaattgaggacctggaggtgacatgcacctggaagctgcccacattggcaaaattttctccttatctgggccaaatgattaatcttcggcgtctgctgcttagtcacatacatgcatccagttacatcagcccagaaaaggaggagcagtacatcgctcagtttacatctcagtttttgtcactgcagtgcctgcaggctctttatgtcgactccctgttcttcttaaggggccgcctcgatcagctcctgcggcacgtgatgaatcctttggagactctgtccataaccaattgtagattgagcgagggcgacgtgatgcacctctcacagtcgcctagtgtctcccagctatccgtgctctctcttagcggagttatgttgacagatgtgtcacccgagccactccaggctcttcttgaaagggccagcgcaactctgcaagatctggtgtttgacgaatgtggtattaccgacgaccagctgttagctctgctaccatctctgtctcactgcagccagcttactacactgtccttttacgggaatagcatctcaatttctgctctgcagtcactgttgcaacacttgataggactgtccaatttgactcacgtgctgtatcctgttcctctcgagagttacgaggacatccatggaacattgcaccttgagcggttagcgtacctccacgccagactacgcgagctgctgtgtgagctcgggaggccaagcatggtgtggctttcagcaaatccttgtccccactgtggggatcggactttttatgatccagagcccattctgtgcccctgttttatgccaaattag

SEQ ID NO: 264702 - DNA, 1530 bp, Artificial Sequence
  derived and/or modified sequence
atggagcggcgcaggctgtggggctccattcagtctcggtacattagtatgagtgtgtggacgagtccccgaagactcgtcgagctcgctggccagtcgctcctcaaggacgaagctctggcgatagcagccctcgagctcttgccgcgcgagctgtttcctcccctttttatggctgcattcgacggccgtcatagccagaccctgaaggcaatggtgcaggcatggccttttacgtgcttgccattgggcgttctaatgaaggggcaacacctgcatctggaaacattcaaagcggtgctggatgggctcgatgttctgcttgcacaggaggtgcggccgcggcggtggaaactccaagttttagatcttcgcaaaaactcacaccaggacttttggactgtgtggtccggaaatcgcgctagtctgtacagcttccctgagcctgaggctgcccagccaatgaccaagaagagaaaggtcgatgggctgtctacggaggccgaacagccatttatccctgttgaagttttggttgatctgttccttaaggagggcgcttgtgacgagctgtttagttatctgatagaaaaggtgaaaaggaaaaagaacgtgctaagactgtgttgtaaaaagctgaaaatttttgccatgcctatgcaagacattaaaatgatcctcaaaatggtgcagctggattctattgaagatctggaggtcacatgtacgtggaagctccccacactggcaaagtttagcccgtatctgggccagatgataaacctcaggagattgcttctctcgcatatacatgcctcctcgtatattagcccagaaaaggaggaacagtatatagcacagttcactagccagttcctctctctccagtgccttcaggctctgtacgtggatagtttattttttttgcgcggccgcctcgaccagttgctgaggcacgtcatgaaccccctagagaccctgagtataacaaattgccggctttctgagggagatgttatgcacctcagtcagtccccatcggtgtcacaactgtcggtcctatcactaagcggcgtcatgctgaccgatgtatccccggaaccgctccaggcgttgctggagcgagcaagcgcgacattgcaagatctggtgtttgacgaatgtggtatcactgacgaccagctcctggcactgctgccctcactttctcactgctctcagctgactacactgagcttctacggcaacagcatatctatctcagccctgcagagcttattgcagcatcttattgggctctccaacctgacccatgtgctgtaccctgttccattagagtcctatgaggacatccacgggaccttgcacctcgagcggcttgcctaccttcacgcccgattgagagaattactgtgcgagttgggtaggcctagcatggtgtggttgtctgccaatccgtgcccccactgtggagacaggacgttctacgatcctgaacccatcctgtgtccctgttttatgccaaactag

SEQ ID NO: 264703 - DNA, 1530 bp, Artificial Sequence
  derived and/or modified sequence
atggagcggcggcggctgtggggcagcatccagagccgctacatctccatgtctgtgtggaccagcccccggcggctggtggagctggccggccagagcctgctgaaggatgaggccctggccatcgccgccctggagctgctgccccgggagctgttccccccactcttcatggccgcctttgatggccgccacagccagaccctgaaggccatggtgcaggcctggcccttcacctgcctgcccctgggcgtgctgatgaagggccagcacctgcacctggagaccttcaaggctgtgctggatggcctggatgtgctgctggcccaggaggtgcggccccggcgctggaagctgcaggtgctggacctgaggaagaacagccaccaggacttctggacagtgtggagcggcaacagagccagcctgtacagcttccctgagcctgaggccgcccagcccatgaccaagaagaggaaggtggatggcctgagcacagaggccgagcagcccttcatccctgtggaggtgctggtggacctcttcctgaaggagggcgcctgtgatgagctgttctcctacctgattgagaaggtgaagaggaagaagaatgtgctgcggctgtgctgcaagaagctgaagatctttgccatgcccatgcaggacatcaagatgatcctgaagatggtgcagctggacagcattgaggacctggaggtgacctgcacctggaagctgcccaccctggccaagttcagcccctacctgggccagatgatcaacctgcggcggctgctgctgagccacatccacgccagcagctacatcagccctgagaaggaggagcagtacatcgcccagttcaccagccagttcctgagcctgcagtgcctgcaggccctgtatgtggacagcctcttcttcctgcggggccgcctggaccagctgctgcggcacgtgatgaaccccctggagaccctgagcatcaccaactgccgcctgtctgaaggagatgtgatgcacctgagccagagccccagcgtgtcccagctgtctgtgctgagcctgtctggagtgatgctgacagatgtgtccccagagcccctgcaggccctgctggagcgggccagcgccaccctgcaggacctggtgtttgatgaatgtggcatcacagatgaccagctgctggccctgctgcccagcctgagccactgcagccagctgaccaccctgtccttctacggcaacagcatcagcatcagcgccctgcagagcctgctgcagcacctgattggcctgagcaacctgacccacgtgctgtaccctgtgcccctggagagctatgaggacatccacggcaccctgcacctggagcggctggcctacctgcacgcccggctgcgggagctgctgtgtgagctgggccggcccagcatggtgtggctgagcgccaacccctgcccccactgtggggacaggaccttctatgaccctgagcccatcctgtgcccctgcttcatgcccaactag

SEQ ID NO: 264704 - DNA, 261 bp, Artificial Sequence
  derived and/or modified sequence
atggagcggcggcggctgtggggcagcatccagagccgctacatctccatgtctgtgtggaccagcccccggcggctggtggagctggccggccagagcctgctgaaggatgaggccctggccatcgccgccctggagctgctgccccgggagctgttccccccactcttcatggccgcctttgatggccgccacagccagaccctgaaggccatggtgcaggcctggcccttcacctgcctgcccctgggcgtgctgtag

SEQ ID NO: 264705 - DNA, 348 bp, Artificial Sequence
  derived and/or modified sequence
atggagcggcggcggctgtggggcagcatccagagccgctacatctccatgtctgtgtggaccagcccccggcggctggtggagctggccggccagagcctgctgaaggatgaggccctggccatcgccgccctggagctgctgccccgggagctgttccccccactcttcatggccgcctttgatggccgccacagccagaccctgaaggccatggtgcaggcctggcccttcacctgcctgcccctgggcgtgctgatgaagggccagcacctgcacctggagaccttcaaggctgtgctggatggcctggatgtgctgctggcccaggaggtgcggcccaggtag

SEQ ID NO: 264706 - DNA, 459 bp, Artificial Sequence
  derived and/or modified sequence
atggagcggcggcggctgtggggcagcatccagagccgctacatctccatgtctgtgtggaccagcccccggcggctggtggagctggccggccagagcctgctgaaggatgaggccctggccatcgccgccctggagctgctgccccgggagctgttccccccactcttcatggccgcctttgatggccgccacagccagaccctgaaggccatggtgcaggcctggcccttcacctgcctgcccctgggcgtgctgatgaagggccagcacctgcacctggagaccttcaaggctgtgctggatggcctggatgtgctgctggcccaggaggtgcggccccggcgctggaagctgcaggtgctggacctgaggaagaacagccaccaggacttctggacagtgtggagcggcaacagagccagcctgtacagcttccctgagcctgaggccgcctag

SEQ ID NO: 264707 - DNA, 1482 bp, Artificial Sequence
  derived and/or modified sequence
atgtctgtgtggaccagcccccggcggctggtggagctggccggccagagcctgctgaaggatgaggccctggccatcgccgccctggagctgctgccccgggagctgttccccccactcttcatggccgcctttgatggccgccacagccagaccctgaaggccatggtgcaggcctggcccttcacctgcctgcccctgggcgtgctgatgaagggccagcacctgcacctggagaccttcaaggctgtgctggatggcctggatgtgctgctggcccaggaggtgcggccccggcgctggaagctgcaggtgctggacctgaggaagaacagccaccaggacttctggacagtgtggagcggcaacagagccagcctgtacagcttccctgagcctgaggccgcccagcccatgaccaagaagaggaaggtggatggcctgagcacagaggccgagcagcccttcatccctgtggaggtgctggtggacctcttcctgaaggagggcgcctgtgatgagctgttctcctacctgattgagaaggtgaagaggaagaagaatgtgctgcggctgtgctgcaagaagctgaagatctttgccatgcccatgcaggacatcaagatgatcctgaagatggtgcagctggacagcattgaggacctggaggtgacctgcacctggaagctgcccaccctggccaagttcagcccctacctgggccagatgatcaacctgcggcggctgctgctgagccacatccacgccagcagctacatcagccctgagaaggaggagcagtacatcgcccagttcaccagccagttcctgagcctgcagtgcctgcaggccctgtatgtggacagcctcttcttcctgcggggccgcctggaccagctgctgcggcacgtgatgaaccccctggagaccctgagcatcaccaactgccgcctgtctgaaggagatgtgatgcacctgagccagagccccagcgtgtcccagctgtctgtgctgagcctgtctggagtgatgctgacagatgtgtccccagagcccctgcaggccctgctggagcgggccagcgccaccctgcaggacctggtgtttgatgaatgtggcatcacagatgaccagctgctggccctgctgcccagcctgagccactgcagccagctgaccaccctgtccttctacggcaacagcatcagcatcagcgccctgcagagcctgctgcagcacctgattggcctgagcaacctgacccacgtgctgtaccctgtgcccctggagagctatgaggacatccacggcaccctgcacctggagcggctggcctacctgcacgcccggctgcgggagctgctgtgtgagctgggccggcccagcatggtgtggctgagcgccaacccctgcccccactgtggggacaggaccttctatgaccctgagcccatcctgtgcccctgcttcatgcccaactag

SEQ ID NO: 264708 - DNA, 606 bp, Artificial Sequence
  derived and/or modified sequence
atggagcggcggcggctgtggggcagcatccagagccgctacatctccatgtctgtgtggaccagcccccggcggctggtggagctggccggccagagcctgctgaaggatgaggccctggccatcgccgccctggagctgctgccccgggagctgttccccccactcttcatggccgcctttgatggccgccacagccagaccctgaaggccatggtgcaggcctggcccttcacctgcctgcccctgggcgtgctgatgaagggccagcacctgcacctggagaccttcaaggctgtgctggatggcctggatgtgctgctggcccaggaggtgcggccccggcgctggaagctgcaggtgctggacctgaggaagaacagccaccaggacttctggacagtgtggagcggcaacagagccagcctgtacagcttccctgagcctgaggccgcccagcccatgaccaagaagaggaaggtggatggcctgagcacagaggccgagcagcccttcatccctgtggaggtgctggtggacctcttcctgaaggagggcgcctgtgatgagctgttctcctacctgattgagaaggtgaagaggtag

SEQ ID NO: 264709 - DNA, 1530 bp, Artificial Sequence
  derived and/or modified sequence
atggagcggcggcggctgtggggcagcatccagagccggtacatctccatgtcagtatggacctccccccgaagactggtggaattggccggacagagcctattgaaggatgaggcactggccattgctgccctcgagctgctgccacgagagttgttcccaccgttgttcatggctgcttttgacggccgccattcccagaccctaaaggcaatggtgcaagcctggccattcacgtgcctcccgcttggggtattgatgaagggacaacaccttcacctggagaccttcaaagctgtgctggatggactggatgttctcctggcccaggaggttaggcctagacggtggaaactgcaggttctggatctgagaaaaaactcccaccaagatttttggaccgtttggtccggcaaccgtgcctccttatactccttccctgagccagaagctgcgcaacctatgaccaagaagcgcaaagtggacgggctgtctaccgaagccgagcagccctttattccagttgaggtacttgttgatctcttcttaaaggagggggcctgtgatgaactatttagctacctaattgagaaggtgaagagaaaaaaaaacgtgctgcgcctctgctgtaagaagctgaagatcttcgctatgccaatgcaagacattaaaatgattctgaagatggtgcagttagattccatcgaagacttagaggtcacatgcacgtggaagctacccaccctcgcgaaattttcgccttatttgggtcagatgatcaatctgaggcgcctgctgctcagccacatccacgccagctcttatatctctcctgagaaggaagagcaatacatagcccaattcacctcacaattccttagtttacagtgcttgcaggccctttatgtcgattctctgtttttccttagaggacggctggaccagttgctccgccatgtgatgaatcctctggaaactttgtctattaccaactgtcgcctgagtgagggagacgttatgcatctgtcacagtctccttccgtctcacaactttcagtgttgagtctctcaggggtgatgctgacagatgtgtccccagagccacttcaggccttgctcgagcgggcctccgctactcttcaggatcttgtgttcgatgagtgcgggatcaccgatgatcaactgctcgctctgttgcccagcctgtcccactgttcgcagttaacaacactctcattctacggcaattcaatctctatcagcgccctccagagcctactccaacatctcataggcctctcgaaccttacacacgtgttatacccagtgcccttagaaagttatgaagacatccacggaacattacacctggagagattagcatatctacatgcacgcctgagggagctgctctgtgagctggggagaccctctatggtatggttgtcagcaaatccgtgcccgcactgtggcgatagaactttctacgatcccgaacccatattgtgcccttgcttcatgcccaattag

SEQ ID NO: 264710 - DNA, 1530 bp, Artificial Sequence
  derived and/or modified sequence
atggagcggcggcggctgtggggcagcatccagagccggtacatctctatgagtgtgtggacaagcccacgccggctagtggagctggcaggccagagtttgctgaaagacgaggctctagccatcgccgcgcttgagttgctgcccagagagctttttcctccactcttcatggctgcttttgacggtcgccatagccaaacactgaaggcaatggtccaggcctggccattcacctgcctccctctgggcgtgctgatgaaagggcaacatctgcacctcgaaacttttaaggccgtgctcgacggcctagatgtgcttctagcccaggaggtgcggccccgccgctggaaactgcaagtcctggatctgcgaaaaaacagtcaccaggatttttggaccgtgtggagcggcaacagagccagcctttattcatttccagagcccgaggccgctcaacctatgactaagaagcggaaagtcgatgggctaagcaccgaagccgaacagccatttattcctgtggaggtgctggtggatctgtttcttaaggagggggcatgtgatgaactgttctcatatttaattgaaaaggtgaagagaaaaaagaacgtgcttcggttatgctgcaagaagctgaagatctttgcaatgcctatgcaggatattaagatgatattaaaaatggtccagctggatagcattgaggatctcgaagtcacctgcacgtggaagctcccaacgctggcaaagttttccccctacttaggccagatgatcaacctacgtcggttgttgcttagtcacatacacgctagttcttacatcagtccagaaaaggaggaacagtacattgctcagtttacgtcacaatttctaagcctgcagtgcctgcaagccctgtatgtggactccctgttttttcttcggggtcggctggatcagctactgaggcatgtcatgaacccactggaaaccttgtccataacaaactgccgactgtctgagggagacgtgatgcatttaagtcagagcccctcagtttcacaattatctgtgttaagcctttcaggtgtaatgctgactgatgtctcgcccgagcccctccaagcacttctggaaagagccagcgcgaccctgcaggacctggtctttgacgaatgcggcatcacggatgaccagctgctggcactgctgcctagtcttagtcactgctctcagctcacaacactgtccttctacggaaattctattagcattagtgccctccaatctttgctgcaacacttgataggcctctcaaatttgactcatgtcctatatcccgtgccccttgagtcatacgaggacattcacggcactctgcatttggaacgcttagcctacctccacgcaaggttacgcgaactactgtgtgaactgggacggccaagtatggtttggctctcagcaaatccatgcccgcattgcggggatagaacattctacgatcctgaacccatactgtgcccatgttttatgccaaactag

SEQ ID NO: 264711 - DNA, 1530 bp, Artificial Sequence
  derived and/or modified sequence
atggagcggcggcggctgtggggcagcatccagagccggtacatcagtatgtctgtgtggacctcaccacgtcggcttgtggagttagcggggcagagcctcctgaaggacgaggcactcgccattgctgcgttagagctcctgcccagggagctttttccacctctattcatggctgcatttgatggtagacacagccagacactcaaggccatggtccaggcttggccttttacctgccttcccctgggcgtgctcatgaaggggcagcacctgcacttggagacgtttaaagccgtgctcgacggcttggacgtcttactagcccaggaggtgcggccccgtcgctggaaactgcaagtcctcgatttgagaaaaaactctcaccaggacttctggactgtgtggtcaggaaacagagcttcgctgtatagttttcccgagcccgaggccgcacagccgatgaccaaaaaacgcaaagttgatggactgtctaccgaggccgagcaaccttttattcccgtcgaggtgttggtggacctgtttctgaaggaaggcgcgtgtgacgaactctttagctatcttatcgagaaggttaaacgcaagaagaacgtgttgaggttgtgctgtaaaaaactaaagatttttgctatgcccatgcaagatataaaaatgattctgaagatggtgcagcttgactccatcgaggacctggaggtgacgtgtacttggaaactgcccaccctcgctaagtttagtccatatctcgggcagatgattaacctgcgtcgcctactcctttcacatattcacgcctccagttacatttctcccgagaaagaggagcaatacatcgctcagtttacatcccaattcctgagtcttcagtgtttacaggccttatacgtggactctctgttctttctgcgcgggaggctagaccagttgctgagacatgtcatgaatccactggaaacattgagcatcacaaattgtcggttatctgagggagatgtgatgcacctgagtcagtcccccagtgtgagccagctctctgtgctctcgttgtccggggtgatgttaacagatgtcagcccggagccgctgcaagctctgctggagagggctagcgctacgctccaggacctggtttttgatgagtgtgggattacagatgaccagctgctggcattactcccctctctcagtcactgcagccagttaacaaccttgtctttttatggtaactcaataagcattagcgcactgcagtccctgctccagcatttaatcggccttagcaaccttacacacgttctgtacccggtgccgcttgagagttatgaggatattcacgggacactgcacctcgaacgcctggcttacctgcacgccagattgcgggagctgctttgcgagttaggacgaccatcaatggtgtggctgtcggcgaatccttgtcctcattgtggtgaccgaaccttctatgaccctgaacccatcctctgcccatgcttcatgcccaattag

SEQ ID NO: 264712 - DNA, 261 bp, Artificial Sequence
  derived and/or modified sequence
atggagcggcggcggctgtggggcagcatccagagccggtacatcagcatgagcgtctggacatcgcctaggaggctagtagaattagctggacagagcctcctgaaggacgaagctctagcgattgccgctctggaactgcttccgcgcgaactctttcctccgctgtttatggccgcatttgatgggaggcacagccaaacgctgaaagctatggtgcaagcatggccattcacatgcctccccttgggcgtcctgtag

SEQ ID NO: 264713 - DNA, 1530 bp, Artificial Sequence
  derived and/or modified sequence
atggagcggcggcggctgtggggcagcatccagagccggtacatctctatgtccgtttggacctccccccgcagactggtggagttagcaggacaaagtctgctgaaggatgaggctctagctatcgcagctctggaactccttccaagagaactgttcccacctctgttcatggccgcattcgacggacggcattcacagacactcaaagcaatggtgcaagcctggccttttacctgcctacctcttggcgtactgatgaaggggcagcatctccatctagaaacctttaaggccgtactcgatggtctagacgtgctgttggctcaggaggtacgccctcggagatggaaactgcaagtgctcgaccttagaaaaaatagccaccaagatttctggacagtgtggagcggcaatcgcgctagcttgtacagctttccggaaccagaggctgcacagccaatgaccaaaaagcgtaaagtggacggtctgagcacagaggctgagcagccatttatcccggttgaagtcctcgtggatttattcttaaaggaaggcgcctgcgacgaactgttctcctatctcatcgagaaggttaagagaaagaagaacgtcctacgcctatgttgcaaaaaactcaaaatttttgccatgccaatgcaggacataaaaatgattttgaaaatggttcagctggactctattgaagacctggaggtaacttgtacctggaagctcccaacattggccaagttctccccttatctggggcagatgataaacctgcgcaggcttctgctgtcccacatccacgctagttcttacatctctccagagaaagaggagcagtatatcgctcaatttaccagccagtttctttccctgcagtgcctccaggccttgtacgtggacagcttattcttcttgcgaggacgtttggatcagctcctccggcacgtgatgaacccactcgagaccctgtctattacaaattgcaggctttcagaaggagacgttatgcatctatctcagagcccctcagtaagtcagctatccgttctatccttatcaggagtgatgttgaccgacgtgagtccagagcctctgcaggccctactggagcgggctagtgccaccctacaggatctggtatttgacgagtgtgggatcactgacgatcagctgctggcactgctgcccagcctaagccactgttcgcagttgactactctcagcttctacggaaacagtatttcgatctcggcgctacagtccctgctgcagcacctcattggactgagtaatctgacacacgtcctctacccggtccccctggaaagttatgaggacatccacggaactcttcacctagaacggctggcatatctccatgcacgacttcgggaactcctttgcgaactcgggaggccaagtatggtctggttaagcgccaatccatgtccccactgtggagatcgcactttctacgaccccgagcctattctctgcccctgcttcatgccaaattag

SEQ ID NO: 264714 - DNA, 348 bp, Artificial Sequence
  derived and/or modified sequence
atggagcggcggcggctgtggggcagcatccagagccggtacatcagcatgagcgtctggactagcccgcgcagactggtggagctcgctgggcagagtctcctgaaggacgaggctctggcaatagccgcactggagctgctgccccgcgagctgtttccccccttgttcatggctgcctttgacggacgccattctcagaccttgaaagctatggtccaggcctggccctttacatgcctcccgctcggagtgctgatgaaaggacagcaccttcacctggagacatttaaggcagtgctcgacggactagacgtgctactggcccaagaagtgcggccccggtag

SEQ ID NO: 264715 - DNA, 459 bp, Artificial Sequence
  derived and/or modified sequence
atggagcggcggcggctgtggggcagcatccagagccggtacatctcaatgagcgtgtggacaagcccacgccgtttggtggaactcgctggccaatcgctgcttaaagatgaggccctggcaatcgcagcattggaactgctgcccagagagcttttccccccactgttcatggcggcattcgacgggaggcattcacaaacactgaaggccatggtacaagcatggccatttacatgtctgcccctgggtgtgttgatgaagggacagcatctacatctggaaacgtttaaagccgtgttggacggcctggatgtgttgctcgcccaggaagttcgccccaggaggtggaagctacaggtccttgacttaaggaagaacagccatcaagacttttggaccgtctggtccggaaatagggctagtctgtatagtttccccgagcccgaagctgcttag

SEQ ID NO: 264716 - DNA, 1482 bp, Artificial Sequence
  derived and/or modified sequence
atgagcgtgtggaccagcccccggcggctggtggagctggccggccagtcactcctgaaagacgaagcattggcaattgcggctctggagctactgccgagggagctgttcccacccctgttcatggcggctttcgacggccgccactcccagactcttaaggccatggtccaggcttggccctttacctgcctgcccctgggggttctgatgaaggggcaacatctccacctcgaaacatttaaggctgtgctggacggattggacgtgctactggctcaggaagtcaggcctcggcgctggaaactacaggtcctggacttgagaaagaacagtcatcaggacttctggactgtgtggtctggtaaccgtgcttccctctacagcttccctgaaccagaagcagcacagcccatgaccaaaaaacgtaaggtggatggattgtccaccgaagccgagcagccctttatacctgtggaggtgttagtggacctgttcctcaaagagggcgcttgtgacgaactctttagctacttgatcgaaaaagtaaagcggaaaaaaaatgtgctgcgtctgtgctgtaaaaagctcaagatcttcgcaatgccgatgcaggacatcaagatgattctgaagatggtgcaactggacagcatagaggacctcgaagtaacttgtacatggaagcttccaaccctcgcaaagttctcaccctacctggggcagatgattaacctccgaaggctgctgttaagccatatccacgcctcttcgtatattagcccagaaaaggaagaacagtatattgcccagttcaccagtcagttcctctctctccaatgcctacaggcactgtacgtcgatagcttgtttttcctgaggggtcgactagaccaactactgagacacgtgatgaatcctctcgagactctttctatcactaattgtcggctctccgagggggacgtgatgcatctcagtcaaagtccaagtgtatcccagcttagcgtgctgtctctttcaggggtgatgctgacggacgtgtcccctgagcctctgcaggccctcctggagcgcgcgtctgccactcttcaggacctggtgtttgacgagtgtggcatcaccgacgatcagctcctggccctgttgccttccttgagtcattgctctcagctgactaccttgtctttctacggaaattcaataagcatcagtgctctgcaatctctgcttcagcacctgatcggtctgagcaacctgacacatgtgttgtaccccgtgcctcttgagtcctatgaggacatccacggtactctacatctggaaaggctcgcatatttgcacgcccgattacgggagctgctgtgtgaactggggaggccatccatggtgtggctgtcagctaatccatgtccccattgcggcgacaggactttttatgacccggagcctatactgtgtccctgctttatgcctaactag

SEQ ID NO: 264717 - DNA, 606 bp, Artificial Sequence
  derived and/or modified sequence
atggagcggcggcggctgtggggcagcatccagagccggtacatctctatgtcagtgtggaccagtccccggagactggtcgagctggctgggcagtcactcctcaaagacgaggctctagctatcgccgccttagaacttctgcctagagagttatttcctcctctgtttatggccgccttcgacggacggcactcgcagacactgaaagctatggtgcaggcctggcctttcacctgtctgcctttgggagttttaatgaaggggcagcatctgcacctggaaacatttaaagctgtgttagatgggctggacgttcttttggcacaggaagtcagaccacgccggtggaaactccaggttcttgatttgcggaaaaattctcatcaagatttctggactgtatggtctgggaacagagcttctttgtacagcttccccgagcctgaggccgcccagcccatgaccaagaaacgaaaggtggatgggctttcaaccgaggccgagcagcctttcattccagtggaagttctcgtggacctctttctcaaagaaggggcctgtgatgagctgttcagctatctcatcgaaaaagtgaagagatag

SEQ ID NO: 264718 - DNA, 1482 bp, Artificial Sequence
  derived and/or modified sequence
atgagcgtgtggaccagcccccggcggctggtggagctggccggccagagcctcctgaaagatgaggcactcgccattgctgccctcgaactcctgccccgcgagctgttccctcccttattcatggccgctttcgatggacgacatagccagacactgaaagcaatggtgcaggcatggcctttcacttgccttccgctcggggttctgatgaaaggccagcatctgcatctcgagacattcaaagcggttttggatggattggacgtcctcttagctcaggaggtcaggcccagacgctggaagttgcaagttctggatctgaggaaaaatagccaccaagacttctggacggtatggtctggcaaccgtgcgagcttatattctttccccgagccggaagcggctcagccaatgaccaagaagcgcaaagtcgatggcctttcaaccgaggctgagcagccattcatccctgtggaagtcctggttgatttgtttctgaaggagggggcatgcgatgaactattttcctacctcattgagaaggtgaaaagaaaaaaaaacgtcttgaggctctgttgcaaaaagctgaaaatctttgcaatgcctatgcaggatattaagatgatcctgaaaatggttcagctcgattctatagaagacctggaggtgacttgcacgtggaagttaccaactcttgctaaattctccccttacctcggacaaatgattaacctgcgccggctacttctgtctcacatccatgctagctcatacatctcaccagagaaggaggagcagtacattgcccaatttacaagtcaatttttaagccttcagtgcctgcaggcactttacgtcgacagtctgttcttcctcaggggacggttagatcagctcctgagacacgttatgaatcccctagagacgctgagcattacaaactgtcgcctatccgagggcgatgtgatgcacctaagccagtccccaagcgtctcccaacttagcgtgctgagcctgtccggagtcatgcttaccgatgtctcaccagaacctttgcaggccttattggaaagagcctctgccaccctgcaggacctggtatttgatgagtgtggaatcacggatgatcagttactggcgctcttgcccagcttgtcccactgctcacagctgacaaccctatcattttatggaaactctatctcaatctctgcgcttcagtccctgctgcaacatctgataggacttagcaatctcacacatgttttgtatccagtgcctctggaaagctatgaggatatccatggcacactgcatttggaaagattggcctacttgcacgccagactgcgagagcttctttgtgaattgggtcgtccctcgatggtgtggctttccgccaatccatgtcctcactgtggtgataggacattctacgaccccgaacccatcctgtgcccttgtttcatgcccaactag

SEQ ID NO: 264719 - DNA, 1530 bp, Artificial Sequence
  derived and/or modified sequence
atggagcggcggcggctgtggggcagcatccagagccggtacatcagcatgagtgtgtggacttcgcctcgcagactggtggaactggccggacagtcactactgaaagatgaagctctggctatcgccgctctggaactgctgcctcgggaactttttcctccattgtttatggccgcgtttgatgggagacatagccagacattaaaggcaatggtacaagcgtggccttttacctgtctacctttgggagttctgatgaagggtcagcacctgcacctggaaaccttcaaagctgtattggacggactggatgttctactggcccaggaggtgagaccacgtcggtggaagctgcaagtgctcgatctcagaaaaaactctcatcaggacttttggactgtttggagtggcaacagggcaagcctgtactctttcccagagcctgaggcagcacagcccatgacaaagaaaaggaaagtcgacggcctcagcacagaggccgagcagccttttattcctgtggaggttctcgtagatcttttcctcaaggaaggagcttgcgatgaactgttctcttatctcattgaaaaggtgaagcgcaaaaagaacgttctccggctctgctgtaagaaactgaagatctttgcgatgcctatgcaagatataaagatgatcctgaaaatggtgcagctcgacagcatcgaggaccttgaggtcacttgcacctggaaactgcctacactagccaagttctcaccctatctcgggcaaatgatcaacctccgacgacttctactgagccatatacatgcctcaagctatatcagccctgagaaagaggagcaatatattgcccagttcacatcccagttcctttccctgcagtgcttgcaggcactatacgtcgatagtttgttcttcctgcggggcagattggaccaattgcttagacatgtgatgaatcccctggaaactttgtctataaccaactgccggttatccgagggggacgtcatgcatttgtcccagagcccatcagtgtcccaactgtccgttctgagcctgtctggcgttatgctgactgatgtgagccccgaacccctgcaagctctgctggagcgggcatctgcgacacttcaggatctcgtgtttgatgaatgtgggattactgacgatcagcttctcgccttgctgcctagcctctcccactgttcacagctgacgacgttgagtttctacggaaactcaatctcaatttctgcattgcaaagcttgctgcagcacctcattggcctctccaatctgacacacgtcctgtatcctgtacctctggagagctatgaagatatacacggtaccctccacctcgagcggctggcttaccttcatgctaggttacgggagttgctgtgtgagcttggacgtccgtcaatggtatggctcagcgccaatccctgcccacactgtggggatcggaccttctatgaccctgaaccaattctttgtccctgctttatgcccaattag

SEQ ID NO: 264720 - DNA, 2202 bp, Artificial Sequence
  derived and/or modified sequence
aatgtagggaaagcagggcggagtcctctgcaggctcgggggaggggaggggcgtgaatgcgtggatttctgtggagagtggaaacacggggagtcgaggggagcatgcgcgggcctcagaaagttttgggaaaccgactcctgggagcagggaggaacgcgcgctccagagacaacttcgcggtgtggtgaactctctgaggaaaaaccattttgattattactctcagacgtgcgtggcaacaagtgactgagacctagaaatccaagcgttggaggtcctgaggccagcctaagtcgcttcaaaatggaacgaaggcgtttgtggggttccattcagagccgatacatcagcatgagtgtgtggacaagcccacggagacttgtggagctggcagggcagagcctgctgaaggatgaggccctggccattgccgccctggagttgctgcccagggagctcttcccgccactcttcatggcagcctttgacgggagacacagccagaccctgaaggcaatggtgcaggcctggcccttcacctgcctccctctgggagtgctgatgaagggacaacatcttcacctggagaccttcaaagctgtgcttgatggacttgatgtgctccttgcccaggaggttcgccccaggaggtggaaacttcaagtgctggatttacggaagaactctcatcaggacttctggactgtatggtctggaaacagggccagtctgtactcatttccagagccagaagcagctcagcccatgacaaagaagcgaaaagtagatggtttgagcacagaggcagagcagcccttcattccagtagaggtgctcgtagacctgttcctcaaggaaggtgcctgtgatgaattgttctcctacctcattgagaaagtgaagcgaaagaaaaatgtactacgcctgtgctgtaagaagctgaagatttttgcaatgcccatgcaggatatcaagatgatcctgaaaatggtgcagctggactctattgaagatttggaagtgacttgtacctggaagctacccaccttggcgaaattttctccttacctgggccagatgattaatctgcgtagactcctcctctcccacatccatgcatcttcctacatttccccggagaaggaagagcagtatatcgcccagttcacctctcagttcctcagtctgcagtgcctgcaggctctctatgtggactctttatttttccttagaggccgcctggatcagttgctcaggcacgtgatgaaccccttggaaaccctctcaataactaactgccggctttcggaaggggatgtgatgcatctgtcccagagtcccagcgtcagtcagctaagtgtcctgagtctaagtggggtcatgctgaccgatgtaagtcccgagcccctccaagctctgctggagagagcctctgccaccctccaggacctggtctttgatgagtgtgggatcacggatgatcagctccttgccctcctgccttccctgagccactgctcccagcttacaaccttaagcttctacgggaattccatctccatatctgccttgcagagtctcctgcagcacctcatcgggctgagcaatctgacccacgtgctgtatcctgtccccctggagagttatgaggacatccatggtaccctccacctggagaggcttgcctatctgcatgccaggctcagggagttgctgtgtgagttggggcggcccagcatggtctggcttagtgccaacccctgtcctcactgtggggacagaaccttctatgacccggagcccatcctgtgcccctgtttcatgcctaactagctgggtgcacatatcaaatgcttcattctgcatacttggacactaaagccaggatgtgcatgcatcttgaagcaacaaagcagccacagtttcagacaaatgttcagtgtgagtgaggaaaacatgttcagtgaggaaaaaacattcagacaaatgttcagtgaggaaaaaaaggggaagttggggataggcagatgttgacttgaggagttaatgtgatctttggggagatacatcttatagagttagaaatagaatctgaatttctaaagggagattctggcttgggaagtacatgtaggagttaatccctgtgtagactgttgtaaagaaactgttgaaaataaagagaagcaatgtgaagc

SEQ ID NO: 264721 - DNA, 2196 bp, Artificial Sequence
  derived and/or modified sequence
gttttgcatacagtccctgttgactctagtgccccctgctggccccagacgcgagttccggcgaggcttcagggtacagctcccccgcagccagaagccgggcctgcagcgcctcagcaccgctccgggacaccccacccgcttcccaggcgtgacctgtcaacagcaacttcgcggtgtggtgaactctctgaggaaaaaccattttgattattactctcagacgtgcgtggcaacaagtgactgagacctagaaatccaagcgttggaggtcctgaggccagcctaagtcgcttcaaaatggaacgaaggcgtttgtggggttccattcagagccgatacatcagcatgagtgtgtggacaagcccacggagacttgtggagctggcagggcagagcctgctgaaggatgaggccctggccattgccgccctggagttgctgcccagggagctcttcccgccactcttcatggcagcctttgacgggagacacagccagaccctgaaggcaatggtgcaggcctggcccttcacctgcctccctctgggagtgctgatgaagggacaacatcttcacctggagaccttcaaagctgtgcttgatggacttgatgtgctccttgcccaggaggttcgccccaggaggtggaaacttcaagtgctggatttacggaagaactctcatcaggacttctggactgtatggtctggaaacagggccagtctgtactcatttccagagccagaagcagctcagcccatgacaaagaagcgaaaagtagatggtttgagcacagaggcagagcagcccttcattccagtagaggtgctcgtagacctgttcctcaaggaaggtgcctgtgatgaattgttctcctacctcattgagaaagtgaagcgaaagaaaaatgtactacgcctgtgctgtaagaagctgaagatttttgcaatgcccatgcaggatatcaagatgatcctgaaaatggtgcagctggactctattgaagatttggaagtgacttgtacctggaagctacccaccttggcgaaattttctccttacctgggccagatgattaatctgcgtagactcctcctctcccacatccatgcatcttcctacatttccccggagaaggaagagcagtatatcgcccagttcacctctcagttcctcagtctgcagtgcctgcaggctctctatgtggactctttatttttccttagaggccgcctggatcagttgctcaggcacgtgatgaaccccttggaaaccctctcaataactaactgccggctttcggaaggggatgtgatgcatctgtcccagagtcccagcgtcagtcagctaagtgtcctgagtctaagtggggtcatgctgaccgatgtaagtcccgagcccctccaagctctgctggagagagcctctgccaccctccaggacctggtctttgatgagtgtgggatcacggatgatcagctccttgccctcctgccttccctgagccactgctcccagcttacaaccttaagcttctacgggaattccatctccatatctgccttgcagagtctcctgcagcacctcatcgggctgagcaatctgacccacgtgctgtatcctgtccccctggagagttatgaggacatccatggtaccctccacctggagaggcttgcctatctgcatgccaggctcagggagttgctgtgtgagttggggcggcccagcatggtctggcttagtgccaacccctgtcctcactgtggggacagaaccttctatgacccggagcccatcctgtgcccctgtttcatgcctaactagctgggtgcacatatcaaatgcttcattctgcatacttggacactaaagccaggatgtgcatgcatcttgaagcaacaaagcagccacagtttcagacaaatgttcagtgtgagtgaggaaaacatgttcagtgaggaaaaaacattcagacaaatgttcagtgaggaaaaaaaggggaagttggggataggcagatgttgacttgaggagttaatgtgatctttggggagatacatcttatagagttagaaatagaatctgaatttctaaagggagattctggcttgggaagtacatgtaggagttaatccctgtgtagactgttgtaaagaaactgttgaaaataaagagaagcaatgtgaagca

SEQ ID NO: 264722 - DNA, 2057 bp, Artificial Sequence
  derived and/or modified sequence
gagttccggcgaggcttcagggtacagctcccccgcagccagaagccgggcctgcagcgcctcagcaccgctccgggacaccccacccgcttcccaggcgtgacctgtcaacagcaacttcgcggtgtggtgaactctctgaggaaaaacacgtgcgtggcaacaagtgactgagacctagaaatccaagcgttggaggtcctgaggccagcctaagtcgcttcaaaatggaacgaaggcgtttgtggggttccattcagagccgatacatcagcatgagtgtgtggacaagcccacggagacttgtggagctggcagggcagagcctgctgaaggatgaggccctggccattgccgccctggagttgctgcccagggagctcttcccgccactcttcatggcagcctttgacgggagacacagccagaccctgaaggcaatggtgcaggcctggcccttcacctgcctccctctgggagtgctgatgaagggacaacatcttcacctggagaccttcaaagctgtgcttgatggacttgatgtgctccttgcccaggaggttcgccccaggaggtggaaacttcaagtgctggatttacggaagaactctcatcaggacttctggactgtatggtctggaaacagggccagtctgtactcatttccagagccagaagcagctcagcccatgacaaagaagcgaaaagtagatggtttgagcacagaggcagagcagcccttcattccagtagaggtgctcgtagacctgttcctcaaggaaggtgcctgtgatgaattgttctcctacctcattgagaaagtgaagcgaaagaaaaatgtactacgcctgtgctgtaagaagctgaagatttttgcaatgcccatgcaggatatcaagatgatcctgaaaatggtgcagctggactctattgaagatttggaagtgacttgtacctggaagctacccaccttggcgaaattttctccttacctgggccagatgattaatctgcgtagactcctcctctcccacatccatgcatcttcctacatttccccggagaaggaagagcagtatatcgcccagttcacctctcagttcctcagtctgcagtgcctgcaggctctctatgtggactctttatttttccttagaggccgcctggatcagttgctcaggcacgtgatgaaccccttggaaaccctctcaataactaactgccggctttcggaaggggatgtgatgcatctgtcccagagtcccagcgtcagtcagctaagtgtcctgagtctaagtggggtcatgctgaccgatgtaagtcccgagcccctccaagctctgctggagagagcctctgccaccctccaggacctggtctttgatgagtgtgggatcacggatgatcagctccttgccctcctgccttccctgagccactgctcccagcttacaaccttaagcttctacgggaattccatctccatatctgccttgcagagtctcctgcagcacctcatcgggctgagcaatctgacccacgtgctgtatcctgtccccctggagagttatgaggacatccatggtaccctccacctggagaggcttgcctatctgcatgccaggctcagggagttgctgtgtgagttggggcggcccagcatggtctggcttagtgccaacccctgtcctcactgtggggacagaaccttctatgacccggagcccatcctgtgcccctgtttcatgcctaactagctgggtgcacatatcaaatgcttcattctgcatacttggacactaaagccaggatgtgcatgcatcttgaagcaacaaagcagccacagtttcagacaaatgttcagtgtgagtgaggaaaacatgttcagtgaggaaaaaacattcagacaaatgttcagtgaggaaaaaaaggggaagttggggataggcagatgttgacttgaggagttaatgtgatctttggggagatacatcttatagagttagaaatagaatctgaatttctaaagggagattctggcttgggaagtacatgta

SEQ ID NO: 264723 - DNA, 567 bp, Artificial Sequence
  derived and/or modified sequence
ctcgactctctgggcgacctcactggatctcgtgagattttgccctggaaggactgagaaacggggattggtcagaccaggctgcccagccccccggcccccaccgccgccccccccgccccacgcagcggctagggcgcttagctgagccattgtctcgttctttccttccagcaacttcgcggtgtggtgaactctctgaggaaaaaccattttgattattactctcagacgtgcgtggcaacaagtgactgagacctagaaatccaagcgttggaggtcctgaggccagcctaagtcgcttcaaaatggaacgaaggcgtttgtggggttccattcagagccgatacatcagcatgagtgtgtggacaagcccacggagacttgtggagctggcagggcagagcctgctgaaggatgaggccctggccattgccgccctggagttgctgcccagggagctcttcccgccactcttcatggcagcctttgacgggagacacagccagaccctgaaggcaatggtgcaggcctggcccttcacctgcctccctctgggagtgctga

SEQ ID NO: 264724 - DNA, 2179 bp, Artificial Sequence
  derived and/or modified sequence
aatgtagggaaagcagggcggagtcctctgcaggctcgggggaggggaggggcgtgaatgcgtggatttctgtggagagtggaaacacggggagtcgaggggagcatgcgcgggcctcagaaagttttgggaaaccgactcctgggagcagggaggaacgcgcgctccagagacaacttcgcggtgtggtgaactctctgaggaaaaacacgtgcgtggcaacaagtgactgagacctagaaatccaagcgttggaggtcctgaggccagcctaagtcgcttcaaaatggaacgaaggcgtttgtggggttccattcagagccgatacatcagcatgagtgtgtggacaagcccacggagacttgtggagctggcagggcagagcctgctgaaggatgaggccctggccattgccgccctggagttgctgcccagggagctcttcccgccactcttcatggcagcctttgacgggagacacagccagaccctgaaggcaatggtgcaggcctggcccttcacctgcctccctctgggagtgctgatgaagggacaacatcttcacctggagaccttcaaagctgtgcttgatggacttgatgtgctccttgcccaggaggttcgccccaggaggtggaaacttcaagtgctggatttacggaagaactctcatcaggacttctggactgtatggtctggaaacagggccagtctgtactcatttccagagccagaagcagctcagcccatgacaaagaagcgaaaagtagatggtttgagcacagaggcagagcagcccttcattccagtagaggtgctcgtagacctgttcctcaaggaaggtgcctgtgatgaattgttctcctacctcattgagaaagtgaagcgaaagaaaaatgtactacgcctgtgctgtaagaagctgaagatttttgcaatgcccatgcaggatatcaagatgatcctgaaaatggtgcagctggactctattgaagatttggaagtgacttgtacctggaagctacccaccttggcgaaattttctccttacctgggccagatgattaatctgcgtagactcctcctctcccacatccatgcatcttcctacatttccccggagaaggaagagcagtatatcgcccagttcacctctcagttcctcagtctgcagtgcctgcaggctctctatgtggactctttatttttccttagaggccgcctggatcagttgctcaggcacgtgatgaaccccttggaaaccctctcaataactaactgccggctttcggaaggggatgtgatgcatctgtcccagagtcccagcgtcagtcagctaagtgtcctgagtctaagtggggtcatgctgaccgatgtaagtcccgagcccctccaagctctgctggagagagcctctgccaccctccaggacctggtctttgatgagtgtgggatcacggatgatcagctccttgccctcctgccttccctgagccactgctcccagcttacaaccttaagcttctacgggaattccatctccatatctgccttgcagagtctcctgcagcacctcatcgggctgagcaatctgacccacgtgctgtatcctgtccccctggagagttatgaggacatccatggtaccctccacctggagaggcttgcctatctgcatgccaggctcagggagttgctgtgtgagttggggcggcccagcatggtctggcttagtgccaacccctgtcctcactgtggggacagaaccttctatgacccggagcccatcctgtgcccctgtttcatgcctaactagctgggtgcacatatcaaatgcttcattctgcatacttggacactaaagccaggatgtgcatgcatcttgaagcaacaaagcagccacagtttcagacaaatgttcagtgtgagtgaggaaaacatgttcagtgaggaaaaaacattcagacaaatgttcagtgaggaaaaaaaggggaagttggggataggcagatgttgacttgaggagttaatgtgatctttggggagatacatcttatagagttagaaatagaatctgaatttctaaagggagattctggcttgggaagtacatgtaggagttaatccctgtgtagactgttgtaaagaaactgttgaaaataaagagaagcaatgtgaa

SEQ ID NO: 264725 - DNA, 740 bp, Artificial Sequence
  derived and/or modified sequence
gtacagctcccccgcagccagaagccgggcctgcagcgcctcagcaccgctccgggacaccccacccgcttcccaggcgtgacctgtcaacagcaacttcgcggtgtggtgaactctctgaggaaaaaccccaggaaacactggtgctcaggtttggagccagagatttgcactgaaagggcgggattgagtcgccagttgtcagtttcctcagcagtatttgcggaggttttcacaggaggccgttgcttcgtaaatattatacatgtattcttctttttggagcattttgattattactctcagacgtgcgtggcaacaagtgactgagacctagaaatccaagcgttggaggtcctgaggccagcctaagtcgcttcaaaatggaacgaaggcgtttgtggggttccattcagagccgatacatcagcatgagtgtgtggacaagcccacggagacttgtggagctggcagggcagagcctgctgaaggatgaggccctggccattgccgccctggagttgctgcccagggagctcttcccgccactcttcatggcagcctttgacgggagacacagccagaccctgaaggcaatggtgcaggcctggcccttcacctgcctccctctgggagtgctgatgaagggacaacatcttcacctggagaccttcaaagctgtgcttgatggacttgatgtgctccttgcccaggaggttcgccccaggtaagggtgacct

SEQ ID NO: 264726 - DNA, 705 bp, Artificial Sequence
  derived and/or modified sequence
cgtggatttctgtggagagtggaaacacggggagtcgaggggagcatgcgcgggcctcagaaagttttgggaaaccgactcctgggagcagggaggaacgcgcgctccagagacaacttcgcggtgtggtgaactctctgaggaaaaaccattttgattattactctcagacgtgcgtggcaacaagtgactgagacctagaaatccaagcgttggaggtcctgaggccagcctaagtcgcttcaaaatggaacgaaggcgtttgtggggttccattcagagccgatacatcagcatgagtgtgtggacaagcccacggagacttgtggagctggcagggcagagcctgctgaaggatgaggccctggccattgccgccctggagttgctgcccagggagctcttcccgccactcttcatggcagcctttgacgggagacacagccagaccctgaaggcaatggtgcaggcctggcccttcacctgcctccctctgggagtgctgatgaagggacaacatcttcacctggagaccttcaaagctgtgcttgatggacttgatgtgctccttgcccaggaggttcgccccaggaggtggaaacttcaagtgctggatttacggaagaactctcatcaggacttctggactgtatggtctggaaacagggccagtctgtactcatttccagagccagaagcagctca

SEQ ID NO: 264727 - DNA, 1766 bp, Artificial Sequence
  derived and/or modified sequence
agacgcaaaagcccacacttccagtggtgtcagagagtatgagctccaggaggctttgatctcactgccccatgggcttgggccattagggggttccattcagagccgatacatcagcatgagtgtgtggacaagcccacggagacttgtggagctggcagggcagagcctgctgaaggatgaggccctggccattgccgccctggagttgctgcccagggagctcttcccgccactcttcatggcagcctttgacgggagacacagccagaccctgaaggcaatggtgcaggcctggcccttcacctgcctccctctgggagtgctgatgaagggacaacatcttcacctggagaccttcaaagctgtgcttgatggacttgatgtgctccttgcccaggaggttcgccccaggaggtggaaacttcaagtgctggatttacggaagaactctcatcaggacttctggactgtatggtctggaaacagggccagtctgtactcatttccagagccagaagcagctcagcccatgacaaagaagcgaaaagtagatggtttgagcacagaggcagagcagcccttcattccagtagaggtgctcgtagacctgttcctcaaggaaggtgcctgtgatgaattgttctcctacctcattgagaaagtgaagcgaaagaaaaatgtactacgcctgtgctgtaagaagctgaagatttttgcaatgcccatgcaggatatcaagatgatcctgaaaatggtgcagctggactctattgaagatttggaagtgacttgtacctggaagctacccaccttggcgaaattttctccttacctgggccagatgattaatctgcgtagactcctcctctcccacatccatgcatcttcctacatttccccggagaaggaagagcagtatatcgcccagttcacctctcagttcctcagtctgcagtgcctgcaggctctctatgtggactctttatttttccttagaggccgcctggatcagttgctcaggcacgtgatgaaccccttggaaaccctctcaataactaactgccggctttcggaaggggatgtgatgcatctgtcccagagtcccagcgtcagtcagctaagtgtcctgagtctaagtggggtcatgctgaccgatgtaagtcccgagcccctccaagctctgctggagagagcctctgccaccctccaggacctggtctttgatgagtgtgggatcacggatgatcagctccttgccctcctgccttccctgagccactgctcccagcttacaaccttaagcttctacgggaattccatctccatatctgccttgcagagtctcctgcagcacctcatcgggctgagcaatctgacccacgtgctgtatcctgtccccctggagagttatgaggacatccatggtaccctccacctggagaggcttgcctatctgcatgccaggctcagggagttgctgtgtgagttggggcggcccagcatggtctggcttagtgccaacccctgtcctcactgtggggacagaaccttctatgacccggagcccatcctgtgcccctgtttcatgcctaactagctgggtgcacatatcaaatgcttcattctgcatacttggacactaaagccaggatgtgcatgcatcttgaagcaacaaagcagccacagtttcagacaaatgttcagtgtgagtgaggaaaacatgttcagtgaggaaaaaacattcagacaaatgttcagtgagg

SEQ ID NO: 264728 - DNA, 891 bp, Artificial Sequence
  derived and/or modified sequence
cgaggcttcagggtacagctcccccgcagccagaagccgggcctgcagcgcctcagcaccgctccgggacaccccacccgcttcccaggcgtgacctgtcaacagcaacttcgcggtgtggtgaactctctgaggaaaaacgaggccgttgcttcgtaaatattatacatgtattcttctttttggagcattttgattattactctcagacgtgcgtggcaacaagtgactgagacctagaaatccaagcgttggaggtcctgaggccagcctaagtcgcttcaaaatggaacgaaggcgtttgtggggttccattcagagccgatacatcagcatgagtgtgtggacaagcccacggagacttgtggagctggcagggcagagcctgctgaaggatgaggccctggccattgccgccctggagttgctgcccagggagctcttcccgccactcttcatggcagcctttgacgggagacacagccagaccctgaaggcaatggtgcaggcctggcccttcacctgcctccctctgggagtgctgatgaagggacaacatcttcacctggagaccttcaaagctgtgcttgatggacttgatgtgctccttgcccaggaggttcgccccaggaggtggaaacttcaagtgctggatttacggaagaactctcatcaggacttctggactgtatggtctggaaacagggccagtctgtactcatttccagagccagaagcagctcagcccatgacaaagaagcgaaaagtagatggtttgagcacagaggcagagcagcccttcattccagtagaggtgctcgtagacctgttcctcaaggaaggtgcctgtgatgaattgttctcctacctcattgagaaagtgaagcgaaa

SEQ ID NO: 264729 - DNA, 2223 bp, Artificial Sequence
  derived and/or modified sequence
aaaagcaccagtgggtgatcaggcccaggataggaatcatccctaagcagatccttaaatgccaaatataacttcaattttttgtgacggaaaatgtatttgtgcactgtgcctagcatggaaatagagaaaaactgagtctaattgataggcctgattgcatctcgctgaccagaatctctgtacctgagcagcttaggggcaagaaagaacagctgttttcttgaagtgtggaaacattagtaatacttaggaaggggctggccattggagattatgtttgtggtaaaggcctgacctgctgcttgtgaacagccccagtgtggaagaggacacctaaccataaagagaagggttccattcagagccgatacatcagcatgagtgtgtggacaagcccacggagacttgtggagctggcagggcagagcctgctgaaggatgaggccctggccattgccgccctggagttgctgcccagggagctcttcccgccactcttcatggcagcctttgacgggagacacagccagaccctgaaggcaatggtgcaggcctggcccttcacctgcctccctctgggagtgctgatgaagggacaacatcttcacctggagaccttcaaagctgtgcttgatggacttgatgtgctccttgcccaggaggttcgccccaggaggtggaaacttcaagtgctggatttacggaagaactctcatcaggacttctggactgtatggtctggaaacagggccagtctgtactcatttccagagccagaagcagctcagcccatgacaaagaagcgaaaagtagatggtttgagcacagaggcagagcagcccttcattccagtagaggtgctcgtagacctgttcctcaaggaaggtgcctgtgatgaattgttctcctacctcattgagaaagtgaagcgaaagaaaaatgtactacgcctgtgctgtaagaagctgaagatttttgcaatgcccatgcaggatatcaagatgatcctgaaaatggtgcagctggactctattgaagatttggaagtgacttgtacctggaagctacccaccttggcgaaattttctccttacctgggccagatgattaatctgcgtagactcctcctctcccacatccatgcatcttcctacatttccccggagaaggaagagcagtatatcgcccagttcacctctcagttcctcagtctgcagtgcctgcaggctctctatgtggactctttatttttccttagaggccgcctggatcagttgctcaggcacgtgatgaaccccttggaaaccctctcaataactaactgccggctttcggaaggggatgtgatgcatctgtcccagagtcccagcgtcagtcagctaagtgtcctgagtctaagtggggtcatgctgaccgatgtaagtcccgagcccctccaagctctgctggagagagcctctgccaccctccaggacctggtctttgatgagtgtgggatcacggatgatcagctccttgccctcctgccttccctgagccactgctcccagcttacaaccttaagcttctacgggaattccatctccatatctgccttgcagagtctcctgcagcacctcatcgggctgagcaatctgacccacgtgctgtatcctgtccccctggagagttatgaggacatccatggtaccctccacctggagaggcttgcctatctgcatgccaggctcagggagttgctgtgtgagttggggcggcccagcatggtctggcttagtgccaacccctgtcctcactgtggggacagaaccttctatgacccggagcccatcctgtgcccctgtttcatgcctaactagctgggtgcacatatcaaatgcttcattctgcatacttggacactaaagccaggatgtgcatgcatcttgaagcaacaaagcagccacagtttcagacaaatgttcagtgtgagtgaggaaaacatgttcagtgaggaaaaaacattcagacaaatgttcagtgaggaaaaaaaggggaagttggggataggcagatgttgacttgaggagttaatgtgatctttggggagatacatcttatagagttagaaatagaatctgaatttctaaagggagattctggcttgggaagtacatgtaggagttaatccctgtgtagactgttgtaaagaaactgttgaaaataaagagaagcaatgtg

SEQ ID NO: 264730 - DNA, 2758 bp, Artificial Sequence
  derived and/or modified sequence
cgagttccggcgaggcttcagggtacagctcccccgcagccagaagccgggcctgcagcgcctcagcaccgctccgggacaccccacccgcttcccaggcgtgacctgtcaacagcaacttcgcggtgtggtgaactctctgaggaaaaacgtaagttcgagccctgattcctccgcttccccgcagggtgaccttgggcttgtgcccccggcaccacccctgtcccgggtccctgttttctctctggaaatgggttgaagaccaaagaaaataatgtgcgccacttgggtcaccccgggccgcctgccccggaaaattggccccagttgaggagttgtggctgtaaggatgccttgaaccgaggcggcggtgctcgtggttggagctctccagggtgggtgcgcatttgtaatgcggtggatgctctgggactcggcccctctgaaggtgctgggggttggggacggcccaggcagtggcgtaggcgtcctaggaaggcgggagcagaggcagaaatgtcgctgcaagaccgtagtcagggtccttgaccacaggggtcacttgtgaccaaccacatggtctgttgttcctcctgccccctggttcagcccaggaaacactggtgctcaggtttggagccagagatttgcactgaaagggcgggattgagtcgccagttgtcagtttcctcagcagtatttgcggaggttttcacaggaggccgttgcttcgtaaatattatacatgtattcttctttttggagcattttgattattactctcagacgtgcgtggcaacaagtgactgagacctagaaatccaagcgttggaggtcctgaggccagcctaagtcgcttcaaaatggaacgaaggcgtttgtggggttccattcagagccgatacatcagcatgagtgtgtggacaagcccacggagacttgtggagctggcagggcagagcctgctgaaggatgaggccctggccattgccgccctggagttgctgcccagggagctcttcccgccactcttcatggcagcctttgacgggagacacagccagaccctgaaggcaatggtgcaggcctggcccttcacctgcctccctctgggagtgctgatgaagggacaacatcttcacctggagaccttcaaagctgtgcttgatggacttgatgtgctccttgcccaggaggttcgccccaggaggtggaaacttcaagtgctggatttacggaagaactctcatcaggacttctggactgtatggtctggaaacagggccagtctgtactcatttccagagccagaagcagctcagcccatgacaaagaagcgaaaagtagatggtttgagcacagaggcagagcagcccttcattccagtagaggtgctcgtagacctgttcctcaaggaaggtgcctgtgatgaattgttctcctacctcattgagaaagtgaagcgaaagaaaaatgtactacgcctgtgctgtaagaagctgaagatttttgcaatgcccatgcaggatatcaagatgatcctgaaaatggtgcagctggactctattgaagatttggaagtgacttgtacctggaagctacccaccttggcgaaattttctccttacctgggccagatgattaatctgcgtagactcctcctctcccacatccatgcatcttcctacatttccccggagaaggaagagcagtatatcgcccagttcacctctcagttcctcagtctgcagtgcctgcaggctctctatgtggactctttatttttccttagaggccgcctggatcagttgctcaggcacgtgatgaaccccttggaaaccctctcaataactaactgccggctttcggaaggggatgtgatgcatctgtcccagagtcccagcgtcagtcagctaagtgtcctgagtctaagtggggtcatgctgaccgatgtaagtcccgagcccctccaagctctgctggagagagcctctgccaccctccaggacctggtctttgatgagtgtgggatcacggatgatcagctccttgccctcctgccttccctgagccactgctcccagcttacaaccttaagcttctacgggaattccatctccatatctgccttgcagagtctcctgcagcacctcatcgggctgagcaatctgacccacgtgctgtatcctgtccccctggagagttatgaggacatccatggtaccctccacctggagaggcttgcctatctgcatgccaggctcagggagttgctgtgtgagttggggcggcccagcatggtctggcttagtgccaacccctgtcctcactgtggggacagaaccttctatgacccggagcccatcctgtgcccctgtttcatgcctaactagctgggtgcacatatcaaatgcttcattctgcatacttggacactaaagccaggatgtgcatgcatcttgaagcaacaaagcagccacagtttcagacaaatgttcagtgtgagtgaggaaaacatgttcagtgaggaaaaaacattcagacaaatgttcagtgaggaaaaaaaggggaagttggggataggcagatgttgacttgaggagttaatgtgatctttggggagatacatcttatagagttagaaatagaatctgaatttctaaagggagattctggcttgggaagtacatgtaggagttaatccctgtgtagactgttgtaaagaaactgttgaaaataaagagaagcaatgtgaagc

SEQ ID NO: 264731 - DNA, 1530 bp, Artificial Sequence
  derived and/or modified sequence
atggagcggagaagactgtggggcagcatccaatcccgctacattagcatgtcagtgtggactagcccaagacgtctcgtcgagcttgctggacagagcttattgaaggacgaggctcttgcgatcgctgcactcgagctgttgccacgcgaactgttccctcctctatttatggccgcattcgacgggagacactcacagactctaaaggccatggtacaggcctggcccttcacatgcctccctctgggagtcctgatgaagggccaacacttacatctagaaactttcaaggccgtcctagacggcctagatgtcctcctggcccaggaagttcgacctcggagatggaagttgcaggtcctggatcttcgaaaaaacagtcaccaagacttctggacggtctggtctgggaaccgggctagcttgtacagttttccggaaccagaggcggctcagcctatgactaaaaaacgcaaagtggatggtctgtccaccgaggccgagcagcccttcatacctgtggaagtccttgtggacctgttcctgaaagagggggcttgtgatgaattattttcatatctgattgagaaagtcaaaagaaagaagaacgtccttcgattgtgttgcaaaaagctgaagatattcgcaatgccgatgcaggacatcaagatgatcctcaagatggtccagctcgattcgattgaggacctcgaagtcacctgtacatggaagctgccaacactggccaagttttctccttatctcggtcaaatgataaacctccgtaggctattgctgtcacatatccacgcttcctcctacatcagtccggaaaaagaggagcagtacatcgcccagtttacctcacaatttctcagtctccagtgtttgcaggcactgtatgtcgatagcttatttttcctgcggggaaggctcgatcaattactgaggcacgtgatgaaccccttagagacactgagcataacaaactgcaggcttagcgagggagatgtcatgcacctatcccagagtccgtccgtttctcagttgtccgtgcttagcctgtctggggtaatgttgactgatgtatcacctgagccactccaggctcttctagagagggcgtccgctaccctacaggatctcgtcttcgatgagtgtggcattaccgacgaccaactgctcgccctgctgccaagcctttcccattgtagccagctaacaactctaagtttctacggaaacagtatatctatctccgctcttcagagtcttctgcaacatctgattggccttagcaatttaacccacgtcttgtaccctgtgcctctagaatcctacgaggatatccacggtacgctgcacctcgagagactagcctatcttcatgcacggcttagagagcttctttgtgaattaggtcgcccttctatggtttggttgtccgcgaacccatgcccacattgtggcgatcgcacattctacgaccccgaacctattctgtgcccctgttttatgcccaactag

SEQ ID NO: 264732 - DNA, 1530 bp, Artificial Sequence
  derived and/or modified sequence
atggagcgtcgtagattatgggggtccattcagagcaggtatattagtatgtcagtctggacatcccctagaagactcgttgagctggccggacagtcgctgctaaaggacgaagccctcgccatcgccgctcttgagctgttgccaagggaactctttccccctctgttcatggccgcatttgatgggaggcactcgcaaaccctgaaggccatggttcaagcttggccatttacgtgtttaccactaggagtgctgatgaaggggcaacatttgcatcttgaaacgttcaaagctgtactggatggcctggacgttctgctggcgcaggaagtgagacctagacgatggaaactgcaagtcctggacctccgaaagaattcccaccaggacttctggaccgtgtggtccggtaaccgtgctagcctgtatagttttcctgagcccgaggccgcacagcctatgaccaagaaacgcaaggtggacgggctgtctactgaagcagagcagccctttattcctgtcgaagtgctggtcgatctttttctgaaagagggtgcctgtgacgaactgttctcctacttaatcgagaaggtcaagaggaagaagaacgtcttgagactctgctgtaagaaactgaaaatctttgcaatgccaatgcaggatatcaaaatgatcctcaagatggtccaactggactccatagaggacctcgaggtgacctgcacttggaaactccctaccctggcgaaattttcgccctacctgggccagatgatcaacctgcggaggctgttgctgagccacattcatgcatcttcatacatctctccggaaaaagaggagcagtacatagcgcaattcacttcccagttcttatctttgcagtgccttcaggctctgtacgtggatagcttgtttttccttagaggtcgactcgaccaactgctacgtcacgtcatgaatccgctggagaccctcagtatcaccaactgccgactcagcgaaggcgacgtgatgcacctcagtcaatcacctagtgtaagccaactcagtgtgctctcattgtctggtgtgatgctgacggatgtgagtccggagcctctgcaggccttgcttgagcgagctagcgccacattgcaggatttagttttcgacgagtgtgggattactgacgatcagctgcttgccttgctgcccagcctgagtcattgttcccaacttaccaccctgagcttctatggcaatagtatcagcatctctgccctgcagagccttcttcagcaccttatcgggctttcgaacctcacccatgtgctctaccccgtgcccctggaatcttacgaggacatccacgggacacttcatcttgagaggctggcgtatctgcatgccagacttcgtgagcttctatgcgaactcggacggccatccatggtatggctttccgctaacccatgtccccattgcggcgatagaaccttctacgaccccgaacccattttgtgtccttgctttatgcccaactag

SEQ ID NO: 264733 - DNA, 1530 bp, Artificial Sequence
  derived and/or modified sequence
atggagagacgtagactgtggggaagtattcagtccagatacatcagtatgtcagtatggaccagcccacgccgtctagtcgagctggccggacagagtctgctcaaggatgaggctcttgctatagcggcactcgagctcctgccccgagaactctttccccctttgttcatggcggctttcgacggtaggcattctcagacgctgaaagccatggtgcaagcctggcctttcacgtgcctgcctttaggggtacttatgaaaggacagcacctgcacctagaaactttcaaggccgtcctcgacgggctggatgtgctcctggcccaggaggtgaggcctaggagatggaaacttcaggttctggacctgcggaagaacagccatcaggatttctggacagtttggtctggcaatagggcctcgctttatagctttcctgagccagaagctgctcagcccatgacgaaaaagaggaaggtggacgggctgtctactgaggccgagcagccattcataccagtggaagttctggttgacttgtttttgaaggagggcgcatgcgacgagctcttttcttatctgattgagaaggttaagcgcaaaaaaaatgtgctgcgtctctgctgcaaaaagctcaaaatattcgcaatgccgatgcaggacatcaaaatgatccttaagatggttcagctggattctatagaagatctcgaagttacctgcacgtggaagctcccaacccttgctaaattttctccatatctcggacagatgatcaatcttagacgactgctcctgtcccacatccacgcctcgagctacatatcgccagaaaaagaggagcagtacatcgcacagtttactagccagtttctcagcctgcagtgcctccaagcactatacgtggactctctctttttcctccggggaaggctggaccagctgttgcggcacgtgatgaatcctctagaaacattatccatcacgaattgccggctctctgagggcgacgtcatgcacctgtcacaatccccatctgtgtcacagctctcagtgctcagtttaagcggggtgatgttgaccgacgtgtccccagaacccctgcaggccctactggagcgagcttctgccacactccaagacctggtgttcgacgagtgcggcattacagacgaccagctacttgctttactacctagcctgtcgcactgctcgcagctgactactctctctttctatggcaatagcatcagcatatccgcgctccaaagtctgttgcagcatcttatcgggctcagcaatctaactcacgtactgtaccctgtgccactggaaagctacgaggatatccatggcacacttcacctcgaaagactcgcatacctgcatgctcggctgcgagagttgttgtgtgaactggggagaccatcaatggtttggctgagtgcaaatccatgcccccactgcggggacagaaccttctacgatccagaacctatcctctgtccctgcttcatgcccaattag

SEQ ID NO: 264734 - DNA, 261 bp, Artificial Sequence
  derived and/or modified sequence
atggagcgtcgcaggttgtggggctccatccagagcaggtatataagcatgtccgtgtggacgtcccctcgccgattggtggagttggccggtcagtccctattaaaagatgaggctctggcaatcgcagctctcgaactcctgcctcgcgagctcttccctccactcttcatggcagcattcgacggtagacattctcagacactgaaagccatggtgcaagcatggccttttacttgtctgccactgggagtgctgtag

SEQ ID NO: 264735 - DNA, 1530 bp, Artificial Sequence
  derived and/or modified sequence
atggagaggaggcgcctgtgggggtccatccagagcaggtatatctcaatgtccgtttggaccagtcctagacggctcgtcgaattggcaggccagagtcttctgaaggatgaagcccttgctatagccgcactggagttgctgcccagggaactattcccccctctttttatggccgcatttgacgggagacattcccagaccctgaaagcaatggttcaggcttggccattcacatgcttgcctctcggggttctgatgaaggggcagcacctccatcttgagaccttcaaagccgtccttgacggcctagacgtgctgcttgcccaggaggtgagacccagacgctggaagctgcaagtgctagaccttagaaaaaatagtcaccaggacttttggacagtgtggagtggcaacagggcctctttatacagctttcctgaaccagaagccgctcagcctatgaccaaaaaaagaaaggtggacggcctatcaactgaagccgaacagccgtttattccagtcgaggtgttggtcgacctatttttgaaggaaggagcatgcgacgaactttttagctacctcatcgagaaggtgaaacgtaagaagaatgtgcttcggctttgttgcaagaagttaaaaatctttgccatgccgatgcaagacataaagatgattctgaagatggtccagctcgattccatcgaagacctggaggtcacatgtacctggaaattacctaccttagccaagtttagcccgtacctcggccagatgataaatttgcggagactactgctgtctcacatccacgccagctcatatatctccccggagaaggaggagcaatacatcgctcagtttaccagtcaatttttgtccctgcagtgtctgcaggccttgtacgtcgactccctctttttccttagaggacgcttggaccagctgctgcgccatgttatgaacccgctggagaccctgagcatcaccaattgtcggctcagcgagggcgacgtgatgcacctgagtcagagtcccagtgtctcacagctgtctgtattgtcactctctggtgtgatgctgacagacgtatcccccgagcccctccaggccctgcttgagagggcctctgctactctgcaggatcttgtgtttgacgagtgtggcatcacagatgatcagctcctcgcgcttctgcctagcctctctcactgcagccaactaacgacactctctttctatggaaactctatttctatctccgcactccagtccctgctccagcacctcatagggctctccaacctgacacatgtgctgtaccccgtgccattagagtcctacgaggacattcacggtaccctgcatctggagcggctggcgtatctacatgctagactgagagaactgctatgtgagctgggacgccctagcatggtgtggctgtcagcaaacccctgcccccattgcggagaccggactttttacgatcctgagccaattctgtgcccgtgcttcatgcctaattag

SEQ ID NO: 264736 - DNA, 348 bp, Artificial Sequence
  derived and/or modified sequence
atggaacggagacggctgtgggggtcaattcaatctaggtatatctccatgtccgtgtggacatcaccccgaagattggtcgagctggcgggtcagagtctgctgaaggacgaggcactggctatagccgcattagaactgctcccacgggagctgttccctcccctctttatggctgccttcgacgggaggcatagccaaacacttaaagcaatggttcaagcttggcccttcacgtgcctgccattaggggttctgatgaagggccaacatctacacttagagacctttaaggccgtcctcgatgggctcgacgtgcttctggctcaggaagttagaccgagatag

SEQ ID NO: 264737 - DNA, 459 bp, Artificial Sequence
  derived and/or modified sequence
atggaacggcgacggctctggggctctattcagagtaggtatatttcaatgtccgtttggacgtcccctaggcggctggtggagctcgctgggcaatctttactgaaggatgaggccctggcaattgctgcactggagctcctgcctagagaactgttcccccctttgttcatggccgcttttgatggccgtcattctcagacacttaaagctatggttcaggcttggccgttcacctgccttccgcttggggtgttaatgaagggacaacatttacatctggagacatttaaagccgtgctggacggacttgatgtgctgctggcccaggaggtgcgacctcggcgttggaagctacaggtgctcgacctccgtaagaattcacaccaggatttttggaccgtttggtctgggaatcgcgctagtctgtattctttccctgaaccagaggccgcatag

SEQ ID NO: 264738 - DNA, 1482 bp, Artificial Sequence
  derived and/or modified sequence
atgagtgtttggacatcccctcgcagacttgtggagctcgccggacaaagcctgctcaaggatgaggccttggccatcgccgcactggagttgctcccccgtgagctatttccacctctcttcatggctgctttcgacggcagacactctcagacacttaaagccatggtccaagcctggccatttacttgtttgcctctgggtgttctgatgaaggggcagcatctccacctagagacctttaaggccgtcctggatggattggacgtgcttctggcccaggaagtgaggcccagacggtggaagctgcaagtcctggatctgaggaagaatagtcaccaggatttttggaccgtatggtcaggtaacagggcctccctgtattcgtttccagaaccagaggctgcacagccgatgactaagaaacgtaaagtcgatggcctttccactgaagctgagcagccctttatacctgtcgaggtactggtggatctttttttgaaagaaggagcctgcgacgaacttttcagttatctgattgagaaggtgaaacgtaagaagaacgtgctgcgactgtgttgcaagaagctgaagattttcgcaatgcctatgcaggatatcaagatgatcctcaagatggtccagcttgacagcatcgaagacctagaagttacctgtacctggaaactccctaccctggccaaattctccccttatctgggacagatgattaatctccgtcgtctgctgctgagccatatccacgcatcctcttacatctcaccagagaaagaggagcagtacattgcacagttcacttcgcagttcctgtccctccaatgcttacaggcgctgtacgtggatagtctgtttttcttgcgaggcagactggaccagctcctgcggcacgtgatgaatcccctggagaccctatctatcacgaactgtagactaagtgagggcgatgtgatgcatttgtctcagagcccttccgtttctcagcttagtgtacttagcttgagtggcgttatgcttacggacgtgagcccagagccactccaggcacttttggaaagggccagtgccaccctgcaggacttggtgttcgatgagtgtggaattactgacgatcagctgttggctctgctcccgagcttgtcccactgtagccagctgacgaccttgagtttttatggcaactccatcagcatttccgccctacaaagcctcctgcagcacctcatcggcctatctaatctgactcatgtgttgtaccccgtgcctctcgaaagttatgaggacatacacggcactctacacctggaaagactagcttacttgcacgcgcgtcttcgggaattgctgtgcgaactgggccgaccctccatggtgtggctttccgcaaacccttgtcctcactgtggagacaggaccttttacgacccggagcctattctctgcccctgtttcatgccaaattag

SEQ ID NO: 264739 - DNA, 606 bp, Artificial Sequence
  derived and/or modified sequence
atggaaagaaggcgcctctgggggtccattcagtcccgttacattagtatgtccgtttggacaagcccacgcagattggtggagctggccggacagagcctgttgaaggatgaggccctagcaatcgctgccctggaacttctgccacgtgaactgttcccccctttatttatggcagcttttgatggaaggcattcccagactcttaaggcaatggtgcaagcttggccctttacatgccttcccctcggcgttttgatgaaaggacagcacctgcatctcgaaaccttcaaggcagtgctggatggcctggatgtgttgttagcacaggaggtgcgccctaggagatggaagctccaggtgctggacttgagaaagaattcacatcaagatttctggaccgtgtggtccggcaacagggcatctttatactctttcccagagccggaagctgctcagccgatgactaaaaagcgcaaagtcgacggccttagtacagaggccgaacagccatttattcccgtcgaagtgctggtggatctctttctaaaggagggtgcttgcgacgaactgttttcttatctcatcgaaaaagttaagcggtag

SEQ ID NO: 264740 - DNA, 1482 bp, Artificial Sequence
  derived and/or modified sequence
atgagtgtttggaccagtccacggaggctggttgaattggcgggacaaagcctcctgaaagacgaagccctcgccatagccgctctcgaactgctacctcgagaactctttccacccctttttatggctgcctttgacggcaggcacagccagacgctgaaagcaatggttcaggcatggcccttcacgtgccttcctcttggggtactgatgaagggccaacatctgcacctagagacatttaaagcagtcctggatggacttgacgtgctactcgcccaggaagtccgtccacgacgatggaagcttcaggttctggatctgcgcaaaaactcccaccaggacttctggaccgtttggtcaggaaacagggcatcgttgtatagttttcctgaacccgaggccgctcagcctatgacgaagaagagaaaagttgatggcctatcgactgaagcggagcagcccttcatcccagtagaagtgctcgtcgatctgtttcttaaagagggcgcttgtgatgaactgttcagctacctcatcgagaaagttaaaaggaagaaaaatgttctacgcctctgttgcaagaagcttaagatcttcgcgatgccaatgcaggacattaaaatgattttaaaaatggtgcagctggacagcatcgaagatctggaagttacttgtacatggaaattaccgactctcgccaagttctccccctatctgggccagatgatcaatctgagacgactgctgctctcgcacatccatgcttcttcgtatatcagtcctgagaaggaggaacagtacatagcgcaattcacatcccagttcctgtctttgcagtgccttcaggctctatatgtggacagcctgttcttcctgcgagggaggctcgaccagttactgagacacgtgatgaaccctctggagacactctcaattaccaactgtaggttaagcgagggcgacgtgatgcacctgtctcaatcaccgtcggtatcccagctaagcgtcctgtccctgtccggtgtgatgttgactgacgtatccccggaacccctacaggcacttttggaaagggcctccgccactttgcaagacttggtgttcgacgagtgtggcatcacggacgatcaactgcttgcgcttctgccaagcctgtcacactgctctcagttaaccacattaagtttttacggaaactcgatctctatcagtgccctgcagagtctgttgcagcacctcatcgggcttagcaatctgactcacgtgctgtacccagtcccacttgaatcttacgaggacattcacggtaccctgcacctggagcgattggcttatttgcatgctcgcttgagagagctgctctgtgagctggggaggccttcaatggtatggctctctgctaatccctgcccccactgcggtgacagaactttctacgaccctgaaccgatcctgtgtccttgcttcatgcccaattag

SEQ ID NO: 264741 - DNA, 1530 bp, Artificial Sequence
  derived and/or modified sequence
atggagcgaaggagactctggggatcgatacagagccgctacatttccatgtcagtgtggacctcaccccgaagacttgtggagttggccggtcaatccctattgaaagatgaggcacttgcaattgcagcactagagttgcttcctcgcgaactgtttccccctctgttcatggccgcttttgatggccgtcacagtcaaaccttaaaggccatggtccaggcgtggccgtttacttgcctcccgctgggagtgctgatgaaaggacagcatctgcatctcgagacattcaaggccgttctcgatggacttgatgtgctactagcgcaggaagttagacccaggcgatggaagctgcaggttctggatcttagaaagaattctcatcaggacttttggaccgtttggagtggaaaccgtgcaagcctttatagctttcctgagccagaagccgcacagccgatgacaaaaaagaggaaggtcgatggactgagtacagaggctgaacagcccttcataccagtggaagtactggtcgatctgttccttaaggaaggagcctgtgacgagctcttttcttacttaatcgagaaggtcaaaaggaagaagaacgtcctgcgtttatgctgcaagaagctcaagatattcgccatgcctatgcaggatattaagatgatcctgaaaatggttcagcttgacagcatcgaagacttggaggtaacctgtacctggaaacttcctacgctagccaaattctccccctacctgggccagatgatcaatctgcggcgactgctgttaagccacattcatgcttcatcttacatcagtcctgaaaaggaggaacaatacatagctcagttcacttctcagttcttaagcctacagtgtttgcaagcactttacgttgattccctcttctttctgcggggacgtcttgaccagcttctccgccatgtaatgaatcccctggaaaccctctccatcacgaactgcagattgtccgagggagacgtgatgcacctgtcgcagagtccatccgtgtcccagctgtcagtgcttagtctaagtggtgtgatgctcacagatgtaagcccagaaccacttcaggcactgcttgaaagagcatccgccactttgcaggacctggtctttgatgaatgtggcataactgatgaccagcttctcgcccttctgccttctctttcccactgcagccagctgacaaccctgagcttttacggtaattctatctcaatctctgcgctccaaagcctcttacagcacctaatcgggctctccaatctgacacacgtgctgtaccccgtgcctctcgagagctatgaggacattcacggcaccttgcatttggagcgcctagcttatctccacgctagactacgtgagctgctctgcgaattgggcagaccatcaatggtatggctgtcagcgaacccttgcccccactgtggcgataggacattttacgaccccgagcctatcttatgcccctgcttcatgccaaactag

SEQ ID NO: 264742 - DNA, 1530 bp, Artificial Sequence
  derived and/or modified sequence
atggagagaagaagactgtggggcagcatccagagcagatacatcagcatgagcgtgtggaccagccccagaagactggtggagctggccggccagagcctgctgaaggacgaggccctggccatcgccgccctggagctgctgcccagagagctgttcccccccctgttcatggccgccttcgacggcagacacagccagaccctgaaggccatggtgcaggcctggcccttcacctgcctgcccctgggcgtgctgatgaagggccagcacctgcacctggagaccttcaaggccgtgctggacggcctggacgtgctgctggcccaggaggtgagacccagaagatggaagctgcaggtgctggacctgagaaagaacagccaccaggacttctggaccgtgtggagcggcaacagagccagcctgtacagcttccccgagcccgaggccgcccagcccatgaccaagaagagaaaggtggacggcctgagcaccgaggccgagcagcccttcatccccgtggaggtgctggtggacctgttcctgaaggagggcgcctgcgacgagctgttcagctacctgatcgagaaggtgaagagaaagaagaacgtgctgagactgtgctgcaagaagctgaagatcttcgccatgcccatgcaggacatcaagatgatcctgaagatggtgcagctggacagcatcgaggacctggaggtgacctgcacctggaagctgcccaccctggccaagttcagcccctacctgggccagatgatcaacctgagaagactgctgctgagccacatccacgccagcagctacatcagccccgagaaggaggagcagtacatcgcccagttcaccagccagttcctgagcctgcagtgcctgcaggccctgtacgtggacagcctgttcttcctgagaggcagactggaccagctgctgagacacgtgatgaaccccctggagaccctgagcatcaccaactgcagactgagcgagggcgacgtgatgcacctgagccagagccccagcgtgagccagctgagcgtgctgagcctgagcggcgtgatgctgaccgacgtgagccccgagcccctgcaggccctgctggagagagccagcgccaccctgcaggacctggtgttcgacgagtgcggcatcaccgacgaccagctgctggccctgctgcccagcctgagccactgcagccagctgaccaccctgagcttctacggcaacagcatcagcatcagcgccctgcagagcctgctgcagcacctgatcggcctgagcaacctgacccacgtgctgtaccccgtgcccctggagagctacgaggacatccacggcaccctgcacctggagagactggcctacctgcacgccagactgagagagctgctgtgcgagctgggcagacccagcatggtgtggctgagcgccaacccctgcccccactgcggcgacagaaccttctacgaccccgagcccatcctgtgcccctgcttcatgcccaactag

SEQ ID NO: 264743 - DNA, 261 bp, Artificial Sequence
  derived and/or modified sequence
atggagagaagaagactgtggggcagcatccagagcagatacatcagcatgagcgtgtggaccagccccagaagactggtggagctggccggccagagcctgctgaaggacgaggccctggccatcgccgccctggagctgctgcccagagagctgttcccccccctgttcatggccgccttcgacggcagacacagccagaccctgaaggccatggtgcaggcctggcccttcacctgcctgcccctgggcgtgctgtag

SEQ ID NO: 264744 - DNA, 348 bp, Artificial Sequence
  derived and/or modified sequence
atggagagaagaagactgtggggcagcatccagagcagatacatcagcatgagcgtgtggaccagccccagaagactggtggagctggccggccagagcctgctgaaggacgaggccctggccatcgccgccctggagctgctgcccagagagctgttcccccccctgttcatggccgccttcgacggcagacacagccagaccctgaaggccatggtgcaggcctggcccttcacctgcctgcccctgggcgtgctgatgaagggccagcacctgcacctggagaccttcaaggccgtgctggacggcctggacgtgctgctggcccaggaggtgagacccagatag

SEQ ID NO: 264745 - DNA, 459 bp, Artificial Sequence
  derived and/or modified sequence
atggagagaagaagactgtggggcagcatccagagcagatacatcagcatgagcgtgtggaccagccccagaagactggtggagctggccggccagagcctgctgaaggacgaggccctggccatcgccgccctggagctgctgcccagagagctgttcccccccctgttcatggccgccttcgacggcagacacagccagaccctgaaggccatggtgcaggcctggcccttcacctgcctgcccctgggcgtgctgatgaagggccagcacctgcacctggagaccttcaaggccgtgctggacggcctggacgtgctgctggcccaggaggtgagacccagaagatggaagctgcaggtgctggacctgagaaagaacagccaccaggacttctggaccgtgtggagcggcaacagagccagcctgtacagcttccccgagcccgaggccgcctag

SEQ ID NO: 264746 - DNA, 1482 bp, Artificial Sequence
  derived and/or modified sequence
atgagcgtgtggaccagccccagaagactggtggagctggccggccagagcctgctgaaggacgaggccctggccatcgccgccctggagctgctgcccagagagctgttcccccccctgttcatggccgccttcgacggcagacacagccagaccctgaaggccatggtgcaggcctggcccttcacctgcctgcccctgggcgtgctgatgaagggccagcacctgcacctggagaccttcaaggccgtgctggacggcctggacgtgctgctggcccaggaggtgagacccagaagatggaagctgcaggtgctggacctgagaaagaacagccaccaggacttctggaccgtgtggagcggcaacagagccagcctgtacagcttccccgagcccgaggccgcccagcccatgaccaagaagagaaaggtggacggcctgagcaccgaggccgagcagcccttcatccccgtggaggtgctggtggacctgttcctgaaggagggcgcctgcgacgagctgttcagctacctgatcgagaaggtgaagagaaagaagaacgtgctgagactgtgctgcaagaagctgaagatcttcgccatgcccatgcaggacatcaagatgatcctgaagatggtgcagctggacagcatcgaggacctggaggtgacctgcacctggaagctgcccaccctggccaagttcagcccctacctgggccagatgatcaacctgagaagactgctgctgagccacatccacgccagcagctacatcagccccgagaaggaggagcagtacatcgcccagttcaccagccagttcctgagcctgcagtgcctgcaggccctgtacgtggacagcctgttcttcctgagaggcagactggaccagctgctgagacacgtgatgaaccccctggagaccctgagcatcaccaactgcagactgagcgagggcgacgtgatgcacctgagccagagccccagcgtgagccagctgagcgtgctgagcctgagcggcgtgatgctgaccgacgtgagccccgagcccctgcaggccctgctggagagagccagcgccaccctgcaggacctggtgttcgacgagtgcggcatcaccgacgaccagctgctggccctgctgcccagcctgagccactgcagccagctgaccaccctgagcttctacggcaacagcatcagcatcagcgccctgcagagcctgctgcagcacctgatcggcctgagcaacctgacccacgtgctgtaccccgtgcccctggagagctacgaggacatccacggcaccctgcacctggagagactggcctacctgcacgccagactgagagagctgctgtgcgagctgggcagacccagcatggtgtggctgagcgccaacccctgcccccactgcggcgacagaaccttctacgaccccgagcccatcctgtgcccctgcttcatgcccaactag

SEQ ID NO: 264747 - DNA, 606 bp, Artificial Sequence
  derived and/or modified sequence
atggagagaagaagactgtggggcagcatccagagcagatacatcagcatgagcgtgtggaccagccccagaagactggtggagctggccggccagagcctgctgaaggacgaggccctggccatcgccgccctggagctgctgcccagagagctgttcccccccctgttcatggccgccttcgacggcagacacagccagaccctgaaggccatggtgcaggcctggcccttcacctgcctgcccctgggcgtgctgatgaagggccagcacctgcacctggagaccttcaaggccgtgctggacggcctggacgtgctgctggcccaggaggtgagacccagaagatggaagctgcaggtgctggacctgagaaagaacagccaccaggacttctggaccgtgtggagcggcaacagagccagcctgtacagcttccccgagcccgaggccgcccagcccatgaccaagaagagaaaggtggacggcctgagcaccgaggccgagcagcccttcatccccgtggaggtgctggtggacctgttcctgaaggagggcgcctgcgacgagctgttcagctacctgatcgagaaggtgaagagatag

SEQ ID NO: 264748 - protein, 803 aa, Artificial Sequence
  derived and/or modified sequence
MGCWGQLLVWFGAAGAILCSSPGSQETFLRSSPLPLASPSPRDPKVSAPPSILEPASPLNSPGTEGSWLFSTCGASGRHGPTQTQCDGAYAGTSVVVTVGAAGQLRGVQLWRVPGPGQYLISAYGAAGGKGAKNHLSRAHGVFVSAIFSLGLGESLYILVGQQGEDACPGGSPESQLVCLGESRAVEEHAAMDGSEGVPGSRRWAGGGGGGGGATYVFRVRAGELEPLLVAAGGGGRAYLRPRDRGRTQASPEKLENRSEAPGSGGRGGAAGGDASETDNLWADGEDGVSFIHPSSELFLQPLAVTENHGEVEIRRHLNCSHCPLRDCQWQAELQLAECLCPEGMELAVDNVTCMDLHKPPGPLVLMVAVVATSTLSLLMVCGVLILVKQKKWQGLQEMRLPSPELELSKLRTSAIRTAPNPYYCQVGLGPAQSWPLPPGVTEVSPANVTLLRALGHGAFGEVYEGLVIGLPGDSSPLQVAIKTLPELCSPQDELDFLMEALIISKFRHQNIVRCVGLSLRATPRLILLELMSGGDMKSFLRHSRPHLGQPSPLVMRDLLQLAQDIAQGCHYLEENHFIHRDIAARNCLLSCAGPSRVAKIGDFGMARDIYRASYYRRGDRALLPVKWMPPEAFLEGIFTSKTDSWSFGVLLWEIFSLGYMPYPGRTNQEVLDFVVGGGRMDPPRGCPGPVYRIMTQCWQHEPELRPSFASILERLQYCTQDPDVLNSLLPMELGPTPEEEGTSGLGNRSLECLRPPQPQELSPEKLKSWGGSPLGPWLSSGLKPLKSRGLQPQNLWNPTYRS

SEQ ID NO: 264749 - DNA, 2412 bp, Artificial Sequence
  derived and/or modified sequence
atgggatgttggggccagctgcttgtgtggtttggggccgccggtgccatcctctgcagttccccggggtctcaagagaccttccttcgtagcagcccattgccgctggcatctcctagtcccagagatccgaaagtctcggcccctccttccattcttgaaccagcttctccgttgaactcgcctggtaccgagggcagctggttgttctccacatgtggcgctagcggccggcacggccctacacagacacaatgtgatggcgcttacgccggcacatctgtggtcgtcacagtgggcgcagccgggcaacttagaggcgtgcagttgtggagggtgccgggacctgggcagtacctcattagtgcttacggtgccgctggcggtaagggcgcaaaaaatcacctgagtcgtgcacatggagtgtttgtgagtgccattttctctctggggctgggagagtccttatatatcctggtcggccagcaaggtgaggatgcctgccccggcggaagtcctgagagtcagctggtctgcctcggtgaatctcgcgctgtggaggagcacgccgctatggatgggtctgaaggcgtgccaggaagcagaaggtgggctggcgggggaggcggggggggaggggccacttacgtcttccgggtcagggcgggcgagctggagcccttgctagtcgcggccggaggaggcggccgagcatatcttcgtccccgagacagaggccgaacccaggcgagcccagaaaagctggagaacaggtccgaagcaccgggaagtggcggcaggggcggcgcagctgggggtgatgctagcgagaccgataacctttgggccgatggtgaggacggggtctcgttcattcacccctcatccgagttatttctccagccactcgctgtcacagagaaccatggcgaggtagagatccgtaggcacctcaactgtagccactgcccactgagagactgtcagtggcaagcagaactgcagttagctgagtgcctgtgccctgaagggatggagctcgctgtggataacgtcacctgtatggacctgcataaaccaccgggccctctggtgctaatggttgctgtcgtggccaccagcaccctgtcgctgctcatggtgtgtggggtcctcatcctggtgaaacagaagaagtggcaagggttgcaggaaatgagacttccttcacccgaattggaactttcaaagctgaggacatcggcgatccggacagcgccaaatccttattattgtcaggtcggcctggggccagcacaatcatggccgcttcccccgggggtcaccgaggtgtcgcccgccaatgtgacattgctccgcgccctggggcacggagcgtttggggaagtctacgaagggttggtaatcggactccctggggactcatcgcccctgcaggttgcgattaaaacccttcctgagctgtgctccccacaagacgaactcgacttcttaatggaggcgctgatcatctctaagttccggcaccagaacattgtgcggtgcgtcggactcagccttcgggcaacaccccgtctgattctgctggagctaatgagcggcggggacatgaagagcttcctgagacattccaggccacatctgggccaaccctcgcccttggtcatgagggatctgttacagctggcccaggacatcgctcaaggatgccactaccttgaagaaaaccactttatccacagggacattgccgcccgaaattgtctacttagctgcgctggaccctcgagggtcgcaaagatcggggatttcggcatggctcgcgacatatacagggcttcatactatcgacggggagatcgagcactgctgcctgttaagtggatgccacccgaagcttttttagaggggattttcacctccaaaacagactcatggagctttggtgtgttactgtgggaaatcttcagcttggggtatatgccttaccctggccggacaaatcaagaggttttggatttcgtggtcggtgggggcaggatggatccgcctagaggttgccctggccccgtgtaccgcatcatgacacagtgttggcaacatgaacccgagttgcgaccaagctttgcttctatcctggagcgactgcagtactgcacgcaggacccagatgtgctgaattctctcctgcctatggagttgggtccaaccccagaagaggagggcacatccgggctcggtaatcgcagtcttgaatgtctgcgtccacctcaaccccaggagctgtcccccgagaagctgaagagctgggggggttcccccctgggcccttggttgtccagcggcctcaagcccctgaagtctcgcggtcttcaaccgcaaaacttatggaaccccacgtacagaagttag

SEQ ID NO: 264750 - DNA, 2412 bp, Artificial Sequence
  derived and/or modified sequence
atgggctgctggggccagctgctggtgtggtttggagctgctggggccatcctgtgcagcagccctggcagccaggagaccttcctgcggagcagccccctgcccctggccagccccagcccccgggaccccaaggtgtctgcccctccttccatcctggagcccgccagccccctgaacagccctggaacagagggctcctggctgttcagcacctgtggggccagcggcagacatggccccacccagacccagtgtgatggagcctatgccggcacctctgtggtggtgacagtgggcgccgccggccagctgcggggcgtgcagctgtggagggtgcccggccctggccagtacctgatcagcgcctacggggctgctgggggcaagggggccaagaaccacctgagccgggcccacggcgtgtttgtgtctgccatcttcagcctgggcctgggggagagcctgtacatcctggtgggccagcagggagaagatgcctgccctgggggcagccctgagagccagctggtgtgcctgggggagagcagagctgtggaggagcacgccgccatggatggcagcgagggcgtgcccggcagccgccgctgggccggcggcggcggcggcggcggcggggccacctacgtgttccgggtgcgggccggggagctggagcccctgctggtggccgccggcggcggcggccgggcctacctgcggccccgggaccggggccgcacccaggccagccctgagaagctggagaacagaagtgaggcccctggcagcggcggccggggcggcgctgctggaggagatgccagcgagacagacaacctgtgggcagatggagaagatggagtgtccttcatccaccccagcagcgagctgttcctgcagcccctggccgtgacagaaaatcatggagaggtggagatcagaagacacctgaactgcagccactgccccctgcgggactgccagtggcaggccgagctgcagctggccgagtgcctgtgcccagagggcatggagctggccgtggacaacgtgacctgcatggacctgcacaagcccccaggccccctggtgctgatggtggccgtggtggccaccagcaccctgagcctgctgatggtgtgtggggtgctgatcctggtgaagcagaagaagtggcagggcctgcaggagatgaggctgcccagccctgagctggagctgagcaagctgcggaccagcgccatcagaacagcccccaacccctactactgccaggtgggcctgggccctgcccagagctggcccctgcccccaggagtgacagaggtgtccccagccaacgtgaccctgctgcgggccctgggccatggagccttcggggaggtgtatgagggcctggtgattggcctgcccggggacagcagccccctgcaggtggccatcaagaccctgcctgagctgtgcagcccccaggatgagctggacttcctgatggaggccctgatcatcagcaagttccgccaccagaacatcgtgcgctgtgtgggcctgagcctgcgggccacccccaggctcatcctgctggagctgatgtctggaggagacatgaagagcttcctgcggcacagccggccccacctgggccagcccagccccctggtgatgagggacctgctgcagctggcccaggacatcgcccagggctgccactacctggaggagaaccacttcatccaccgggacattgctgccaggaactgcctgctgagctgtgccggccccagccgggtggccaagattggagactttggcatggcccgggacatctaccgggccagctactacagaagaggagaccgggccctgctgcctgtgaagtggatgcctcctgaggccttcctggagggcatcttcaccagcaagacagacagctggagctttggagtgctgctgtgggagatcttcagcctgggctacatgccctacccaggccgcaccaaccaggaggtgctggactttgtggtgggcggcggccgcatggaccccccccggggctgccccggccctgtgtaccgcatcatgacccagtgctggcagcacgagcctgagctgcggcccagctttgccagcatcctggagcggctgcagtactgcacccaggaccctgatgtgctgaacagcctgctgcccatggagctgggccccaccccagaggaggagggcaccagcggcctgggcaacagaagcctggagtgcctgcggcccccccagccccaggagctgagccctgagaagctgaagtcctggggcggcagccccctgggcccctggctgagcagcggcctgaagcccctgaagagccggggcctgcagccccagaacctgtggaaccccacctaccgctcctag

SEQ ID NO: 264751 - DNA, 2940 bp, Artificial Sequence
  derived and/or modified sequence
aggtgggcgtggccagaccagctttaggtccggggagtgtctcgccagcggcagcacacccctgtaagtggtggccagggctgccgtggcaaaatgagctgtcaactttaggttgacaggggtgtggccgcgaccgcaagggcttttgttgccgggtggacccaacagggatgggctgctggggacagctgctggtgtggttcggagccgcgggcgccattctctgctctagcccggggtcccaggagacttttctgcggtcctcgcccctgccgctggcaagtcccagcccccgggacccgaaagtcagcgccccgcctagtatcttggagccagcctccccgctgaattctccgggcaccgaggggtcttggctgttttctacctgcggggccagcggccggcatgggcccacacagacacaatgtgacggggcgtacgcggggaccagcgtggtggtgaccgtgggggccgccgggcagctgagaggcgtgcagctgtggcgcgtgccgggccctggccagtatctgatctcagcctacggagccgcgggcggcaaaggcgccaagaaccacctgtcgcgggcgcatggcgtcttcgtctcagcaatcttctccctcggtctcggggagtcgctgtacatcctggtggggcagcagggagaggacgcctgtcccggaggtagcccggagagccagctcgtctgcctcggggagtctcgagccgttgaagagcacgcggcgatggatgggagcgaaggggtcccggggtcgcggcgctgggcgggaggtggcgggggtggcgggggcgccacctacgttttccgggtgcgcgctggcgagctggaaccgttgctggtggcggccggaggcggcggtcgggcctacctgaggccgcgggaccgaggccggactcaggcctcccccgagaaactggagaaccgctcggaggcgcccgggagcggcgggagaggcggggcggcagggggcgacgcttcagagactgacaacctctgggctgatggggaagatggagtatccttcatacaccccagcagcgagctcttcctgcagcctctggcagtcaccgagaaccacggagaggtagagatccgaaggcacctcaactgcagtcactgccctttgagagactgccaatggcaggcagagctccagctggctgaatgcctgtgcccagaaggcatggagctagctgtggataacgtcacctgcatggacctgcacaagcccccaggccctctggttctgatggtggctgtggtggcaacctcaacactgagcctccttatggtgtgtggggtcctgattctggtgaagcagaagaagtggcagggcctgcaggagatgaggctgccgagccctgagcttgagctgagcaagcttcgaacctctgccatcaggacagcccccaatccctattattgccaggtggggcttggcccggcccagtcctggcctctgccaccaggtgtcaccgaggtttccccagccaatgttactctgctcagagccctgggccatggtgcctttggggaggtgtatgagggactggtaattggccttcctggggactccagtcccctgcaggtagctatcaagaccctgccagaactctgctcgcctcaggatgagctggatttcctcatggaggccctcatcatcagcaagtttcgccatcagaacattgtgcggtgtgtggggctcagcctcagggccacccctcgcctcattctgctggaactgatgtctggaggggacatgaagagtttcctgaggcacagtcggccacacctgggccagccatcacctctggtcatgcgggacctgctgcaactggcccaggacatagcccagggctgccactacctggaggaaaatcacttcatccacagggatattgccgcccggaactgcctgctgagctgcgctggacccagccgagtggccaagattggggactttgggatggcacgagatatctaccgggccagttattaccgcaggggggaccgggccttgctcccagtcaagtggatgcccccagaggccttcctggagggcatcttcacatccaagacagattcctggtcttttggggtgctgctctgggagatcttctcactgggctacatgccctatcctgggcgcaccaaccaggaggtgctggacttcgtcgttggaggaggccggatggaccctcctaggggctgcccagggcctgtgtaccgcatcatgacccagtgttggcagcacgagcctgagctccgccctagctttgccagcatcttggagcgtctgcagtactgcactcaggacccggatgtgctgaattcactcctgccaatggagctggggcccaccccagaggaggaagggacttctgggctggggaacagatctttggagtgcctaagacccccacagccccaggaactgagtccagagaagttgaaaagctggggaggtagccctcttggcccctggctgtcctctggcctcaagcccctcaaatccaggggcctccaacctcagaacctttggaatcccacttatcgctcctgagccccaaggggccctgagggtaaggactgaggcactgagggtccctccctatactcctcaggctcctgggtggcctgttatgccagcggcctctgttccctgcagtctgtgctgtgtgtctgggcctgtctcggggctggcctggcagcgctgcacttgccatgctggaaaccagcccaggcctcccagggaagggcccagccacttccagcttttgatcttggggccagaggccgccttacacacaccccaggtgtccatggggagcactggattgctctcccattatgagcatccttcatctgggcagaccccccaccctgcagatgcttctaataaaaagctcttctcatcctcc

SEQ ID NO: 264752 - DNA, 2412 bp, Artificial Sequence
  derived and/or modified sequence
atgggctgctggggccagctgctggtgtggttcggcgccgccggcgcaatcttgtgctcctcaccaggaagccaggagacttttctgaggtctagccccctcccacttgcctcaccatcccctcgggatcccaaggtgagtgcccccccttctatcctggaacccgcctcaccgttaaattcccccgggactgaggggtcatggctttttagtacatgcggagcctctggtaggcatggcccaactcagactcagtgcgatggggcgtacgctgggacatctgtagtcgttactgtaggagctgcgggacagctgcggggcgtgcagttgtggagggttccggggcccggccaatacctgatcagtgcttacggagcagctgggggaaagggagcgaaaaatcatctctcgcgagcccatggggtgttcgtgtctgccatattcagtttgggtctaggagagtccttgtacattctggtcggacaacagggagaggatgcttgtccaggcgggtctcctgagagtcagctggtctgcctgggggagtcaagagccgtggaggaacatgctgccatggatggttcggaaggcgtgccagggtcccggcggtgggccggcggtgggggcggtggcgggggcgcaacctatgtgttcagagtccgcgcaggcgagcttgagcccctgctggtggccgctggcggcggtggccgggcctacctgagacctcgggaccgcggacgcactcaggcatcacccgagaagctggaaaataggagtgaggcgcccggctccggcgggcggggtggagccgccggcggtgacgctagcgaaaccgataatttgtgggcagatggggaagatggagtaagcttcattcacccgtcctccgaactgttcctccaaccactggctgtaacggagaatcacggcgaggtcgaaataaggaggcacttgaactgctcacactgccctctacgggattgccagtggcaggctgaactgcagctggcagaatgtctgtgcccagaagggatggaattggccgtagacaacgtgacgtgcatggatctgcacaaaccccctggtccgcttgtgcttatggtcgccgtagtagctaccagcacacttagcctactcatggtgtgcggggtcctgattctagtcaagcagaagaagtggcagggcctacaagagatgcggctcccaagcccagaactcgagctttcaaaattgcgcacaagtgccattcgcactgccccgaacccatattattgccaagtcgggctgggaccagcgcagagctggcccctgccaccaggcgtaacagaggtgtcacctgctaacgtgacattattgagagcattgggccatggggcctttggtgaagtgtatgaaggactggtgattggcttgccaggcgattctagccctcttcaggtcgccatcaaaaccctcccggagctgtgctcaccccaggatgagctggacttcctgatggaggcactgataatctcaaagtttcgtcaccaaaacatcgtgcggtgtgtcggacttagcctccgagcgactcctcgccttattcttctcgaactgatgagcggtggggacatgaaatcgtttttgaggcattctcgccctcatctcggacagcctagccctttggtgatgagggacctcctgcagctggctcaggacatcgcccagggatgccattacctcgaagaaaaccatttcattcaccgggacatcgccgccaggaactgcttgctgtcatgtgcagggcccagccgtgtggcgaaaatcggtgactttgggatggcaagggacatctatagggcctcttactaccggcggggtgatagggcgcttctgcctgtcaagtggatgccgcccgaagccttcttggaagggatcttcaccagtaaaactgactcatggagctttggggtcttattatgggaaatcttttcccttggttatatgccctatccgggcagaacgaatcaagaggtactggatttcgtagtgggtggagggcgcatggacccacccagaggatgtcccgggcctgtataccggatcatgacccagtgctggcaacatgaacccgaactgagaccttcgttcgcaagcattcttgaaaggctccagtactgtacacaagatcctgacgtactgaattctctcctgcccatggagctgggcccaacacccgaggaagaaggcacaagtggcttagggaaccggtcgctggaatgtctaaggccacctcaaccccaggagcttagtcctgaaaagttgaaatcttggggagggtcaccgctgggcccatggctctcttccgggctgaagcctctgaagagcaggggtctgcagccccaaaatctctggaatccgacctataggtcctag

SEQ ID NO: 264753 - DNA, 2412 bp, Artificial Sequence
  derived and/or modified sequence
atgggttgctggggtcaattactcgtgtggttcggtgcggcaggagccatcctatgtagctccccgggttcccaggagacctttctgcggagctcacccctccccctggcatcaccgtcaccaagagatcccaaggtctcagcccctccttcaattcttgagccagcctcaccactcaattcacccggaacagaaggatcttggctgttttccacatgcggcgcaagtggcaggcacggcccaacccagacacaatgcgatggagcatatgcgggaacaagcgtcgttgtgacagtgggcgctgccggacaacttagaggcgtccagctctggcgcgtacccggtcctggccagtacctcatctcagcatatggcgctgctggtggcaaaggggcaaaaaatcatctgtctcgcgctcacggagtgttcgtgtctgccatcttctccctgggtctgggagagagcctctatatactggtggggcagcagggcgaagatgcctgtccgggagggagccccgagtctcagctcgtttgcttgggtgagagccgagccgtggaggaacacgcagctatggacggcagtgaaggagtgccagggagtagacgatgggcgggtggtggcggagggggagggggagccacgtacgtgttcagagtgagagcaggcgaactcgagcccctactcgttgcggctggaggtggcggacgggcatatttgcgcccaagggatcggggaagaactcaggccagccctgagaagttggaaaaccggtccgaagcgcctggatcagggggacgaggcggtgctgctggcggagatgcttctgagacggacaatctctgggcggacggggaagatggtgtctctttcatacatccatcttccgaattatttctccagccactggcagtaacggagaatcatggagaagtcgaaattcgcagacaccttaattgttcccactgtccgttaagggattgtcaatggcaagctgaactccaactggccgaatgtctctgcccagagggcatggagttggctgtggataatgtgacgtgcatggacctccacaaacctcctggtccactcgttttgatggttgccgttgtggcaacatctacactgagcctgctcatggtctgcggagttctgatcctagttaaacagaaaaagtggcaaggtctacaggaaatgaggctgccttcccccgagctggagctcagtaagctacgcacgagtgctattcgcacagccccaaacccttattattgtcaggtgggtctgggcccagctcagtcatggcccctgccacccggtgtgacggaggtgtctccagcaaatgttactcttctgagggcactgggccacggggcattcggggaggtctatgagggacttgttataggacttccaggagattcatcaccactgcaggttgcaatcaaaaccttgccagaactctgctcgccgcaggatgaacttgactttctgatggaggctctgatcatctctaaattccgccaccaaaatattgtaagatgtgtgggtctctcactccgtgcgacaccccgactgatactcttagagctgatgtctggaggtgatatgaagagcttccttaggcactctaggcctcatcttggtcagcccagtcccctggtgatgcgcgacctacttcagttggcccaagacatagctcaggggtgccattacctcgaagagaaccatttcattcaccgagatattgccgcaagaaactgtctcctgtcttgcgccggtccaagtcgtgtcgcgaagatcggcgactttggcatggccagagatatctaccgggctagctactacagaagaggcgaccgggctctcttaccggtaaagtggatgcccccagaagcctttttggaggggatctttaccagcaagactgattcatggagtttcggcgtgctgctttgggaaattttcagtctgggctacatgccatacccgggaagaacgaatcaggaggtgctggactttgtcgtagggggtggacgaatggatccacccagaggatgcccaggccctgtttatcgaataatgacccagtgctggcaacatgagcctgagctgcggccatccttcgccagtatacttgagcggctgcaatattgcactcaggatccggacgtcttaaactcattgctacctatggaactgggtccaaccccagaagaagagggaacttctggacttggtaataggagcctggagtgcctgcggcctccccagccacaggaactttcgcctgagaaactgaagagctggggtgggtcacccctcggcccttggctctctagcgggctgaagccattgaagtctagagggctccagccccagaacctttggaacccaacctatcgaagttag

SEQ ID NO: 264754 - DNA, 2412 bp, Artificial Sequence
  derived and/or modified sequence
atgggctgctggggccagctgctggtgtggttcggcgccgccggcgccatcctgtgcagcagccccggcagccaggagaccttcctgagaagcagccccctgcccctggccagccccagccccagagaccccaaggtgagcgccccccccagcatcctggagcccgccagccccctgaacagccccggcaccgagggcagctggctgttcagcacctgcggcgccagcggcagacacggccccacccagacccagtgcgacggcgcctacgccggcaccagcgtggtggtgaccgtgggcgccgccggccagctgagaggcgtgcagctgtggagagtgcccggccccggccagtacctgatcagcgcctacggcgccgccggcggcaagggcgccaagaaccacctgagcagagcccacggcgtgttcgtgagcgccatcttcagcctgggcctgggcgagagcctgtacatcctggtgggccagcagggcgaggacgcctgccccggcggcagccccgagagccagctggtgtgcctgggcgagagcagagccgtggaggagcacgccgccatggacggcagcgagggcgtgcccggcagcagaagatgggccggcggcggcggcggcggcggcggcgccacctacgtgttcagagtgagagccggcgagctggagcccctgctggtggccgccggcggcggcggcagagcctacctgagacccagagacagaggcagaacccaggccagccccgagaagctggagaacagaagcgaggcccccggcagcggcggcagaggcggcgccgccggcggcgacgccagcgagaccgacaacctgtgggccgacggcgaggacggcgtgagcttcatccaccccagcagcgagctgttcctgcagcccctggccgtgaccgagaaccacggcgaggtggagatcagaagacacctgaactgcagccactgccccctgagagactgccagtggcaggccgagctgcagctggccgagtgcctgtgccccgagggcatggagctggccgtggacaacgtgacctgcatggacctgcacaagccccccggccccctggtgctgatggtggccgtggtggccaccagcaccctgagcctgctgatggtgtgcggcgtgctgatcctggtgaagcagaagaagtggcagggcctgcaggagatgagactgcccagccccgagctggagctgagcaagctgagaaccagcgccatcagaaccgcccccaacccctactactgccaggtgggcctgggccccgcccagagctggcccctgccccccggcgtgaccgaggtgagccccgccaacgtgaccctgctgagagccctgggccacggcgccttcggcgaggtgtacgagggcctggtgatcggcctgcccggcgacagcagccccctgcaggtggccatcaagaccctgcccgagctgtgcagcccccaggacgagctggacttcctgatggaggccctgatcatcagcaagttcagacaccagaacatcgtgagatgcgtgggcctgagcctgagagccacccccagactgatcctgctggagctgatgagcggcggcgacatgaagagcttcctgagacacagcagaccccacctgggccagcccagccccctggtgatgagagacctgctgcagctggcccaggacatcgcccagggctgccactacctggaggagaaccacttcatccacagagacatcgccgccagaaactgcctgctgagctgcgccggccccagcagagtggccaagatcggcgacttcggcatggccagagacatctacagagccagctactacagaagaggcgacagagccctgctgcccgtgaagtggatgccccccgaggccttcctggagggcatcttcaccagcaagaccgacagctggagcttcggcgtgctgctgtgggagatcttcagcctgggctacatgccctaccccggcagaaccaaccaggaggtgctggacttcgtggtgggcggcggcagaatggacccccccagaggctgccccggccccgtgtacagaatcatgacccagtgctggcagcacgagcccgagctgagacccagcttcgccagcatcctggagagactgcagtactgcacccaggaccccgacgtgctgaacagcctgctgcccatggagctgggccccacccccgaggaggagggcaccagcggcctgggcaacagaagcctggagtgcctgagacccccccagccccaggagctgagccccgagaagctgaagagctggggcggcagccccctgggcccctggctgagcagcggcctgaagcccctgaagagcagaggcctgcagccccagaacctgtggaaccccacctacagaagctag

SEQ ID NO: 264755 - protein, 294 aa, Artificial Sequence
  derived and/or modified sequence
MQPRRQRLPAPWSGPRGPRPTAPLLALLLLLAPVAAPAGSGDPDDPGQPQDAGVPRRLLQQAARAALHFFNFRSGSPSALRVLAEVQEGRAWINPKEGCKVHVVFSTERYNPESLLQEGEGRLGKCSARVFFKNQKPRPTINVTCTRLIEKKKRQQEDYLLYKQMKQLKNPLEIVSIPDNHGHIDPSLRLIWDLAFLGSSYVMWEMTTQVSHYYLAQLTSVRQWKTNDDTIDFDYTVLLHELSTQEIIPCRIHLVWYPGKPLKVKYHCQELQTPEEASGTEEGSAVVPTELSNF

SEQ ID NO: 264756 - DNA, 885 bp, Artificial Sequence
  derived and/or modified sequence
atgcagccacgacggcagagactgccagccccctggagcggaccccgggggccccggccaacagctcctctgttagccctactgcttctcctggctcctgtggcagcccccgcaggatcgggcgaccccgatgacccaggtcagccccaggacgcaggagtaccccgccggctgttacagcaagccgctagagcggctctgcacttctttaattttcgctctggctccccttctgccctgagagtccttgccgaggttcaggaagggcgggcctggatcaacccaaaggagggttgtaaggtccatgtcgtgttttcaactgaaaggtataaccccgagtctttactgcaggagggggaggggagattaggtaaatgtagtgcacgagtgttctttaagaaccagaaaccaagacctacaattaacgtgacctgtacacgattgattgaaaaaaagaagcgacagcaggaggattatctgctctacaaacagatgaagcagttgaagaatcctctcgaaatcgtctccatacccgacaaccacggacatatcgaccctagcctacggctcatctgggatttagccttccttggtagcagctacgtcatgtgggagatgacgacacaggtgtcccattattatctggcacagctgacatcagtgcggcaatggaagaccaatgacgacaccattgactttgactacaccgtcctattacacgagctgtctacacaggagatcattccctgtcgtatccacctggtctggtatcctggtaagccgcttaaggtgaagtaccactgccaggaactgcagaccccagaagaggcatcaggtacggaagagggttcagctgtggtgcctacggagttgtccaacttctag

SEQ ID NO: 264757 - DNA, 885 bp, Artificial Sequence
  derived and/or modified sequence
atgcagccccggcggcagaggctgcctgccccctggagcggcccccggggcccccggcccacagcccccctgctggccctgctgctgctgctggcccctgtggccgccccagctggcagcggggaccctgatgaccccggccagccccaggatgctggggtgccccggcggctgctgcagcaggccgcccgggccgccctgcacttcttcaacttccgcagcggcagccccagcgccctgcgggtgctggccgaggtgcaggagggccgggcctggatcaaccccaaggagggctgcaaggtgcacgtggtgttcagcacagagcgctacaaccctgagagcctgctgcaggagggggagggccgcctgggcaaatgttctgcccgggtcttcttcaagaaccagaagccccggcccaccatcaacgtgacctgcacccggctgattgagaagaagaagaggcagcaggaggactacctgctgtacaagcagatgaagcagctgaagaaccccctggagatcgtgtccatcccagacaaccacggccacatcgaccccagcctgcggctcatctgggacctggccttcctgggcagcagctatgtgatgtgggagatgaccacccaggtgagccactactacctggcccagctgacctctgtgcggcagtggaagaccaatgatgacaccatcgactttgactacacagtgctgctgcacgagctgagcacccaggagatcatcccctgccgcatccacctggtgtggtacccaggcaagcccctgaaggtgaagtaccactgccaggagctgcagaccccagaggaggccagcggcacagaggagggcagcgctgtggtgcccacagagctgagcaacttctag

SEQ ID NO: 264758 - DNA, 885 bp, Artificial Sequence
  derived and/or modified sequence
atgcagccccggcggcagcggctgcccgccccctggagcggccccagaggcccaagaccaaccgcaccgctgctcgcactccttctgctcctggccccagtcgccgcaccagcagggagtggagatccagatgaccctggacaaccccaggacgccggcgtccctagaagactgctgcagcaagccgcccgcgcagctctgcacttcttcaacttccgcagcgggtctccaagtgctctgagagtactcgctgaggttcaggaaggcagggcctggataaaccctaaagaaggctgcaaggtccacgtagtgttctctacagagcggtacaaccccgagtcactcctgcaggaaggcgaaggtaggctgggtaaatgctccgctagagttttctttaaaaatcaaaaaccacggcctacaattaacgttacctgcactagattgattgaaaagaagaaacgccaacaggaagattatttgctatataagcagatgaagcagctgaagaatcctctggaaatagtaagtatcccagataatcatggccatatcgaccccagcttgcggctcatttgggatctcgctttccttggctcttcctacgtcatgtgggaaatgacaacccaggtctcccattactatctcgcccaacttacgagcgtgcgacagtggaagacaaacgatgacacaatcgatttcgactataccgtcctcttgcacgagctatcgacacaggaaatcatcccttgcaggatacatctcgtttggtaccctgggaagcctcttaaagtcaagtaccattgccaggagttacagactcccgaggaggcgtcaggaaccgaggagggttctgccgtggtcccgaccgaactaagcaacttttag

SEQ ID NO: 264759 - DNA, 885 bp, Artificial Sequence
  derived and/or modified sequence
atgcagcctcggaggcagcgtctgcccgcaccctggtccggtccgagaggacctagaccgactgctcccctgctggcgcttctgctgttgctcgcacccgtggcagcccctgctggatctggggatccagacgacccaggtcagccccaggatgccggtgtccccaggcgcctcctgcagcaagccgctagagccgcactacatttttttaactttaggtcaggctcgccatcggccctgagggtccttgcggaagtgcaggagggtagagcctggattaacccgaaagagggatgcaaggtgcacgttgtgtttagtacggagaggtataatcctgagtctcttctgcaggagggagaggggagactggggaagtgctctgctcgcgttttttttaagaatcagaagccaaggcctactatcaatgtcacttgcaccagactgatcgaaaagaagaagcggcagcaagaagattacctgctgtataagcagatgaagcagttaaagaaccccctcgagattgtgagcatccccgataaccacggccatatcgacccctccctgcgcctgatctgggatctagccttcctggggagctcctacgtgatgtgggaaatgactactcaagtgtcccactactacttagcccagctaacctcagtgcggcagtggaagacaaatgatgacaccattgacttcgactacactgtgttactacatgaactttcaacccaagaaattattccatgtcgcatccaccttgtgtggtacccaggcaagccactaaaggttaaatatcattgccaggagctccaaacaccagaggaggcgtccggtactgaagagggctccgctgtcgttcctaccgaattatccaacttttag

SEQ ID NO: 264760 - DNA, 885 bp, Artificial Sequence
  derived and/or modified sequence
atgcagcccagaagacagagactgcccgccccctggagcggccccagaggccccagacccaccgcccccctgctggccctgctgctgctgctggcccccgtggccgcccccgccggcagcggcgaccccgacgaccccggccagccccaggacgccggcgtgcccagaagactgctgcagcaggccgccagagccgccctgcacttcttcaacttcagaagcggcagccccagcgccctgagagtgctggccgaggtgcaggagggcagagcctggatcaaccccaaggagggctgcaaggtgcacgtggtgttcagcaccgagagatacaaccccgagagcctgctgcaggagggcgagggcagactgggcaagtgcagcgccagagtgttcttcaagaaccagaagcccagacccaccatcaacgtgacctgcaccagactgatcgagaagaagaagagacagcaggaggactacctgctgtacaagcagatgaagcagctgaagaaccccctggagatcgtgagcatccccgacaaccacggccacatcgaccccagcctgagactgatctgggacctggccttcctgggcagcagctacgtgatgtgggagatgaccacccaggtgagccactactacctggcccagctgaccagcgtgagacagtggaagaccaacgacgacaccatcgacttcgactacaccgtgctgctgcacgagctgagcacccaggagatcatcccctgcagaatccacctggtgtggtaccccggcaagcccctgaaggtgaagtaccactgccaggagctgcagacccccgaggaggccagcggcaccgaggagggcagcgccgtggtgcccaccgagctgagcaacttctag

SEQ ID NO: 264761 - protein, 187 aa, Artificial Sequence
  derived and/or modified sequence
MRPLAGAPVPKRQKCDHWTPCPSDTYAYRLLSGGGRSKYAKICFEDNLLMGEQLGNVARGINIAIVNYVTGNVTATRCFDMYEGDNSGPMTKFIQSAAPKSLLFMVTYDDGSTRLNNDAKNAIEALGSKEIRNMKFRSSWVFIAAKGLELPSEIQREKINHSDAKNNRYSGWPAEIQIEGCIPKERS

SEQ ID NO: 264762 - DNA, 864 bp, Artificial Sequence
  derived and/or modified sequence
gggctccgctggctgcggtcgcctgggagctgccgccagggccaggaggggagcggcacctggaagatgcgcccattggctggtgctccagtccccaaaaggcaaaaatgtgaccactggactccctgcccatctgacacctatgcctacaggttactcagcggaggtggcagaagcaagtacgccaaaatctgctttgaggataacctacttatgggagaacagctgggaaatgttgccagaggaataaacattgccattgtcaactatgtaactgggaatgtgacagcaacacgatgttttgatatgtatgaaggtgataactctggaccgatgacaaagtttattcagagtgctgctccaaaatccctgctcttcatggtgacctatgacgacggaagcacaagactgaataacgatgccaagaatgccatagaagcacttggaagtaaagaaatcaggaacatgaaattcaggtctagctgggtatttattgcagcaaaaggcttggaactcccttccgaaattcagagagaaaagatcaaccactctgatgctaagaacaacagatattctggctggcctgcagagatccagatagaaggctgcatacccaaagaacgaagctgacactgcagggtcctgagtaaatgtgttctgtataaacaaatgcagctggaatcgctcaagaatcttatttttctaaatccaacagcccatatttgatgagtattttgggtttgttgtaaaccaatgaacatttgctagttgtatcaaatcttggtacgcagtatttttataccagtattttatgtagtgaagatgtcaattagcaggaaactaaaatgaatggaaattcttaaa

SEQ ID NO: 264763 - DNA, 564 bp, Artificial Sequence
  derived and/or modified sequence
atgcggcctctggcaggagcgccagtccccaaacgtcagaagtgcgatcattggaccccgtgcccaagcgacacatacgcctatcgcctgttgtctggaggtgggagatctaaatatgcaaaaatatgctttgaagacaacttgctgatgggggaacagcttgggaatgtcgctagaggtatcaacattgcaatagtgaattacgtcacaggaaacgtcactgcaactcggtgttttgacatgtacgagggcgataattcaggacctatgactaagtttatccagtctgccgcacccaagagcttgctattcatggtaacgtatgacgacggatcaaccaggctcaacaacgacgcaaagaacgccatagaggccttaggtagcaaagaaatcaggaatatgaaattccgcagctcatgggtctttatcgccgcaaaaggactggagctcccttctgagatccagcgtgaaaaaatcaatcattcggacgctaaaaataaccggtattccgggtggccggcagaaattcaaattgaaggatgtattcctaaggagagaagttag

SEQ ID NO: 264764 - DNA, 564 bp, Artificial Sequence
  derived and/or modified sequence
atgagaccgctcgcgggtgctccagtcccaaagcgccagaagtgcgaccactggacaccctgtccctcagacacctacgcttatcgccttctttcaggtgggggtcggtcaaaatatgccaagatttgtttcgaagataatctgctaatgggcgagcagttgggaaacgtggcacggggtattaatatcgccatagtgaattatgtgacgggcaacgttactgctacaagatgtttcgacatgtacgagggcgacaactcaggccctatgacaaagtttatacagtcagctgcgccaaaaagcctgctgtttatggtcacctacgacgatggtagcacgcgcctgaacaatgacgcaaaaaacgcaattgaagcacttgggagcaaagagattcgaaatatgaaatttcggtcttcctgggtttttattgctgcaaaaggcctagagttaccttctgagatccagcgagagaaaataaatcatagcgacgctaagaataaccgctactccggatggcctgcagagatccagattgagggttgtattccaaaagagagatcgtag

SEQ ID NO: 264765 - DNA, 564 bp, Artificial Sequence
  derived and/or modified sequence
atgagaccacttgcaggcgccccagttcccaagcgacaaaagtgcgatcattggacaccttgcccctccgatacatatgcataccgtctgttgtctggtggaggacggtctaagtacgcaaaaatatgttttgaagataacctgttaatgggggagcagctgggtaacgtggcacgtggcatcaacattgccatcgtcaactatgtcacgggtaacgttaccgccaccaggtgcttcgacatgtatgaaggcgacaatagcggcccaatgacgaaatttattcagtctgcagccccaaaaagcctgctgtttatggtcacctacgacgatggtagcacgcgcctgaacaatgacgcaaaaaacgcaattgaagcacttgggagcaaagagattcgaaatatgaaatttcggtcttcctgggtttttattgctgcaaaaggcctagagttaccttctgagatccagcgagagaaaataaatcatagcgacgctaagaataaccgctactccggatggcctgcagagatccagattgagggttgtattccaaaagagagatcgtag

SEQ ID NO: 264766 - DNA, 564 bp, Artificial Sequence
  derived and/or modified sequence
atgagacccctggccggcgcccccgtgcccaagagacagaagtgcgaccactggaccccctgccccagcgacacctacgcctacagactgctgagcggcggcggcagaagcaagtacgccaagatctgcttcgaggacaacctgctgatgggcgagcagctgggcaacgtggccagaggcatcaacatcgccatcgtgaactacgtgaccggcaacgtgaccgccaccagatgcttcgacatgtacgagggcgacaacagcggccccatgaccaagttcatccagagcgccgcccccaagagcctgctgttcatggtgacctacgacgacggcagcaccagactgaacaacgacgccaagaacgccatcgaggccctgggcagcaaggagatcagaaacatgaagttcagaagcagctgggtgttcatcgccgccaagggcctggagctgcccagcgagatccagagagagaagatcaaccacagcgacgccaagaacaacagatacagcggctggcccgccgagatccagatcgagggctgcatccccaaggagagaagctag

SEQ ID NO: 264767 - DNA, 564 bp, Artificial Sequence
  derived and/or modified sequence
atgaggccactagccggtgccccggtgcctaagcgccagaaatgtgatcactggaccccttgcccctccgacacttacgcctacagactgctgtccgggggcggccgttccaagtacgctaagatctgctttgaagacaacttgctcatgggtgaacaactgggaaacgttgctcgcgggataaacattgccattgtgaattacgtgaccgggaacgtcaccgctacccggtgcttcgacatgtacgagggcgataactctggcccaatgacaaagtttatccagtccgccgctcctaaatcactattgtttatggtgacgtatgacgacggttccactaggctgaataatgacgccaagaatgcaatcgaggctcttggttccaaggaaattagaaatatgaaatttcggtcatcctgggtctttatcgccgccaaagggttggagttgccctctgagattcagagagaaaagataaaccacagtgatgcaaaaaataacagatatagcgggtggccagctgagattcaaatcgagggttgtatccctaaggagcgctcttag

SEQ ID NO: 264768 - DNA, 564 bp, Artificial Sequence
  derived and/or modified sequence
atgaggcccctggccggggcccctgtgcccaagaggcagaagtgtgaccactggaccccctgccccagcgacacctacgcctaccgcctgctgagcggcggcggccgcagcaaatatgccaagatctgctttgaggacaacctgctgatgggagagcagctgggcaatgtggcccggggcatcaacatcgccatcgtgaactacgtgactggaaatgtgacagccacccgctgctttgacatgtatgaaggagacaacagcggccccatgaccaagttcatccagagcgctgcccccaagagcctgctcttcatggtgacctatgatgatggcagcacccggctgaacaatgatgccaagaatgccatcgaggccctgggcagcaaggagatccggaacatgaagttccgcagctcctgggtgttcatcgccgccaagggcctggagctgcccagcgagatccagcgggagaagatcaaccacagtgatgccaagaacaaccgctacagcggctggccagctgagatccagatcgagggctgcatccccaaggagaggagctag

SEQ ID NO: 264769 - DNA, 564 bp, Artificial Sequence
  derived and/or modified sequence
atgcggcccctggccggcgcccccgtgcccaagcggcagaagtgcgatcactggactccatgcccttctgatacatatgcctataggctgctgagcggggggggcaggtcgaaatacgctaaaatctgctttgaagacaatctcctcatgggggagcagctggggaacgtggctcgcggcatcaatattgcaattgtaaattacgtcaccggcaacgtaaccgcaactcggtgttttgacatgtatgaaggggataactctggccccatgactaaatttatccagagcgctgcccccaagagcctcctctttatggttacctacgatgatggcagtactcgccttaacaacgacgccaaaaatgctatagaagcgttgggtagtaaggaaatccgcaatatgaagtttaggtcaagctgggtgttcattgccgccaagggcctcgagctgccgtctgaaatccaaagggagaagatcaaccatagcgatgcaaaaaacaacaggtattccgggtggccagcagaaatacagatcgagggctgcattccaaaggaacgctcctag

SEQ ID NO: 264770 - RNA, 564 nt, Artificial Sequence
  derived and/or modified sequence
augagaccgcucgcgggugcuccagucccaaagcgccagaagugcgaccacuggacacccugucccucagacaccuacgcuuaucgccuucuuucaggugggggucggucaaaauaugccaagauuuguuucgaagauaaucugcuaaugggcgagcaguugggaaacguggcacgggguauuaauaucgccauagugaauuaugugacgggcaacguuacugcuacaagauguuucgacauguacgagggcgacaacucaggcccuaugacaaaguuuauacagucagcugcgccaaaaagccugcuguuuauggucaccuacgacgaugguagcacgcgccugaacaaugacgcaaaaaacgcaauugaagcacuugggagcaaagagauucgaaauaugaaauuucggucuuccuggguuuuuauugcugcaaaaggccuagaguuaccuucugagauccagcgagagaaaauaaaucauagcgacgcuaagaauaaccgcuacuccggauggccugcagagauccagauugaggguuguauuccaaaagagagaucguag

SEQ ID NO: 264771 - RNA, 564 nt, Artificial Sequence
  derived and/or modified sequence
augagaccacuugcaggcgccccaguucccaagcgacaaaagugcgaucauuggacaccuugccccuccgauacauaugcauaccgucuguugucugguggaggacggucuaaguacgcaaaaauauguuuugaagauaaccuguuaaugggggagcagcuggguaacguggcacguggcaucaacauugccaucgucaacuaugucacggguaacguuaccgccaccaggugcuucgacauguaugaaggcgacaauagcggcccaaugacgaaauuuauucagucugcagccccaaaaagccugcuguuuauggucaccuacgacgaugguagcacgcgccugaacaaugacgcaaaaaacgcaauugaagcacuugggagcaaagagauucgaaauaugaaauuucggucuuccuggguuuuuauugcugcaaaaggccuagaguuaccuucugagauccagcgagagaaaauaaaucauagcgacgcuaagaauaaccgcuacuccggauggccugcagagauccagauugaggguuguauuccaaaagagagaucguag

SEQ ID NO: 264772 - protein, 541 aa, Artificial Sequence
  derived and/or modified sequence
MSQLVECVPNFSEGKNQEVIDAISGAITQTPGCVLLDVDAGPSTNRTVYTFVGPPECVVEGALNAARVASRLIDMSRHQGEHPRMGALDVCPFIPVRGVSVDECVLCAQAFGQRLAEELDVPVYLYGEAARMDSRRTLPAIRAGEYEALPKKLQQADWAPDFGPSSFVPSWGATATGARKFLIAFNINLLGTKEQAHRIALNLREQGRGKDQPGRLKKVQGIGWYLDEKNLAQVSTNLLDFEVTALHTVYEETCREAQELSLPVVGSQLVGLVPLKALLDAAAFYCEKENLFILEEEQRIRLVVSRLGLDSLCPFSPKERIIEYLVPERGPERGLGSKSLRAFVGEVGARSAAPGGGSVAAAAAAMGAALGSMVGLMTYGRRQFQSLDTTMRRLIPPFREASAKLTTLVDADAEAFTAYLEAMRLPKNTPEEKDRRTAALQEGLRRAVSVPLTLAETVASLWPALQELARCGNLACRSDLQVAAKALEMGVFGAYFNVLINLRDITDEAFKDQIHHRVSSLLQEAKTQAALVLDCLETRQE

SEQ ID NO: 264773 - protein, 495 aa, Artificial Sequence
  derived and/or modified sequence
MSQLVECVPNFSEGKNQEVIDAISGAITQTPGCVLLDVDAGPSTNRTVYTFVGPPECVVEGALNAARVASRLIDMSRHQGEHPRMGALDVCPFIPVRGVSVDECVLCAQAFGQRLAEELDVPVYLYGEAARMDSRRTLPAIRAGEYEALPKKLQQADWAPDFGPSSFVPSWGATATGARKFLIAFNINLLGTKEQAHRIALNLREQGRGKDQPGRLKKVQGIGWYLDEKNLAQVSTNLLDFEVTALHTVYEETCREAQELSLPVVGSQLVGLVPLKALLDAAAFYCEKENLFILEEEQRIRLVVSRLGLDSLCPFSPKERIIEYLVPERGPERGLGSKSLRAFVGEVGARSAAPGGGSVAAAAAAMGAALGSMVGLMTYGRRQFQSLDTTMRRLIPPFREASAKLTTLVDADAEAFTAYLAHGGPTGGSEAGSLCAADAGGDGGLAVAGPAGTGPVWEPGLPVRPPGGGQSPGDGRVWRIFQRAHQPEGHHRRGI

SEQ ID NO: 264774 - DNA, 1626 bp, Artificial Sequence
  derived and/or modified sequence
atgagtcagttagtggaatgcgtccctaatttcagcgagggaaagaaccaggaggttatcgacgccatctcaggagccatcacccagactcctgggtgcgttttactagatgttgatgccgggccttcaacaaacaggaccgtctatacctttgtcggacctcccgagtgcgttgttgagggagctcttaatgccgctcgcgtggcctctcggttgatcgatatgtctcggcaccagggagaacatcctcgtatgggagccctggacgtatgtcccttcatacctgtgaggggagtgtccgtggacgagtgcgtgttgtgcgcccaggcatttgggcaacggctggccgaagaattagatgttccagtctacctgtacggggaagccgccagaatggactctcgaaggaccttgcctgcaatccgtgcaggcgagtatgaagcactcccaaagaagctccagcaggcagattgggctccagactttggaccctcaagttttgtccccagctggggcgcaaccgcaaccggcgctcgcaaatttctgatcgccttcaacatcaacctgcttggcaccaaagagcaggcccaccgcatcgctttaaaccttcgcgagcaggggagggggaaggaccagcccggccgcctcaaaaaggtccagggtattgggtggtatttggatgaaaaaaacttggcgcaggtcagtactaacctgctcgacttcgaggtgaccgccctgcacaccgtctatgaggaaacctgcagggaggcccaggagctttctcttcccgttgtgggctcccagctggtgggtctggtgcctctcaaagctcttctagacgccgccgccttttactgcgagaaagagaatctgttcatactcgaagaagagcagcgcatcaggctggtagtgagtcgcctagggttggacagcctctgccccttttctcccaaggaacgcatcattgaatatttggtgccagagaggggccctgaacgtgggctcgggtcaaagagcctgagggcattcgtcggcgaagtcggggccagatccgccgctccagggggtgggagcgtggccgccgctgccgccgcaatgggagctgccttgggttctatggttggcctcatgacttacggccggagacagtttcaaagtctggacacaacgatgcgtcggcttatcccccctttccgggaagcctctgccaaactgacaaccctcgtggacgcagacgcagaggcgttcacggcctatcttgaagctatgcggctgcctaaaaatacacccgaagagaaagaccgacgcacagctgctctgcaagaagggctccgccgggcggtatctgttccactgacgctggccgagaccgtggcctctctgtggccagcacttcaagaacttgctcggtgcgggaacctggcctgccgcagcgatttacaggtggccgcgaaggcgctcgaaatgggtgtcttcggagcttatttcaacgtgctcatcaacttgcgtgatattacggacgaggcctttaaggaccaaatccaccacagggtcagttcattactccaagaggccaaaacgcaggctgctcttgttttggattgtttggagactaggcaggagtag

SEQ ID NO: 264775 - DNA, 1626 bp, Artificial Sequence
  derived and/or modified sequence
atgagtcagctggttgagtgcgtccccaacttcagcgagggaaagaaccaggaggtgatagacgccatctctggtgccatcacccagacccccggatgtgtgctgctggacgtggacgcaggcccatctaccaatagaacagtgtacacctttgtgggccctcctgagtgcgtggtggaaggcgctctgaatgccgcaagggtggcgtcccgcctgattgatatgagcaggcaccaaggtgaacaccctagaatgggagccctcgatgtgtgcccattcattccggtccgcggtgtaagcgttgacgaatgcgtgctgtgcgctcaggcttttggccaaagactggccgaagagctggacgttccagtgtatctctatggcgaagcagctcgaatggatagccggagaacactgccagctatccgtgccggagaatacgaggctctccctaagaagctccagcaggccgattgggcacccgactttggtcccagctcatttgttcccagctggggggcaactgccactggagcacgaaaattcctgatcgcattcaacatcaatctcctcgggacaaaagagcaggctcaccgcattgcactcaacctgagggagcaggggcgaggcaaggaccagcccggtcggctgaaaaaagtgcaaggaatcggctggtacctggacgaaaaaaacctggcccaggtgtcaaccaatctcctggacttcgaggttacagcccttcacacagtgtacgaggagacatgtcgtgaagcccaagagctgtcattaccagtggtgggtagccaactggtgggcttggtacccctgaaggctcttctagacgcagccgccttctattgcgaaaaggaaaacctcttcatacttgaggaggaacaaaggataaggctggtggtcagtagactgggattagattccctgtgcccattttcaccaaaggagcggattattgagtatctcgtgcctgagcggggacccgaaagaggactgggatctaaaagtctgagagcttttgtgggcgaagtaggagcacgctctgctgctcccggcgggggcagcgtggccgcagcggcggctgccatgggcgctgcattggggagcatggttggtctgatgacatacggcagaaggcagttccagagcctggacaccaccatgcggaggttaataccaccattccgagaggcctctgctaagctgacaaccctcgtggacgccgacgcagaggctttcaccgcatatttggaggctatgcggttgcctaagaacactccagaagagaaagataggcggacagctgccctgcaggagggactaaggcgcgccgtctccgtccctcttacattagccgagactgtggcctctctttggcctgccctccaggaattggctcgctgcgggaacttggcctgtagatcggatctgcaggtcgctgccaaggctctggagatgggagtgtttggggcatatttcaatgtgctgattaatctcagggatattacagacgaggcttttaaggaccaaatccaccacagggtgagctctctgctacaagaggccaaaacacaggccgccttggtccttgactgtctcgagacgagacaggagtag

SEQ ID NO: 264776 - DNA, 1626 bp, Artificial Sequence
  derived and/or modified sequence
atgagccagctggtggagtgtgtgcccaacttcagcgagggcaagaaccaggaggtgattgatgccatcagcggggccatcacccagaccccaggctgtgtgctgctggatgtggatgctggccccagcaccaacagaacagtgtacacctttgtgggccccccagaatgtgtggtggagggcgccctgaatgctgcccgggtggccagccggctgattgacatgagccgccaccagggcgagcaccccaggatgggcgccctggatgtgtgccccttcatccctgtgcggggcgtgtctgtggatgaatgtgtgctgtgtgcccaggccttcggccagaggctggccgaggagctggatgtgcctgtgtacctgtatggagaggccgccaggatggacagcaggaggaccctgcctgccatccgggccggggagtatgaggccctgcccaagaagctgcagcaggccgactgggccccagactttggccccagcagctttgtgcccagctggggcgccacagccaccggggccaggaagttcctgattgccttcaacatcaacctgctgggcaccaaggagcaggcccacagaattgccctgaacctgcgggagcagggccggggcaaggaccagcccggccgcctgaagaaggtgcagggcatcggctggtacctggatgagaagaacctggcccaggtgtccaccaacctgctggactttgaggtgacagccctgcacacagtgtatgaggagacctgccgggaggcccaggagctgagcctgcctgtggtgggcagccagctggtgggcctggtgcccctgaaggccctgctggatgctgctgccttctactgtgagaaggaaaatctcttcatcctggaggaggagcagaggatccggctggtggtgtcccggctgggcctggacagcctgtgccccttcagccccaaggagcgcatcatcgagtacctggtgcctgagcggggccctgagcggggcctgggcagcaagagcctgcgggcctttgtgggggaggtgggcgcccggtctgctgcccctgggggcggctctgtggccgctgctgctgctgccatgggcgccgccctgggctccatggtgggcctgatgacctatggaagacggcagttccagagcctggacaccaccatgaggaggctcatcccccccttccgggaggccagcgccaagctgaccaccctggtggatgctgatgctgaggccttcaccgcctacctggaggccatgaggctgcccaagaacaccccagaggagaaggacagaagaacagctgccctgcaggagggcctgcggcgggctgtgtctgtgcccctgaccctggccgagaccgtggccagcctgtggccagccctgcaggagctggcccgctgtggcaacctggcctgccgcagtgacctgcaggtggccgccaaggccctggagatgggcgtgtttggagcctacttcaacgtgctgatcaacctgcgggacatcacagatgaggccttcaaggaccagatccaccaccgggtgagcagcctgctgcaggaggccaagacccaggccgccctggtgctggactgcctggagacccggcaggagtag

SEQ ID NO: 264777 - DNA, 1626 bp, Artificial Sequence
  derived and/or modified sequence
atgagccagctggtggagtgcgtgcccaacttcagcgagggcaagaaccaggaagtgatcgacgccataagtggtgctatcactcagacccctggttgcgtgctgctcgacgtggacgcaggccctagcactaaccggactgtctacaccttcgtgggcccacccgaatgcgtggtggagggcgcgttaaatgccgctcgcgtagcttccaggctgatcgacatgtccagacaccagggagaacatcctcgaatgggcgcactcgacgtgtgccctttcattccagtgaggggcgtaagcgtggacgaatgcgttttatgcgcacaggccttcggccagcgtcttgccgaagagttggatgtgccagtgtacctgtacggggaggctgccagaatggactccaggcggactctaccagctatccgtgccggagagtacgaggcactcccaaaaaaactgcaacaagcggactgggcccccgattttggcccctccagcttcgtaccgtcttggggtgcgaccgctacaggagcaaggaaattcctgatagcgttcaatatcaacttattaggcaccaaagagcaggcccacaggatcgccctgaacctacgtgagcagggacggggtaaagatcaacccggcaggcttaagaaggtgcaggggatcggttggtatcttgacgagaagaatcttgcccaggtgtccacaaaccttctggattttgaggtcactgccctccatactgtttacgaagaaacctgtagggaggcacaggagctgtcactccctgtcgtagggtcccagttggtcggtctggtccctctgaaagccttgttggacgcagctgctttctactgcgagaaagaaaatttatttatccttgaagaagaacagagaattcgcctggtggtaagcagactcggactcgactcattgtgcccctttagccctaaggaacgcatcatagagtatctcgtgcctgagagaggaccagagagagggctgggctccaagtccctgagggccttcgtgggcgaagtcggggctcgctccgccgcaccgggaggcggctctgttgctgccgcagccgctgccatgggcgccgcattggggtcgatggtcggcctcatgacatacgggaggaggcaatttcagtcattggacacgactatgaggaggctgattccacccttcagagaggcctcggccaaactcaccaccctagtagatgcagacgcagaggcattcacagcatacctcgaagccatgcggctacctaagaacacaccagaagagaaagaccgaagaacagcagccctgcaggaaggactccgcagggccgtctctgtgccgttaaccttagccgagaccgtggcaagtttatggccggcactgcaggaactcgcacggtgtggaaatcttgcctgtcgtagcgacctgcaagtggccgccaaggcactggagatgggggtgttcggagcatactttaacgtgttaatcaacctccgggatatcactgacgaggcgtttaaggatcagatccatcatagagtatcctcattactgcaggaagcaaagactcaggcagccttggtcctggattgcttggagacacgacaggaatag

SEQ ID NO: 264778 - DNA, 1626 bp, Artificial Sequence
  derived and/or modified sequence
atgagccagctggtggagtgcgtgcccaacttcagcgagggcaagaaccaggaagtgatcgacgccatctccggagctattacgcaaacgcctggctgtgtcctgttggacgtagacgcagggcctagcactaacaggactgtgtacacttttgttggccctccagagtgtgtagtggagggggccctgaacgcagcacgcgtcgccagccgtctcatagatatgagccggcaccagggtgagcacccgcggatgggagccctggacgtttgtcctttcatccctgtgaggggcgtgtccgtggacgaatgtgtcctctgcgcgcaggcatttggacaaagactagcagaggagctggacgtgcccgtctacctctacggagaagctgctcgaatggattcccgcagaacgctgcccgctatccgagctggtgagtacgaagccttacccaaaaaactgcagcaggccgattgggcaccggactttggcccgagctcattcgtgccatcgtggggagcaacggccacaggggctcgaaaattcctcattgcattcaatattaatttgttgggaacaaaggagcaggcccatcggattgccctcaatcttagggagcagggccgtggcaaagatcagccgggcaggcttaaaaaggtgcagggcattgggtggtatctggatgagaaaaacctcgcacaggtgagcaccaaccttctggatttcgaagtgacagcgctgcacacagtatatgaagaaacatgccgagaagcccaagagctctccctgcccgtcgtcggatcccagctggtgggactcgttcccctgaaggcgctccttgatgcagccgcattctactgcgaaaaagaaaacctgtttattttggaggaggagcagagaatccgtcttgtggtatcccgcttggggctggattcactttgtccatttagtccaaaagagagaatcatcgagtatctggtccctgagcgggggccagaacgcggcctgggctctaaaagtttgagggcctttgtcggtgaggtcggagcacgcagtgctgcgccgggtggcggttccgtggcggccgctgctgctgccatgggcgcagcattaggttccatggtcgggctgatgacatatggcagaaggcaatttcaatcactcgataccacaatgcggaggcttattcccccctttagggaagcttccgctaagctcactacgttggtggatgccgacgctgaagcatttactgcttatctggaggctatgcggcttcctaaaaacaccccagaagagaaggaccggcgaactgcagcgttgcaagaagggcttcgccgcgcagtcagtgtccctttaaccctggcggagacagtcgcttcgctgtggccagctctacaggaattagcaaggtgcggcaatttagcttgcaggtcagatcttcaagtagccgctaaagccctggagatgggtgtgttcggagcgtatttcaacgtgctgattaaccttcgtgacatcacggacgaggccttcaaagatcagatccaccatcgggtttcatccctcctacaggaggctaaaacccaggctgcactcgtccttgactgtctggaaacacgccaggaatag

SEQ ID NO: 264779 - DNA, 1626 bp, Artificial Sequence
  derived and/or modified sequence
atgagccaacttgtagagtgcgtaccaaactttagcgaaggcaaaaatcaagaggtcatcgatgcgatctccggcgcaataactcagactcctggatgcgttctgcttgatgtagacgcgggaccaagtacaaaccgcacagtatacacctttgttggacctcctgagtgtgtggtcgaaggagccctgaacgcagctcgtgttgcctcccgactcatagatatgagcaggcaccagggggaacatccacggatgggagcacttgacgtgtgcccattcatcccagtgcggggagtttcggtggatgagtgcgtcctttgcgcacaagcctttggccagcgtctagcagaggagctggatgttcccgtgtacctctacggcgaagccgcaaggatggactctaggaggactctacccgctatccgcgcaggcgaatacgaagccctcccaaaaaaattacagcaggcagattgggcgccagacttcggtccttcatccttcgtgccttcgtggggggctaccgccactggggctcggaagttccttattgcctttaacattaatcttctggggactaaggagcaggctcaccggatcgcacttaaccttagggagcaaggacggggtaaagatcagcccggacgactgaagaaagtgcaaggaataggctggtatctcgatgagaaaaacttggctcaggtttccacgaatctcctggatttcgaagtgaccgcactgcataccgtttatgaagagacgtgtagggaagctcaggaactgagtctacctgttgttggaagccagctggtgggcctcgtgcccctcaaggcacttctcgacgcagctgccttttactgcgaaaaggaaaatttattcatcttggaagaagagcaaaggatcaggcttgttgtatcccgtttagggttggactccctgtgcccgtttagtccaaaggagaggatcattgagtatctggtcccagagagaggcccagagagggggttaggctctaaaagtttacgcgctttcgtaggagaggtaggagctaggagtgcagctcctggaggcggaagtgtggcagccgctgcggctgccatgggggcagcactcgggtcaatggtggggttgatgacgtacggtcggagacagttccagtccttagacaccaccatgcgtcggctcatccctcctttcagggaagcatccgcgaaactcacgacactcgtggacgcagatgctgaagccttcacagcctatctggaggctatgcgtctgccaaaaaacacccccgaagagaaggacagaaggacggccgctctgcaggaaggcctcaggagagctgtgagcgtgccactgacactcgccgaaacggtagcatccctctggcctgcactgcaggagctggctcggtgtggaaacctggcctgtcgatctgatctccaggtagctgccaaagccctggaaatgggggtgttcggcgcatattttaatgtcctgatcaatcttagggacattaccgacgaggcctttaaggaccagattcaccaccgagtcagtagccttctgcaagaagctaaaactcaggcagcactcgtgttggactgcctcgaaaccagacaggagtag

SEQ ID NO: 264780 - DNA, 1626 bp, Artificial Sequence
  derived and/or modified sequence
atgtcacagctcgtggaatgtgtgcccaacttctccgaggggaagaatcaagaagttatcgacgccatatccggagctatcacccagactccagggtgtgtcttgctggatgttgatgcgggtccatctacaaatagaacagtgtataccttcgtcggacctccagagtgtgtggtagagggagcattgaacgcagctcgagtcgcctctcgactgatagacatgagccggcaccaaggcgagcatccaaggatgggcgctcttgatgtttgtccgttcatccccgtgcgtggggtctctgtcgatgagtgcgtcctgtgtgcacaggccttcggtcagaggctagccgaggaactggacgtgcccgtttatctatacggagaagctgccaggatggactcccgtcggaccctcccggctattcgagctggagaatatgaagccctgcctaaaaagctccagcaagccgattgggcccctgactttggtccttcttcctttgtcccaagttggggggctactgctaccggggctcggaaattcttgattgcttttaatatcaatctattggggactaaagaacaggcccaccgcatagccttgaacctccgagaacagggcaggggcaaggatcagccgggaagattgaagaaagttcaaggaatcgggtggtacctcgatgaaaagaacctggcccaggtgtctactaatctcctcgattttgaagtgactgccttgcacacggtgtacgaggaaacttgtagagaggcacaggagttaagcctcccagtggtgggctcccagcttgtcggcctcgtccctctaaaggcacttctcgatgccgcagccttctactgcgagaaggagaatctcttcatcctcgaggaagaacagaggattcgcctggtggtgtctagactggggctcgatagcttatgtccttttagtcccaaagaacgaattatcgagtatctggtcccagaacgtggtccggagcgagggctcggttccaagagcctcagagctttcgtaggagaggttggggcaagaagcgccgcacccggaggaggatcagtggccgctgctgcggctgccatgggcgctgccttgggcagcatggtcggcttaatgacatatggcagaagacagttccaatcccttgatacgaccatgcggcgacttatcccaccgttccgtgaagcttccgcaaaactgacgactctagtcgacgccgatgctgaagcatttactgcatatctggaagccatgcgcctgcctaaaaacactccagaagagaaggatagaagaaccgccgcactgcaagagggactgcgccgtgcagtttcagtgcccctgacgctggccgaaaccgtcgcctctctgtggcctgcgctgcaggagctcgcaaggtgcggaaatctcgcatgccgcagtgaccttcaggtagcggcaaaggcgctcgagatgggggtgttcggggcttactttaacgtcctgatcaaccttcgagacatcaccgacgaggccttcaaagaccagattcatcaccgtgtttctagtctcctgcaggaggctaagacacaggcagcgctcgtgctggactgtttggaaacccggcaggaatag

SEQ ID NO: 264781 - DNA, 1626 bp, Artificial Sequence
  derived and/or modified sequence
atgagccagctggtggagtgcgtgcccaacttcagcgagggcaagaaccaggaggtgatcgacgccatcagcggcgccatcacccagacccccggctgcgtgctgctggacgtggacgccggccccagcaccaacagaaccgtgtacaccttcgtgggcccccccgagtgcgtggtggagggcgccctgaacgccgccagagtggccagcagactgatcgacatgagcagacaccagggcgagcaccccagaatgggcgccctggacgtgtgccccttcatccccgtgagaggcgtgagcgtggacgagtgcgtgctgtgcgcccaggccttcggccagagactggccgaggagctggacgtgcccgtgtacctgtacggcgaggccgccagaatggacagcagaagaaccctgcccgccatcagagccggcgagtacgaggccctgcccaagaagctgcagcaggccgactgggcccccgacttcggccccagcagcttcgtgcccagctggggcgccaccgccaccggcgccagaaagttcctgatcgccttcaacatcaacctgctgggcaccaaggagcaggcccacagaatcgccctgaacctgagagagcagggcagaggcaaggaccagcccggcagactgaagaaggtgcagggcatcggctggtacctggacgagaagaacctggcccaggtgagcaccaacctgctggacttcgaggtgaccgccctgcacaccgtgtacgaggagacctgcagagaggcccaggagctgagcctgcccgtggtgggcagccagctggtgggcctggtgcccctgaaggccctgctggacgccgccgccttctactgcgagaaggagaacctgttcatcctggaggaggagcagagaatcagactggtggtgagcagactgggcctggacagcctgtgccccttcagccccaaggagagaatcatcgagtacctggtgcccgagagaggccccgagagaggcctgggcagcaagagcctgagagccttcgtgggcgaggtgggcgccagaagcgccgcccccggcggcggcagcgtggccgccgccgccgccgccatgggcgccgccctgggcagcatggtgggcctgatgacctacggcagaagacagttccagagcctggacaccaccatgagaagactgatcccccccttcagagaggccagcgccaagctgaccaccctggtggacgccgacgccgaggccttcaccgcctacctggaggccatgagactgcccaagaacacccccgaggagaaggacagaagaaccgccgccctgcaggagggcctgagaagagccgtgagcgtgcccctgaccctggccgagaccgtggccagcctgtggcccgccctgcaggagctggccagatgcggcaacctggcctgcagaagcgacctgcaggtggccgccaaggccctggagatgggcgtgttcggcgcctacttcaacgtgctgatcaacctgagagacatcaccgacgaggccttcaaggaccagatccaccacagagtgagcagcctgctgcaggaggccaagacccaggccgccctggtgctggactgcctggagaccagacaggagtag

SEQ ID NO: 264782 - protein, 76 aa, Artificial Sequence
  derived and/or modified sequence
MGLKMSCLKGFQMCVSSSSSSHDEAPVLNDKHLDVPDIIITPPTPTGMMLPRDLGSTVWLDETGSCPDDGEIDPEA

SEQ ID NO: 264783 - DNA, 231 bp, Artificial Sequence
  derived and/or modified sequence
atggggctgaagatgtcatgtctgaagggtttccagatgtgcgtctcatctagctcatctagccacgacgaagcgcctgtattaaacgataagcatctcgatgtgcctgacatcataatcacgccaccgaccccgactggcatgatgcttccccgggatctgggcagcactgtgtggttagatgaaacaggcagttgccccgacgatggcgagatagaccctgaggcctag

SEQ ID NO: 264784 - DNA, 231 bp, Artificial Sequence
  derived and/or modified sequence
atgggcctgaagatgagctgcctgaagggcttccagatgtgtgtgagcagcagcagcagcagccatgatgaggcccctgtgctgaatgacaagcacctggatgtgcctgacatcatcatcaccccacccacccccaccggcatgatgctgccccgggacctgggcagcacagtgtggctggatgaaacaggcagctgcccagatgatggagaaattgatcctgaggcctag

SEQ ID NO: 264785 - DNA, 231 bp, Artificial Sequence
  derived and/or modified sequence
atgggcctgaagatgagctgcctgaagggcttccagatgtgcgtgagttcctcctcttcgtcccacgatgaggcccccgtgctgaacgacaagcacctcgacgtgccggacattatcatcactccgccgacccccaccgggatgatgctcccaagagacttggggtctactgtttggctggacgagaccggctcttgccctgatgacggggaaatcgatcctgaggcctag

SEQ ID NO: 264786 - DNA, 231 bp, Artificial Sequence
  derived and/or modified sequence
atgggcctgaagatgagctgtcttaaaggctttcagatgtgtgtcagcagttcatccagctcccacgatgaggctcctgtcctcaacgacaaacacctcgatgttcccgacatcatcattacaccacccaccccaacaggaatgatgttacccagagatctcggctctaccgtgtggctggacgagacaggttcctgcccagatgacggggagatagatcccgaagcatag

SEQ ID NO: 264787 - DNA, 898 bp, Artificial Sequence
  derived and/or modified sequence
cccgagcgccggccgggccatgacccccgctgctctgtcttgcaggctcgtcgccgcggccccccgagcccgaccgccgccgccaccaccaccagcgcccgggcgggcctcgcgcgcctcgggcgcggctccgcagtgagcccaccaagaaggaagcggcctgcagaggtgccgacatggggcttaagatgtcctgcctgaaaggctttcaaatgtgtgtcagcagcagcagcagcagccacgacgaggcccccgtcctgaacgacaagcacctggacgtgcccgacatcatcatcacgccccccacccccacgggcatgatgctgccgagggacttggggagcacagtctggctggatgagacagggtcgtgcccagatgatggagaaatcgacccagaagcctgaggaggtgtcctgggtttggctggctggctcctgctccagcggcccggcttcaggtgtccgggggcgtggctgcctggagcaggtgtgctgaataccctggatgggaactgagcgaacccgggcctccgctcagagagacgtggcaggaccagcgaggaatccagcctgtccacttccagaacagtgtttcccaggccccgctgagtggaccggacctctgacacctccaggttcttgctgactccggcctggtgaaagggagcgccatggtcctggctgttggggtcccagggagaggctctcttctggacaaacacaccctcccagcccccagggctgtgcaaacacatgcccctgccataagcaccaacaagaacttcttgcaggtggagtggctgttttttataagttgttttacagatacggaaacagtccaaaatgggatttataatttcttttttgcattataaataaagatcctctgtaacaaa

SEQ ID NO: 264788 - DNA, 231 bp, Artificial Sequence
  derived and/or modified sequence
atgggcctgaagatgagctgcctgaagggcttccagatgtgcgtgagcagcagcagcagcagccacgacgaggcccccgtgctgaacgacaagcacctggacgtgcccgacatcatcatcaccccccccacccccaccggcatgatgctgcccagagacctgggcagcaccgtgtggctggacgagaccggcagctgccccgacgacggcgagatcgaccccgaggcctag

SEQ ID NO: 264789 - protein, 470 aa, Artificial Sequence
  derived and/or modified sequence
MDTTMEADLGATGHRPRTELDDEDSYPQGGWDTVFLVALLLLGLPANGLMAWLAGSQARHGAGTRLALLLLSLALSDFLFLAAAAFQILEIRHGGHWPLGTAACRFYYFLWGVSYSSGLFLLAALSLDRCLLALCPHWYPGHRPVRLPLWVCAGVWVLATLFSVPWLVFPEAAVWWYDLVICLDFWDSEELSLRMLEVLGGFLPFLLLLVCHVLTQATACRTCHRQQQPAACRGFARVARTILSAYVVLRLPYQLAQLLYLAFLWDVYSGYLLWEALVYSDYLILLNSCLSPFLCLMASADLRTLLRSVLSSFAAALCEERPGSFTPTEPQTQLDSEGPTLPEPMAEAQSQMDPVAQPQVNPTLQPRSDPTAQPQLNPTAQPQSDPTAQPQLNLMAQPQSDSVAQPQADTNVQTPAPAASSVPSPCDEASPTPSSHPTPGALEDPATPPASEGESPSSTPPEAAPGAGPT

SEQ ID NO: 264790 - DNA, 1413 bp, Artificial Sequence
  derived and/or modified sequence
atggacaccaccatggaggccgacctgggcgccaccggccacagacccagaaccgagctggacgacgaggacagctacccccagggcggctgggacaccgtgttcctggtggccctgctgctgctgggcctgcccgccaacggcctgatggcctggctggccggcagccaggccagacacggcgccggcaccagactggccctgctgctgctgagcctggccctgagcgacttcctgttcctggccgccgccgccttccagatcctggagatcagacacggcggccactggcccctgggcaccgccgcctgcagattctactacttcctgtggggcgtgagctacagcagcggcctgttcctgctggccgccctgagcctggacagatgcctgctggccctgtgcccccactggtaccccggccacagacccgtgagactgcccctgtgggtgtgcgccggcgtgtgggtgctggccaccctgttcagcgtgccctggctggtgttccccgaggccgccgtgtggtggtacgacctggtgatctgcctggacttctgggacagcgaggagctgagcctgagaatgctggaggtgctgggcggcttcctgcccttcctgctgctgctggtgtgccacgtgctgacccaggccaccgcctgcagaacctgccacagacagcagcagcccgccgcctgcagaggcttcgccagagtggccagaaccatcctgagcgcctacgtggtgctgagactgccctaccagctggcccagctgctgtacctggccttcctgtgggacgtgtacagcggctacctgctgtgggaggccctggtgtacagcgactacctgatcctgctgaacagctgcctgagccccttcctgtgcctgatggccagcgccgacctgagaaccctgctgagaagcgtgctgagcagcttcgccgccgccctgtgcgaggagagacccggcagcttcacccccaccgagccccagacccagctggacagcgagggccccaccctgcccgagcccatggccgaggcccagagccagatggaccccgtggcccagccccaggtgaaccccaccctgcagcccagaagcgaccccaccgcccagccccagctgaaccccaccgcccagccccagagcgaccccaccgcccagccccagctgaacctgatggcccagccccagagcgacagcgtggcccagccccaggccgacaccaacgtgcagacccccgcccccgccgccagcagcgtgcccagcccctgcgacgaggccagccccacccccagcagccaccccacccccggcgccctggaggaccccgccaccccccccgccagcgagggcgagagccccagcagcaccccccccgaggccgcccccggcgccggccccacctag

SEQ ID NO: 264791 - DNA, 1429 bp, Artificial Sequence
  derived and/or modified sequence
cccaaatggacactaccatggaagctgacctgggtgccactggccacaggccccgcacagagcttgatgatgaggactcctacccccaaggtggctgggacacggtcttcctggtggccctgctgctccttgggctgccagccaatgggttgatggcgtggctggccggctcccaggcccggcatggagctggcacgcgtctggcgctgctcctgctcagcctggccctctctgacttcttgttcctggcagcagcggccttccagatcctagagatccggcatgggggacactggccgctggggacagctgcctgccgcttctactacttcctatggggcgtgtcctactcctccggcctcttcctgctggccgccctcagcctcgaccgctgcctgctggcgctgtgcccacactggtaccctgggcaccgcccagtccgcctgcccctctgggtctgcgccggtgtctgggtgctggccacactcttcagcgtgccctggctggtcttccccgaggctgccgtctggtggtacgacctggtcatctgcctggacttctgggacagcgaggagctgtcgctgaggatgctggaggtcctggggggcttcctgcctttcctcctgctgctcgtctgccacgtgctcacccaggccacagcctgtcgcacctgccaccgccaacagcagcccgcagcctgccggggcttcgcccgtgtggccaggaccattctgtcagcctatgtggtcctgaggctgccctaccagctggcccagctgctctacctggccttcctgtgggacgtctactctggctacctgctctgggaggccctggtctactccgactacctgatcctactcaacagctgcctcagccccttcctctgcctcatggccagtgccgacctccggaccctgctgcgctccgtgctctcgtccttcgcggcagctctctgcgaggagcggccgggcagcttcacgcccactgagccacagacccagctagattctgagggtccaactctgccagagccgatggcagaggcccagtcacagatggatcctgtggcccagcctcaggtgaaccccacactccagccacgatcggatcccacagctcagccacagctgaaccctacggcccagccacagtcggatcccacagcccagccacagctgaacctcatggcccagccacagtcagattctgtggcccagccacaggcagacactaacgtccagacccctgcacctgctgccagttctgtgcccagtccctgtgatgaagcttccccaaccccatcctcgcatcctaccccaggggcccttgaggacccagccacacctcctgcctctgaaggagaaagccccagcagcaccccgccagaggcggccccgggcgcaggccccacgtgagggtccaggaa

SEQ ID NO: 264792 - DNA, 1413 bp, Artificial Sequence
  derived and/or modified sequence
atggacacgacaatggaggccgatttaggagcaactggtcacaggccccggacggagctggacgatgaagattcctatccccagggtggttgggacaccgtcttcttggtggcactactgctgctgggattgcctgccaacggcctcatggcatggctcgctgggagtcaggcgcgccacggagctgggacaaggctcgccctgctgctcctgagcctcgccctcagtgactttctttttcttgctgcagctgccttccagatcctcgagatccgtcacggaggacactggccattgggcactgctgcatgccggttctactatttcttgtggggagtctcatactcctcaggtctgtttttactggccgccctatcattggaccgatgcttattagccctgtgcccacactggtaccccggtcatagaccagtcaggttacccctctgggtttgcgccggtgtctgggtcctggccacactttttagcgtgccctggttggtctttcctgaggctgcggtatggtggtacgacctcgtgatttgcctagatttctgggatagtgaagaactcagcttgagaatgctggaggtgctaggcggattcctgcctttcctgttgctgctggtatgtcacgtactaacacaggctactgcgtgcaggacttgccacagacagcagcaacccgccgcctgtagaggctttgcaagagtagcaagaaccattctttccgcttacgtggtgttaaggttgccatatcagttagcccagttgctgtatctggcgtttctatgggacgtgtattccgggtacttgctgtgggaggccctggtctactcagattatctgatactgttgaatagttgcctgtctccattcctgtgcctcatggcctcagctgacttacggaccttgctgcgcagtgtgctttcatcgttcgcggccgcattgtgcgaagaaagacctggctcattcacccctaccgaaccacaaacccagttagattccgagggacccactctccccgagcccatggctgaagcgcagtcgcagatggacccagtggcccagccgcaggtgaaccccacgctgcagcctcgctcagaccctaccgcacagccacagctgaaccctaccgcccagccgcaaagtgatcccacagcccagccacagctaaatctcatggcgcagccacaatcagactcagtggctcaaccccaagcggataccaacgtgcaaacaccagctcctgcagcctccagcgttccctctccctgcgatgaggccagccccactccgtctagccacccaacaccaggagcactggaggaccctgccacacctcctgcatctgagggcgagagtccatcctctactccccctgaagcagccccaggagctggtccgacatag

SEQ ID NO: 264793 - DNA, 1413 bp, Artificial Sequence
  derived and/or modified sequence
atggacaccaccatggaggccgacctgggcgccaccggccaccggcccaggacagagctggatgatgaagattcctacccccagggcggctgggacacagtgttcctggtggccctgctgctgctgggcctgcctgccaacggcctgatggcctggctggccggcagccaggcccggcacggggccggcacccggctggccctgctgctgctgagcctggccctgagtgacttcctgttcctggccgccgccgccttccagatcctggagatcagacatggaggccactggcccctgggcacagctgcctgccgcttctactacttcctgtggggcgtgtcctacagcagcggcctcttcctgctggccgccctgagcctggaccgctgcctgctggccctgtgcccccactggtacccaggccacaggcctgtgcggctgcccctgtgggtgtgtgccggcgtgtgggtgctggccaccctcttctctgtgccctggctggtgtttcctgaggccgctgtgtggtggtatgacctggtgatctgcctggacttctgggacagcgaggagctgagcctgaggatgctggaggtgctgggcggcttcctgcccttcctgctgctgctggtgtgccacgtgctgacccaggccacagcctgcaggacctgccaccggcagcagcagcctgctgcctgccggggctttgcccgggtggcccggaccatcctgagcgcctacgtggtgctgcggctgccctaccagctggcccagctgctgtacctggccttcctgtgggatgtgtacagcggctacctgctgtgggaggccctggtgtacagcgactacctgatcctgctgaacagctgcctgagccccttcctgtgcctgatggccagcgctgacctgcggaccctgctgcggtctgtgctgagcagctttgctgctgccctgtgtgaggagcggcccggcagcttcacccccacagagccccagacccagctggacagcgagggccccaccctgcctgagcccatggccgaggcccagagccagatggaccctgtggcccagccccaggtgaaccccaccctgcagcccaggagtgaccccacagcccagccccagctgaaccccacagcccagccccagagcgaccccacagcccagccccagctgaacctgatggcccagccccagagcgacagcgtggcccagccccaggccgacaccaacgtgcagaccccagccccagctgccagctctgtgcccagcccctgtgatgaggccagccccacccccagcagccaccccacccctggggccctggaggaccctgccaccccaccagccagcgagggggagagccccagcagcaccccacctgaggccgcccctggagctggccccacctag

SEQ ID NO: 264794 - DNA, 1413 bp, Artificial Sequence
  derived and/or modified sequence
atggacaccaccatggaggccgacctgggcgccaccggccaccggccgcgaaccgagctggatgacgaggattcttatccacagggcggctgggacactgtgtttctggtcgcgctactcctgcttggccttcccgctaacgggctcatggcctggctggctggtagccaggcgcgtcatggggcaggcaccaggctagctcttttactgttgtccctcgctctgagcgatttcctttttttagctgcggccgcattccaaatcctcgaaattcgccatggaggtcattggcctctggggaccgctgcatgccggttttattactttctgtggggggtgtcatatagctcaggcctctttctgctggcagccctttctttagacaggtgcttgctggccttgtgcccccactggtatcccggtcatcgtccagttaggctgcccctgtgggtgtgcgcaggggtctgggtactggccacgctgttctccgtgccttggctcgtgtttccagaagccgcagtgtggtggtatgatctggtcatttgcctcgatttttgggattcagaggaattgagccttcgtatgctcgaggtgcttggcggtttcctgccctttttactcctcctagtgtgccacgttttaacacaagcaacggcctgcagaacatgccataggcagcagcagcccgcggcttgcagagggttcgctcgggtagcccggacaattctttccgcctatgtcgtgctaagacttccttaccagcttgcccagctgctgtacttggcttttctgtgggacgtgtatagcggatatctcctgtgggaggctctggtgtattctgactacctgatcctgctgaattcttgcctatctccatttctctgcctcatggcctcagctgacctgaggactctgctcaggtctgtcttgtcttcctttgccgcagccctgtgcgaggagcgccccggttcatttacacctacagaacctcagactcaactcgactctgaggggcccactctgccagaaccaatggctgaggcgcagagtcaaatggatccagtggctcagccccaggtcaaccccacactgcagccacggtctgatcctacagctcagccacaactcaatccgacggcacagccacagtccgatccgaccgcacagccacaactgaatttgatggcccagccccagtccgactctgtcgcacaaccccaggccgacactaacgttcaaacaccagcccccgccgcctcctctgtgccctcaccctgtgacgaggcctccccgacgccttcatctcaccccacccccggagcactggaggaccccgccaccccccccgcttcagagggcgagtccccatcctctacccctcctgaagcggcacccggtgccgggccgacttag

SEQ ID NO: 264795 - DNA, 1413 bp, Artificial Sequence
  derived and/or modified sequence
atggacaccacaatggaggcagatctaggagctaccggacaccgtccccgaacggagctggatgatgaagacagctacccgcaggggggttgggatactgtctttctggtggctctcctgctgctgggtctcccggctaacggcctgatggcctggctggcaggttctcaggctcgccatggtgcaggcacaagactggcgctacttctcctgagcctggccctgtctgactttctgttcctggcagctgcggctttccaaatcctcgagatccgccatgggggacactggcccctaggtaccgcagcttgccgcttttactatttcctatggggagtgagttattcctcaggcctatttttattagcagccctctctctggatagatgtctgctggctctgtgcccccactggtaccctggccatcggccagtgagactgccgctgtgggtctgtgccggagtttgggtgctggcaacactattcagcgtgccttggcttgtgttcccagaagctgcggtgtggtggtacgacttggtcatatgtttggacttttgggacagtgaggagctgtccttgaggatgctggaggttctgggtggattcctccccttcctgctgttacttgtatgccatgttctgacccaagccaccgcctgccggacatgccatagacaacagcagcctgcggcttgtagggggttcgccagggtagcccgaactatcttgagtgcttacgtcgtgctgaggctcccctaccagctcgcccagttactgtatctggcattcctatgggacgtatactcagggtacttactgtgggaggccctcgtctattctgattatctgatcctgttgaattcatgcttatcccctttcctgtgcttaatggcatcggccgacctgcgcacgcttttgaggagtgtcttgtccagctttgctgcagcactgtgtgaggagcgcccagggtcatttactccgacagaacctcagacccagttggattcggagggaccaacactgccagaaccgatggccgaagcgcagtcccaaatggatcccgtcgcccagcctcaagtcaaccctacacttcagccacggtcagatccaacggcacagccccagctgaatccgaccgcccagccccagtccgacccgaccgcccagccgcagttgaatctaatggcacagccccagtcagacagcgtcgctcagcctcaggcagacactaacgtccagactcccgctccagctgcttcctcagttccctccccatgcgatgaggctagtcccactccctccagccaccctacacccggtgctctggaagatcctgctacaccacccgctagcgagggagagagtccaagcagcactcctcccgaggcagcaccaggtgccggaccaacatag

SEQ ID NO: 264796 - DNA, 423 bp, Artificial Sequence
  derived and/or modified sequence
atggcctcttatccctacagacagggctgccctggagctgctggccaggcgcccggagccccaccgggaagttactacccaggtcctccaaactcaggaggacagtacggttctggtctgccacccggcggggggtacggaggccctgccccaggcggaccctacggccctcctgcaggcggcggaccctatggccaccccaatccagggatgtttcctagcggaacccctggcggaccatatggcggagccgcacctggtggtccctacggacaaccaccaccctctagctatggcgcccagcagcctggactttacgggcagggcatacatgcggaaggagccgctcccgtttgggacatgttgtccctgtggcagagagaaggggccggcgagctggccagaatgcacaacgcctcatag

SEQ ID NO: 264797 - protein, 1070 aa, Artificial Sequence
  derived and/or modified sequence
MLLNGTPFAFVIDLAALASRREYLKLDKWLTDKIREHGEPFIQACMTFLKRRCPSILGGLAPEKDQPKSAQLPPETLATMLACLQACAGSVSQELSETILTMVANCSNVMNKARQPPPGVMPKGRPPSASSLDAISPVQIDPLAGMTSLSIGGSAAPHTQSMQGFPPNLGSAFSTPQSPAKAFPPLSTPNQTTAFSGIGGLSSQLPVGGLGTGSLTGIGTGALGLPAVNNDPFVQRKLGTSGLNQPTFQQSKMKPSDLSQVWPEANQHFSKEIDDEANSYFQRIYNHPPHPTMSVDEVLEMLQRFKDSTIKREREVFNCMLRNLFEEYRFFPQYPDKELHITACLFGGIIEKGLVTYMALGLALRYVLEALRKPFGSKMYYFGIAALDRFKNRLKDYPQYCQHLASISHFMQFPHHLQEYIEYGQQSRDPPVKMQGSITTPGSIALAQAQAQAQVPAKAPLAGQVSTMVTTSTTTTVAKTVTVTRPTGVSFKKDVPPSINTTNIDTLLVATDQTERIVEPPENIQEKIAFIFNNLSQSNMTQKVEELKETVKEEFMPWVSQYLVMKRVSIEPNFHSLYSNFLDTLKNLITRFFRLCTEMCVEISYRAQAEQQHNPAANPTMIRAKCYHNLDAFVRLIALLVKHSGEATNTVTKINLLNKVLGIVVGVLLQDHDVRQSEFQQLPYHRIFIMLLLELNAPEHVLETINFQTLTAFCNTFHILRPTKAPGFVYAWLELISHRIFIARMLAHTPQQKGWPMYAQLLIDLFKYLAPFLRNVELTKPMQILYKGTLRVLLVLLHDFPEFLCDYHYGFCDVIPPNCIQLRNLILSAFPRNMRLPDPFTPNLKVDMLSEINIAPRILTNFTGVMPPQFKKDLDSYLKTRSPVTFLSDLRSNLQVSNEPGNRYNLQLINALVLYVGTQAIAHIHNKGSTPSMSTITHSAHMDIFQNLAVDLDTEGRYLFLNAIANQLRYPNSHTHYFSCTMLYLFAEANTEAIQEQITRVLLERLIVNRPHPWGLLITFIELIKNPAFKFWNHEFVHCAPEIEKLFQSVAQCCMGQKQAQQVMEGTGAS

SEQ ID NO: 264798 - protein, 1551 aa, Artificial Sequence
  derived and/or modified sequence
MNLDSLSLALSQISYLVDNLTKKNYRASQQEIQHIVNRHGPEADRHLLRCLFSHVDFSGDGKSSGKDFHQTQFLIQECALLITKPNFISTLSYAIDNPLHYQKSLKPAPHLFAQLSKVLKLSKVQEVIFGLALLNSSSSDLRGFAAQFIKQKLPDLLRSYIDADVSGNQEGGFQDIAIEVLHLLLSHLLFGQKGAFGVGQEQIDAFLKTLRRDFPQERCPVVLAPLLYPEKRDILMDRILPDSGGVAKTMMESSLADFMQEVGYGFCASIEECRNIIVQFGVREVTAAQVARVLGMMARTHSGLTDGIPLQSISAPGSGIWSDGKDKSDGAQAHTWNVEVLIDVLKELNPSLNFKEVTYELDHPGFQIRDSKGLHNVVYGIQRGLGMEVFPVDLIYRPWKHAEGQLSFIQHSLINPEIFCFADYPCHTVATDILKAPPEDDNREIATWKSLDLIESLLRLAEVGQYEQVKQLFSFPIKHCPDMLVLALLQINTSWHTLRHELISTLMPIFLGNHPNSAIILHYAWHGQGQSPSIRQLIMHAMAEWYMRGEQYDQAKLSRILDVAQDLKALSMLLNGTPFAFVIDLAALASRREYLKLDKWLTDKIREHGEPFIQACMTFLKRRCPSILGGLAPEKDQPKSAQLPPETLATMLACLQACAGSVSQELSETILTMVANCSNVMNKARQPPPGVMPKGRPPSASSLDAISPVQIDPLAGMTSLSIGGSAAPHTQSMQGFPPNLGSAFSTPQSPAKAFPPLSTPNQTTAFSGIGGLSSQLPVGGLGTGSLTGIGTGALGLPAVNNDPFVQRKLGTSGLNQPTFQQSKMKPSDLSQVWPEANQHFSKEIDDEANSYFQRIYNHPPHPTMSVDEVLEMLQRFKDSTIKREREVFNCMLRNLFEEYRFFPQYPDKELHITACLFGGIIEKGLVTYMALGLALRYVLEALRKPFGSKMYYFGIAALDRFKNRLKDYPQYCQHLASISHFMQFPHHLQEYIEYGQQSRDPPVKMQGSITTPGSIALAQAQAQAQVPAKAPLAGQVSTMVTTSTTTTVAKTVTVTRPTGVSFKKDVPPSINTTNIDTLLVATDQTERIVEPPENIQEKIAFIFNNLSQSNMTQKVEELKETVKEEFMPWVSQYLVMKRVSIEPNFHSLYSNFLDTLKNPEFNKMVLNETYRNIKVLLTSDKAAANFSDRSLLKNLGHWLGMITLAKNKPILHTDLDVKSLLLEAYVKGQQELLYVVPFVAKVLESSIRSVVFRPPNPWTMAIMNVLAELHQEHDLKLNLKFEIEVLCKNLALDINELKPGNLLKDKDRLKNLDEQLSAPKKDVKQPEELPPITTTTTSTTPATNTTCTATVPPQPQYSYHDINVYSLAGLAPHITLNPTIPLFQAHPQLKQCVRQAIERAVQELVHPVVDRSIKIAMTTCEQIVRKDFALDSEESRMRIAAHHMMRNLTAGMAMITCREPLLMSISTNLKNSFASALRVSWLFPWYRYKTYYCLSVIIFFFVYIWHWALPLILNNHHICLMSSIILDCNSVRQSIMSVCFFFFLLYSQHDV

SEQ ID NO: 264799 - DNA, 4656 bp, Artificial Sequence
  derived and/or modified sequence
atgaatctcgatagcctctctctcgcactatcccagatcagctatctcgtcgacaacctgactaagaaaaattaccgcgcttcccagcaggagattcagcacatcgttaaccgacacggccccgaagctgatcgccatctactgcggtgtctgttctcacatgtggacttctccggggatgggaagagctctggtaaagatttccatcagactcaattcctgatacaggagtgcgctctgttgatcaccaagcctaattttatcagcacactctcatacgcaattgacaatcctttgcattatcagaagtcacttaaaccggctccacatctgtttgcgcagctcagcaaggtccttaaactgtccaaagtgcaagaggtgatttttggactagccctcctcaatagtagttcatctgacctacggggttttgctgcccaattcattaaacaaaaacttcccgatttattaaggtcctacatcgacgctgatgtctcaggtaaccaggaaggaggctttcaagatatcgccatcgaagtgctccatttactcttgagccacttgctgttcggtcagaagggagccttcggagtgggacaggagcaaatcgacgcctttctgaaaacgctgcgccgggacttcccccaggagcgctgtcccgtggtgctcgcccccctgctgtaccccgaaaaaagagacatcctgatggatcgtatcttgccagattcgggcggggtagccaaaaccatgatggaatcatcacttgctgatttcatgcaggaggtggggtacggtttttgtgctagtatagaggaatgtaggaatattatcgtacagtttggcgttagagaggtaaccgcagcgcaagtggcccgagtgctgggcatgatggcccgcacccattctgggctgactgatggcattcccctgcagtccatatccgctccgggttccggcatttggagcgatggcaaggacaaatctgatggagcgcaggcccatacctggaacgtggaagtgttgattgacgtgttgaaagagttgaacccaagtcttaattttaaagaggtcacatatgaattagatcatccaggttttcagatccgggatagtaaggggcttcataatgttgtgtacggcatacagcgcggtttaggaatggaagtttttcctgtggatttaatatacagaccatggaaacatgctgagggccaactaagctttattcagcattcgctgatcaatcccgaaatattctgtttcgccgactacccttgccacacagtagcaacagatatcctcaaagccccccctgaggacgacaaccgggagatcgctacctggaagtccctcgaccttattgagtctctgctcaggctcgccgaagtagggcagtatgagcaagtcaagcaactgttctcatttcccatcaagcattgtcctgacatgctggtcttggcattgctgcagatcaatacttcctggcacactctgcggcatgaactcatttccacattaatgcctatctttttgggcaaccaccctaattcagccattatcctccactatgcatggcacgggcaaggtcagagtccctccattaggcagctcatcatgcacgccatggccgagtggtatatgcggggtgaacagtacgaccaagcaaagcttagccgcatactcgatgtcgctcaggatctgaaggctttgagcatgctgctaaacggaacgccttttgccttcgtcatcgatcttgcggccttggccagcaggcgggagtatctgaaattggacaagtggctgacagacaagatacgggagcacggggagcccttcatccaggcgtgcatgacctttctcaagcgacggtgtccgtcaatccttggcggcctcgccccagaaaaggaccagcctaaaagtgctcaactgccgcctgaaaccctggctacaatgctggcgtgcctgcaagcctgcgcagggagtgtgtctcaggagctctccgagacaatcctcactatggttgccaactgctctaacgttatgaacaaggcccgacagccaccccctggggtgatgcccaaagggcgacctcccagtgcctcttccctggatgctatttctcccgtccagatagatccccttgctggaatgacttctctgagcattggagggagtgccgcccctcatactcagtctatgcaaggttttcctccaaatttgggatcagcgtttagtaccccacagtcaccagctaaggcctttcctccattatccacccctaatcagactacagcatttagcggcattggaggattgtcttcccagttgcctgtcggcgggttggggacagggagtctgacagggatcggcactggggctctgggtctgcccgctgtgaacaacgatccgttcgtccagcgcaaacttggtacctccgggctcaaccaaccaacatttcaacagtccaagatgaagccttccgacctttctcaggtctggccggaggccaaccagcacttttctaaggagattgatgatgaggccaatagctatttccagcggatttacaaccatccaccgcatcccaccatgtctgtagacgaggttcttgagatgctacagcgcttcaaggatagcaccatcaaacgcgaacgagaggtctttaattgtatgctgaggaatctgttcgaggaatataggtttttcccacagtatccggacaaggagctgcatattaccgcgtgcttattcggcggaatcattgagaaagggctcgtgacctacatggccttgggtttggctcttcggtatgttctagaggccctgagaaagccatttggcagtaaaatgtattacttcgggatcgcagctctggaccggttcaaaaacagattgaaggactacccacagtattgtcagcatttggcatcaatttcccattttatgcagtttccgcatcatctgcaggagtacatcgaatacggccaacaatccagggatcctcccgttaaaatgcaaggcagcattaccacccccgggtccattgccttggcgcaggcccaggctcaagctcaagtgcctgccaaagctcccctggctggtcaggtctcaaccatggtcaccacctctacaacaactactgtcgcaaagaccgtgaccgtgacaaggcccacaggggtgagttttaaaaaggacgtgcccccgtcaatcaatacaaccaacattgacactcttctcgttgcaactgaccagactgaaaggatcgttgagccccccgaaaatatccaggagaaaattgcatttatatttaataatctctcacagagtaacatgacccagaaggtagaggagcttaaggagacagtgaaggaagagttcatgccatgggtctcccagtaccttgtgatgaaaagagttagcatcgagcccaattttcatagcctctattcaaactttctcgatacactgaaaaatcctgaattcaacaaaatggtactgaacgaaacatacaggaatatcaaggttctgctgacaagtgataaggccgcagctaactttagcgatagatctctgcttaagaatttgggtcattggctcggcatgataactctcgctaaaaacaagccaattcttcacacagatctggatgtcaaaagcttactgctggaggcttacgtgaaaggccagcaagaactgctgtacgttgtgccgtttgtcgcgaaagtcctggagagcagtatcaggtccgtagtgttccgcccccctaatccctggacaatggccataatgaatgtgctggccgagctgcatcaagaacacgaccttaaactgaacctgaagtttgagatcgaggttctctgtaagaatctggcactcgacatcaatgaattgaaacctggcaatttgctcaaagacaaggacagactgaagaatttggatgagcagctctctgcccctaagaaggacgtgaaacagcccgaggagttgcctccaattacgaccacgactacttcaactactccagccaccaacacaacttgcaccgcaacggttccaccccagcctcaatattcataccacgatattaacgtatattccctcgccggattagctccccatattacgcttaatccgactatcccgctctttcaggcccatccccagttgaagcagtgtgtgaggcaggccattgagagagctgtgcaggaattggtccatcccgttgtagatcggagcatcaagattgccatgacaacctgcgagcaaatcgtaaggaaggactttgctctggattctgaagagtcgcggatgaggatcgcagctcaccatatgatgaggaatctaactgccggcatggcgatgatcacatgcagggagccacttctgatgtctatatctactaacctgaaaaattcctttgcctccgctcttagggtcagttggctcttcccatggtaccgctacaaaacttattactgtctctcagtgattatcttcttcttcgtatacatctggcattgggcccttccattgatcctcaataatcaccacatctgcctgatgtctagcataatcctcgactgcaattcagtccgccagtcaattatgagcgtctgcttcttcttcttcttgctctattcacagcacgatgtctag

SEQ ID NO: 264800 - DNA, 4656 bp, Artificial Sequence
  derived and/or modified sequence
atgaacctggacagcctgagcctggccctgagccagatctcctacctggtggacaacctgaccaagaagaactaccgggccagccagcaggagatccagcacatcgtgaacagacatggccctgaggccgacagacacctgctgcgctgcctcttcagccacgtggacttctctggagatggcaagagcagcggcaaggacttccaccagacccagttcctgatccaggagtgtgccctgctgatcaccaagcccaacttcatcagcaccctgtcctatgccatcgacaaccccctgcactaccagaagagcctgaagccagccccccacctgtttgcccagctgagcaaggtgctgaagctgagcaaggtgcaggaggtgatcttcggcctggccctgctgaacagcagcagcagtgacctgcggggctttgctgcccagttcatcaagcagaagctgcctgacctgctgcggagctacattgatgctgatgtgtctggcaaccaggagggcggcttccaggacatcgccatcgaggtgctgcacctgctgctgagccacctgctgtttggccagaagggggccttcggcgtgggccaggagcagattgatgccttcctgaagaccctgcggcgggacttcccccaggagcgctgccctgtggtgctggcccccctgctgtacccagagaagagggacatcctgatggaccgcatcctgcctgattctggaggagtggccaagaccatgatggagagcagcctggccgacttcatgcaggaggtgggctacggcttctgtgccagcattgaggagtgcaggaacatcatcgtgcagtttggagtgcgggaggtgacagctgcccaggtggcccgggtgctgggcatgatggcccggacccacagcggcctgacagatggcatccccctgcagagcatcagcgcccctggcagcggcatctggagcgatggcaaggacaagagtgatggagcccaggcccacacctggaatgtggaggtgctgattgatgtgctgaaggagctgaaccccagcctgaacttcaaggaggtgacctatgagctggaccaccctggcttccagatccgggacagcaagggcctgcacaacgtggtgtatggcatccagaggggcctgggcatggaggtgtttcctgtggacctgatctaccggccctggaagcacgccgagggccagctgtccttcatccagcacagcctcatcaaccctgagatcttctgctttgctgactacccctgccacacagtggccacagacatcctgaaggcccccccagaagatgacaaccgggagatcgccacctggaagagcctggacctgattgagagcctgctgcggctggccgaggtgggccagtatgagcaggtgaagcagctgttctccttccccatcaagcactgcccagacatgctggtgctggccctgctgcagatcaacacctcctggcacaccctgcggcatgagctgatcagcaccctgatgcccatcttcctgggcaaccaccccaacagcgccatcatcctgcactacgcctggcacggccagggccagagccccagcatccggcagctgatcatgcacgccatggccgagtggtacatgagaggagagcagtatgaccaggccaagctgagccgcatcctggatgtggcccaggacctgaaggccctgtccatgctgctgaatggcaccccatttgcctttgtgattgacctggccgccctggccagcagaagagagtacctgaagctggacaagtggctgacagacaagatccgggagcacggggagcccttcatccaggcctgcatgaccttcctgaagaggcgctgccccagcatcctgggcggcctggcccctgagaaggaccagcccaagagcgcccagctgcccccagagaccctggccaccatgctggcctgcctgcaggcctgtgccggctctgtgtcccaggagctgtctgagaccatcctgaccatggtggccaactgcagcaatgtgatgaacaaggcccggcagcccccacctggggtgatgcccaagggccggcccccatctgccagcagcctggatgccatcagccctgtgcagattgaccccctggccggcatgaccagcctgagcatcggcggcagcgctgccccccacacccagagcatgcagggcttcccccccaacctgggcagcgccttcagcaccccccagagccctgccaaggccttcccccccctgagcacccccaaccagaccacagccttctctggaattggaggcctgagcagccagctgcctgtgggcggcctgggcaccggcagcctgactggaattggaactggagccctgggcctgcctgctgtgaacaatgacccctttgtgcagaggaagctgggcaccagcggcctgaaccagcccaccttccagcagagcaagatgaagcccagcgacctgagccaggtgtggccagaggccaaccagcacttcagcaaggagattgatgatgaggccaacagctacttccagaggatctacaaccaccccccccaccccaccatgtctgtggatgaggtgctggagatgctgcagcgcttcaaggacagcaccatcaagcgggagcgggaggtgttcaactgcatgctgaggaacctgtttgaggagtaccgcttcttcccccagtacccagacaaggagctgcacatcacagcctgcctgtttggaggcatcatcgagaagggcctggtgacctacatggccctgggcctggccctgcgctacgtgctggaggccctgaggaagcccttcggcagcaagatgtactactttggaattgctgccctggaccgcttcaagaaccggctgaaggactacccccagtactgccagcacctggccagcatcagccacttcatgcagttcccccaccacctgcaggagtacatcgagtatggccagcagagccgggacccccctgtgaagatgcagggcagcatcaccaccccaggcagcatcgccctggcccaggcccaggcccaggcccaggtgcctgccaaggcccccctggccggccaggtgtccaccatggtgaccaccagcaccaccaccaccgtggccaagacagtgacagtgacccggcccaccggggtgtccttcaagaaggatgtgcccccatccatcaacaccaccaacatcgacaccctgctggtggccacagaccagacagagcgcatcgtggagcccccagagaacatccaggagaagatcgccttcatcttcaacaacctgagccagagcaacatgacccagaaggtggaggagctgaaggagaccgtgaaggaggagttcatgccctgggtgtcccagtacctggtgatgaagagggtgtccattgagcccaacttccacagcctgtacagcaacttcctggacaccctgaagaaccctgagttcaacaagatggtgctgaatgagacctacagaaacatcaaggtgctgctgaccagtgacaaggctgctgccaacttcagtgacaggagcctgctgaagaacctgggccactggctgggcatgatcaccctggccaagaacaagcccatcctgcacacagacctggatgtgaagagcctgctgctggaggcctacgtgaagggccagcaggagctgctgtatgtggtgccctttgtggccaaggtgctggagagcagcatccgctctgtggtgttccggccccccaacccctggaccatggccatcatgaatgtgctggccgagctgcaccaggagcatgacctgaagctgaacctgaagtttgaaattgaggtgctgtgcaagaacctggccctggacatcaatgagctgaagccaggcaacctgctgaaggacaaggaccggctgaagaacctggatgagcagctgagcgcccccaagaaggatgtgaagcagcctgaggagctgccccccatcaccaccaccaccaccagcaccaccccagccaccaacaccacctgcacagccaccgtgcccccccagccccagtacagctaccatgacatcaacgtgtacagcctggccggcctggccccccacatcaccctgaaccccaccatccccctcttccaggcccacccccagctgaagcagtgtgtgcggcaggccatcgagagagctgtgcaggagctggtgcaccctgtggtggacaggagcatcaagatcgccatgaccacctgtgagcagatcgtgaggaaggactttgccctggacagcgaggagagcaggatgagaattgctgcccaccacatgatgaggaacctgacagctggcatggccatgatcacctgccgggagcccctgctgatgagcatcagcaccaacctgaagaacagctttgccagcgccctgcgggtgtcctggctgttcccctggtaccgctacaagacctactactgcctgagcgtcatcatcttcttctttgtgtacatctggcactgggccctgcccctcatcctgaacaaccaccacatctgcctgatgagcagcatcatcctggactgcaacagcgtgcggcagagcatcatgtctgtgtgcttcttcttcttcctgctgtacagccagcatgatgtgtag

SEQ ID NO: 264801 - DNA, 4656 bp, Artificial Sequence
  derived and/or modified sequence
atgaacctggacagcctgagcctggccctgagccagatcagctacctggtggacaatctgacaaagaaaaactaccgggcaagtcaacaggaaatccagcacatcgtgaatcggcacggaccagaggcagatcgtcatctgctgaggtgcctattttctcatgtggacttctctggtgacggtaagtcatcaggtaaggactttcaccagacccagtttctgattcaggagtgcgcattgctgattacgaaacctaactttatttccacgctgtcatacgcaatcgataatcccctccactaccaaaagtcgctgaagcctgccccacatctctttgctcagctgtctaaagttctcaaattgagcaaggttcaggaggtgatattcggcctagccctcttgaatagtagtagttccgaccttaggggcttcgccgcccagtttattaagcagaagcttcccgacctgttacggagttatattgatgccgatgtatctggtaatcaggagggaggttttcaggacatcgcaattgaggtcctgcacctgctgctctctcacctgctgttcggccagaaaggtgccttcggcgtgggccaggagcagatcgacgccttcctgaaaacactacgtcgcgatttcccacaggaaaggtgccccgttgttctggcgcctttattgtaccccgagaaacgcgacatcctaatggaccgcattctcccagatagtgggggggttgccaagaccatgatggagtcttcgctcgcggactttatgcaggaagtgggatatggcttttgtgccagtattgaggaatgtaggaatatcatcgtacaatttggcgttcgagaagtgaccgcagcccaggttgccagggtacttgggatgatggctcgcacccatagtggccttaccgatggtatccctcttcagagtatctcggcccctggaagcgggatctggagcgacggaaaggataagagcgacggggcacaggctcatacctggaatgtagaggtgctcatcgacgtgctgaaagagctgaacccttcgcttaacttcaaggaggtgacatacgaactcgatcaccctggttttcagataagagattcaaaaggactccacaacgtggtgtatggtatccaaagaggactgggcatggaagtgttccccgtcgatctgatctacagaccctggaaacatgccgaggggcagctgtcattcattcagcattccctgatcaatccagagattttctgctttgccgactatccatgccacaccgtcgctaccgatatactgaaggccccgccggaagacgataacagagaaattgccacctggaaatctcttgacctcatcgaaagcctgttacgtctcgccgaagtaggacagtacgagcaggttaaacagctgttttcgtttcccatcaagcactgtcccgacatgctggtccttgcgctcctccagattaataccagctggcatacacttaggcacgagctcatttcaacactgatgccaatctttctggggaatcacccgaatagcgctataatattgcactacgcatggcacggacagggacagtctcctagcattcgccagctgattatgcatgcaatggctgagtggtacatgaggggcgaacagtacgaccaggctaagcttagtagaatcttggatgtggcacaggacctgaaggcccttagcatgctcctcaacggcacaccctttgcattcgttatcgacctagcagccctcgcctcccgaagggagtatctgaagttggacaagtggcttacagacaaaatccgagagcacggcgaaccgtttatacaggcttgcatgacctttctgaaaaggaggtgccctagcattctgggggggctcgccccggagaaggaccagccaaaatcagcccagctgccacccgagaccctggcaactatgctggcatgtctgcaagcctgtgctggtagcgtttctcaggagttaagcgagacaatcttgactatggtggctaactgcagcaacgtgatgaacaaagccaggcagcctccacctggtgtgatgcccaaaggccggccgccctctgcatccagcctagacgccatcagccccgtccaaattgatccgcttgccggcatgaccagcctgtctatcggcggctccgctgccccacatactcagtctatgcaggggtttccccctaatctcgggtcagccttcagcacaccacagagccccgccaaagcatttcccccacttagtacccctaaccaaaccactgcttttagcggaatcggcggcctgtcttctcaacttccagtgggcggcctgggcaccggatccctgaccgggattggaacgggggcactgggtctgcccgcagtcaataatgacccctttgtccagagaaaactaggtacctccggtcttaatcagcctaccttccagcagtccaaaatgaaaccgtcagatttatcacaggtttggcctgaggcgaaccagcatttctctaaagagattgacgacgaggcaaattcttattttcagagaatctataaccaccctccccaccccactatgtccgtggatgaagtacttgagatgctccagcgattcaaagattcaaccatcaagcgggagagggaagttttcaactgcatgctgcgcaacctcttcgaggaataccgcttcttcccacaataccctgataaggaactccatattactgcttgtcttttcggaggaataatcgaaaaagggcttgttacctacatggctttgggactggctctgcgttacgttctggaagctcttaggaaaccatttggcagcaaaatgtactatttcggcatcgccgcactggacagattcaagaacaggctcaaggattatccgcagtactgccaacacctggccagcatctctcacttcatgcagttcccacatcaccttcaggagtacatcgaatacggccaacagtcccgggatcctcccgtgaaaatgcagggcagtatcacgacaccagggtcaatcgcactcgcacaagcacaagcccaggcccaagtgcctgccaaggccccgctcgcaggacaggtgtccaccatggtgaccaccagtaccacaactactgttgcaaaaacagtgaccgtgacccgcccaaccggagtgtcattcaagaaagatgtcccacccagcatcaatacgactaacattgacactctgttggtggcgaccgatcagaccgagcggattgtggagccaccagagaacatacaggagaagatcgcatttatctttaataatctgtctcagagtaacatgactcaaaaagtagaggaacttaaggaaacggtgaaagaggaattcatgccttgggtgtctcaatatctggttatgaaacgcgtctccatcgagcctaactttcatagtctttactctaattttctggacactctgaaaaacccagaattcaataagatggtcttgaacgaaacctacaggaacattaaggttctgctgaccagcgataaggccgctgccaacttcagcgatcgaagcctgctgaaaaatttggggcactggctcggaatgatcactttggccaagaacaagccaatcctccacacagacctggatgtcaaaagcctgttgctcgaggcgtatgtgaaaggacagcaggagctgttgtacgtggtgccttttgtggcgaaagtcttagagagctccatacgcagtgtggtgtttcgtccacctaatccctggacaatggcaatcatgaatgttctggcggagctgcaccaggaacacgacctcaaactgaatcttaagtttgagattgaagtgctgtgtaaaaatctggccctagacatcaacgagctgaagccaggcaaccttctcaaggacaaagatcggctgaaaaacctagatgagcagctttcagctccaaaaaaagacgttaaacaaccagaagagctgccaccaattactaccaccactacatccacaacaccagccactaacacgacatgtactgccaccgtccctccccagcctcaatacagctatcacgatattaacgtgtattccctggccgggctcgccccacacatcacccttaaccctactatcccgctgtttcaggctcatccccaacttaaacagtgcgtgcggcaggccattgaacgcgcggtccaggaactcgtacaccctgtggtggaccgaagcataaagatagcgatgacaacctgtgagcaaatcgtgcggaaagatttcgcactggattccgaagagagccgtatgagaatcgccgcccaccacatgatgcgaaacctgaccgctggcatggctatgatcacatgtcgggaaccactacttatgagtatctccacgaaccttaagaatagtttcgcctcagccttgagggtctcttggctcttcccctggtatagatacaagacctactactgcctctctgtaatcatcttcttctttgtctatatttggcattgggccttgcccctgattctgaacaatcatcacatctgcctgatgtctagcataatccttgattgcaatagcgtccgacagagcatcatgtctgtctgttttttcttcttcctcctgtactctcagcatgacgtgtag

SEQ ID NO: 264802 - DNA, 4656 bp, Artificial Sequence
  derived and/or modified sequence
atgaaccttgacagtctgagcctggcactaagtcaaatcagctacctggtggacaatctgactaagaagaattaccgtgcctcgcaacaggaaatccaacacatcgtcaatagacatggtccagaagcagacaggcacttactgcgctgtcttttcagtcatgtcgatttctccggcgacggtaaaagttctggcaaggactttcaccaaacccaatttttgattcaggagtgcgctctgctaatcacgaaacctaattttatctcgaccctgtcctacgccatcgacaaccccctacactaccaaaagtctctgaagccagctccccacctattcgctcagctttctaaagtgctgaaactgagtaaagtccaggaggtgatctttggcctggcacttttgaactccagctcctctgacctccggggatttgccgctcagtttataaaacagaaactgcctgatctgctccgctcctacatcgacgctgatgtgtctggcaaccaggaagggggatttcaggacatcgcaattgaggtactgcacctgctcctgtctcacctgctgttcggtcagaaaggcgcatttggcgtcggccaggaacagatagacgctttcttgaagacgctgcggcgtgatttcccacaggagcgatgccctgtcgtgttagctcccttgctgtaccccgaaaaacgggacatcctgatggaccgcattctgcccgactctgggggagtggctaagactatgatggagtcatccctggccgacttcatgcaggaagtgggttatgggttttgcgcaagtattgaggagtgccggaacattatcgtccaattcggcgttcgtgaagtgactgcggcacaggtggcaagagttctaggcatgatggcaagaacacactccgggcttactgatggcataccacttcagtccatctccgcgcctggttcaggcatctggtcggatggtaaggataaaagcgacggagctcaggcccatacctggaacgtggaggttctgatcgacgtgctgaaggagctaaatccctctctgaattttaaggaagttacctatgagttggaccaccccggattccagatccgcgacagtaaagggttacataacgttgtgtatggcattcagcggggattgggaatggaagtctttcctgtggatcttatatacaggccatggaaacatgccgaggggcaattatcctttatacagcacagtctgatcaatcccgagattttctgctttgccgactatccttgccacaccgtggcgactgacatcttgaaggcaccacccgaggatgataatagggagattgcgacatggaaatcactcgacctgattgagtccctgctgcgtctagctgaggtaggtcagtatgaacaggtgaaacaattattctcattccccataaagcactgtcccgatatgctggtgctggcgctgctacagattaacaccagttggcacacactgcgacatgaattgatctctacactcatgcctatcttcctcggtaatcacccaaactcagccattatcttgcactacgcttggcacggccagggtcagtccccatcaattcggcaactcatcatgcacgctatggctgagtggtacatgcgcggagaacagtacgatcaagcaaaactttctcgcatactcgacgtggcccaagatcttaaagccttgtccatgctgctgaatgggaccccctttgcgttcgtgatcgacctggccgctctggcctctcgcagagaatatctgaagctggacaagtggctaaccgacaagattcgggagcacggcgaaccttttatacaggcctgtatgacatttcttaagcgcaggtgtccatccatcttaggcggtctcgcacccgagaaggatcagccaaaatctgctcaactgccaccagagaccctcgccaccatgctcgcatgtctgcaggcatgcgccggatccgtgtctcaggaactcagtgagacaatcctgaccatggtggcgaattgctcaaacgttatgaataaggcacggcagccaccgcctggggtgatgccaaaaggtcggccaccgtctgctagctctctggacgcaatttcccccgttcagatagacccattagctggcatgacatcacttagcatagggggatctgccgctccccacacgcaatccatgcaggggtttccgcctaaccttggcagtgccttctctacaccccagtcccctgccaaagcctttccaccactcagcacgccgaaccagaccacagccttttcgggaatcggaggcctttccagccagttgcctgttggtggtttaggaaccggcagtttgaccggaattggaactggggctctcggcttgccagccgtgaataatgaccccttcgtccagcggaagctgggaaccagtggactaaaccagcctacgtttcagcagagcaagatgaagccaagcgacctgtctcaagtgtggcccgaggccaatcagcatttttccaaggaaattgatgatgaggcaaatagttacttccaacggatctacaatcacccccctcacccaacaatgagtgtggatgaggtgctggaaatgctccaaagatttaaagactctactattaaacgtgagcgcgaagtgtttaactgcatgctcaggaaccttttcgaggaatatcgcttttttcctcaataccctgacaaagagctccacataacagcttgccttttcggcggaattatagagaagggcctggtgacgtacatggcacttggccttgctctgcgttacgtgctggaagccctgcggaaaccgtttgggtcaaagatgtactactttggaattgccgcactggacaggtttaaaaacaggctgaaagattatccccagtattgccaacacctcgctagtattagccacttcatgcagtttccacaccatctacaagaatacatcgagtacggacaacagagcagggatcccccagtcaaaatgcaggggagcattactacgccagggtcaatagccctcgcccaggcccaggcacaggctcaggtgcctgcgaaggccccactcgctggccaggtcagcacaatggttacaacctctaccacaacaactgtggctaagaccgtgacagtaacgagacctacaggcgtgtcctttaaaaaggacgttcccccttctataaatactaccaatattgatacactgctcgtggccacagaccagacagaacgtattgtggaacctccagagaacattcaggaaaaaattgccttcatcttcaataatctgtcacaaagcaacatgacacaaaaggtcgaggaactcaaagaaacagtgaaggaggagtttatgccgtgggtttctcaatatctggtcatgaaacgagtgagtatcgaacctaactttcactcactttattctaatttccttgatacactgaagaacccagaatttaacaagatggtgctcaacgaaacctacagaaatattaaggtgttgctgacctctgataaggcagcggctaacttttcagatcgcagcttgttgaaaaacctgggacattggctgggcatgattaccctggcaaagaataagccgatcctccatacagatctagatgtgaagtctttacttctggaggcatacgtaaaaggtcagcaggagctgctgtacgtggtgccttttgttgccaaagtcctagaaagctccataaggtccgttgtcttccggcctcccaatccctggactatggcgatcatgaatgtgcttgctgaattgcaccaagagcacgacctgaaacttaacctgaaattcgagattgaggtcctgtgcaagaatctcgctttggacatcaacgagttgaaacccggtaatctcctaaaggataaggaccgactgaaaaatctggatgagcagttgagcgcaccaaagaaggatgttaagcagccggaggagctcccccctattaccactactacgaccagcaccacgccagctacaaacacgacctgtacagccaccgtgcccccacagcctcagtattcctatcatgacatcaatgtctacagcttagccggtctagcacctcatataaccctgaaccccacgattcccctgtttcaggcacatccgcagctcaagcagtgcgtgaggcaggcaatagagcgcgctgtgcaggaacttgtccaccccgtagtcgatagatctatcaaaatagctatgaccacttgtgagcagatagtgaggaaggatttcgctctagactcagaggagagcaggatgaggatagcagctcaccatatgatgcgaaaccttactgccggtatggctatgatcacctgtagggaaccccttttgatgtctatcagcactaacttaaaaaactccttcgcaagcgcacttcgtgtgtcttggctgtttccatggtatagatataaaacttattactgtctgtcagtgattatcttctttttcgtctacatatggcattgggccctgcccctgattttaaacaatcatcacatatgtctcatgtcttccatcatcctggactgtaactcggttcggcagtcgattatgtctgtgtgttttttctttttcctactttattctcagcatgacgtgtag

SEQ ID NO: 264803 - DNA, 4997 bp, Artificial Sequence
  derived and/or modified sequence
gcgacctccggcgccattttgtagagaaacaagcggagttaaccgaagagggggtcgaggagagccggagtcggggacccaggagtttcctgtgtccagcgctgccggagccgcctgaggtgccatgtttcagaacagagtaagacccctggtaaagaagaactgaagatattatacagataccagatatagcctaattacaaagaaagcattaacctgcctctgaggtgactaaaggggaataatggtgattttgcgccgggctcggccgcctgcttccgccccaaccagcaatgaatcttgactcgctctcgctggccttgtctcaaatcagctacctggtggacaatttaaccaagaaaaattaccgagccagccagcaggaaatacagcatattgtgaatcggcacggtcctgaggcagacaggcatttattacgctgcctattttcgcatgtggatttcagtggcgatggtaaaagcagtggcaaagatttccatcagactcagtttctgattcaggagtgtgcgttgctgattacaaagccaaattttatctcgacgctgtcctatgccattgataatccattgcactatcagaagagtttaaagcctgcaccccacttatttgcccagctgagtaaagtgctcaaattaagcaaagtacaagaggtaatttttggccttgccctgttgaattcttccagctcagatcttagaggtttcgctgcccagtttatcaaacagaagcttccagatcttctgcgttcttacattgacgcagacgtcagtggaaatcaagaaggtggcttccaagatatagcaatagaggtcctacacctcctcctctcccatctcctctttgggcagaagggagcctttggagttggacaagaacagatagacgcttttcttaagacgctgcgcagagattttccccaagaacgctgtcccgtggtgctcgcaccacttttataccctgaaaaacgggacattctaatggacaggatcctgcctgattccggaggggtagctaaaaccatgatggagagctctttggctgatttcatgcaagaagtaggctatggcttttgtgcaagtattgaagaatgtcgcaatataatcgtgcagtttggtgttcgggaggtcacagctgcccaggttgcaagggttttgggaatgatggctcgaactcattcaggattaacagatggcattccattacagagtatttctgctccgggcagtgggatctggagtgatgggaaagataaaagtgatggagcacaggcacacacatggaatgtagaagtcttgattgacgttcttaaagaactgaatccaagtttgaatttcaaggaagtaacttatgaactggaccatcctggatttcaaattcgtgacagtaaaggacttcataatgtggtttatggcattcagaggggtttgggtatggaagtgttcccagtagacctcatatatagaccttggaaacatgctgaaggccagctctccttcattcaacattcccttataaatccagagatcttctgttttgctgactatccctgtcatactgttgccactgatattctgaaagcaccaccagaggatgacaatcgagaaattgccacatggaagagcttggatttgattgaatctctgctgaggcttgcagaggttgggcagtatgagcaagtcaaacagctcttcagcttccctatcaaacactgtccagacatgctggtattggccttactacaaattaacacctcttggcataccttgcgccatgaacttatctccactctgatgccaattttccttggaaaccatcctaactcagctattattttgcactatgcatggcatgggcagggacagtctccctcaattcgccaacttatcatgcatgcaatggcagaatggtacatgagaggggagcagtatgatcaggccaaattgtctcgaatacttgatgtggcccaggacttgaaggccttgtcaatgctgctaaatggtactccatttgcctttgttattgaccttgctgcacttgcttcacgtcgtgaatacctcaaacttgataagtggctcacagataaaattcgagagcatggggagccttttatccaggcgtgtatgacttttttaaagagacggtgtccttctattttgggcggacttgccccagaaaaagaccagcccaaaagtgctcaacttcctccagaaactttggcgacaatgttggcctgtctgcaagcttgtgcagggagtgtttctcaggagctatcagaaactatcctcaccatggtagccaattgcagtaatgttatgaataaggccagacaaccaccacctggagttatgccaaaaggacgtcctcctagtgctagcagcttagatgccatttctcctgttcagattgaccctcttgctggaatgacatctcttagtataggtggttcagctgcccctcacacccagagtatgcagggttttcctccaaatttgggttctgcattcagtacccctcagtcaccagcaaaagcatttccacccctttcaacccccaatcagaccactgcattcagtggtattggaggactttcatcacagcttccagtaggtggtcttggcacaggcagcctgactggtataggaactggtgctcttggactccctgcagtgaataacgacccttttgtacagaggaaactgggcacctctggactgaatcagcctacattccagcagagtaagatgaaaccttcggacttgtctcaggtgtggccagaggcaaaccagcactttagtaaagagatagatgatgaagcaaacagctatttccagcgaatatataatcatccaccacatccaaccatgtctgttgatgaggtattagaaatgctgcagagatttaaagactctactataaagagggaacgagaagtatttaactgtatgctaaggaacttgtttgaagaatatcgtttttttccccagtatcctgataaagagttacatataacagcctgcctatttggtggtataattgagaaaggactggtcacttacatggcactaggtctggctctacgatatgttcttgaagccttacgcaagccttttggatccaaaatgtattatttcgggattgctgcactagatagatttaaaaacagattgaaggactatccccagtattgtcagcatttggcttctatcagtcactttatgcaatttccacatcatttacaggagtatattgagtatggacagcagtctagagatcctcctgtgaaaatgcaaggctctatcacaacccctggaagtattgcactggctcaggcccaggctcaggcccaggttccagcaaaagctcctcttgctggtcaagttagcactatggtaaccacctcaacaactaccactgttgctaaaacggttacggtcaccaggccaactggagtcagctttaagaaagatgtgccaccttctattaatactacaaatatagatacgttgcttgtggccacagatcaaactgagagaattgtggagcccccagaaaatatccaggagaaaattgcttttattttcaataatctctcacagtcaaatatgacacaaaaggttgaagagctaaaggaaacggtgaaagaagaatttatgccttgggtttcacagtatctggttatgaagagagtcagtattgagccaaactttcatagcctgtattcaaacttccttgacacgctgaagaatcctgaatttaacaagatggttctgaatgagacctacagaaacattaaagtgctcctgacctctgataaagctgcagccaatttctcagatcgttctttgctgaagaacttgggacattggctaggaatgatcacattagctaaaaacaaacccatcttacacactgacttggatgtgaaatcattgctgctagaggcttatgttaaaggacaacaagaattgctctatgtagtgccctttgttgccaaagtcttagaatctagcattcgtagtgtggtttttaggccaccaaacccttggacaatggcaattatgaatgtattagctgagctacatcaggagcatgacttaaagttaaacttgaagtttgaaatcgaggttctctgcaagaaccttgcattagacatcaatgagctaaaacctggaaacctcctaaaggataaagatcgcctgaagaatttagatgagcaactctctgctccaaagaaagatgtcaagcagccagaagaactccctcccatcacaaccacaacaacttctactacaccagctaccaacaccacttgtacagccacggttccaccacagccacagtacagctaccacgacatcaatgtctattcccttgcgggcttggcaccacacattactctgaatccaacaattcccttgtttcaggcccatccacagttgaagcagtgtgtgcgtcaggcaattgaacgggctgtccaggagctggtccatcctgtggtggatcgatcaattaagattgccatgactacttgtgagcaaatagtcaggaaggattttgccctggattcggaggaatctcgaatgcgaatagcagctcatcacatgatgcgtaacttgacagctggaatggctatgattacatgcagggaacctttgctcatgagcatatctaccaacttaaaaaacagttttgcctcagcccttcgtgtaagttggctatttccttggtataggtacaaaacgtattactgcttgtctgtaataatttttttctttgtctatatatggcactgggcgttaccacttattcttaataatcaccatatttgtttgatgtcttccatcattttagattgtaattctgtgaggcaaagcatcatgtctgtgtgtttttttttttttctgttatattctcaacacgatgtttgacagatagtagatacccaaatatttgttggtttaaataaattaagattt

SEQ ID NO: 264804 - DNA, 4656 bp, Artificial Sequence
  derived and/or modified sequence
atgaacctggacagcctgagcctggccctgagccagatcagctacctggtggacaacctgaccaagaagaactacagagccagccagcaggagatccagcacatcgtgaacagacacggccccgaggccgacagacacctgctgagatgcctgttcagccacgtggacttcagcggcgacggcaagagcagcggcaaggacttccaccagacccagttcctgatccaggagtgcgccctgctgatcaccaagcccaacttcatcagcaccctgagctacgccatcgacaaccccctgcactaccagaagagcctgaagcccgccccccacctgttcgcccagctgagcaaggtgctgaagctgagcaaggtgcaggaggtgatcttcggcctggccctgctgaacagcagcagcagcgacctgagaggcttcgccgcccagttcatcaagcagaagctgcccgacctgctgagaagctacatcgacgccgacgtgagcggcaaccaggagggcggcttccaggacatcgccatcgaggtgctgcacctgctgctgagccacctgctgttcggccagaagggcgccttcggcgtgggccaggagcagatcgacgccttcctgaagaccctgagaagagacttcccccaggagagatgccccgtggtgctggcccccctgctgtaccccgagaagagagacatcctgatggacagaatcctgcccgacagcggcggcgtggccaagaccatgatggagagcagcctggccgacttcatgcaggaggtgggctacggcttctgcgccagcatcgaggagtgcagaaacatcatcgtgcagttcggcgtgagagaggtgaccgccgcccaggtggccagagtgctgggcatgatggccagaacccacagcggcctgaccgacggcatccccctgcagagcatcagcgcccccggcagcggcatctggagcgacggcaaggacaagagcgacggcgcccaggcccacacctggaacgtggaggtgctgatcgacgtgctgaaggagctgaaccccagcctgaacttcaaggaggtgacctacgagctggaccaccccggcttccagatcagagacagcaagggcctgcacaacgtggtgtacggcatccagagaggcctgggcatggaggtgttccccgtggacctgatctacagaccctggaagcacgccgagggccagctgagcttcatccagcacagcctgatcaaccccgagatcttctgcttcgccgactacccctgccacaccgtggccaccgacatcctgaaggccccccccgaggacgacaacagagagatcgccacctggaagagcctggacctgatcgagagcctgctgagactggccgaggtgggccagtacgagcaggtgaagcagctgttcagcttccccatcaagcactgccccgacatgctggtgctggccctgctgcagatcaacaccagctggcacaccctgagacacgagctgatcagcaccctgatgcccatcttcctgggcaaccaccccaacagcgccatcatcctgcactacgcctggcacggccagggccagagccccagcatcagacagctgatcatgcacgccatggccgagtggtacatgagaggcgagcagtacgaccaggccaagctgagcagaatcctggacgtggcccaggacctgaaggccctgagcatgctgctgaacggcacccccttcgccttcgtgatcgacctggccgccctggccagcagaagagagtacctgaagctggacaagtggctgaccgacaagatcagagagcacggcgagcccttcatccaggcctgcatgaccttcctgaagagaagatgccccagcatcctgggcggcctggcccccgagaaggaccagcccaagagcgcccagctgccccccgagaccctggccaccatgctggcctgcctgcaggcctgcgccggcagcgtgagccaggagctgagcgagaccatcctgaccatggtggccaactgcagcaacgtgatgaacaaggccagacagcccccccccggcgtgatgcccaagggcagaccccccagcgccagcagcctggacgccatcagccccgtgcagatcgaccccctggccggcatgaccagcctgagcatcggcggcagcgccgccccccacacccagagcatgcagggcttcccccccaacctgggcagcgccttcagcaccccccagagccccgccaaggccttcccccccctgagcacccccaaccagaccaccgccttcagcggcatcggcggcctgagcagccagctgcccgtgggcggcctgggcaccggcagcctgaccggcatcggcaccggcgccctgggcctgcccgccgtgaacaacgaccccttcgtgcagagaaagctgggcaccagcggcctgaaccagcccaccttccagcagagcaagatgaagcccagcgacctgagccaggtgtggcccgaggccaaccagcacttcagcaaggagatcgacgacgaggccaacagctacttccagagaatctacaaccaccccccccaccccaccatgagcgtggacgaggtgctggagatgctgcagagattcaaggacagcaccatcaagagagagagagaggtgttcaactgcatgctgagaaacctgttcgaggagtacagattcttcccccagtaccccgacaaggagctgcacatcaccgcctgcctgttcggcggcatcatcgagaagggcctggtgacctacatggccctgggcctggccctgagatacgtgctggaggccctgagaaagcccttcggcagcaagatgtactacttcggcatcgccgccctggacagattcaagaacagactgaaggactacccccagtactgccagcacctggccagcatcagccacttcatgcagttcccccaccacctgcaggagtacatcgagtacggccagcagagcagagacccccccgtgaagatgcagggcagcatcaccacccccggcagcatcgccctggcccaggcccaggcccaggcccaggtgcccgccaaggcccccctggccggccaggtgagcaccatggtgaccaccagcaccaccaccaccgtggccaagaccgtgaccgtgaccagacccaccggcgtgagcttcaagaaggacgtgccccccagcatcaacaccaccaacatcgacaccctgctggtggccaccgaccagaccgagagaatcgtggagccccccgagaacatccaggagaagatcgccttcatcttcaacaacctgagccagagcaacatgacccagaaggtggaggagctgaaggagaccgtgaaggaggagttcatgccctgggtgagccagtacctggtgatgaagagagtgagcatcgagcccaacttccacagcctgtacagcaacttcctggacaccctgaagaaccccgagttcaacaagatggtgctgaacgagacctacagaaacatcaaggtgctgctgaccagcgacaaggccgccgccaacttcagcgacagaagcctgctgaagaacctgggccactggctgggcatgatcaccctggccaagaacaagcccatcctgcacaccgacctggacgtgaagagcctgctgctggaggcctacgtgaagggccagcaggagctgctgtacgtggtgcccttcgtggccaaggtgctggagagcagcatcagaagcgtggtgttcagaccccccaacccctggaccatggccatcatgaacgtgctggccgagctgcaccaggagcacgacctgaagctgaacctgaagttcgagatcgaggtgctgtgcaagaacctggccctggacatcaacgagctgaagcccggcaacctgctgaaggacaaggacagactgaagaacctggacgagcagctgagcgcccccaagaaggacgtgaagcagcccgaggagctgccccccatcaccaccaccaccaccagcaccacccccgccaccaacaccacctgcaccgccaccgtgcccccccagccccagtacagctaccacgacatcaacgtgtacagcctggccggcctggccccccacatcaccctgaaccccaccatccccctgttccaggcccacccccagctgaagcagtgcgtgagacaggccatcgagagagccgtgcaggagctggtgcaccccgtggtggacagaagcatcaagatcgccatgaccacctgcgagcagatcgtgagaaaggacttcgccctggacagcgaggagagcagaatgagaatcgccgcccaccacatgatgagaaacctgaccgccggcatggccatgatcacctgcagagagcccctgctgatgagcatcagcaccaacctgaagaacagcttcgccagcgccctgagagtgagctggctgttcccctggtacagatacaagacctactactgcctgagcgtgatcatcttcttcttcgtgtacatctggcactgggccctgcccctgatcctgaacaaccaccacatctgcctgatgagcagcatcatcctggactgcaacagcgtgagacagagcatcatgagcgtgtgcttcttcttcttcctgctgtacagccagcacgacgtgtag

SEQ ID NO: 264805 - DNA, 339 bp, Artificial Sequence
  derived and/or modified sequence
atggctaaacagccctcggacgtctccagcgagtgcgatcgggaaggccggcagttacagccagcagaaaggccgccacagcttcggcctggcgccccaacctctctccagacagagccacaggaccgaagtcccgctccgatgagctgcgataaatccacccaaacaccatcacctccttgccaggctttcaaccactacctgagcgccatggttgtaatactggaggatataggcgacctgtccctctgtttcggttttatatttaccggcctcgatctgtacgggcatcaccatagtcaggatactgagcaattgaaccacaaagacttcagttag

SEQ ID NO: 264806 - DNA, 339 bp, Artificial Sequence
  derived and/or modified sequence
atggccaagcagcccagtgatgtgtccagtgaatgtgaccgggagggccggcagctgcagcctgctgagaggcctccccagctgcggcctggggcccccaccagcctgcagacagagccccaggacaggagccctgcccccatgagctgtgacaagagcacccagacccccagccccccctgccaggccttcaaccactacctgagcgccatggtggtgatcctggaggacatcggggacctgagcctgtgcttcggcttcatcttcaccggcctggacctgtatggccaccaccacagccaggacacagagcagctgaaccacaaggacttctcctag

SEQ ID NO: 264807 - DNA, 339 bp, Artificial Sequence
  derived and/or modified sequence
atggccaagcagcccagcgacgtgagcagcgagtgcgaccgggagggaagacagctgcaacctgccgaaagacctccgcagttgcgccccggggccccaacctccctccagacggaaccgcaggatcggtctccagctcctatgagctgcgacaagtccactcagaccccatcaccaccgtgccaggcctttaatcactatctaagcgcaatggtggtgattctcgaagacataggcgacctgagtctttgttttggcttcatcttcactggactagacctgtatggacatcatcatagccaggacaccgaacagctcaaccacaaagatttctcctag

SEQ ID NO: 264808 - DNA, 339 bp, Artificial Sequence
  derived and/or modified sequence
atggcgaagcagccctctgatgtgagctctgagtgtgatcgcgagggccgtcagctgcagccggctgagaggccccctcagcttagacccggagccccaacctctctgcagactgagccccaggatcgcagccctgcaccaatgagctgtgacaagagcacacaaaccccctctccaccttgccaagcttttaatcactatctgagcgctatggtggtcatactggaagatatcggcgaccttagcctctgttttgggttcatcttcacgggcctggatctttacggacatcaccactcccaggataccgagcaactcaaccacaaagacttcagctag

SEQ ID NO: 264809 - DNA, 339 bp, Artificial Sequence
  derived and/or modified sequence
atggccaagcagcccagcgacgtgagcagcgagtgcgacagagagggcagacagctgcagcccgccgagagacccccccagctgagacccggcgcccccaccagcctgcagaccgagccccaggacagaagccccgcccccatgagctgcgacaagagcacccagacccccagccccccctgccaggccttcaaccactacctgagcgccatggtggtgatcctggaggacatcggcgacctgagcctgtgcttcggcttcatcttcaccggcctggacctgtacggccaccaccacagccaggacaccgagcagctgaaccacaaggacttcagctag

SEQ ID NO: 264810 - DNA, 756 bp, Artificial Sequence
  derived and/or modified sequence
atgtacagagtgatccaggtgagcgagggccagctggacggccagaccgagggcaccggcgccatcagcggctaccccgccacccagagcatgacccaggccgtgatccagggcgccttcaccagcgacgacgccgtggacaccgagggcaccgccgccgagacccactacacctacttccccagcaccgccgtgggcgacggcgccggcggcaccaccagcggcagcaccgccgccgtggtgaccacccagggcagcgaggccctgctgggccaggccaccccccccggcaccggccagttcttcgtgatgatgagcccccaggaggtgctgcagggcggcagccagagaagcatcgcccccagaacccacccctacagccccaagagcgaggcccccagaaccaccagagacgagaagagaagagcccagcacaacgaggtggagagaagaagaagagacaagatcaacaactggatcgtgcagctgagcaagatcatccccgactgcagcatggagagcaccaagagcggccagagcaagggcggcatcctgagcaaggcctgcgactacatccaggagctgagacagagcaaccacagactgagcgaggagctgcagggcctggaccagctgcagctggacaacgacgtgctgagacagcaggtggaggacctgaagaacaagaacctgctgctgagagcccagctgagacaccacggcctggaggtggtgatcaagaacgacagcaactag

SEQ ID NO: 264811 - DNA, 756 bp, Artificial Sequence
  derived and/or modified sequence
atgtatagggtcatccaggtgtccgagggccagttggatggccagacagaaggcacaggtgcaattagcggatatcccgcaacccagtctatgacacaggctgttatccagggggctttcacgagcgacgatgccgttgacaccgagggcactgccgccgagacccactatacctattttccgagcaccgctgtcggcgacggagcaggtgggacaacttctggatcaacagcggcagtggtaaccacacagggttcagaagccctgctgggccaggcaacccctcccgggactgggcagttttttgtgatgatgagcccccaggaggtgttgcagggcggatcccaacgctcgatagctccccgtactcacccatattctccaaaatccgaagccccacgcaccacaagggatgagaagcggcgcgcacagcacaacgaagtcgagcgacggcgacgggacaagatcaataactggattgtccagctatcgaagatcatcccagattgttcaatggagagcacaaaaagtgggcagagcaaaggaggaatactgtccaaagcgtgcgactatatccaggaactccgccaatctaaccaccgactgtcagaggaacttcagggtctcgaccagctccagttggacaacgacgttctccgccaacaagttgaagatctgaagaacaagaatctgctactccgtgcccagctccgccaccatggcctagaagtagttattaaaaatgattccaattag

SEQ ID NO: 264812 - DNA, 756 bp, Artificial Sequence
  derived and/or modified sequence
atgtacagagtcatccaggtgtctgagggccagctggatggccagacagagggcactggagccatcagcggctacccagccacccagagcatgacccaggccgtcatccagggcgccttcaccagtgatgatgctgtggacacagagggcacagctgctgagacccactacacctacttccccagcacagctgtgggagatggagctgggggcaccaccagcggcagcacagctgctgtggtgaccacccagggcagcgaggccctgctgggccaggccaccccacctggcaccggccagttctttgtgatgatgagcccccaggaggtgctgcagggcggcagccagaggagcatcgcccccaggacccacccctacagccccaagtctgaggcccccaggaccaccagagatgagaagagaagagcccagcacaatgaggtggagaggagaagaagagacaagatcaacaactggatcgtgcagctgagcaagatcatcccagactgcagcatggagagcaccaagagcggccagagcaaaggaggcatcctgagcaaggcctgtgactacatccaggagctgcggcagagcaaccaccggctgtctgaggagctgcagggcctggaccagctgcagctggacaatgatgtgctgcggcagcaggtggaggacctgaagaacaagaacctgctgctgcgggcccagctgcggcaccacggcctggaggtggtgatcaagaatgacagcaactag

SEQ ID NO: 264813 - DNA, 756 bp, Artificial Sequence
  derived and/or modified sequence
atgtaccgggtgatccaggtgagcgagggccagctggacggccagactgaagggacaggggctataagtggataccctgccacccagagcatgacacaggcagtgatccaaggggcttttacaagcgatgatgccgttgacaccgaaggaactgcagctgagacgcattacacatacttcccctccacagcggtgggcgacggcgccggaggaacgactagtgggtcaactgcagccgtagtcacgactcagggcagcgaagctctcctgggacaagccacgcctccaggaaccggacaattctttgttatgatgtccccccaagaggttttacagggtggctcacaaagaagcatcgcccctcggactcatccatattctcccaagtctgaggctcctagaaccacacgtgatgaaaagcgacgcgcccagcacaatgaagtggagcgacggagacgagataagatcaacaattggatcgtacaactgtccaaaatcattccggattgctcaatggagagtaccaagtcgggccaaagtaaaggcgggattctgtcaaaggcgtgcgactacattcaggagctgcggcagtccaatcacaggctgagtgaagaactgcagggcttggatcagttacagctggataatgacgtcctgaggcagcaagtggaagatctgaagaacaagaacttactgttgagagcccagctcagacaccatggcctcgaagtggtgattaagaacgattcaaactag

SEQ ID NO: 264814 - DNA, 756 bp, Artificial Sequence
  derived and/or modified sequence
atgtatagagtgatccaggtgtcggagggtcagctcgatggtcaaacagaggggacaggagccatctccggctaccccgcaacacagagcatgacccaggcagtcatccagggcgcttttacttcagacgatgccgttgataccgaagggactgcggcagagacacattatacatattttccctctaccgcagttggggacggtgcaggtggcactacttctggctcaactgccgctgtggttaccactcagggctcagaggcactcctcggacaggcaactccccctggcactggacaattctttgtaatgatgtcacctcaggaagttctgcaaggaggtagccaacgatcaatagcccctcggacacatccctattctcctaagtctgaagcccctagaaccacaagagatgaaaagcggagagcccagcataacgaggtggagagaaggagaagagacaagatcaacaactggatcgtgcagctgtcaaagatcattccagactgttctatggaatcgacaaaaagcgggcagtcaaaggggggtatactgtcgaaggcgtgcgactacatccaggagctgcgtcagtccaaccaccggttatccgaagagctgcaaggcctggatcaactccagctggataacgacgtcctgagacagcaagtcgaagatctcaagaacaagaaccttctgctgagagctcaactgcgccaccacggactggaagtggtcattaagaatgactccaattag

SEQ ID NO: 264815 - protein, 367 aa, Artificial Sequence
  derived and/or modified sequence
MSRSRHLGKIRKRLEDVKSQWVRPARADFSDNESARLATDALLDGGSEAYWRVLSQEGEVDFLSSVEAQYIQAQAREPPCPPDTLGGAEAGPKGLDSSSLQSGTYFPVASEGSEPALLHSWASAEKPYLKEKSSATVYFQTVKHNNIRDLVRRCITRTSQVLVILMDVFTDVEIFCDILEAANKRGVFVCVLLDQGGVKLFQEMCDKVQISDSHLKNISIRSVEGEIYCAKSGRKFAGQIREKFIISDWRFVLSGSYSFTWLCGHVHRNILSKFTGQAVELFDEEFRHLYASSKPVMGLKSPRLVAPVPPGAAPANGRLSSSSGSASDRTSSNPFSGRSAGSHPVPESKQNKTKTKKQTTLWFLMAF

SEQ ID NO: 264816 - DNA, 1104 bp, Artificial Sequence
  derived and/or modified sequence
atgagcagaagcagacacctgggcaagatcagaaagagactggaggacgtgaagagccagtgggtgagacccgccagagccgacttcagcgacaacgagagcgccagactggccaccgacgccctgctggacggcggcagcgaggcctactggagagtgctgagccaggagggcgaggtggacttcctgagcagcgtggaggcccagtacatccaggcccaggccagagagcccccctgcccccccgacaccctgggcggcgccgaggccggccccaagggcctggacagcagcagcctgcagagcggcacctacttccccgtggccagcgagggcagcgagcccgccctgctgcacagctgggccagcgccgagaagccctacctgaaggagaagagcagcgccaccgtgtacttccagaccgtgaagcacaacaacatcagagacctggtgagaagatgcatcaccagaaccagccaggtgctggtgatcctgatggacgtgttcaccgacgtggagatcttctgcgacatcctggaggccgccaacaagagaggcgtgttcgtgtgcgtgctgctggaccagggcggcgtgaagctgttccaggagatgtgcgacaaggtgcagatcagcgacagccacctgaagaacatcagcatcagaagcgtggagggcgagatctactgcgccaagagcggcagaaagttcgccggccagatcagagagaagttcatcatcagcgactggagattcgtgctgagcggcagctacagcttcacctggctgtgcggccacgtgcacagaaacatcctgagcaagttcaccggccaggccgtggagctgttcgacgaggagttcagacacctgtacgccagcagcaagcccgtgatgggcctgaagagccccagactggtggcccccgtgccccccggcgccgcccccgccaacggcagactgagcagcagcagcggcagcgccagcgacagaaccagcagcaaccccttcagcggcagaagcgccggcagccaccccgtgcccgagagcaagcagaacaagaccaagaccaagaagcagaccaccctgtggttcctgatggccttctag

SEQ ID NO: 264817 - DNA, 1104 bp, Artificial Sequence
  derived and/or modified sequence
atgtccagaagtcgccacctgggtaaaattcgcaagcgcctggaagatgtcaaatcccagtgggtgagaccggcaagggcagacttcagtgataatgaatcagctaggttggccactgacgctttactggacggggggagcgaggcttattggagggtgctgtcacaagagggcgaggtggatttcctttcctccgttgaagcacagtacattcaggcccaggcacgcgaacctccgtgccctccagataccctaggaggcgccgaagccggcccaaagggtttggatagtagctctctccagtcaggcacctacttccctgtggcaagcgagggatccgaaccagcgttactccactcatgggcttccgccgaaaaaccctacctgaaagaaaagtcttcagccacggtctacttccaaaccgtgaaacataacaatatacgggacctcgtcaggcgttgcattacacgcactagtcaggtgctggtgatcttgatggacgttttcactgacgttgagatcttttgcgacatcttggaggcggctaacaagagaggagtgtttgtatgcgttctgctggatcaggggggggtgaagctctttcaagaaatgtgtgacaaagtgcagattagcgatagtcaccttaaaaatatctccatacggtctgttgaaggcgaaatatactgcgccaagagcggccggaaattcgctggccagatccgcgaaaagtttatcatctcagactggaggttcgtattgtcaggatcttatagtttcacgtggctttgtggccacgtacacaggaacatcctgagcaaatttactgggcaggccgtggaactgttcgacgaggagttccgacacctgtatgccagtagcaagccagttatgggccttaagtctccacggctcgtcgcaccagtcccaccaggtgccgcccccgctaatgggaggttgagcagcagctcaggttccgcttcggaccgtacttcctcaaaccctttttcaggacgatccgcaggctcgcaccctgtgccggagagcaaacagaataaaacgaaaacaaagaagcagactaccctgtggttcttgatggccttctag

SEQ ID NO: 264818 - DNA, 1104 bp, Artificial Sequence
  derived and/or modified sequence
atgtcaagatctcgtcatctcgggaaaatccgtaaacggctggaggacgttaagtcacagtgggtgagacctgcaagagctgacttcagtgacaatgagtccgctcggctcgcgacggacgccttacttgatggtggcagtgaagcctactggcgggtactctcacaggagggggaggtcgatttcctgagctctgtggaggcgcagtatatccaagctcaagctagggagccaccctgccccccagataccctggggggagctgaggctggcccaaaaggcttggactcaagcagtctgcaatccggcacctactttccggtggccagtgaaggctcagaacccgccctcctgcactcctgggcatcagcagaaaaaccatatctgaaggaaaagtccagcgccacagtctattttcagaccgtgaagcataataacataagagacctcgtccgccgttgtatcactaggactagccaggtactggttatccttatggatgtcttcaccgacgtcgagatcttttgcgacatcctggaggccgccaacaagcgtggtgttttcgtctgtgttttgcttgaccaaggcggagtgaagctcttccaggaaatgtgcgacaaagtgcagatttcagactctcaccttaaaaacatctcaattagatcagtggaaggcgaaatttactgtgccaaatccggtagaaaatttgccggacagataagagaaaagttcatcatctcagactggcgcttcgtcctctccgggtcatactctttcacgtggctttgcggccacgtacatcggaatatattgagtaaatttaccgggcaggccgtggaattattcgatgaggagttccggcacctgtacgcatcaagtaaacccgtgatgggtcttaagtcaccgaggctagtagcgcccgtcccaccaggagctgcaccggcaaatggacggttgtctagtagttcagggtctgctagcgacagaaccagttccaatccgttctctgggaggagcgcgggatctcatccagtacccgaaagtaagcagaataagacaaagaccaaaaagcagaccacactatggtttctgatggcattttag

SEQ ID NO: 264819 - DNA, 1858 bp, Artificial Sequence
  derived and/or modified sequence
attgctcaggacagcggtaaatcacttcttggaggtgccctgcacgccggtcctgggagcaggcggcctcccgggggtgcgggagccccactcctccgtggtgtgttccatttgcttcccacatctggaggagctgacgtgccagcctcccccagcaccacccagggacgggaggcatgagccggtcaaggcacctgggcaaaatccggaagcgtctggaagatgtcaagagccagtgggtccggccagccagggctgactttagtgacaacgagagtgcccggctggccacggacgccctcttggatgggggttctgaagcctactggcgggtgctcagccaggaaggcgaggtggacttcttgtcctcggtggaggcccagtacatccaggcccaggccagggagcccccgtgtcccccagacaccctgggaggggcggaagcaggccctaagggactggactccagctccctacagtccggcacctacttccctgtggcctcagagggcagcgagccggccctactgcacagctgggcctcagctgagaagccctacctgaaggaaaaatccagcgccactgtgtacttccagaccgtcaagcacaacaacatcagagacctcgtccgccgctgcatcacccggactagccaggtcctggtcatcctgatggatgtgttcacggatgtggagatcttctgtgacattctagaggcagccaacaagcgtggggtgttcgtttgtgtgctcctggaccagggaggtgtgaagctcttccaggagatgtgtgacaaagtccagatctctgacagtcacctcaagaacatttccatccggagtgtggaaggagagatatactgtgccaagtcaggcaggaaattcgctggccaaatccgggagaagttcatcatctcggactggagatttgtcctgtctggatcttacagcttcacctggctctgcggacacgtgcaccggaacatcctctccaagttcacaggccaggcggtggagctgtttgacgaggagttccgccacctctacgcctcctccaagcctgtgatgggcctgaagtccccgcggctggtcgcccccgtcccgcccggagcagccccggccaatggccgccttagcagcagcagtggctccgccagtgaccgcacgtcctccaaccccttcagcggccgctcggcaggcagccaccccgttcctgaaagtaaacaaaacaaaacaaaaacaaaaaaacaaacaacactttggttcctgatggctttctgaacccagccctgaccttgttgtttcacagctgacggctgagatgaggttagaatgactgggcccggctgaacattccaaattggatttcaccatctgctgagaaagtttaaggaaggcaaagcttgccaggtcacagaagctcccaagcccagctttccaaaggcctcagcctgtgcctgtgtcgagctcagtcctgggagataggggagaacctgcaggcaggaacaagcccccctactcctgaccaccctccatcagcagtctcccctccgtggtcgtctttgttgacaaaggtgcagtttctcctctcctgggcacctgtaacatgtgatgcgctgcctgctgggaggttaggtcggggctgccccggcgagtggagcatgagcagaaccgccgagggtcacttctgggcagaagctttgagagcctgggtccaggttgccacatagaagcagctctccagttgaaaccctcctctgccagcctggggtcctaagcgatgagcagaatcccccactcccaccccaccaacccacaatggatatgtagtgagcaagaaataaacctttgttgtttaa

SEQ ID NO: 264820 - DNA, 2006 bp, Artificial Sequence
  derived and/or modified sequence
tcagcgatggccaagtatgggagaagccatgctggaatgaacatgtgggaccattttgtgcagtttctcagcgccaacactgactggtcccctgggctcgtgggccgccggcagcctcggctcgttctccagacagtgttccaagaagccacttccagcgaggaagcgttggcctgagaactggaacctctgcggtctctgcaaacacgacaatgacaaacacttgagagggcatgggagaaaggagctccttcatagggcagggaggggtgggcacttgggtgtgaccaaggagaggaggcgcgcctggtcaacagctctccctggcccgtgtccagctccctcctcacacagagaggggggcgcatctcagggatggcatctttcccccccacagggaaattcttatctttgaaacagcatgggaatcgaggcacccaggaggggagcagaggcaggcaggcctccttcaggcccatcctccagctgggctggtggtgccagggaggctccctgcttggtaacaaaggcctgagggagagttgcgaaacccagcaggaaagccggctcaccttcgcctccccctgcggctgggaggagaggaaatatcccatggctgactgtgccaaggaggtgtctgagccagccctcccggcccgagggcagggcaggtggccctgagagataagccaatcccgcagctgcagatgaggagttctgagaagcattgctcaggacagcggtaaatcacttcttggaggtgccctgcacgccggtcctgggagcaggcggcctcccgggggtgcgggagccccactcctccgtggtgtgttccatttgcttcccacatctggaggagctgacgtgccagcctcccccagcaccacccagggacgggaggcatgagccggtcaaggcacctgggcaaaatccggaagcgtctggaagatgtcaagagccagtgggtccggccagccagggctgactttagtgacaacgagagtgcccggctggccacggacgccctcttggatgggggttctgaagcctactggcgggtgctcagccaggaaggcgaggtggacttcttgtcctcggtggaggcccagtacatccaggcccaggccagggagcccccgtgtcccccagacaccctgggaggggcggaagcaggccctaagggactggactccagctccctacagtccggcacctacttccctgtggcctcagagggcagcgagccggccctactgcacagctgggcctcagctgagaagccctacctgaaggaaaaatccagcgccactgtgtacttccagaccgtcaagcacaacaacatcagagacctcgtccgccgctgcatcacccggactagccaggtcctggtcatcctgatggatgtgttcacggatgtggagatcttctgtgacattctagaggcagccaacaagcgtggggtgttcgtttgtgtgctcctggaccagggaggtgtgaagctcttccaggagatgtgtgacaaagtccagatctctgacagtcacctcaagaacatttccatccggagtgtggaaggagagatatactgtgccaagtcaggcaggaaattcgctggccaaatccgggagaagttcatcatctcggactggagatttgtcctgtctggatcttacagcttcacctggctctgcggacacgtgcaccggaacatcctctccaagttcacaggccaggcggtggagctgtttgacgaggagttccgccacctctacgcctcctccaagcctgtgatgggcctgaagtccccgcggctggtcgcccccgtcccgcccggagcagccccggccaatggccgccttagcagcagcagtggctccgccagtgaccgcacgtcctccaaccccttcagcggccgctcggcaggcagccaccccgttcctgaaagtaaacaaaacaaaacaaaaacaaaaaaacaaacaacactttggttcctgatggctttctga

SEQ ID NO: 264821 - DNA, 1104 bp, Artificial Sequence
  derived and/or modified sequence
atgagccgcagccgccacctgggcaagatcaggaagaggctggaggatgtgaagagccagtgggtgcggcctgcccgggctgacttcagtgacaatgaaagtgcccggctggccacagatgccctgctggatggcggcagcgaggcctactggagggtgctgagccaggagggggaggtggacttcctgagctctgtggaggcccagtacatccaggcccaggcccgggagcccccctgccccccagacaccctgggcggcgctgaggccggccccaagggcctggacagcagcagcctgcagagcggcacctacttccctgtggccagcgagggcagcgagcccgccctgctgcacagctgggccagcgctgagaagccctacctgaaggagaagagcagcgccaccgtgtacttccagacagtgaagcacaacaacatccgggacctggtgcggcgctgcatcaccaggaccagccaggtgctggtgatcctgatggatgtgttcacagatgtggagatcttctgtgacatcctggaggccgccaacaagaggggcgtgtttgtgtgtgtgctgctggaccagggcggcgtgaagctgttccaggagatgtgtgacaaggtgcagatcagtgacagccacctgaagaacatcagcatccgctctgtggagggggagatctactgtgccaagagcggcaggaagtttgctggccagatccgggagaagttcatcatcagtgactggaggtttgtgctgagcggcagctacagcttcacctggctgtgtggccacgtgcacaggaacatcctgagcaagttcaccggccaggccgtggagctgtttgatgaggagttccgccacctgtatgccagcagcaagcctgtgatgggcctgaagagcccccggctggtggcccctgtgcccccaggggccgccccagccaacggccgcctgagcagcagcagcggcagcgccagtgacaggaccagcagcaaccccttcagcggccgctctgctggcagccaccctgtgcctgagagcaagcagaacaagaccaagaccaagaagcagaccaccctgtggttcctgatggccttctag

SEQ ID NO: 264822 - DNA, 1104 bp, Artificial Sequence
  derived and/or modified sequence
atgagccggagccggcacctgggcaagatccggaagcggctggaggacgtcaaatctcagtgggtgcgcccagctagagccgatttctccgataacgaaagcgcgcgacttgccacagacgctctgctggatggcggctctgaggcatattggcgcgtgctctctcaagaaggtgaggtggacttcctgagttccgtggaggcacaatatatccaagcccaggccagggagcctccctgtcctcccgataccctaggaggagctgaggctggccctaagggcttagattcaagctccctgcaatcaggcacatatttcccggtggcttctgaagggagcgaaccagctctgctccactcatgggccagcgccgagaagccgtatctgaaagaaaagagcagtgcaaccgtgtattttcagacagttaaacataataacattcgggacttagtgagaaggtgtattacgcgcacatcacaggtgctggtaattctcatggacgtattcactgatgtcgagatcttctgtgacattctggaggcagccaataagcggggtgtgtttgtttgcgttctgctcgaccagggaggtgttaaactgtttcaggagatgtgtgataaagtacagatatccgatagccatttgaagaatattagtattagatcagtcgaaggggaaatctattgcgctaaaagtggccgcaagttcgcaggacagattagagagaagtttataatatccgattggcgttttgttctcagtgggtcatactctttcacttggctctgtgggcacgtgcatcgtaatatactcagcaagttcacagggcaggcggtcgagctctttgatgaagaattccggcacctttacgcatcaagcaagcctgttatgggcctgaagtctccacgactcgtggctcccgtccctccaggagccgcaccagcaaacggaaggctgagtagtagctccggtagtgcttcggacagaacttcctccaatccttttagtggacggtctgctgggtctcatccggttcccgagagtaaacagaataaaaccaaaaccaaaaaacagacaacgctttggtttttgatggctttttag

SEQ ID NO: 264823 - DNA, 1104 bp, Artificial Sequence
  derived and/or modified sequence
atgagccggagccggcacctgggcaagatccggaagcggctggaggatgtgaagtcccagtgggtgcgacccgcgcgtgctgatttttcagataacgaaagtgcccgcctggccacagatgcactgttagatggtggttccgaggcatattggcgcgtgctttcgcaggaaggagaagtggactttctgagtagtgtggaggcgcagtatatccaggctcaagcccgggaaccaccctgtccacctgacactctaggtggggcagaagctgggcctaaaggtcttgattcgtctagtcttcagtccgggacatattttcccgtggcttccgagggttccgagccagcattgttacacagctgggccagtgctgagaaaccctatctgaaagaaaagagctccgcaacagtctattttcaaacagtgaaacacaacaacatccgcgacctggtccgccgctgcattacacggactagccaagtgttagtaattctgatggacgtcttcactgacgttgaaattttctgtgatatcctggaggctgcgaataagcgcggcgtgttcgtctgcgttctgctggatcagggaggcgtaaagttattccaggagatgtgcgataaggtccagattagcgactcccaccttaagaacatctctattaggtcagtggagggagaaatctattgtgctaaatccgggcgtaagttcgctggacagattcgcgagaaatttatcatcagcgattggaggttcgtgcttagcgggagttatagcttcacctggctttgtgggcacgtgcatcgtaacatccttagcaaattcactggacaagccgttgagctgtttgatgaagagttccggcacctatacgcaagttctaaaccagtgatgggcttgaaatccccacgcctggtggcccccgtacctccaggcgccgcccctgccaatgggcgtctgagttccagctccggaagcgcgagcgaccgtacctcatccaaccccttctccgggcggtcagccggatcccacccagtccctgagtcaaaacagaataagaccaagactaaaaagcagacgaccctgtggtttctgatggctttttag

SEQ ID NO: 264824 - DNA, 1104 bp, Artificial Sequence
  derived and/or modified sequence
atgagccgctctcgccacctgggcaagatccggaaaagactagaagatgttaagtcccagtgggttcgacctgcgcgagcggatttctcagataacgaatccgccaggctcgccactgatgctctactggacggcggaagcgaggcttattggcgggtcttatcccaggagggagaggttgactttctgagcagcgtggaagctcagtacattcaggcgcaggctagggaaccaccatgtccacccgacaccctgggaggggcagaagctggaccaaaaggcctggactcatcctccctacagtccggcacctactttccggttgcgtctgagggaagcgagcctgccttgctccactcatgggcaagtgccgaaaaaccttatcttaaagaaaaatcttcagcaactgtttatttccagaccgtgaaacacaataatattagagacttagtgcggagatgcatcactcgtacgtcacaggtgctggtcatcctaatggatgtgttcacagatgtcgaaatcttttgcgatatcctagaggcagctaacaagagaggagtatttgtgtgtgtgctcctcgatcagggcggagtcaagctctttcaagagatgtgcgataaagtgcagatctcagattcccatctcaaaaacatatctatccggtcagtagagggagagatctactgtgccaaatccggaagaaagtttgccggacagatacgcgaaaagttcatcatctcagattggaggttcgtgcttagcggttcatacagtttcacttggctgtgcggccatgtgcatagaaatatattaagcaagtttactggtcaggcagttgaactcttcgatgaagagtttcgacacttgtacgcctctagcaaacccgtgatgggactcaaatcccctcgtctcgttgctcccgtacctccaggcgctgccccagctaacggtcgcctttctagctctagtggatctgcatcagatcggacgtccagtaacccatttagcggccgttcagccggtagtcatccggttccagagagtaagcagaataagactaagacaaagaagcaaaccacgctctggtttctgatggccttttag

SEQ ID NO: 264825 - DNA, 1104 bp, Artificial Sequence
  derived and/or modified sequence
atgagtagatcaagacatttgggaaagatccggaagcgcctcgaggacgtgaagtcccagtgggtcaggcctgcaagggccgacttttccgacaacgagagcgcgcgactcgccaccgatgccctgttggacggtggctccgaagcctactggagagtcttgtcccaggagggcgaagtcgatttcctcagcagtgtggaggcacagtacatacaagcacaggccagagaacctccttgccctcccgatacccttgggggagccgaggccggaccaaagggattagattctagcagccttcaaagtggtacgtatttcccagttgcatctgagggtagcgaacctgccctactccactcatgggcctctgccgaaaagccgtatttgaaagagaaatctagcgccactgtctatttccagactgttaaacataacaacatacgcgatcttgtgaggaggtgcattacccgcacctctcaggtgctggttattcttatggacgtgttcactgatgtcgagattttctgtgacattttggaggcagccaacaaacgcggtgttttcgtgtgcgtgctgctggaccaggggggagtgaaactgttccaggagatgtgcgacaaggtccagatttcggattcccacctcaagaacatttcaattagatcggtggagggtgaaatctactgcgccaagtctggccgtaagttcgccggtcaaataagagaaaagtttatcatctctgattggcgttttgtgctcagcggctcgtactcctttacgtggctctgtggccatgtacaccggaacattctgtcgaagtttactggccaggctgttgaactctttgacgaagaattcaggcacttgtatgcgtcctcgaaacccgttatggggcttaaaagccccagactggttgcccctgttcccccaggcgcagccccagccaacgggaggctgagcagcagtagcgggtcagcatccgaccgcaccagcagtaatcctttttctggcagaagtgctggctcacatccagtgccagaatcaaagcaaaacaaaaccaagaccaagaagcaaacaacactctggtttctcatggctttttag

SEQ ID NO: 264826 - protein, 92 aa, Artificial Sequence
  derived and/or modified sequence
MKLCVTVLSLLVLVAAFCSLALSAPMGSDPPTACCFSYTARKLPRNFVVDYYETSSLCSQPAVVFQTKRGKQVCADPSESWVQEYVYDLELN

SEQ ID NO: 264827 - DNA, 279 bp, Artificial Sequence
  derived and/or modified sequence
atgaaactgtgtgttaccgtcttaagtttactggttctcgtagccgctttctgttctctggcgctgtctgcccctatgggaagcgacccacctaccgcgtgctgtttctcctacacggcaagaaaactacccaggaattttgtggtagactattatgagacctcatctctctgttcccagcctgccgttgttggattcttgggtcggaaggggaagcaagtgtgtgcagacccgagtgagagttgggtgcaagaatatgtgtacgacttagagttgtag

SEQ ID NO: 264828 - DNA, 279 bp, Artificial Sequence
  derived and/or modified sequence
atgaaactctgtgtaactgtgcttagtctgctggtgttggtcgccgctttttgtagtttagccctatcagccccaatggggagcgatccccctaccgcatgttgtttctcctacactgccaggaaactgcccaggaactttgtggtcgactactacgagacaagctctctgtgctcgcagccagccgtcccatgggattctaatcttggcaagcaagtgtgtgccgatcccagcgaaagttgggtccaggaatacgtgtatgacctagagttgaattag

SEQ ID NO: 264829 - DNA, 279 bp, Artificial Sequence
  derived and/or modified sequence
atgaagttatgcgttaccgtgttaagcctgctggtgctggtggcagccttttgcagtctggccctgtccgcgcctatgggatcagacccacctacagcctgctgctttagttacactgccagaaagctgccacgcaacttcgtggtggattactatgaaacttcaagtttgtgctcccagcctgccgtagtgttccagaccaagcgaggcaagcaggtctgcgctgatcctagcgagagttgggtgcaggagtatgtgtacgacctggaactcaattag

SEQ ID NO: 264830 - DNA, 279 bp, Artificial Sequence
  derived and/or modified sequence
atgaaattatgtgtaactgtcctttcactccttgtgctagttgccgcattctgttccctggccctctccgctcctatgggaagtgacccccctaccgcatgttgttttagttacacagctcggaaacttcctaggaacttcgtggtggactattacgaaacatcttcactttgtagccagcccgcagtggttgggtttttgggtaggaagggtaaacaagtatgcgctgatcccagtgaatcgtgggtccaggaatatgtttatgatctggagttgtag

SEQ ID NO: 264831 - DNA, 279 bp, Artificial Sequence
  derived and/or modified sequence
atgaaactgtgtgtcactgttctgtctctgctggttctcgtagctgcattttgttctctggcactgtcagccccaatggggtcagatcctcctacggcttgctgcttctcctacactgcacgcaaactcccacgaaatttcgtcgttgattattatgaaacctcaagcctctgttcacagcctgccgtcccctgggatagtaaccttggtaagcaggtctgcgcagatccttctgaatcatgggtccaggaatatgtgtatgatcttgaactgaattag

SEQ ID NO: 264832 - DNA, 279 bp, Artificial Sequence
  derived and/or modified sequence
atgaaactttgcgtaacagtgttatcactactcgttctggtggccgctttctgctcacttgccctctcagccccaatgggtagcgatcctcctacagcttgttgcttctcttacaccgctagaaaactcccacgaaattttgttgtcgactattatgaaactagttcattgtgtagtcagcccgccgtggtctttcagacaaaaaggggcaaacaagtatgtgcggaccccagtgaatcatgggtgcaggagtacgtctacgatttagaactgaactag

SEQ ID NO: 264833 - DNA, 590 bp, Artificial Sequence
  derived and/or modified sequence
ccctggggaagagaagctgagaggaactcctcactcagctagcttcaggagccatgacatcatctctaccatggaaattccactcactctcctgtgcccccacatttgtcctaggcctcagagtccctataaagagagattcccaactcagtatcagcacaggacacagctaggttctgaagcttctgagttctgcagcctcacctctgagaaaacctctttgccaccaataccatgaagctctgcgtgactgtcctgtctctcctcgtgctagtagctgccttctgctctctagcactctcagcaccaatgggctcagaccctcccaccgcctgctgcttttcttacaccgcgaggaagcttcctcgcaactttgtggtagattactatgagaccagcagcctctgctcccagccagctgtggtattccaaaccaaaagaggcaagcaagtctgcgctgaccccagtgagtcctgggtccaggagtacgtgtatgacctggaactgaactgagctgctcagagacaggaagtcttcagggaaggtcacctgagcctggatgcttctccatgagccgcatctcctccata

SEQ ID NO: 264834 - DNA, 279 bp, Artificial Sequence
  derived and/or modified sequence
atgaagctgtgcgtgaccgtgctgagcctgctggtgctggtggccgccttctgcagcctggccctgagcgcccccatgggcagcgacccccccaccgcctgctgcttcagctacaccgccagaaagctgcccagaaacttcgtggtggactactacgagaccagcagcctgtgcagccagcccgccgtggtgggcttcctgggcagaaagggcaagcaggtgtgcgccgaccccagcgagagctgggtgcaggagtacgtgtacgacctggagctgtag

SEQ ID NO: 264835 - DNA, 279 bp, Artificial Sequence
  derived and/or modified sequence
atgaagctgtgcgtgaccgtgctgagcctgctggtgctggtggccgccttctgcagcctggccctgagcgcccccatgggcagcgacccccccaccgcctgctgcttcagctacaccgccagaaagctgcccagaaacttcgtggtggactactacgagaccagcagcctgtgcagccagcccgccgtgccctgggacagcaacctgggcaagcaggtgtgcgccgaccccagcgagagctgggtgcaggagtacgtgtacgacctggagctgaactag

SEQ ID NO: 264836 - DNA, 279 bp, Artificial Sequence
  derived and/or modified sequence
atgaagctgtgcgtgaccgtgctgagcctgctggtgctggtggccgccttctgcagcctggccctgagcgcccccatgggcagcgacccccccaccgcctgctgcttcagctacaccgccagaaagctgcccagaaacttcgtggtggactactacgagaccagcagcctgtgcagccagcccgccgtggtgttccagaccaagagaggcaagcaggtgtgcgccgaccccagcgagagctgggtgcaggagtacgtgtacgacctggagctgaactag

SEQ ID NO: 264837 - DNA, 279 bp, Artificial Sequence
  derived and/or modified sequence
atgaagctatgtgttaccgtgttgagcctccttgtccttgtggccgccttttgcagtctggctctgtccgccccaatgggatcagatcccccaaccgcctgttgtttcagttatacagccaggaaactccctagaaacttcgtggtggattattatgaaacttcttctctgtgcagccagcctgccgtcgtcgggtttttgggtcggaagggcaaacaggtctgcgcagacccgtcagaatcatgggtacaagaatacgtgtacgaccttgaactgtag

SEQ ID NO: 264838 - DNA, 279 bp, Artificial Sequence
  derived and/or modified sequence
atgaaactgtgcgtgacagtcctcagcctcttagttctcgtcgccgccttttgctcactagcactctcagcgccaatgggctcagacccacccactgcttgctgtttcagctacacagccaggaagctcccccgcaatttcgttgtggattattacgagacatcgagcctatgctcccaaccagctgtgccctgggatagcaacctgggaaagcaggtgtgcgcagatccttcggaaagctgggtacaggagtacgtttatgacctcgagctaaattag

SEQ ID NO: 264839 - DNA, 279 bp, Artificial Sequence
  derived and/or modified sequence
atgaaactatgtgtgactgtgctctcattactagttctggttgctgccttctgcagtctggccctctcagcacccatgggatcagacccaccaacggcatgctgttttagctacaccgccagaaaattgccacggaacttcgttgtcgactattacgagacgtcatccctgtgttcccaacctgccgtggtgtttcagactaaacgaggtaagcaagtctgtgcggatccttcagaaagttgggtacaagaatacgtatacgatctggaactgaattag

SEQ ID NO: 264840 - DNA, 510 bp, Artificial Sequence
  derived and/or modified sequence
ccctggggaagagaagctgagaggaactcctcactcagctagcttcaggagccatgacatcatctctaccatggaaattccactcactctcctgtgcccccacatttgtcctaggcctcagagtccctataaagagagattcccaactcagtatcagcacaggacacagctaggttctgaagcttctgagttctgcagcctcacctctgagaaaacctctttgccaccaataccatgaagctctgcgtgactgtcctgtctctcctcgtgctagtagctgccttctgctctctagcactctcagcaccaatgggctcagaccctcccaccgcctgctgcttttcttacaccgcgaggaagcttcctcgcaactttgtggtagattactatgagaccagcagcctctgctcccagccagctgtggtggggttcctggggaggaaaggcaagcaagtctgcgctgaccccagtgagtcctgggtccaggagtacgtgtatgacctggaactg

SEQ ID NO: 264841 - DNA, 279 bp, Artificial Sequence
  derived and/or modified sequence
atgaagctgtgtgtgacagtgctgagcctgctggtgctggtggccgccttctgcagcctggccctgagcgcccccatgggcagtgaccccccaacagcctgctgcttctcctacacagccaggaagctgcccaggaactttgtggtggactactatgagaccagcagcctgtgcagccagcctgctgtggtgggcttcctgggcaggaagggcaagcaggtgtgtgccgaccccagcgagagctgggtgcaggagtatgtgtatgacctggagctgtag

SEQ ID NO: 264842 - DNA, 279 bp, Artificial Sequence
  derived and/or modified sequence
atgaagctgtgtgtgacagtgctgagcctgctggtgctggtggccgccttctgcagcctggccctgagcgcccccatgggcagtgaccccccaacagcctgctgcttctcctacacagccaggaagctgcccaggaactttgtggtggactactatgagaccagcagcctgtgcagccagcctgctgtgccctgggacagcaacctgggcaagcaggtgtgtgccgaccccagcgagagctgggtgcaggagtatgtgtatgacctggagctgaactag

SEQ ID NO: 264843 - DNA, 279 bp, Artificial Sequence
  derived and/or modified sequence
atgaagctgtgtgtgacagtgctgagcctgctggtgctggtggccgccttctgcagcctggccctgagcgcccccatgggcagtgaccccccaacagcctgctgcttctcctacacagccaggaagctgcccaggaactttgtggtggactactatgagaccagcagcctgtgcagccagcctgctgtggtgttccagaccaagaggggcaagcaggtgtgtgccgaccccagcgagagctgggtgcaggagtatgtgtatgacctggagctgaactag

SEQ ID NO: 264844 - DNA, 355 bp, Artificial Sequence
  derived and/or modified sequence
acaggacacagctaggttctgaagcttctgagttctgcagcctcacctctgagaaaacctctttgccaccaataccatgaagctctgcgtgactgtcctgtctctcctcgtgctagtagctgccttctgctctctagcactctcagcaccaatgggctcagaccctcccaccgcctgctgcttttcttacaccgcgaggaagcttcctcgcaactttgtggtagattactatgagaccagcagcctctgctcccagccagctgtcccatgggattctaatctaggcaagcaagtctgcgctgaccccagtgagtcctgggtccaggagtacgtgtatgacctggaactgaactga

SEQ ID NO: 264845 - DNA, 279 bp, Artificial Sequence
  derived and/or modified sequence
atgaagctgtgcgtgaccgtgctgagcctgctggtgctggtggccgcattctgcagcttggccctcagtgctccgatgggaagtgacccacctactgcctgttgcttcagttacaccgcacgaaagttgccgagaaactttgttgtggattactacgagacttcctccctctgtagccagcctgcagtggtgggtttcttgggcaggaaaggcaaacaagtgtgcgccgatccatcggaatcctgggtgcaggagtacgtttacgatttggagctatag

SEQ ID NO: 264846 - DNA, 279 bp, Artificial Sequence
  derived and/or modified sequence
atgaagctgtgcgtgaccgtgctgagcctgctggtgctggtggccgcgttctgttcactggcactgtccgcaccaatggggtctgacccacccaccgcgtgctgctttagttacacagcccggaaactccctaggaattttgtggtcgactactacgaaacaagctcgctttgttcacagcctgcagtgccatgggattccaatctcggaaaacaggtgtgcgctgatcccagtgaatcctgggttcaggaatatgtgtacgacttagagctaaactag

SEQ ID NO: 264847 - DNA, 378 bp, Artificial Sequence
  derived and/or modified sequence
ccctggggaagagaagctgagaggaactcctcactcagctagcttcaggagccatgacatcatctctaccatggaaattccactcactctcctgtgcccccacatttgtcctaggcctcagagtccctataaagagagattcccaactcagtatcagcacaggacacagctaggttctgaagcttctgagttctgcagcctcacctctgagaaaacctctttgccaccaataccatgaagctctgcgtgactgtcctgtctctcctcgtgctagtagctgccttctgctctctagcactctcagcaccaaaggcaagcaagtctgcgctgaccccagtgagtcctgggtccaggagtacgtgtatgacctggaactga

SEQ ID NO: 264848 - DNA, 279 bp, Artificial Sequence
  derived and/or modified sequence
atgaagctgtgcgtgaccgtgctgagcctgctggtgctggtggccgcattctgttcactggcgctctcggccccaatggggtctgatcctcctacagcatgctgttttagttacaccgcaaggaagctgcccaggaattttgttgtcgactattacgaaactagcagcctatgctctcaacccgctgtggtattccaaaccaaacgggggaagcaggtgtgtgccgacccttctgagtcctgggtacaagagtatgtttatgacctggaactcaattag

SEQ ID NO: 264849 - DNA, 279 bp, Artificial Sequence
  derived and/or modified sequence
atgaaactgtgcgtgaccgtgttatccctgctcgttcttgttgccgcgttctgttctctggcactgtccgctcccatgggcagtgatcctccaactgcctgctgtttctcgtatacagctaggaaactgccccgcaatttcgtggtggactattatgaaaccagttccctttgcagccagccagcagtggtcttccagacaaagcggggaaagcaagtgtgcgcggatccaagtgaatcctgggtgcaggaatacgtctacgacctcgagctgaactag

SEQ ID NO: 264850 - DNA, 279 bp, Artificial Sequence
  derived and/or modified sequence
atgaagctgtgcgtgaccgtgctgagcctgctggtgctggtggccgccttttgctctttagccctgagcgcccccatgggaagcgaccctcctacagcctgttgcttctcgtatacagcccggaagcttccccgcaacttcgttgttgactattatgaaacttcctcactctgcagtcaaccggccgttgtttttcaaaccaagcgcggtaaacaggtttgtgccgatccatccgagagttgggtgcaggagtacgtttatgacttagagctgaactag

SEQ ID NO: 264851 - DNA, 279 bp, Artificial Sequence
  derived and/or modified sequence
atgaagctttgcgttaccgtgctctcgctgttagtcctggttgccgctttctgcagtctggctctctccgctcctatggggtccgacccccctaccgcatgctgtttcagttacactgccaggaagctgccacgtaacttcgttgttgactactacgagacctcctccctttgttcacaacccgcagtcgtctttcaaaccaaaagaggtaaacaggtctgtgcagaccctagtgagagttgggttcaggaatacgtatacgatcttgaactcaactag

SEQ ID NO: 264852 - DNA, 547 bp, Artificial Sequence
  derived and/or modified sequence
agcacaggacacagctaggttctgaagcttctgagttctgcagcctcacctctgagaaaacctctttgccaccaataccatgaagctctgcgtgactgtcctgtctctcctcgtgctagtagctgccttctgctctctagcactctcagcaccaaattccaaaccaaaagaggcaagcaagtctgcgctgaccccagtgagtcctgggtccaggagtacgtgtatgacctggaactgaactgagctgctcagagacaggaagtcttcagggaaggtcacctgagcctggatgcttctccatgagccgcatctcctccatactcaggactcctctccgcagttcctgtctcttctcttaatgtaatctcttttatgtgctgtattattgtattaggtgttatttccattatttatattagtttagccaaaggataagtgtcccctatggggatggtccactctcactctttctctgctgttgcaaatacatggataacaccgttaattccatgtgttttcataataaaactttaaaataaaatgcaaa

SEQ ID NO: 264853 - DNA, 905 bp, Artificial Sequence
  derived and/or modified sequence
agtctcggtcactgcttttggctgtaccacttcccttttcttctcgcctgcacctccctcatctttcctctatgatgacatcgccctggggaagagaagctgagaggaactcctcactcagctagcttcaggagccatgacatcatctctaccatggaaattccactcactctcctgtgcccccacatttgtcctaggcctcagagtccctataaagagagattcccaactcagtatcagcacaggacacagctaggttctgaagcttctgagttctgcagcctcacctctgagaaaacctctttgccaccaataccatgaagctctgcgtgactgtcctgtctctcctcgtgctagtagctgccttctgctctctagcactctcagcaccaatgggctcagaccctcccaccgcctgctgcttttcttacaccgcgaggaagcttcctcgcaactttgtggtagattactatgagaccagcagcctctgctcccagccagctgtggtattccaaaccaaaagaggcaagcaagtctgcgctgaccccagtgagtcctgggtccaggagtacgtgtatgacctggaactgaactgagctgctcagagacaggaagtcttcagggaaggtcacctgagcctggatgcttctccatgagccgcatctcctccatactcaggactcctctccgcagttcctgtctcttctcttaatgtaatctcttttatgtgctgtattattgtattaggtgttatttccattatttatattagtttagccaaaggataagtgtcccctatggggatggtccactctcactctttctctgctgttgcaaatacatggataacaccgttaattccatgtgttttcataataaaactttaaaataaaatgcaaacagtt

SEQ ID NO: 264854 - RNA, 279 nt, Artificial Sequence
  derived and/or modified sequence
augaaauuauguguaacuguccuuucacuccuugugcuaguugccgcauucuguucccuggcccucuccgcuccuaugggaagugaccccccuaccgcauguuguuuuaguuacacagcucggaaacuuccuaggaacuucgugguggacuauuacgaaacaucuucacuuuguagccagcccgcagugguuggguuuuuggguaggaaggguaaacaaguaugcgcugaucccagugaaucguggguccaggaauauguuuaugaucuggaguuguag

SEQ ID NO: 264855 - RNA, 279 nt, Artificial Sequence
  derived and/or modified sequence
augaaacugugugucacuguucugucucugcugguucucguagcugcauuuuguucucuggcacugucagccccaauggggucagauccuccuacggcuugcugcuucuccuacacugcacgcaaacucccacgaaauuucgucguugauuauuaugaaaccucaagccucuguucacagccugccguccccugggauaguaaccuugguaagcaggucugcgcagauccuucugaaucauggguccaggaauauguguaugaucuugaacugaauuag

SEQ ID NO: 264856 - RNA, 279 nt, Artificial Sequence
  derived and/or modified sequence
augaaacuuugcguaacaguguuaucacuacucguucugguggccgcuuucugcucacuugcccucucagccccaauggguagcgauccuccuacagcuuguugcuucucuuacaccgcuagaaaacucccacgaaauuuuguugucgacuauuaugaaacuaguucauuguguagucagcccgccguggucuuucagacaaaaaggggcaaacaaguaugugcggaccccagugaaucaugggugcaggaguacgucuacgauuuagaacugaacuag

SEQ ID NO: 264857 - protein, 161 aa, Artificial Sequence
  derived and/or modified sequence
MDVFLMIRRHKTTIFTDAKESSTVFELKRIVEGILKRPPDEQRLYKDDQLLDDGKTLGECGFTSQTARPQAPATVGLAFRADDTFEALCIEPFSSPPELPDVMKPQDSGSSANEQAVHLHVHSQTMAKSRNTSWSQCPGLTACSTREPQDGPTQVHPRWGL

SEQ ID NO: 264858 - DNA, 486 bp, Artificial Sequence
  derived and/or modified sequence
atggacgtgtttctgatgatccgccgtcacaaaactaccatctttaccgatgcaaaagagtcttccaccgtgttcgagctcaagaggatcgttgagggaatcttaaagagacctcccgatgagcagcggctttataaagacgaccagctgctggacgatggcaagacgttaggagagtgcggtttcactagtcagaccgccagaccccaggcccctgccaccgtgggtttagcctttcgcgcggatgacacattcgaagccctctgcattgagccattttcgtccccgcccgagctgcccgacgttatgaaacctcaggacagcggttcctctgctaatgaacaggcagtgcacctgcacgttcatagtcagaccatggcaaaaagcagaaacacctcctggtcccagtgccccggcctcacagcatgttctaccagagagccgcaggacggccccacccaggttcatcctcggtgggggctgtag

SEQ ID NO: 264859 - DNA, 486 bp, Artificial Sequence
  derived and/or modified sequence
atggatgtgttcctgatgatccgccgccacaagaccaccatcttcacagatgccaaggagagcagcacagtgtttgagctgaagagaattgtggagggcatcctgaagaggcccccagatgagcagaggctgtacaaggatgaccagctgctggatgatggcaagaccctgggagaatgtggcttcaccagccagacagcccggccccaggccccagccaccgtgggcctggccttccgggcagatgacacctttgaggccctgtgcatcgagcccttcagcagccccccagagctgcctgatgtgatgaagccccaggacagcggcagcagcgccaatgagcaggccgtgcacctgcacgtgcacagccagaccatggccaagagcaggaacacctcctggagccagtgccccggcctgacagcctgcagcacccgggagccccaggacggccccacccaggtgcacccccgctggggcctgtag

SEQ ID NO: 264860 - DNA, 486 bp, Artificial Sequence
  derived and/or modified sequence
atggacgtgttcctgatgatccggcggcacaagaccaccatcttcacggatgctaaagagtcgtctacggtcttcgaactgaagagaatcgttgaaggtatactcaagcggccacccgacgaacaacgactctacaaagacgatcagctcctggatgatggcaaaacactgggagaatgcgggtttacctcccagaccgcgagaccacaagccccggccacagtcggtttggcatttcgcgccgatgacaccttcgaggccctgtgcattgaaccattttcatctccacccgagctcccagatgtgatgaagcctcaagatagtggctcctcagctaacgagcaggccgtgcatctccacgtccacagtcagacgatggctaaatcaaggaatacaagctggagtcaatgtccaggattaactgcctgctccactagggaaccacaggacggcccaacccaggtccaccccagatggggcttgtag

SEQ ID NO: 264861 - DNA, 486 bp, Artificial Sequence
  derived and/or modified sequence
atggatgtcttcctcatgataagacggcacaagacaactatattcaccgacgctaaggaatcttcaactgtctttgaattaaaaaggatcgtggagggtatcctgaaacggcctcctgatgagcaacggctttacaaggacgatcaacttctggatgacggcaaaacactgggcgaatgtggttttactagtcagaccgccagacctcaggcccctgctacagtaggtctcgcctttagggccgatgacaccttcgaggccctctgtatagagccgttcagctcgcctcccgaactcccggacgtaatgaaacctcaggattctgggagctccgccaacgaacaggccgtccatctccatgtgcactcacagaccatggcaaagtcacggaacacgtcatggtcacagtgccctggccttactgcttgcagcacacgggagccccaggatggacccacacaggtgcatccaagatgggggctgtag

SEQ ID NO: 264862 - DNA, 582 bp, Artificial Sequence
  derived and/or modified sequence
gctgcgccggcgcgtcgaggggagaggcagcagccgcgatggacgtgttcctcatgatccggcgccacaagaccaccatcttcacggacgccaaggagtccagcacggtgttcgaactgaagcgcatcgtcgagggcatcctcaagcggcctcctgacgagcagcggctgtacaaggatgaccaactcttggatgatggcaagacactgggcgagtgtggcttcaccagtcaaacagcacggccacaggccccagccacagtggggctggccttccgggcagatgacacctttgaggccctgtgcatcgagccgttttccagcccgccagagctgcccgatgtgatgaagccccaggactcgggaagcagtgccaatgaacaagccgtgcacctgcatgtccactcccagacgatggccaagagcagaaacacaagctggagccagtgtcctggtttgacagcatgttcaacgagggaaccccaagacggacccacacaggtccacccacgctgggggctgtaatcacggagggaagtggctgcccccttaacacacctttaataaacagtctacagaccca

SEQ ID NO: 264863 - DNA, 486 bp, Artificial Sequence
  derived and/or modified sequence
atggacgtgttcctgatgatcagaagacacaagaccaccatcttcaccgacgccaaggagagcagcaccgtgttcgagctgaagagaatcgtggagggcatcctgaagagaccccccgacgagcagagactgtacaaggacgaccagctgctggacgacggcaagaccctgggcgagtgcggcttcaccagccagaccgccagaccccaggcccccgccaccgtgggcctggccttcagagccgacgacaccttcgaggccctgtgcatcgagcccttcagcagcccccccgagctgcccgacgtgatgaagccccaggacagcggcagcagcgccaacgagcaggccgtgcacctgcacgtgcacagccagaccatggccaagagcagaaacaccagctggagccagtgccccggcctgaccgcctgcagcaccagagagccccaggacggccccacccaggtgcaccccagatggggcctgtag

SEQ ID NO: 264864 - protein, 795 aa, Artificial Sequence
  derived and/or modified sequence
MGENEASLPNTSLQGKKMAYQKVHADQRAPGHSQYLDNDDLQATALDLEWDMEKELEESGFDQFQLDGAENQNLGHSETIDLNLDSIQPATSPKGRFQRLQEESDYITHYTRSAPKSNRCNFCHVLKILCTATILFIFGILIGYYVHTNCPSDAPSSGTVDPQLYQEILKTIQAEDIKKSFRNLVQLYKNEDDMEISKKIKTQWTSLGLEDVQFVNYSVLLDLPGPSPSTVTLSSSGQCFHPNGQPCSEEARKDSSQDLLYSYAAYSAKGTLKAEVIDVSYGMADDLKRIRKIKNVTNQIALLKLGKLPLLYKLSSLEKAGFGGVLLYIDPCDLPKTVNPSHDTFMVSLNPGGDPSTPGYPSVDESFRQSRSNLTSLLVQPISAPLVAKLISSPKARTKNEACSSLELPNNEIRVVSMQVQTVTKLKTVTNVVGFVMGLTSPDRYIIVGSHHHTAHSYNGQEWASSTAIITAFIRALMSKVKRGWRPDRTIVFCSWGGTAFGNIGSYEWGEDFKKVLQKNVVAYISLHSPIRGNSSLYPVASPSLQQLVVEKNNFNCTRRAQCPETNISSIQIQGDADYFINHLGVPIVQFAYEDIKTLEGPSFLSEARFSTRATKIEEMDPSFNLHETITKLSGEVILQIANEPVLPFNALDIALEVQNNLKGDQPNTHQLLAMALRLRESAELFQSDEMRPANDPKERAPIRIRMLNDILQDMEKSFLVKQAPPGFYRNILYHLDEKTSRFSILIEAWEHCKPLASNETLQEALSEVLNSINSAQVYFKAGLDVFKSVLDGKN

SEQ ID NO: 264865 - DNA, 2388 bp, Artificial Sequence
  derived and/or modified sequence
atgggagaaaatgaagccagcctgcccaatactagtttgcagggaaagaaaatggcttaccagaaggtgcacgcagaccaacgagctcccggccacagtcaataccttgacaatgatgacctccaagcaaccgctttggacctggaatgggacatggagaaggagttagaagagtctgggtttgatcagtttcaactagatggcgctgaaaatcagaacctgggccactccgaaaccatcgatctcaacctcgactccatccagcccgccactagccccaagggccggttccagaggctgcaggaggaatccgactacattactcattatacaagatctgctccgaaatccaatcgttgtaacttctgccatgtgctgaaaatcctgtgtactgccacaatcctgtttatcttcggtatactcatcgggtactacgtccatacgaattgtccaagcgacgcaccatcgagcgggacggtagatcctcaactgtatcaggaaatcttgaagaccatccaggccgaggacatcaagaaaagcttcagaaacctggtgcagttatacaaaaatgaggatgacatggagatcagcaagaaaataaaaactcagtggacctcacttgggttagaagacgtccagtttgtgaattactcagtgctgctagacctgccggggccatcaccatctacagtgaccctcagctcttccggacagtgttttcaccccaacggccagccatgctccgaggaggcccggaaagacagctcacaagacctgctgtacagttacgctgcgtactccgcaaagggcactcttaaggctgaagttatagacgtgagttacgggatggctgatgacttgaagcggattcgaaagattaagaatgtgaccaaccagattgccctcttgaaactgggtaagctacccttgctttacaagcttagcagtctggaaaaggccggtttcggaggtgttttgctgtacattgacccttgtgaccttcccaagaccgtaaatccgagtcatgacacatttatggtatccctaaatcccggtggagatcccagcaccccagggtacccaagcgtggatgaatcgttccgacagtctcggtccaatctcacctcgttgctagttcaaccaatctccgcccctctggtggctaagttaatatctagccccaaggccaggaccaagaatgaagcctgttcttcgctggaactgccaaacaatgagattcgggtcgtgtcaatgcaggtccaaactgtaaccaagctgaagaccgtgactaacgtggtgggttttgtgatgggcctgacttcccccgatcggtatattatcgtaggatctcaccaccacactgcacacagctataatggacaggaatgggcttccagcacggctattattacagccttcatcagagcactgatgtcaaaggtgaaaagaggatggagacccgatcgcaccatcgtcttctgcagttggggtgggaccgccttcggcaacattggatcatatgagtggggggaggacttcaagaaggtgctccaaaaaaacgttgtcgcttatatctccctgcatagccctatacggggcaatagttcattgtatcccgtggcaagtcccagtcttcaacagctggtggtcgaaaaaaacaacttcaattgcacacgcagggcacagtgtcctgagactaatatctcgtctatccaaattcagggggacgcagactatttcataaaccatctgggggttcccattgtccagttcgcctacgaggatatcaagaccctcgaaggtccaagcttcttatctgaagcacgatttagcaccagagcaactaagattgaagaaatggatccaagcttcaatctccacgaaacaattaccaagctctcaggggaggttatcttgcagatcgccaatgagccagtgctgcccttcaatgccctggatattgctttggaagtgcagaataaccttaaaggggatcaacctaacacccatcagctactggccatggccttgcgattgcgcgagtccgctgagctgttccagtccgatgagatgcgacctgcaaacgatcctaaggagagagcccccatcagaatcaggatgctgaacgacatcctacaagatatggagaaaagctttctggtgaagcaagctccaccggggttctaccggaatattctctaccacctcgatgagaagacatcacggtttagcatcctgattgaagcttgggagcactgcaagcccctggcgagtaacgagacacttcaggaagctctgagtgaggttctgaattccatcaatagcgcccaggtgtattttaaagctggcctagacgtattcaaatctgtcttggacgggaaaaactag

SEQ ID NO: 264866 - DNA, 2388 bp, Artificial Sequence
  derived and/or modified sequence
atgggagaaaatgaggccagcctgcccaacaccagcctgcagggcaagaagatggcctaccagaaggtgcatgctgaccagagggcccctggccacagccagtacctggacaatgatgacctgcaggccacagccctggacctggagtgggacatggagaaggagctggaggagagcggctttgaccagttccagctggatggagctgagaaccagaacctgggccacagcgagaccatcgacctgaacctggacagcatccagcctgccaccagccccaagggccgcttccagaggctgcaggaggagagtgactacatcacccactacaccaggtctgcccccaagagcaaccgctgcaacttctgccacgtgctgaagatcctgtgcacagccaccatcctcttcatcttcggcatcctgattggctactacgtgcacaccaactgccccagtgatgcccccagcagcggcaccgtggacccccagctgtaccaggagatcctgaagaccatccaggccgaggacatcaagaagagcttcaggaacctggtgcagctgtacaagaatgaagatgacatggagatcagcaagaagatcaagacccagtggaccagcctgggcctggaggatgtgcagtttgtgaactacagcgtgctgctggacctgcccggccccagccccagcacagtgaccctgagcagcagcggccagtgcttccaccccaacggccagccctgcagcgaggaggccaggaaggacagcagccaggacctgctgtacagctatgctgcctacagcgccaagggcaccctgaaggccgaggtgattgatgtgtcctatggcatggctgatgacctgaagaggatcaggaagatcaagaatgtgaccaaccagatcgccctgctgaagctgggcaagctgcccctgctgtacaagctgagcagcctggagaaggccggctttggaggagtgctgctgtacatcgacccctgtgacctgcccaagacagtgaaccccagccatgacaccttcatggtgtccctgaaccctggaggagaccccagcaccccaggctaccccagcgtggatgagagcttccggcagagccgcagcaacctgaccagcctgctggtgcagcccatcagcgcccccctggtggccaagctgatcagcagccccaaggcccggaccaagaatgaggcctgcagcagcctggagctgcccaacaatgagatccgggtggtgtccatgcaggtgcagacagtgaccaagctgaagacagtgaccaacgtggtgggctttgtgatgggcctgaccagcccagaccgctacatcatcgtgggcagccaccaccacacagcccacagctacaacggccaggagtgggccagcagcacagccatcatcacagccttcatccgggccctgatgagcaaggtgaagaggggctggaggccagacaggaccatcgtgttctgctcctggggcggcacagcctttggaaacatcggcagctatgagtggggcgaggacttcaagaaggtgctgcagaagaatgtggtggcctacatcagcctgcacagccccatccggggcaacagcagcctgtaccctgtggccagccccagcctgcagcagctggtggtggagaagaacaacttcaactgcacccggcgggcccagtgcccagagaccaacatcagcagcatccagatccagggagatgctgactacttcatcaaccacctgggcgtgcccatcgtgcagtttgcctatgaggacatcaagaccctggagggccccagcttcctgtctgaggcccgcttcagcacccgggccaccaagattgaggagatggaccccagcttcaacctgcacgagaccatcaccaagctgagcggggaggtgatcctgcagatcgccaatgaacctgtgctgcccttcaatgccctggacatcgccctggaggtgcagaacaacctgaagggggaccagcccaacacccaccagctgctggccatggccctgcggctgcgggagagcgctgagctgttccagagtgatgagatgaggcctgccaatgaccccaaggagcgggcccccatccgcatccgcatgctgaatgacatcctgcaggacatggagaagagcttcctggtgaagcaggcccctcctggcttctacagaaacatcctgtaccacctggatgagaagaccagccgcttcagcatcctgattgaggcctgggagcactgcaagcccctggccagcaatgagaccctgcaggaggccctgtctgaggtgctgaacagcatcaacagcgcccaggtgtacttcaaggccggcctggatgtgttcaagtctgtgctggatggcaagaactag

SEQ ID NO: 264867 - DNA, 4953 bp, Artificial Sequence
  derived and/or modified sequence
ttattcacagaagaaagcaggtagtatactgttacaatactacagtagaaagtcagaaggtcacaaagcttgcagggtaagtgacacaacttgaaactgcttggccctctttaaaaagaaataataaaatgggagagaatgaagcaagtttacctaacacgtctttgcaaggtaaaaagatggcctatcagaaggtccatgcagatcaaagagctccaggacactcacagtacttagacaatgatgaccttcaagccactgcccttgacttagagtgggacatggagaaggaactagaggagtctggttttgaccaattccagctagacggtgctgagaatcagaacctagggcattcagagactatagacctcaatcttgattccattcaaccagcaacttcacccaaaggaaggttccagagacttcaagaagaatctgactacattacccattatacacgatctgcaccaaagagcaatcgctgcaacttttgccacgtcttaaaaatactttgcacagccaccattttatttatttttgggattttgataggttattatgtacatacaaattgcccttcagatgctccatcttcaggaacagttgatcctcagttatatcaagagattctcaagacaatccaggcagaagatattaagaagtctttcagaaatttggtacaactatataaaaatgaagatgacatggaaatttcaaagaagattaagactcagtggacctctttgggcctagaagatgtacagtttgtaaattactctgtgctgcttgatctgccaggcccttctcccagcactgtgactctgagcagcagtggtcaatgctttcatcctaatggccagccttgcagtgaagaagccagaaaagatagcagccaagacctgctctattcatatgcagcctattctgccaaaggaactctcaaggctgaagtcatcgatgtgagttatggaatggcagatgatttaaaaaggattaggaaaataaaaaacgtaacaaatcagatcgcactcctgaaattaggaaaattgccactgctttataagctttcctcattggaaaaggctggatttggaggtgttcttctgtatatcgatccttgtgatttgccaaagactgtgaatcctagccatgataccttcatggtgtcactgaatccaggaggagacccttctacgcctggttacccaagtgtcgatgaaagttttagacaaagccgatcaaacctcacctctctattagtgcagcccatctctgcacccctcgttgcaaaactgatctcttcgccaaaagctagaaccaaaaatgaagcgtgtagctctctagagcttccaaataatgaaataagagtcgtcagcatgcaagttcagacagtcacaaaattgaaaacagttactaatgttgttggatttgtaatgggcttgacatctccagaccggtatatcatagttggcagccatcatcacactgcacacagttataatggacaagaatgggccagtagtactgcaataatcacagcgtttatccgtgccttgatgtcaaaagttaagagagggtggagaccagaccgaactattgttttctgttcttggggaggaacagcttttggcaatattggctcatatgaatggggagaggatttcaagaaggttcttcagaaaaatgttgtggcttatattagcctccacagtcccataagggggaactctagtctgtatcctgtagcatcaccatctcttcagcaactggtagtagagaaaaataatttcaactgtaccagaagagcccagtgcccagaaaccaatatcagttctatacagatacaaggtgatgctgattatttcatcaaccatcttggagttcccatcgtgcagtttgcttacgaggacatcaaaacattagagggtccaagttttctctccgaggcccgtttttctacacgagcaacaaaaattgaagaaatggatccctctttcaaccttcatgaaaccattactaagctctcaggagaagtgattttgcaaattgccaacgaacctgttctgccctttaatgcacttgatatagctttagaagttcaaaacaaccttaaaggtgatcaacccaacactcatcaactgttagccatggcgttacgcctgcgggagagtgctgaactttttcagtctgatgagatgcgacctgctaatgatcccaaggagagagcacccatccgcatccggatgctgaatgacattctccaagacatggagaaaagctttctggtaaagcaggcaccaccaggtttttatagaaacatcctctaccaccttgatgaaaagacaagccggttttcaatacttatagaggcttgggaacactgcaaaccccttgcatcaaatgagacccttcaagaagccctgtcagaggtgttgaacagcattaattcagctcaggtttacttcaaagcaggacttgatgtgttcaagagtgtcttggatgggaagaattgagaaaactctgagcatttttaaaagtttgtttacaattccacaagcaaaagctctaatttaaccagattttctgacattgaaggcttattttccccaatggctttttgacaagtataaagctattattacattgtattttttaaatgtaaatatagaaagaacattttgcacatttaatatttttcttatatctacatttctgaatatgtaaagcaagttattgaaataggacttaagaattacctattaaaaagaaatctgatatataaaaatatgtactattttaaggaaaaatttccaagaagttctggactatctttgttcctatggggagggcatataggaacacagtttattctctctgatagagctattaatgacttagtttctgtaaaagaaatggagagttgatatggttcagattaacttcactattaagtgttcaatatgaagaattcaagtattctgactgagtgattggttgacctaaaccactttgaatgtttctattttatgaaatgaagtttctcttcttaacacaactagatgtagtaatacactggttatgaaattgtatttttttaagtattaatgaaaaaagagccataagcattccaggagaaaatctcaagggagctacatagagcaatttaaatgcaaatttttttcctaacaacttacaaggtgactagctttgaaacccctaatttgcctcagttgattttctaagaatttcaggagtgatgtatgtcttaagagggagaaaaaaatatttcttattactttttctcttgtttctgttggaaacactgaagcagggactctaaaatgaaagcatctcacattggttttctttcttgtatcttttctgaaactccttgctgtaaggcagctttctcagagtactatatattttcaacagtaaagtagcagagtttctctttgaaacccaaaatgtcttctaaagaatcaaatttctatttctgcctctgacaaaaagaacttactatgaaagaaatagttgttttatcaataaaagccccttaatattatgaagaaacttttcatattttttcttctttatccttaattgtgactaagatggaaatctagaaaatattcatgcttctaagtttctgcagtgttactgtaagagagtgtctcgtctacacttcagttcttctctcatgtggaaaactaagctttttatattgacattgccattgaatagctctagcaactattattattcccccaaaccctaaaattctacctattaggtgtcaggttaaagttctaatttatctttagaaatttatgtgaaaaatggttttcctatactggataaagcaattccccttaggaaacatagcctcagagtatttcatataaattttctctatctaattcaaacatatctccccatgatacaccgccagagtgacattgcagacagtctgtgtatgtttaaattttcactttttatggatgagcataaacctagtcttagtttaaaggcaaactaaagttgaggggaaataattaatcaatactgattaattgatttataaggttcaacactgtctaccctaaataatttttatatgctcaaggcaaagcagggaatagaggcaattagctagataattcaagcagaaatccattttcatcgaaattgcctgtgtgcacatatttttagatgaaaaatgaaactaccttacaatattatttttttaaccaatgtatttgtttgcaaacatttgccatgttgaagagtgtgtataggaaaggtctagaaataaataggcttgtgcatacctaggcattcatgctctttcttcctcttcagagatcatcagaaaagaggtgggaatacacaagcaggtgcatgtaagcccaaaagctagaaagccttatatttaaccaaaggttgatgtgttcattccagttattcacttacagatgaaactaaaacaaataaaggcaagctattatcagtttggtagttcattattttagaacaaatttctaaattaatttattcccataacctacaatagcactgagaacagaaaacatgtttcttcttcattttgtttaaagattgcgtacctaggtaagtcacactgtatagataaaaaccttcttctgtattcctcacctctaaattatatgttatttgctatttgaaaactgtagttaactatggttttttattagtctattaaaagatacgtggagatattaaattatacctaaagcagacgtccaacaaattctgtacatgctgctttacatctttgcaacaaacctcttaactagcagcattatttctatagtgtgattacctgagggtgcctccaaatgtatatcatttcactcccctcccctccccacccccaatagattcaaataaataaaatcctgagcaaattaa

SEQ ID NO: 264868 - DNA, 2388 bp, Artificial Sequence
  derived and/or modified sequence
atgggcgagaacgaggccagcctgcccaacaccagcctgcagggcaaaaaaatggcttaccagaaggtgcatgcagaccagagagcgccgggccattcccagtatctggataatgatgacttgcaggcaactgctttggacctcgagtgggacatggagaaggaactggaggagagcggcttcgaccagtttcagctggacggcgccgaaaaccagaacttgggccattcagagactattgatcttaatttagatagcattcagcctgccacatctcccaagggccggttccagaggctccaggaagagtcagattatatcacacattacaccagatcagcccccaaaagcaatcggtgtaacttctgccacgtgctcaagatactgtgtaccgcaactattctgtttatctttgggatcttgatcggctactacgtgcatacaaattgtccctcagacgccccctcaagtggcaccgtggatccacaactgtaccaggagattctaaagaccatccaagccgaggatatcaaaaagagcttcaggaacttagtccagctgtataagaacgaagacgatatggagatctcaaaaaagattaaaactcagtggacctcccttggactggaggacgtgcagtttgtaaattatagcgtactcctcgacctgcccggccccagcccttctaccgtgacactctctagcagtggccagtgctttcaccccaatgggcagccttgttcagaggaagctaggaaggatagctcccaggatcttctgtactcctacgcagcttattccgcaaagggcacccttaaggctgaagtgatcgacgtttcttacggcatggccgacgacttaaagcgtatacgaaaaatcaagaacgtgacgaatcaaattgccctgctgaaactcggaaagctcccgctgctctataagctcagctctttggagaaagcagggtttggtggagtgctgctgtatatcgacccctgcgatctccccaagacggtgaatccctcacatgacacattcatggtgagtctgaatcctgggggtgatcctagcacacctggatatccctcagttgacgaatcgtttcggcagtcccggtcgaacttaacgtcactgctggtgcaaccgatctcagctcccttagttgccaagctcataagctctccgaaggcccgaaccaagaatgaggcttgcagctcactggagctgcccaataatgagattagggtcgtgtccatgcaggtgcagactgttaccaaacttaagactgtcaccaacgtcgtagggtttgtgatgggcctcacgtctccggatagatacataattgtggggagtcaccatcatacggctcattcgtataatggacaggagtgggcttcatcaaccgccattattaccgccttcataagggccctgatgtccaaggtgaagaggggttggcgtccagaccgtaccatcgtgttctgttcctgggggggcactgctttcgggaacatcgggtcttatgagtggggcgaagactttaagaaggtgcttcaaaaaaacgtggttgcttacatatccttacactctccgattcgcggaaacagttcgctgtaccctgtggcttcgccatccctgcagcagctagtggtagaaaagaataatttcaactgcacacgacgggcacagtgccctgagacaaatattagctctattcaaatccagggagacgccgactatttcatcaaccacctgggcgtgccgatcgtgcagttcgcctatgaggatattaagactttggagggtccctctttcctgagcgaagcccgatttagtactagggctacaaagatcgaggaaatggacccatcttttaatcttcatgaaaccataacaaagctctctggggaggtgatattacagattgcgaacgagccggtgttgccttttaatgcattagacatagcattagaggttcaaaataacctgaagggagatcaaccgaatacacatcagctgctggcaatggcgcttagacttcgcgagtcagcagagctgttccaaagtgacgagatgaggcctgctaatgaccccaaggagcgtgccccaattcggatccgaatgctgaacgatatccttcaggacatggaaaaatctttcctggtgaaacaggcccctccaggtttctaccgcaacatactttaccacctcgatgagaagacttctcgcttttctatcctgattgaagcctgggagcattgcaagccactcgcttctaacgagaccctgcaagaggcactcagtgaggtcctgaacagtattaattctgcgcaggtgtactttaaggctggtctggatgtgtttaagagcgtattggacggcaagaattag

SEQ ID NO: 264869 - DNA, 2388 bp, Artificial Sequence
  derived and/or modified sequence
atgggggagaacgaggcgtcactacccaatacctctctacagggcaagaaaatggcttaccagaaagtccatgcagaccaacgcgctccgggtcattcgcagtatttggacaatgacgacttgcaggccacagcacttgacttggaatgggatatggagaaggagctggaagagtccggcttcgatcagttccagctggacggggctgagaaccaaaacctgggccattcagagactatcgacctgaacctggacagcattcagccagccacctctcccaaagggaggtttcagaggctgcaagaagagagtgactatatcactcactataccaggtcagcaccaaaatccaaccgatgcaacttctgtcatgtgttaaaaattctatgcactgccacgatcctcttcatcttcggcatcctaatcggctattacgtccatactaactgcccctccgacgccccttcatcaggaactgtcgatccccagttgtaccaggagatcctcaagacaattcaggccgaggatatcaagaagagcttccggaacctggtccaactatacaagaatgaggatgatatggagatcagcaagaagattaaaactcaatggacatccctcggactggaggacgtacagttcgttaactattccgtgttgctggacctgcctggcccatccccctcgacggtgactctgtcttctagtggtcagtgctttcaccctaacggacagccttgctcggaggaggctcgcaaggatagttcacaggacctgctttatagctacgctgcttatagcgccaaggggactttaaaagccgaggtgatagacgtgtcctacggaatggctgatgatcttaaacgtattagaaagattaagaatgtgactaaccagattgctctgttgaagctcggcaaactccccttgctgtataagctgagctcattggagaaggctgggtttggtggggtgctcctgtatattgacccttgcgatctcccaaagaccgtcaacccaagccacgacacattcatggtgtcccttaatcccggaggcgacccttctactcccggatatccctccgtggacgaaagcttccgccagagtcgatccaatctgacatcactcctcgtgcaacctatatccgccccactcgtggcaaagctcatttcaagcccgaaggctcggactaagaatgaggcttgctcaagtcttgaattgcctaacaacgagatccgagtagtctccatgcaggttcagactgtcactaagctgaagaccgtgacgaatgttgtgggtttcgtaatgggtctgactagccccgatcggtatataatcgtgggaagtcatcatcacactgcccactcatataatggacaggagtgggcatcgagtaccgcaattattactgcatttatccgagccttgatgtccaaagtgaagaggggctggcgcccagaccgcactatcgtgttttgcagctgggggggaactgcgttcggtaatatcggctcctacgaatggggcgaagacttcaaaaaagtccttcaaaagaacgtggtggcatatatctctctgcacagccctattcgtgggaatagtagtctgtacccagtggcttcgccttcgttgcagcagctggttgtggagaaaaacaacttcaattgtactcggagggcccaatgcccagagaccaatattagctccatacaaatccagggggatgcggactatttcatcaaccacctaggtgtgcctatagtgcaatttgcgtacgaagatattaaaaccctggaagggccatctttcctgtccgaggccaggttctccacacgtgctacaaagatagaggaaatggatcccagctttaacctgcatgaaaccattaccaagctctctggggaggtgatacttcagattgcgaacgagcccgtactcccattcaacgcccttgatatcgccctggaggtacagaataatctgaagggagaccaacctaacacccatcagctgctggcaatggccctccgactgagagaaagtgccgaactgttccaatcagacgagatgcgtcctgccaatgatcctaaggagagagctcctatcagaatccgtatgttgaatgatatcttgcaagatatggaaaaaagctttttagttaagcaggcaccccctggattttatcggaacatactgtaccacctggacgaaaaaacgtcaagattttctatcctcatcgaggcttgggagcattgtaagccgctggcgagtaacgagacgctgcaggaagccctgagcgaagtgctgaattctatcaatagcgctcaggtgtatttcaaagctgggctcgacgtgttcaagagcgtgctagatggcaagaattag

SEQ ID NO: 264870 - DNA, 2388 bp, Artificial Sequence
  derived and/or modified sequence
atgggcgagaacgaggccagcctgcccaacaccagcctgcagggcaagaagatggcctaccagaaggtgcacgccgaccagagagcccccggccacagccagtacctggacaacgacgacctgcaggccaccgccctggacctggagtgggacatggagaaggagctggaggagagcggcttcgaccagttccagctggacggcgccgagaaccagaacctgggccacagcgagaccatcgacctgaacctggacagcatccagcccgccaccagccccaagggcagattccagagactgcaggaggagagcgactacatcacccactacaccagaagcgcccccaagagcaacagatgcaacttctgccacgtgctgaagatcctgtgcaccgccaccatcctgttcatcttcggcatcctgatcggctactacgtgcacaccaactgccccagcgacgcccccagcagcggcaccgtggacccccagctgtaccaggagatcctgaagaccatccaggccgaggacatcaagaagagcttcagaaacctggtgcagctgtacaagaacgaggacgacatggagatcagcaagaagatcaagacccagtggaccagcctgggcctggaggacgtgcagttcgtgaactacagcgtgctgctggacctgcccggccccagccccagcaccgtgaccctgagcagcagcggccagtgcttccaccccaacggccagccctgcagcgaggaggccagaaaggacagcagccaggacctgctgtacagctacgccgcctacagcgccaagggcaccctgaaggccgaggtgatcgacgtgagctacggcatggccgacgacctgaagagaatcagaaagatcaagaacgtgaccaaccagatcgccctgctgaagctgggcaagctgcccctgctgtacaagctgagcagcctggagaaggccggcttcggcggcgtgctgctgtacatcgacccctgcgacctgcccaagaccgtgaaccccagccacgacaccttcatggtgagcctgaaccccggcggcgaccccagcacccccggctaccccagcgtggacgagagcttcagacagagcagaagcaacctgaccagcctgctggtgcagcccatcagcgcccccctggtggccaagctgatcagcagccccaaggccagaaccaagaacgaggcctgcagcagcctggagctgcccaacaacgagatcagagtggtgagcatgcaggtgcagaccgtgaccaagctgaagaccgtgaccaacgtggtgggcttcgtgatgggcctgaccagccccgacagatacatcatcgtgggcagccaccaccacaccgcccacagctacaacggccaggagtgggccagcagcaccgccatcatcaccgccttcatcagagccctgatgagcaaggtgaagagaggctggagacccgacagaaccatcgtgttctgcagctggggcggcaccgccttcggcaacatcggcagctacgagtggggcgaggacttcaagaaggtgctgcagaagaacgtggtggcctacatcagcctgcacagccccatcagaggcaacagcagcctgtaccccgtggccagccccagcctgcagcagctggtggtggagaagaacaacttcaactgcaccagaagagcccagtgccccgagaccaacatcagcagcatccagatccagggcgacgccgactacttcatcaaccacctgggcgtgcccatcgtgcagttcgcctacgaggacatcaagaccctggagggccccagcttcctgagcgaggccagattcagcaccagagccaccaagatcgaggagatggaccccagcttcaacctgcacgagaccatcaccaagctgagcggcgaggtgatcctgcagatcgccaacgagcccgtgctgcccttcaacgccctggacatcgccctggaggtgcagaacaacctgaagggcgaccagcccaacacccaccagctgctggccatggccctgagactgagagagagcgccgagctgttccagagcgacgagatgagacccgccaacgaccccaaggagagagcccccatcagaatcagaatgctgaacgacatcctgcaggacatggagaagagcttcctggtgaagcaggccccccccggcttctacagaaacatcctgtaccacctggacgagaagaccagcagattcagcatcctgatcgaggcctgggagcactgcaagcccctggccagcaacgagaccctgcaggaggccctgagcgaggtgctgaacagcatcaacagcgcccaggtgtacttcaaggccggcctggacgtgttcaagagcgtgctggacggcaagaactag

SEQ ID NO: 264871 - protein, 219 aa, Artificial Sequence
  derived and/or modified sequence
MEPGLWLLFGLTVTSAAGFVPCSQSGDAGRRGVSQAPTAARSEGDCEETVAGPGEETVAGPGEGTVAPTALQGPSPGSPGQEQAAEGAPEHHRSRRCTCFTYKDKECVYYCHLDIIWINTPEQTVPYGLSNYRGSFRGKRSAGPLPGNLQLSHRPHLRCACVGRYDKACLHFCTQTLDVSSNSRTAEKTDKEEEGKVRGANRGLCQRRLKSRTNKASRL

SEQ ID NO: 264872 - DNA, 660 bp, Artificial Sequence
  derived and/or modified sequence
atggagcccgggctgtggctgctctttggcctgactgtgacctccgctgctggctttgtgccatgttcccagagtggagatgcgggtaggagaggagtctcacaggccccaaccgccgctcgttccgagggcgattgtgaggagacagtggccggtcccggagaggagacagtggctggtcctggcgagggcacagtcgcccccactgccctgcaaggaccttcacctgggtcgccagggcaagagcaggcagccgagggcgctcccgagcaccacagatcccgccggtgtacatgtttcacctacaaggataaggagtgcgtgtactactgccacctggatataatctggataaacacccccgagcagacagtcccttatggactcagcaattaccgagggagtttccgcggtaaaagatccgccggtccactgcccggcaatcttcaattatcccatcgcccacatctccgatgtgcctgtgtcggaagatacgataaggcttgtctgcacttctgcacccaaacactggatgtttcttccaatagtaggacagccgagaagactgataaagaggaggaaggcaaggtgagaggagccaaccgagggctctgtcagaggcgcttaaagtctaggacaaataaagcctcccggctgtag

SEQ ID NO: 264873 - DNA, 660 bp, Artificial Sequence
  derived and/or modified sequence
atggagcccggcctgtggctgctgtttggcctgactgtgaccagcgctgctggctttgtgccctgcagccagagcggagatgctggccggcggggcgtgtcccaggcccccacagctgcccggtctgagggggactgtgaggagaccgtggccggccctggagaggagaccgtggccggccctggagagggcaccgtggcccccacagccctgcagggccccagccctggcagccctggccaggagcaggccgctgagggcgcccctgagcaccacaggagccgccgctgcacctgcttcacctacaaggacaaggaatgtgtgtactactgccacctggacatcatctggatcaacaccccagagcagacagtgccctacggcctgagcaactaccggggcagcttccggggcaagaggtctgctggccccctgcccggcaacctgcagctgagccaccggccccacctgcgctgtgcctgtgtgggccgctatgacaaggcctgcctgcacttctgcacccagaccctggatgtgagcagcaacagcaggacagctgagaagacagacaaggaggaggagggcaaggtgcggggggccaacagaggcctgtgccagaggcggctgaagagcaggaccaacaaggccagccggctgtag

SEQ ID NO: 264874 - DNA, 660 bp, Artificial Sequence
  derived and/or modified sequence
atggagcccggcctgtggctgctgttcggcctgaccgtgaccagcgccgccgggtttgtgccctgttcccagtctggtgatgctggtcgcagaggagtgtcccaggcccccacagccgcgagatccgaaggagattgtgaggagacagtagccggcccaggcgaggagactgtcgccggtcctggcgagggcacagtggctcccacagcgctgcagggcccgagccctggctctcctgggcaggagcaggctgctgaaggcgcacctgaacatcataggtcacgccgctgcacttgcttcacttacaaggacaaagagtgcgtttattactgtcacttagacattatctggatcaacacgcccgaacaaacagtgccatacggcctgtccaattaccgaggcagctttagagggaaacggtccgccggtccacttccgggaaatttgcagctgagccaccggccccacctccggtgtgcgtgcgtgggacgatacgacaaggcgtgcttacacttctgcactcagacattggacgtgagttcaaatagtcgaactgccgaaaaaaccgacaaggaggaagagggcaaggtgcgcggtgcaaaccggggactttgccagagaaggctgaagtcccgcactaataaggctagccgcctatag

SEQ ID NO: 264875 - DNA, 660 bp, Artificial Sequence
  derived and/or modified sequence
atggagcctgggttgtggctgctcttcggtctgacagtcacctcggcagctggttttgttccatgctcccaaagcggcgatgcgggaaggagaggtgtctcccaggcccctaccgccgcaaggagtgagggagattgtgaggagacggtggcgggtccgggagaggaaactgtggcgggacctggggagggcacggtggccccaacagcacttcaaggcccaagtcccggttctccaggccaggaacaggccgctgaaggggctcccgaacaccaccggagcaggagatgcacgtgcttcacctataaggacaaagagtgcgtctattactgtcacctggacataatttggataaatacccccgaacagactgtgccttatggtctctctaattatagaggctcctttcgcggtaaaaggagcgctggacctctgcccggtaacctgcaattatctcaccgcccacatctgaggtgcgcctgcgtggggaggtacgacaaggcatgccttcacttctgtacgcaaacactcgatgtatcttctaatagtaggactgctgaaaaaacagataaggaggaagaaggcaaggtccgcggagccaatcgtggactgtgtcaacgccgtctgaagagcaggaccaataaagcatcccgcctgtag

SEQ ID NO: 264876 - DNA, 660 bp, Artificial Sequence
  derived and/or modified sequence
atggagcccggcctgtggctgctgttcggcctgaccgtgaccagcgccgccggcttcgtgccctgcagccagagcggcgacgccggcagaagaggcgtgagccaggcccccaccgccgccagaagcgagggcgactgcgaggagaccgtggccggccccggcgaggagaccgtggccggccccggcgagggcaccgtggcccccaccgccctgcagggccccagccccggcagccccggccaggagcaggccgccgagggcgcccccgagcaccacagaagcagaagatgcacctgcttcacctacaaggacaaggagtgcgtgtactactgccacctggacatcatctggatcaacacccccgagcagaccgtgccctacggcctgagcaactacagaggcagcttcagaggcaagagaagcgccggccccctgcccggcaacctgcagctgagccacagaccccacctgagatgcgcctgcgtgggcagatacgacaaggcctgcctgcacttctgcacccagaccctggacgtgagcagcaacagcagaaccgccgagaagaccgacaaggaggaggagggcaaggtgagaggcgccaacagaggcctgtgccagagaagactgaagagcagaaccaacaaggccagcagactgtag

SEQ ID NO: 264877 - DNA, 2655 bp, Artificial Sequence
  derived and/or modified sequence
cctcgggccgctgcgctcctggccagctccccccagcgcctgggaggcgacccccagtgcgcccgggttcaaaggcccggcgaggcagttccagcccctctggggggcggggaggcgacgggggtggtgcagaagccagaaaagcccgagccacagccggccagctccgcgcagggatgggcagcgcgctctgaaagtttatgaccgccgcagccaactcctggccggagctggagacgcagcgagcgatcggccggcctcgaacccccacagctggagggcgaggccagctgtacccggccccagtgccctttcgcggccacaagcggccgtcctcctggtccggtgctccggcgcctgatctaggttcatggagccggggctgtggctccttttcgggctcacagtgacctccgccgcaggattcgtgccttgctcccagtctggggatgctggcaggcgcggcgtgtcccaggcccccactgcagccagatctgagggggactgtgaagagactgtggctggccctggcgaggagactgtggctggccctggcgaggggactgtggccccgacagcactgcagggtccaagccctggaagccctgggcaggagcaggcggccgagggggcccctgagcaccaccgatccaggcgctgcacgtgcttcacctacaaggacaaggagtgtgtctactattgccacctggacatcatttggatcaacactcccgaacagacggtgccctatggactgtccaactacagaggaagcttccggggcaagaggtctgcggggccacttccagggaatctgcagctctcacatcggccacacttgcgctgcgcttgtgtggggagatatgacaaggcctgcctgcacttttgcacccaaactctggacgtcagcagtaattcaaggacggcagaaaaaacagacaaagaagaggaagggaaggtgagaggtgccaacagaggcctgtgtcaaaggaggttgaagtcaaggaccaacaaagcaagcaggctttagacctccaccatccaaagctcatgcccggcagtggactcgccctcgctccatctacctgcccccgctgcctctttcaggaaggagccccttaggaggacaggcctgcagcatcctggtctcgggaggcttctgtcattgctcacacacagttcagatttccacctctttatagacaagaagtgaatttgcctggggcagaacacccacccaaagagtccccacttaacaataccccccccccacggcaagaatgcccaaatccgaatgaccccagttttcctaatgagtaaaatgatcccagatgtgccccagagcatgacgcctgcagctccggtttcatgcaggaaattggttttggagagttttggcaagttggaaagccacttactggcttttgacatgacttctcttggagaataagtggactccaagctaactctttgcaaatgtaaacacatgtccatcttgtaataaatgcaaaatgcccgtgcagcagaagcatgcgactttcatatccttgcctagaataggctgcatggtgtatgtcagtgagggccacgaggcgtcggctttagacacagatcatagctctacaggagtttatgaatttgaagcttatgggattttggcagagaaattttcagctgtgcttgatacccaccaaaagaatgtatctcgaaagaatgaaggaagaagaaaaaaggatccttgatgtttgtgacaagaaaatgagaaagttagtatctgcaatacagagcttgttcctgttcagtgactgaccctctgtattctgtatagacaccaggccgatacacagtggagttcccaggccttgtttgcaggaagccgactgtaaagacagccccagctcaaggctattaggttgaatatttgctttcatgagtaaatgtggatctttggggaatggcttcaaaataagtcacgaacacaaattctttgtaaattatgtaaattcctgtttatataaattggcaacaacttataccgtctgacagttcaaaatctctttcagctgcgctcttcccaccgagccgagcttactgtgagtgtggagatgttatcccaccatgtaaagtcgcctgcgcaggggagggctgcccatctccccaacccagtcacagagagataggaaacggcatttgagtgggtgtccagggccccgtagagagacatttaagatggtgtatgacagagcattggccttgaccaaatgttaaatcctctgtgtgtatttcataagttattacaggtataaaagtgatgacctatcatgaggaaatgaaagtggctgatttgctggtaggattttgtacagtttagagaagcgattatttattgtgaaactgttctccactccaactcctttatgtggatctgttcaaagtagtcactgtatatacgtatagagaggtagataggtaggtagattttaaattgcattctgaatacaaactcatactccttagagcttgaattacatttttaaaatgcatatgtgctgtttggcaccgtggcaagatggtatcagagagaaacccatcaattgctcaaatactcagaaagtactgtcaaaagcctaataaaaaacctaaagtttgctctga

SEQ ID NO: 264878 - protein, 224 aa, Artificial Sequence
  derived and/or modified sequence
MEPGLWLLFGLTVTSAAGFVPCSQSGDAGRRGVSQAPTAARSEGDCEETVAGPGEETVAGPGEGTVAPTALQGPSPGSPGQEQAAEGAPEHHRSRRCTCFTYKDKECVYYCHLDIIWINTPEQTVPYGLSNYRGSFRGKRSAGPLPGNLQLSHRPHLRCACVGRYDKACLHFCTQTLDVSRQVEVKDQQSKQALDLHHPKLMPGSGLALAPSTCPRCLFQEGAP

SEQ ID NO: 264879 - DNA, 675 bp, Artificial Sequence
  derived and/or modified sequence
atggaacccggcttgtggctgctttttgggctaactgtgaccagcgcagctggattcgtgccgtgttcccagtccggggacgccggacggcgcggagtgagccaggcaccgaccgctgctcgaagcgaaggggattgcgaggagacagtggccgggccgggtgaggagacggtggctggccctggagaaggcaccgtggcccctaccgccctgcaggggcccagccccgggtctcccggacaggagcaggcagctgaaggtgccccagaacatcaccgatctcgtaggtgcacgtgcttcacctataaggataaagagtgtgtgtactattgccatttagacataatttggatcaacaccccagaacagacagttccatatggcctcagcaattaccgtggaagcttcagagggaagaggtcagccggtccccttccaggcaacttacagttaagccataggccacatctcaggtgtgcgtgcgtgggcagatatgataaggcctgtctgcacttttgcacgcagactctggatgtgtctaggcaggtggaagtgaaggaccaacagtcgaagcaagcactggatctacaccatcctaagctgatgcccggttcaggcctggccctggcaccctccacctgcccaaggtgtctgtttcaggaaggggccccctag

SEQ ID NO: 264880 - DNA, 675 bp, Artificial Sequence
  derived and/or modified sequence
atggagcccggcctgtggctgctgtttggcctgactgtgaccagcgctgctggctttgtgccctgcagccagagcggagatgctggccggcggggcgtgtcccaggcccccacagctgcccggtctgagggggactgtgaggagaccgtggccggccctggagaggagaccgtggccggccctggagagggcaccgtggcccccacagccctgcagggccccagccctggcagccctggccaggagcaggccgctgagggcgcccctgagcaccacaggagccgccgctgcacctgcttcacctacaaggacaaggaatgtgtgtactactgccacctggacatcatctggatcaacaccccagagcagacagtgccctacggcctgagcaactaccggggcagcttccggggcaagaggtctgctggccccctgcccggcaacctgcagctgagccaccggccccacctgcgctgtgcctgtgtgggccgctatgacaaggcctgcctgcacttctgcacccagaccctggatgtgtcccggcaggtggaggtgaaggaccagcagagcaagcaggccctggacctgcaccaccccaagctgatgcctggcagcggcctggccctggcccccagcacctgcccccgctgcctcttccaggagggcgccccctag

SEQ ID NO: 264881 - DNA, 675 bp, Artificial Sequence
  derived and/or modified sequence
atggagcccggcctgtggctgctgttcggcctgaccgtgaccagcgctgccgggtttgttccttgttcgcagagtggggatgcgggccggagaggggtcagtcaggccccgacggctgcccgctctgaaggagattgcgaggaaaccgtcgccgggcccggtgaagagaccgtggccggtccaggcgagggtaccgtggctcctactgctctgcaaggaccatctcccgggagtcccggtcaggaacaggcggccgagggcgctcctgagcatcatagaagcaggaggtgtacctgtttcacatataaagataaggagtgtgtgtattattgtcaccttgatatcatttggattaatactcctgagcaaactgtcccctatgggctgagtaattacagaggtagctttcggggaaaacgctctgctggacctcttcccggaaacctgcaactgtcacaccgcccgcatctgaggtgtgcctgtgtggggaggtacgacaaggcgtgtctgcacttctgcacccagacactagatgtatctcggcaggtggaagtcaaggaccagcagagtaaacaggccctggatctccatcaccctaaactcatgcctggctctggcctcgccttggcgccctccacatgccctcgatgcctgttccaggaaggcgctccatag

SEQ ID NO: 264882 - DNA, 675 bp, Artificial Sequence
  derived and/or modified sequence
atggagcccggtctgtggctcctgtttggactgactgttacgagtgcagctgggtttgttccgtgcagccaatcaggggacgccggtaggagaggcgtgtctcaggcacccactgccgctcgctccgagggggactgcgaagaaacggtagcaggtcctggagaagagaccgtggccggaccgggtgaaggaaccgtggcgccaactgccttgcaggggcctagccctggcagccctgggcaggaacaggcagcagaaggggcaccggagcaccataggtccagaagatgcacctgtttcacctataaggataaggagtgtgtgtactactgccatctggacattatctggatcaataccccagagcaaacagtcccttatgggttgtcgaattataggggaagtttccgaggtaagcgctccgccggaccattacccggtaacctgcaactgtcacaccggcctcacctcaggtgtgcgtgtgtggggagatacgacaaagcctgtctccacttctgcacgcagacactcgacgtttctcgtcaagtggaagtgaaagaccaacagtctaaacaggccctcgatctgcaccatcctaagctgatgccaggtagtggactggccctcgctcccagcacctgcccacgctgtctcttccaggagggagcaccctag

SEQ ID NO: 264883 - DNA, 675 bp, Artificial Sequence
  derived and/or modified sequence
atggagcccggcctgtggctgctgttcggcctgaccgtgaccagcgccgccggcttcgtgccctgcagccagagcggcgacgccggcagaagaggcgtgagccaggcccccaccgccgccagaagcgagggcgactgcgaggagaccgtggccggccccggcgaggagaccgtggccggccccggcgagggcaccgtggcccccaccgccctgcagggccccagccccggcagccccggccaggagcaggccgccgagggcgcccccgagcaccacagaagcagaagatgcacctgcttcacctacaaggacaaggagtgcgtgtactactgccacctggacatcatctggatcaacacccccgagcagaccgtgccctacggcctgagcaactacagaggcagcttcagaggcaagagaagcgccggccccctgcccggcaacctgcagctgagccacagaccccacctgagatgcgcctgcgtgggcagatacgacaaggcctgcctgcacttctgcacccagaccctggacgtgagcagacaggtggaggtgaaggaccagcagagcaagcaggccctggacctgcaccaccccaagctgatgcccggcagcggcctggccctggcccccagcacctgccccagatgcctgttccaggagggcgccccctag

SEQ ID NO: 264884 - DNA, 2318 bp, Artificial Sequence
  derived and/or modified sequence
cgaacccccacagctggagggcgaggccagctgtacccggccccagtgccctttcgcggccacaagcggccgtcctcctggtccggtgctccggcgcctgatctaggttcatggagccggggctgtggctccttttcgggctcacagtgacctccgccgcaggattcgtgccttgctcccagtctggggatgctggcaggcgcggcgtgtcccaggcccccactgcagccagatctgagggggactgtgaagagactgtggctggccctggcgaggagactgtggctggccctggcgaggggactgtggccccgacagcactgcagggtccaagccctggaagccctgggcaggagcaggcggccgagggggcccctgagcaccaccgatccaggcgctgcacgtgcttcacctacaaggacaaggagtgtgtctactattgccacctggacatcatttggatcaacactcccgaacagacggtgccctatggactgtccaactacagaggaagcttccggggcaagaggtctgcggggccacttccagggaatctgcagctctcacatcggccacacttgcgctgcgcttgtgtggggagatatgacaaggcctgcctgcacttttgcacccaaactctggacgtcagcagacaggttgaagtcaaggaccaacaaagcaagcaggctttagacctccaccatccaaagctcatgcccggcagtggactcgccctcgctccatctacctgcccccgctgcctctttcaggaaggagccccttaggaggacaggcctgcagcatcctggtctcgggaggcttctgtcattgctcacacacagttcagatttccacctctttatagacaagaagtgaatttgcctggggcagaacacccacccaaagagtccccacttaacaataccccccccccacggcaagaatgcccaaatccgaatgaccccagttttcctaatgagtaaaatgatcccagatgtgccccagagcatgacgcctgcagctccggtttcatgcaggaaattggttttggagagttttggcaagttggaaagccacttactggcttttgacatgacttctcttggagaataagtggactccaagctaactctttgcaaatgtaaacacatgtccatcttgtaataaatgcaaaatgcccgtgcagcagaagcatgcgactttcatatccttgcctagaataggctgcatggtgtatgtcagtgagggccacgaggcgtcggctttagacacagatcatagctctacaggagtttatgaatttgaagcttatgggattttggcagagaaattttcagctgtgcttgatacccaccaaaagaatgtatctcgaaagaatgaaggaagaagaaaaaaggatccttgatgtttgtgacaagaaaatgagaaagttagtatctgcaatacagagcttgttcctgttcagtgactgaccctctgtattctgtatagacaccaggccgatacacagtggagttcccaggccttgtttgcaggaagccgactgtaaagacagccccagctcaaggctattaggttgaatatttgctttcatgagtaaatgtggatctttggggaatggcttcaaaataagtcacgaacacaaattctttgtaaattatgtaaattcctgtttatataaattggcaacaacttataccgtctgacagttcaaaatctctttcagctgcgctcttcccaccgagccgagcttactgtgagtgtggagatgttatcccaccatgtaaagtcgcctgcgcaggggagggctgcccatctccccaacccagtcacagagagataggaaacggcatttgagtgggtgtccagggccccgtagagagacatttaagatggtgtatgacagagcattggccttgaccaaatgttaaatcctctgtgtgtatttcataagttattacaggtataaaagtgatgacctatcatgaggaaatgaaagtggctgatttgctggtaggattttgtacagtttagagaagcgattatttattgtgaaactgttctccactccaactcctttatgtggatctgttcaaagtagtcactgtatatacgtatagagaggtagataggtaggtagattttaaattgcattctgaatacaaactcatactccttagagcttgaattacatttttaaaatgcatatgtgctgtttggcaccgtggcaagatggtatcagagagaaacccatcaattgctcaaatactcagaaagtactgtcaaaagcctaataaaaaacctaaagtttgctctga

SEQ ID NO: 264885 - protein, 238 aa, Artificial Sequence
  derived and/or modified sequence
MEPGLWLLFGLTVTSAAGFVPCSQSGDAGRRGVSQAPTAARSEGDCEETVAGPGEETVAGPGEGTVAPTALQGPSPGSPGQEQAAEGAPEHHRSRRCTCFTYKDKECVYYCHLDIIWINTPEQTVPYGLSNYRGSFRGKRSAGPLPGNLQLSHRPHLRCACVGRYDKACLHFCTQTLDVSSNSRTAEKTDKEEEGKVEVKDQQSKQALDLHHPKLMPGSGLALAPSTCPRCLFQEGAP

SEQ ID NO: 264886 - DNA, 717 bp, Artificial Sequence
  derived and/or modified sequence
atggagcctggtctgtggcttctctttggcctcacggttacctctgcggctggtttcgtaccctgttcccagtcgggggacgccggaaggagaggcgtgagccaggcgcccactgcagccaggagcgagggcgactgcgaggagacagtcgcagggcccggtgaggaaactgtcgccggccccggggagggcaccgtcgctcccacagctctgcagggaccgagtccaggaagccctgggcaggagcaggcggctgagggagcacccgagcatcaccgaagcagacggtgtacgtgtttcacgtacaaggataaggagtgcgtttactattgccacctggacatcatatggattaatacccccgagcagacggtgccttatggcctgtccaactatagaggctcttttaggggaaagcgtagcgcaggtccgctgccgggaaatttacagctcagtcaccgcccgcacctgagatgcgcttgtgtcggacgttatgacaaggcgtgcctccatttttgcactcagacccttgatgtttcctccaattcacgaacagctgaaaaaaccgataaagaggaggagggcaaggtggaggtcaaggatcaacaatcaaagcaggctctcgatttacatcatccaaagctgatgcccgggtccggtctggccctcgctccatcaacttgtccacgctgcttattccaagagggcgcaccatag

SEQ ID NO: 264887 - DNA, 717 bp, Artificial Sequence
  derived and/or modified sequence
atggagcccgggctgtggctgctattcggcctgacggttacttcggctgccgggttcgtgccctgctctcagtctggagatgcaggccggcgcggcgttagccaggccccgactgctgccagatctgagggggactgcgaggaaacagttgcagggccaggggaggaaaccgtggcgggtccaggcgaaggaacggtggccccaactgccctccagggcccatctcccggatcgccaggacaggagcaagccgccgagggcgctcccgagcaccacaggtctcggcggtgcacatgttttacctataaagacaaggaatgtgtttattattgccaccttgacatcatctggattaacactccagagcagacagtaccatacggtttatccaattaccgcgggtcatttcgcggtaagcggtcagccggtcccctgcctggtaaccttcagctatctcaccggccccatctccgatgcgcctgcgtggggaggtatgacaaggcttgtctacatttttgcacccagacgctggatgtctctagcaatagtcggactgccgagaagactgacaaagaggaggagggaaaggttgaggttaaagatcaacagagcaagcaagctttggacctccaccatccaaagctgatgccgggctctggccttgcccttgccccttccacgtgtccccggtgcttattccaggagggcgcgccatag

SEQ ID NO: 264888 - DNA, 717 bp, Artificial Sequence
  derived and/or modified sequence
atggagcccggcctgtggctgctgtttggcctgactgtgaccagcgctgctggctttgtgccctgcagccagagcggagatgctggccggcggggcgtgtcccaggcccccacagctgcccggtctgagggggactgtgaggagaccgtggccggccctggagaggagaccgtggccggccctggagagggcaccgtggcccccacagccctgcagggccccagccctggcagccctggccaggagcaggccgctgagggcgcccctgagcaccacaggagccgccgctgcacctgcttcacctacaaggacaaggaatgtgtgtactactgccacctggacatcatctggatcaacaccccagagcagacagtgccctacggcctgagcaactaccggggcagcttccggggcaagaggtctgctggccccctgcccggcaacctgcagctgagccaccggccccacctgcgctgtgcctgtgtgggccgctatgacaaggcctgcctgcacttctgcacccagaccctggatgtgagcagcaacagcaggacagctgagaagacagacaaggaggaggagggcaaggtggaggtgaaggaccagcagagcaagcaggccctggacctgcaccaccccaagctgatgcctggcagcggcctggccctggcccccagcacctgcccccgctgcctcttccaggagggcgccccctag

SEQ ID NO: 264889 - DNA, 717 bp, Artificial Sequence
  derived and/or modified sequence
atggagcccggcctgtggctgctgttcggcctgaccgtgaccagcgcagcaggatttgttccttgctcccagagcggggatgccggaagaagaggcgtttcccaggcaccgactgctgcgcgctccgagggagactgtgaggaaaccgtggctgggccaggcgaggagaccgttgcaggtcctggcgaggggaccgtggctccaacagccctccagggaccatccccagggtcccctggccaggaacaggcagccgagggggcccccgagcatcaccgaagtagacggtgtacttgtttcacctataaagacaaggaatgcgtgtactactgccatttggacattatatggattaacacacctgaacaaacagtgccctatggactgagcaactaccgagggtcattcaggggtaagcggagcgctggacccctgcctggcaatctgcagttgagccaccggcctcacctccgttgtgcctgcgttgggcgttacgataaggcatgtctgcacttctgtacacagaccctggacgtgagtagcaatagccggaccgctgaaaaaacggacaaagaggaggaagggaaggttgaggtcaaggaccagcaatccaagcaggcattagatctgcatcacccaaaactgatgcccggctctggactggccttggctccctctacatgtccaaggtgcttgtttcaggaaggcgccccctag

SEQ ID NO: 264890 - DNA, 717 bp, Artificial Sequence
  derived and/or modified sequence
atggagcccggcctgtggctgctgttcggcctgaccgtgaccagcgcagcagggtttgtgccctgcagtcagtccggtgacgcgggacgcaggggggtaagccaggctcctacggccgcccgatctgagggggattgcgaggagaccgtggccgggcctggagaggaaacggtggccggcccaggcgaaggcacagttgccccaacagccctgcaaggcccttcccccgggtcacctgggcaagaacaagccgcagaaggagcccctgaacatcacaggtcgcgaaggtgcacatgttttacatataaagacaaggaatgcgtatattattgtcaccttgatattatatggattaacacgcccgaacaaacggtgccatacgggctgagcaattatcgcggtagcttccgggggaaacggtctgccggcccacttcctggcaatttgcaactcagtcaccggcctcacctgagatgtgcatgcgttggacgctacgacaaggcttgtttgcacttctgtacacagaccctggacgtatcatcaaatagccgcacagccgagaagacagacaaggaggaggaggggaaggtggaagtgaaagaccagcaatccaagcaagcgctagatctccaccatcccaaactcatgcccgggtccggcctagctctggctcccagtacgtgtccaaggtgcctgtttcaggagggggcaccatag

SEQ ID NO: 264891 - DNA, 717 bp, Artificial Sequence
  derived and/or modified sequence
atggagcccggactttggctgcttttcggcctgaccgttacatctgccgcaggatttgtgccatgctcccagtccggcgatgctgggaggcgcggagtctctcaagccccaactgccgcacggtctgaaggggattgcgaggagacggtggccggaccaggagaggagaccgtggcaggacctggagaagggacagtggctcctacggccttacagggacctagcccgggaagcccgggtcaggagcaggccgctgagggagccccagagcaccaccgcagccggcgttgtacatgcttcacttacaaggataaggagtgcgtgtattactgccatctggatattatttggatcaatacccctgagcaaaccgtaccttacggtctgtctaattacaggggcagcttccgtgggaaacgctcggccggacccctgcccggaaatttacaattgtctcaccgaccacatctaaggtgcgcatgcgtgggtaggtacgataaagcttgcttgcacttttgcacgcagaccctagatgtgtcctcaaactcccgtacagccgaaaagacagataaagaagaggagggaaaagtagaggtcaaggaccagcagtccaagcaggccctcgacctccatcatccaaagttgatgcctggtagtggactggccctggcgccaagtacctgtcctcgctgcctgtttcaggaaggagccccatag

SEQ ID NO: 264892 - DNA, 717 bp, Artificial Sequence
  derived and/or modified sequence
atggaacctggcctgtggttgttatttggactcactgtgacctccgcagcgggattcgtgccctgcagtcagagcggggacgctggacgccgtggagtgagccaggcccctaccgccgctagatctgagggcgattgtgaggagaccgtggcgggtcctggtgaagagactgtcgccggtccaggcgagggtacagtggcccctacagccttgcagggaccatcacccggatcccccggtcaagaacaggcagcggagggggctccagaacaccatagaagcaggaggtgcacctgcttcacctacaaggacaaggagtgcgtctattactgccacctcgacattatatggataaataccccggagcagactgtaccttatggcctgtcgaactaccgaggatcctttagagggaaacggtcagccggacctctgcctggaaatcttcagctgtcacaccgaccacacttacgttgcgcctgcgtaggccgatatgacaaggcttgtctgcatttttgcacccaaactttggatgtctcctccaactcccggaccgccgaaaaaacggataaagaggaggagggaaaagtggaagtaaaggatcagcagagtaagcaggcattggacctgcatcaccccaagcttatgccaggttcaggtctggccttagcgccttccacttgtccccgttgtctgttccaggaaggggctccctag

SEQ ID NO: 264893 - DNA, 717 bp, Artificial Sequence
  derived and/or modified sequence
atggagcccggcctgtggctgctgttcggcctgaccgtgaccagcgccgccggcttcgtgccctgcagccagagcggcgacgccggcagaagaggcgtgagccaggcccccaccgccgccagaagcgagggcgactgcgaggagaccgtggccggccccggcgaggagaccgtggccggccccggcgagggcaccgtggcccccaccgccctgcagggccccagccccggcagccccggccaggagcaggccgccgagggcgcccccgagcaccacagaagcagaagatgcacctgcttcacctacaaggacaaggagtgcgtgtactactgccacctggacatcatctggatcaacacccccgagcagaccgtgccctacggcctgagcaactacagaggcagcttcagaggcaagagaagcgccggccccctgcccggcaacctgcagctgagccacagaccccacctgagatgcgcctgcgtgggcagatacgacaaggcctgcctgcacttctgcacccagaccctggacgtgagcagcaacagcagaaccgccgagaagaccgacaaggaggaggagggcaaggtggaggtgaaggaccagcagagcaagcaggccctggacctgcaccaccccaagctgatgcccggcagcggcctggccctggcccccagcacctgccccagatgcctgttccaggagggcgccccctag

SEQ ID NO: 264894 - DNA, 2636 bp, Artificial Sequence
  derived and/or modified sequence
cgctgtcctgggtgcgcctcgggccgctgcgctcctggccagctccccccagcgcctgggaggcgacccccagtgcgcccgggttcaaaggcccggcgaggcagttccagcccctctggggggcggggaggcgacgggggtggtgcagaagccagaaaagcccgagccacagccggccagctccgcgcagggatgggcagcgcgctctgaaagtttatgaccgccgcagccaactcctggccggagctggagacgcagcgagcgatcggccggcctcgaacccccacagctggagggcgaggccagctgtacccggccccagtgccctttcgcggccacaagcggccgtcctcctggtccggtgctccggcgcctgatctaggttcatggagccggggctgtggctccttttcgggctcacagtgacctccgccgcaggattcgtgccttgctcccagtctggggatgctggcaggcgcggcgtgtcccaggcccccactgcagccagatctgagggggactgtgaagagactgtggctggccctggcgaggagactgtggctggccctggcgaggggactgtggccccgacagcactgcagggtccaagccctggaagccctgggcaggagcaggcggccgagggggcccctgagcaccaccgatccaggcgctgcacgtgcttcacctacaaggacaaggagtgtgtctactattgccacctggacatcatttggatcaacactcccgaacagacggtgccctatggactgtccaactacagaggaagcttccggggcaagaggtctgcggggccacttccagggaatctgcagctctcacatcggccacacttgcgctgcgcttgtgtggggagatatgacaaggcctgcctgcacttttgcacccaaactctggacgtcagcagtaattcaaggacggcagaaaaaacagacaaagaagaggaagggaaggttgaagtcaaggaccaacaaagcaagcaggctttagacctccaccatccaaagctcatgcccggcagtggactcgccctcgctccatctacctgcccccgctgcctctttcaggaaggagccccttaggaggacaggcctgcagcatcctggtctcgggaggcttctgtcattgctcacacacagttcagatttccacctctttatagacaagaagtgaatttgcctggggcagaacacccacccaaagagtccccacttaacaataccccccccccacggcaagaatgcccaaatccgaatgaccccagttttcctaatgagtaaaatgatcccagatgtgccccagagcatgacgcctgcagctccggtttcatgcaggaaattggttttggagagttttggcaagttggaaagccacttactggcttttgacatgacttctcttggagaataagtggactccaagctaactctttgcaaatgtaaacacatgtccatcttgtaataaatgcaaaatgcccgtgcagcagaagcatgcgactttcatatccttgcctagaataggctgcatggtgtatgtcagtgagggccacgaggcgtcggctttagacacagatcatagctctacaggagtttatgaatttgaagcttatgggattttggcagagaaattttcagctgtgcttgatacccaccaaaagaatgtatctcgaaagaatgaaggaagaagaaaaaaggatccttgatgtttgtgacaagaaaatgagaaagttagtatctgcaatacagagcttgttcctgttcagtgactgaccctctgtattctgtatagacaccaggccgatacacagtggagttcccaggccttgtttgcaggaagccgactgtaaagacagccccagctcaaggctattaggttgaatatttgctttcatgagtaaatgtggatctttggggaatggcttcaaaataagtcacgaacacaaattctttgtaaattatgtaaattcctgtttatataaattggcaacaacttataccgtctgacagttcaaaatctctttcagctgcgctcttcccaccgagccgagcttactgtgagtgtggagatgttatcccaccatgtaaagtcgcctgcgcaggggagggctgcccatctccccaacccagtcacagagagataggaaacggcatttgagtgggtgtccagggccccgtagagagacatttaagatggtgtatgacagagcattggccttgaccaaatgttaaatcctctgtgtgtatttcataagttattacaggtataaaagtgatgacctatcatgaggaaatgaaagtggctgatttgctggtaggattttgtacagtttagagaagcgattatttattgtgaaactgttctccactccaactcctttatgtggatctgttcaaagtagtcactgtatatacgtatagagaggtagataggtaggtagattttaaattgcattctgaatacaaactcatactccttagagcttgaattacatttttaaaatgcatatgtgctgtttggcaccgtggcaagatggtatcagagagaaacccatcaattgctcaaatactcagaaagtactgtcaaaagcctaataaaaaacctaaagtttgctctga

SEQ ID NO: 264895 - DNA, 2397 bp, Artificial Sequence
  derived and/or modified sequence
ctcgggccgctgcgctcctggccagctccccccagcgcctgggaggcgacccccagtgcgcccgggttcaaaggcccggcgaggcagttccagcccctctggggggcggggaggcgacgggggtggtgcagaagccagaaaagcccgagccacagccggccagctccgcgcagggatgggcagcgcgctctgaaagtttatgaccgccgcagccaactcctggccggagctggagacgcagcgagcgatcggccggcctcgaacccccacagctggagggcgaggccagctgtacccggccccagtgccctttcgcggccacaagcggccgtcctcctggtccggtgctccggcgcctgatctaggttcatggagccggggctgtggctccttttcgggctcacagtgacctccgccgcaggattcgtgccttgctcccagtctggggatgctggcaggcgcggcgtgtcccaggcccccactgcagccagatctgagggggactgtgaagagactgtggctggccctggcgaggagactgtggctggccctggcgaggggactgtggccccgacagcactgcagggtccaagccctggaagccctgggcaggagcaggcggccgagggggcccctgagcaccaccgatccaggcgctgcacgtgcttcacctacaaggacaaggagtgtgtctactattgccacctggacatcatttggatcaacactcccgaacagacggtgccctatggactgtccaactacagaggaagcttccggggcaagaggtctgcggggccacttccagggaatctgcagctctcacatcggccacacttgcgctgcgcttgtgtggggagatatgacaaggcctgcctgcacttttgcacccaaactctggacgtcagcagtaattcaaggacggcagaaaaaacagacaaagaagaggaagggaaggttgaagtcaaggaccaacaaagcaagcaggctttagacctccaccatccaaagctcatgcccggcagtggactcgccctcgctccatctacctgcccccgctgcctctttcaggaaggagccccttaggaggacaggcctgcactccggtttcatgcaggaaattggttttggagagttttggcaagttggaaagccacttactggcttttgacatgacttctcttggagaataagtggactccaagctaactctttgcaaatgtaaacacatgtccatcttgtaataaatgcaaaatgcccgtgcagcagaagcatgcgactttcatatccttgcctagaataggctgcatggtgtatgtcagtgagggccacgaggcgtcggctttagacacagatcatagctctacaggagtttatgaatttgaagcttatgggattttggcagagaaattttcagctgtgcttgatacccaccaaaagaatgtatctcgaaagaatgaaggaagaagaaaaaaggatccttgatgtttgtgacaagaaaatgagaaagttagtatctgcaatacagagcttgttcctgttcagtgactgaccctctgtattctgtatagacaccaggccgatacacagtggagttcccaggccttgtttgcaggaagccgactgtaaagacagccccagctcaaggctattaggttgaatatttgctttcatgagtaaatgtggatctttggggaatggcttcaaaataagtcacgaacacaaattctttgtaaattatgtaaattcctgtttatataaattggcaacaacttataccgtctgacagttcaaaatctctttcagctgcgctcttcccaccgagccgagcttactgtgagtgtggagatgttatcccaccatgtaaagtcgcctgcgcaggggagggctgcccatctccccaacccagtcacagagagataggaaacggcatttgagtgggtgtccagggccccgtagagagacatttaagatggtgtatgacagagcattggccttgaccaaatgttaaatcctctgtgtgtatttcataagttattacaggtataaaagtgatgacctatcatgaggaaatgaaagtggctgatttgctggtaggattttgtacagtttagagaagcgattatttattgtgaaactgttctccactccaactcctttatgtggatctgttcaaagtagtcactgtatatacgtatagagaggtagataggtaggtagattttaaattgcattctgaatacaaactcatactccttagagcttgaattacatttttaaaatgcatatgtgctgtttggcaccgtggcaagatggtatcagagagaaacccatcaattgctcaaatactcagaaagtactgtcaaaagcctaataaaaaacctaaagtttgctctg

SEQ ID NO: 264896 - protein, 706 aa, Artificial Sequence
  derived and/or modified sequence
MNPQQQRMAAIGTDKELSDLLDFSAMFSPPVNSGKTRPTTLGSSQFSGSGIDERGGTTSWGTSGQPSPSYDSSRGFTDSPHYSDHLNDSRLGAHEGLSPTPFMNSNLMGKTSERGSFSLYSRDTGLPGCQSSLLRQDLGLGSPAQLSSSGKPGTAYYSFSATSSRRRPLHDSAALDPLQAKKVRKVPPGLPSSVYAPSPNSDDFNRESPSYPSPKPPTSMFASTFFMQDGTHNSSDLWSSSNGMSQPGFGGILGTSTSHMSQSSSYGNLHSHDRLSYPPHSVSPTDINTSLPPMSSFHRGSTSSSPYVAASHTPPINGSDSILGTRGNAAGSSQTGDALGKALASIYSPDHTSSSFPSNPSTPVGSPSPLTGTSQWPRPGGQAPSSPSYENSLHSLKNRVEQQLHEHLQDAMSFLKDVCEQSRMEDRLDRLDDAIHVLRNHAVGPSTSLPAGHSDIHSLLGPSHNAPIGSLNSNYGGSSLVASSRSASMVGTHREDSVSLNGNHSVLSSTVTTSSTDLNHKTQENYRGGLQSQSGTVVTTEIKTENKEKDENLHEPPSSDDMKSDDESSQKDIKVSSRGRTSSTNEDEDLNPEQKIEREKERRMANNARERLRVRDINEAFKELGRMCQLHLKSEKPQTKLLILHQAVAVILSLEQQVRERNLNPKAACLKRREEEKVSAVSAEPPTTLPGTHPGLSETTNPMGHM

SEQ ID NO: 264897 - DNA, 2121 bp, Artificial Sequence
  derived and/or modified sequence
atgaacccccagcagcagagaatggccgccatcggcaccgacaaggagctgagcgacctgctggacttcagcgccatgttcagcccccccgtgaacagcggcaagaccagacccaccaccctgggcagcagccagttcagcggcagcggcatcgacgagagaggcggcaccaccagctggggcaccagcggccagcccagccccagctacgacagcagcagaggcttcaccgacagcccccactacagcgaccacctgaacgacagcagactgggcgcccacgagggcctgagccccacccccttcatgaacagcaacctgatgggcaagaccagcgagagaggcagcttcagcctgtacagcagagacaccggcctgcccggctgccagagcagcctgctgagacaggacctgggcctgggcagccccgcccagctgagcagcagcggcaagcccggcaccgcctactacagcttcagcgccaccagcagcagaagaagacccctgcacgacagcgccgccctggaccccctgcaggccaagaaggtgagaaaggtgccccccggcctgcccagcagcgtgtacgcccccagccccaacagcgacgacttcaacagagagagccccagctaccccagccccaagccccccaccagcatgttcgccagcaccttcttcatgcaggacggcacccacaacagcagcgacctgtggagcagcagcaacggcatgagccagcccggcttcggcggcatcctgggcaccagcaccagccacatgagccagagcagcagctacggcaacctgcacagccacgacagactgagctaccccccccacagcgtgagccccaccgacatcaacaccagcctgccccccatgagcagcttccacagaggcagcaccagcagcagcccctacgtggccgccagccacaccccccccatcaacggcagcgacagcatcctgggcaccagaggcaacgccgccggcagcagccagaccggcgacgccctgggcaaggccctggccagcatctacagccccgaccacaccagcagcagcttccccagcaaccccagcacccccgtgggcagccccagccccctgaccggcaccagccagtggcccagacccggcggccaggcccccagcagccccagctacgagaacagcctgcacagcctgaagaacagagtggagcagcagctgcacgagcacctgcaggacgccatgagcttcctgaaggacgtgtgcgagcagagcagaatggaggacagactggacagactggacgacgccatccacgtgctgagaaaccacgccgtgggccccagcaccagcctgcccgccggccacagcgacatccacagcctgctgggccccagccacaacgcccccatcggcagcctgaacagcaactacggcggcagcagcctggtggccagcagcagaagcgccagcatggtgggcacccacagagaggacagcgtgagcctgaacggcaaccacagcgtgctgagcagcaccgtgaccaccagcagcaccgacctgaaccacaagacccaggagaactacagaggcggcctgcagagccagagcggcaccgtggtgaccaccgagatcaagaccgagaacaaggagaaggacgagaacctgcacgagccccccagcagcgacgacatgaagagcgacgacgagagcagccagaaggacatcaaggtgagcagcagaggcagaaccagcagcaccaacgaggacgaggacctgaaccccgagcagaagatcgagagagagaaggagagaagaatggccaacaacgccagagagagactgagagtgagagacatcaacgaggccttcaaggagctgggcagaatgtgccagctgcacctgaagagcgagaagccccagaccaagctgctgatcctgcaccaggccgtggccgtgatcctgagcctggagcagcaggtgagagagagaaacctgaaccccaaggccgcctgcctgaagagaagagaggaggagaaggtgagcgccgtgagcgccgagccccccaccaccctgcccggcacccaccccggcctgagcgagaccaccaaccccatgggccacatgtag

SEQ ID NO: 264898 - DNA, 2109 bp, Artificial Sequence
  derived and/or modified sequence
atgaacccccagcagcagagaatggccgccatcggcaccgacaaggagctgagcgacctgctggacttcagcgccatgttcagcccccccgtgaacagcggcaagaccagacccaccaccctgggcagcagccagttcagcggcagcggcaccatccacgagatgaagcagctgaacagcaaggccagacagaagggccagagaatcaagggcttcaccgacagcccccactacagcgaccacctgaacgacagcagactgggcgcccacgagggcctgagccccacccccttcatgaacagcaacctgatgggcaagaccagcgagagaggcagcttcagcctgtacagcagagacaccggcctgcccggctgccagagcagcctgctgagacaggacctgggcctgggcagccccgcccagctgagcagcagcggcaagcccggcaccgcctactacagcttcagcgccaccagcagcagaagaagacccctgcacgacagcgccgccctggaccccctgcaggccaagaaggtgagaaaggtgccccccggcctgcccagcagcgtgtacgcccccagccccaacagcgacgacttcaacagagagagccccagctaccccagccccaagccccccaccagcatgttcgccagcaccttcttcatgcaggacggcacccacaacagcagcgacctgtggagcagcagcaacggcatgagccagcccggcttcggcggcatcctgggcaccagcaccagccacatgagccagagcagcagctacggcaacctgcacagccacgacagactgagctaccccccccacagcgtgagccccaccgacatcaacaccagcctgccccccatgagcagcttccacagaggcagcaccagcagcagcccctacgtggccgccagccacaccccccccatcaacggcagcgacagcatcctgggcaccagaggcaacgccgccggcagcagccagaccggcgacgccctgggcaaggccctggccagcatctacagccccgaccacaccagcagcagcttccccagcaaccccagcacccccgtgggcagccccagccccctgaccggcaccagccagtggcccagacccggcggccaggcccccagcagccccagctacgagaacagcctgcacagcctgaagaacagagtggagcagcagctgcacgagcacctgcaggacgccatgagcttcctgaaggacgtgtgcgagcagagcagaatggaggacagactggacagactggacgacgccatccacgtgctgagaaaccacgccgtgggccccagcaccagcctgcccgccggccacagcgacatccacagcctgctgggccccagccacaacgcccccatcggcagcctgaacagcaactacggcggcagcagcctggtggccagcagcagaagcgccagcatggtgggcacccacagagaggacagcgtgagcctgaacggcaaccacagcgtgctgagcagcaccgtgaccaccagcagcaccgacctgaaccacaagacccaggagaactacagaggcggcctgcagagccagagcggcaccgtggtgaccaccgagatcaagaccgagaacaaggagaaggacgagaacctgcacgagccccccagcagcgacgacatgaagagcgacgacgagagcagccagaaggacatcaaggtgagcagcagaggcagaaccagcagcaccaacgaggacgaggacctgaaccccgagcagaagatcgagagagagaaggagagaagaatggccaacaacgccagagagagactgagagtgagagacatcaacgaggccttcaaggagctgggcagaatgtgccagctgcacctgaagagcgagaagccccagaccaagctgctgatcctgcaccaggccgtggccgtgatcctgagcctggagcagcaggtgagagagagaaacctgaaccccaaggccgcctgcctgaagagaagagaggaggagaaggtgagcgccgtgagcgccgagccccccaccaccctgcccggcacccaccccggcctgagcgagaccaccaaccccatgggccacatgtag

SEQ ID NO: 264899 - DNA, 2121 bp, Artificial Sequence
  derived and/or modified sequence
atgaatccacagcagcagcgaatggccgctattggaaccgacaaggagctgagtgacctgctagatttcagcgcaatgttcagtccccctgtgaacagtggaaagaccaggcctacaactttaggctcctcgcagttctccggttccgggattgacgaacgcggcgggacaacctcctggggaacttctggccagccctccccctcgtacgactcctcaaggggctttacagactcccctcattattctgatcatctcaacgacagccgtctgggcgctcatgaaggcctgtcccccacacccttcatgaacagcaatctgatgggcaaaaccagcgagcgcgggagctttagcctgtattcaagggatacaggattgcccggctgccagtctagtttgcttaggcaggatctgggattgggatcacccgctcagctcagttcatctgggaagcccggcaccgcatactacagctttagcgctaccagtagccggcgacgccccctccatgactccgcagccttagaccctttgcaagctaagaaagtgcgtaaagtgccgcctggattaccaagctccgtgtacgccccttccccaaactccgatgattttaacagagaatccccgagttaccccagtcccaagccacccacaagcatgttcgcctcaactttcttcatgcaggacgggacacataactctagtgacctttggtcaagcagtaatggcatgtctcagcccggctttggtgggatccttgggacatcaacttcccacatgtcccagagtagcagctatggaaatctgcattcccacgatcgcctgtcctaccccccacacagtgtaagccctactgacataaacacctctctgcctccgatgtcctcctttcacaggggatcaactagttccagtccctacgtggctgcctctcacactccccccatcaacgggagcgacagtattttgggtacgagaggcaacgctgctggctcgtctcagactggcgacgccctgggcaaagccctagcgagtatttatagccccgaccatacaagctccagttttccaagcaatccatccacccctgtcggctctccatctcctctgaccgggaccagccagtggcccagacccggaggacaagcccctagctccccttcatacgagaacagtctgcatagcctgaaaaatagggtggaacagcaacttcacgaacacctccaggacgccatgagctttctgaaggatgtgtgtgaacagagccgcatggaggacagactagatcggcttgacgatgcgatccacgttttacgcaaccatgcggtgggcccgtctacttctctgcccgcaggacatagtgatatccactctctcctaggcccctcccataatgcccctattggcagcctaaactccaattatggcgggagttccttagtagctagctccagaagtgcatccatggtgggaacacacagggaagatagcgtaagcctcaacggcaatcactccgtgctgtcctcgactgtcacgacttcctctactgatctgaaccacaagacccaggagaactaccgtggtggattgcagtctcagtctgggactgttgtgaccactgaaattaagacagagaacaaggagaaagatgaaaatctgcacgaacctccgagcagtgacgacatgaagtcagatgatgaaagttctcagaaggacatcaaggtgagctcacgaggacggacaagcagcaccaatgaagatgaagacctcaacccagagcagaagattgagcgcgagaaggagcggagaatggcaaacaatgcccgggaaagactgagagtgcgggatattaacgaggcctttaaggagcttgggagaatgtgtcagcttcatcttaagtcagagaagccccagacaaagctcctcatccttcaccaagctgttgctgtgattctctcccttgagcagcaggtgagggagaggaacctgaacccgaaggctgcatgtctaaaaagacgcgaagaagaaaaagtatccgccgtcagcgccgaaccgccaacaactttgcctggcacccaccccggacttagcgaaactacaaatcccatggggcatatgtag

SEQ ID NO: 264900 - DNA, 2109 bp, Artificial Sequence
  derived and/or modified sequence
atgaacccccagcagcagagaatggctgctattggcaccgacaaagaactgtcagatctgctcgattttagtgctatgttctcacctccagttaactccgggaaaacacggcctacaaccttaggaagctcacaattcagcgggagcggtactattcatgaaatgaaacagctgaattcaaaagcgagacagaaggggcaaaggatcaagggcttcacggactcacctcactattccgaccacttgaatgattctagactgggggcccacgaggggttgtcgcctactcctttcatgaattcaaatttaatggggaagacctcagagcgggggtccttcagcctgtacagtagggacacaggacttcccggttgccagtcatccttgctgagacaggatttaggcctaggaagccccgcgcaactctcaagctctggaaaacctggtacagcatattacagtttttctgccacaagtagtaggagaaggccgctgcacgactcagcggccctcgaccctttgcaggcaaagaaagtccgaaaggtaccccccggcctgccctcaagtgtgtatgctccatctcctaactccgacgattttaaccgggaaagcccaagttacccctctcccaagcccccgacttccatgttcgctagtacctttttcatgcaggatgggacacacaattcgagcgacctgtggtcaagttccaatggcatgagccaacccggtttcggcgggatactgggcacgagcaccagccacatgagtcaaagcagctcttacgggaaccttcacagtcacgacaggctgtcctatccaccgcattccgttagccccactgacatcaatacaagcctgccacctatgagctcctttcaccgcggatctacatctagctctccttatgttgcagcctcccatacccccccaattaacggatcggattccattctggggacaagaggaaacgccgctggctcctcccagaccggggacgccctgggcaaggccctggcctccatttatagtccagaccatacaagctcctcttttccctccaacccttcaacacccgtgggatccccctcacccctaacaggcactagtcagtggccccgaccagggggacaggccccctcatccccttcttacgagaactcactgcacagccttaagaacagggtggaacagcagctgcacgagcaccttcaggacgcaatgagttttctgaaagatgtatgtgagcagagccggatggaggaccggctcgacagattggacgatgcaatccacgtgcttagaaaccatgccgttggccctagcacctccctcccagcgggtcacagcgacatccactccctcctgggtcccagtcacaacgctccaatcggctctctgaattcaaactacgggggctcctcgctggtggcgagctcaaggagcgcaagcatggttgggactcatagagaagattctgtgtctctgaatggaaaccacagcgtcctgagttcgactgtgaccacaagctctaccgacctgaatcacaaaactcaagagaattacagaggcgggttgcaatcccaatcaggtacagttgtgacaacagagataaagactgagaataaagaaaaagacgagaatctgcatgagccacccagctctgacgatatgaagtcagatgatgagtcttcgcagaaagacattaaagtttctagccgcggtcgcacctcctccacaaatgaagatgaagatctgaatcctgaacagaagatcgagagggaaaaagaacgtcgcatggccaacaatgcccgggagcgtttacgagtacgagatataaatgaggcattcaaagaactgggcagaatgtgtcaacttcaccttaaatcggagaagccccagacaaaacttctgatactccaccaggcagtagccgtaatcctctcgctggaacagcaggtgcgcgagcgcaacctgaatccaaaagccgcgtgtctgaaacggagagaggaagaaaaagtcagcgcagtgagcgctgaacctcccaccaccctcccgggtactcatcccggcctgtccgagacaaccaacccaatgggccatatgtag

SEQ ID NO: 264901 - DNA, 2121 bp, Artificial Sequence
  derived and/or modified sequence
atgaacccccagcagcagaggatggccgccatcggcacagacaaggagctgagtgacctgctggacttcagcgccatgttcagcccccctgtgaacagcggcaagacccggcccaccaccctgggcagcagccagttcagcggcagcggcattgatgagcggggcggcaccacctcctggggcaccagcggccagcccagccccagctatgacagcagccggggcttcacagacagcccccactacagcgaccacctgaatgacagccggctgggcgcccacgagggcctgagccccacccccttcatgaacagcaacctgatgggcaagaccagcgagcggggcagcttcagcctgtacagccgggacaccggcctgcccggctgccagagcagcctgctgcggcaggacctgggcctgggcagccctgcccagctgagcagcagcggcaagccaggcacagcctactacagcttcagcgccaccagcagcagaagaagacccctgcatgacagcgctgccctggaccccctgcaggccaagaaggtgaggaaggtgcccccaggcctgcccagctctgtgtatgcccccagccccaacagtgatgacttcaaccgggagagccccagctaccccagccccaagccacccacctccatgtttgccagcaccttcttcatgcaggacggcacccacaacagcagtgacctgtggagcagcagcaatggcatgagccagcccggctttggaggcatcctgggcaccagcaccagccacatgagccagagcagcagctatggcaacctgcacagccatgaccggctgagctacccaccccacagcgtgagccccacagacatcaacaccagcctgccccccatgagcagcttccaccggggcagcaccagcagcagcccctacgtggccgccagccacaccccacccatcaatggaagtgacagcatcctgggcaccagaggaaatgctgctggcagcagccagacaggagatgccctgggcaaggccctggccagcatctacagcccagaccacaccagcagcagcttccccagcaaccccagcacccctgtgggcagccccagccccctgaccggcaccagccagtggcccaggcctgggggccaggcccccagcagccccagctatgagaacagcctgcacagcctgaagaacagagtggagcagcagctgcacgagcacctgcaggatgccatgtccttcctgaaggatgtgtgtgagcagagcaggatggaggaccggctggaccggctggatgatgccatccacgtgctgagaaatcatgctgtgggccccagcaccagcctgcctgctggccacagcgacatccacagcctgctgggccccagccacaatgcccccatcggcagcctgaacagcaactatggaggcagcagcctggtggccagcagccgcagcgcctccatggtgggcacccacagagaagattctgtgtccctgaatggaaaccacagcgtgctgagcagcacagtgaccaccagcagcacagacctgaaccacaagacccaggagaactaccggggcggcctgcagagccagagcggcaccgtggtgaccacagagatcaagacagagaacaaggagaaggatgagaacctgcacgagccccccagcagtgatgacatgaagagtgatgatgagagcagccagaaggacatcaaggtgagcagccggggccgcaccagcagcaccaatgaagatgaggacctgaaccctgagcagaagattgaaagagagaaggagaggaggatggccaacaatgcccgggagcggctgcgggtgcgggacatcaatgaggccttcaaggagctgggccgcatgtgccagctgcacctgaagtctgagaagccccagaccaagctgctgatcctgcaccaggccgtggccgtcatcctgagcctggagcagcaggtgcgggagaggaacctgaaccccaaggccgcctgcctgaagaggcgggaggaggagaaggtgtctgctgtgtctgctgagccccccaccaccctgcccggcacccaccctggcctgtctgagaccaccaaccccatgggccacatgtag

SEQ ID NO: 264902 - DNA, 2109 bp, Artificial Sequence
  derived and/or modified sequence
atgaacccccagcagcagaggatggccgccatcggcacagacaaggagctgagtgacctgctggacttcagcgccatgttcagcccccctgtgaacagcggcaagacccggcccaccaccctgggcagcagccagttcagcggcagcggcaccatccacgagatgaagcagctgaacagcaaggcccggcagaagggccagaggatcaagggcttcacagacagcccccactacagcgaccacctgaatgacagccggctgggcgcccacgagggcctgagccccacccccttcatgaacagcaacctgatgggcaagaccagcgagcggggcagcttcagcctgtacagccgggacaccggcctgcccggctgccagagcagcctgctgcggcaggacctgggcctgggcagccctgcccagctgagcagcagcggcaagccaggcacagcctactacagcttcagcgccaccagcagcagaagaagacccctgcatgacagcgctgccctggaccccctgcaggccaagaaggtgaggaaggtgcccccaggcctgcccagctctgtgtatgcccccagccccaacagtgatgacttcaaccgggagagccccagctaccccagccccaagccacccacctccatgtttgccagcaccttcttcatgcaggacggcacccacaacagcagtgacctgtggagcagcagcaatggcatgagccagcccggctttggaggcatcctgggcaccagcaccagccacatgagccagagcagcagctatggcaacctgcacagccatgaccggctgagctacccaccccacagcgtgagccccacagacatcaacaccagcctgccccccatgagcagcttccaccggggcagcaccagcagcagcccctacgtggccgccagccacaccccacccatcaatggaagtgacagcatcctgggcaccagaggaaatgctgctggcagcagccagacaggagatgccctgggcaaggccctggccagcatctacagcccagaccacaccagcagcagcttccccagcaaccccagcacccctgtgggcagccccagccccctgaccggcaccagccagtggcccaggcctgggggccaggcccccagcagccccagctatgagaacagcctgcacagcctgaagaacagagtggagcagcagctgcacgagcacctgcaggatgccatgtccttcctgaaggatgtgtgtgagcagagcaggatggaggaccggctggaccggctggatgatgccatccacgtgctgagaaatcatgctgtgggccccagcaccagcctgcctgctggccacagcgacatccacagcctgctgggccccagccacaatgcccccatcggcagcctgaacagcaactatggaggcagcagcctggtggccagcagccgcagcgcctccatggtgggcacccacagagaagattctgtgtccctgaatggaaaccacagcgtgctgagcagcacagtgaccaccagcagcacagacctgaaccacaagacccaggagaactaccggggcggcctgcagagccagagcggcaccgtggtgaccacagagatcaagacagagaacaaggagaaggatgagaacctgcacgagccccccagcagtgatgacatgaagagtgatgatgagagcagccagaaggacatcaaggtgagcagccggggccgcaccagcagcaccaatgaagatgaggacctgaaccctgagcagaagattgaaagagagaaggagaggaggatggccaacaatgcccgggagcggctgcgggtgcgggacatcaatgaggccttcaaggagctgggccgcatgtgccagctgcacctgaagtctgagaagccccagaccaagctgctgatcctgcaccaggccgtggccgtcatcctgagcctggagcagcaggtgcgggagaggaacctgaaccccaaggccgcctgcctgaagaggcgggaggaggagaaggtgtctgctgtgtctgctgagccccccaccaccctgcccggcacccaccctggcctgtctgagaccaccaaccccatgggccacatgtag

SEQ ID NO: 264903 - DNA, 2121 bp, Artificial Sequence
  derived and/or modified sequence
atgaacccccagcagcagcggatggccgccatcggcaccgacaaggaacttagcgacctccttgacttctcggccatgttcagtccaccagtcaatagcggcaagacccggccaaccaccttgggcagctcccagtttagtggcagcggaatagatgagaggggggggacaacttcctggggcaccagcgggcagccgagtccaagttatgacagttcccggggattcaccgatagccctcactactcagaccacctgaacgattcgcggctgggcgctcatgagggcctgtccccgacgccctttatgaactccaatctgatgggaaaaactagcgagcggggctcgttttcattatatagccgggacaccgggctgcctggctgtcagagcagcctcctgcgccaggatttgggacttgggagccccgctcagctgtcgagctcagggaaacccggcaccgcctattactcctttagcgctacatcatccaggaggcgccccctgcatgactctgccgcactggaccctcttcaggcgaagaaagtgagaaaggtgccacccggacttccctctagcgtctatgccccttcccctaactctgacgatttcaacagggaaagtccctcgtatcctagcccgaaaccgcctacctccatgtttgcatccacgttcttcatgcaggacggcactcacaacagtagtgatctttggtcatctagcaacggaatgtctcagccaggttttggaggcatcttagggacaagcacctcacatatgtcacagtcctcctcgtacggaaacctccatagccatgaccgtttaagttacccaccacattccgtgagtcccacggacatcaatacatcactgcctcccatgtcctctttccaccggggttctacatcctcctcaccctacgtcgcagcatcacacacaccaccaatcaacgggtcagattcaatccttggcacccgagggaatgccgcgggctcctcccaaacaggagacgctctgggaaaggctctcgcatcaatctatagccccgaccacacgtcttcttccttcccatctaatccatcaaccccagtgggctccccttccccccttaccggaactagccagtggcctcgcccaggtggccaggcgccatcctcccctagctacgagaatagccttcactccttaaaaaaccgggttgaacagcagctccatgaacacttgcaggacgccatgagcttcctaaaggacgtatgcgagcaatccagaatggaggacagactagataggttggacgatgcaatccacgtacttagaaaccacgcagtcggtcctagtactagcctacccgccggacattcagatattcattccctcctcgggccatctcacaacgctcctatcgggagtctaaatagtaactatggaggaagttccctcgtcgcatcgagcaggtcagctagtatggtgggcacacacagagaggattctgtctccctgaatggcaaccatagtgttctcagttcaactgtcaccacttctagcaccgacttgaaccacaaaacacaggagaattacagagggggtctgcagtcacagtcagggaccgtcgttaccaccgagattaaaaccgagaacaaggagaaggacgagaacctgcacgagcccccatctagcgatgatatgaagtcagatgacgaaagttctcaaaaagacataaaggtttcaagcagaggaagaaccagctcgaccaacgaagatgaggacttaaaccctgaacagaaaatcgagcgcgagaaggagcgaagaatggcgaacaacgctcgagagcgcctgagagtaagggacataaatgaggccttcaaggagttgggccgcatgtgccagttgcatctgaaatcagagaaaccccaaactaaactgttaattcttcatcaggccgtcgccgtcattctctcacttgagcagcaggttcgcgagcggaatcttaatccaaaggctgcatgccttaagcggagggaagaagagaaggtgagcgcagtcagcgctgaacctcccactacattgccagggacgcacccgggcctctctgagacaacgaacccgatgggccacatgtag

SEQ ID NO: 264904 - DNA, 2109 bp, Artificial Sequence
  derived and/or modified sequence
atgaacccccagcagcagcggatggccgccatcggcaccgacaaggagctgtcagatctgctagatttctccgctatgttttctcccccggtgaatagtggtaagacaaggcctacaacgctcggaagctcacagttctcaggctctgggaccatccatgaaatgaaacaacttaactccaaagcaagacagaagggacaacgcatcaagggttttactgactccccccattactccgatcatttgaatgacagccgcctaggcgcccacgaggggctgtctcccaccccattcatgaattcgaatctcatggggaaaacgagtgagaggggttccttctcactctatagtcgcgataccggcctgcccggttgtcagtcaagtttgttgcgacaggacttagggttgggcagtcccgcacagctctcatctagcggtaagcccgggaccgcgtattattctttttcagcgactagctcaagacgcaggccactgcatgattccgcagccctggaccccctgcaggctaagaaagtgagaaaggtccctccaggtttaccttcatcagtgtatgctccctcccccaactccgacgacttcaacagggaatccccaagctatccaagtccgaaaccccccacttcaatgttcgcatcaacttttttcatgcaagacggcacgcacaacagttccgacctttggagcagttcaaacggaatgagtcaacccggttttggcggcattctcgggacgtccacctcccacatgagccagtcttctagctacggcaatctacattctcacgaccggctgagttatcctccacacagcgtgtcccctaccgacataaatacaagtctccctcctatgtcgagtttccaccggggtagtacatcctcaagcccatacgtagctgcctcccatactccacctatcaacggctcggattctatcctaggtacacgcggcaatgctgctggctcttcacagacaggtgacgccctcggcaaggccttagcctcaatctattcccccgatcacacttcttcgagctttccgagcaaccccagcacccctgtgggctctcccagcccactgacaggcacttcacagtggcccagacccggggggcaggcgccctcatccccctcttacgagaacagcctccacagcctgaaaaatcgggtggagcaacagctgcacgaacatctccaagacgcgatgtcattcttgaaagacgtgtgcgagcagagtaggatggaggacagactggaccgtctcgacgacgccatccacgtgctgcgcaatcatgctgtcgggccttccactagcctgcctgccggtcatagcgacatccactctcttctgggtccttctcacaacgctcccatagggtccctgaattccaattacggcgggtctagcctggttgccagctcacgaagcgcttctatggttggcacacacagggaggattcagtgagcctgaatggcaaccacagtgttttgagctctaccgtgaccacatcgtcgaccgatctgaaccacaagacccaagagaattatcgcggtggattgcagtcgcagagtggcacagttgtaactactgaaataaaaacagaaaataaagagaaggacgagaacctccacgaacccccaagctccgacgatatgaaatccgacgatgaaagctcacagaaagatattaaagtcagcagccggggacggactagtagcactaatgaggatgaagatttgaaccccgaacaaaaaatcgaacgtgagaaagaacggcgaatggccaacaacgcaagagagcgcttgcgcgttcgggatataaatgaggcattcaaggagcttggccgaatgtgccaattacaccttaaatccgagaaaccccaaaccaaactgttaattttgcaccaagctgtagcggtgatccttagcctcgagcaacaagtgagggagcgcaacctgaatccaaaagcagcctgtttaaaaagacgagaagaagaaaaggtgtctgccgtcagtgccgagcctccaaccactttgccagggacccatcctggactttccgaaactactaacccaatgggccacatgtag

SEQ ID NO: 264905 - DNA, 2121 bp, Artificial Sequence
  derived and/or modified sequence
atgaacccacaacagcagagaatggccgctataggtactgacaaggagctcagcgatctgctcgatttctcagccatgttctcacctcctgtgaactccggcaagacacggccaacaacactcggatcgtctcaattttcggggagcggtattgatgaacgtggcggaactacatcttgggggacttccggacaaccgtcaccatcctatgacagcagtaggggtttcactgatagtccccactatagcgaccacctgaatgacagtcggctgggcgcacacgagggtctgtcccccacgcccttcatgaattccaacttgatgggcaaaacatccgaaaggggctcattttcactgtactcccgcgacacaggtctgccgggttgccaaagcagtctactgagacaggacctcggccttggaagtcctgcccagttgagctcctctggcaagcccggaaccgcttactacagtttttcagcaacctcttccaggagacgaccactgcacgattccgccgcactcgatccattgcaggcaaagaaagtgcgcaaagtgcctccagggttgccgagcagtgtgtatgctcccagcccgaatagcgatgattttaacagggagtccccctcatatcccagtcccaagccccctacctctatgtttgctagtaccttttttatgcaggatggaacccataattcctctgacctatggtcaagttctaatggcatgtctcagcccggttttggagggatcctgggcaccagcacttcacatatgtctcagagctccagctatggcaatctgcacagtcacgataggctttcctacccccctcacagcgtatcaccaactgacatcaacacaagtctgcctcccatgagctccttccatagaggttcaacctcatcatcaccatatgtcgctgcctcccacactcctccaattaatgggtccgacagcattcttggtacgagaggcaatgctgcaggcagttcccaaaccggcgatgctcttggaaaggctctcgcgtctatttactccccagatcacaccagttcaagcttccctagcaatccctctactccagtaggatcgccatctcccctgactggcacgagccagtggccaaggccagggggtcaggctccaagttcaccaagttacgagaacagcttgcactctcttaagaatcgggtcgagcagcagctgcacgagcatctccaggatgctatgtcttttttaaaggacgtgtgtgagcagagcaggatggaagatcggcttgacaggcttgacgacgccattcatgttctgcgaaaccatgccgtcgggcctagcactagcttgccagctggccacagtgatattcattccttactgggaccatcccataatgcacccatcgggtcactcaactccaactatggtggcagtagtctcgtggcttcatcccgtagtgctagcatggtaggaactcatcgcgaagattctgtgtcactcaatgggaatcacagcgttctctcgagtaccgtgacaacctcctctaccgaccttaatcataaaacacaagaaaattatcgcggtgggctgcagtctcagtccgggaccgtcgttactacggagattaagaccgagaacaaggagaaagatgagaacctgcacgagccaccttccagtgatgatatgaagagcgatgatgagagctctcaaaaggatattaaggtgtcatctcgcggtcgtacatcctccactaacgaggacgaggatctgaatccagagcagaagattgaacgcgagaaggagaggagaatggccaacaacgccagggagcgactccgtgtgcgggacataaatgaggctttcaaggagctgggcagaatgtgccagctgcacctcaaaagtgaaaagccccagaccaagttactaattctgcaccaagccgtggcagtaatcctcagtctggaacagcaagtcagggagcgaaacttgaatcccaaggcagcatgtctcaagaggcgggaagaggagaaggtgtctgccgtgtcagccgaaccccctacaacgctcccgggtacccatcctgggctatccgaaaccaccaaccccatgggccacatgtag

SEQ ID NO: 264906 - DNA, 2109 bp, Artificial Sequence
  derived and/or modified sequence
atgaatcctcagcagcaaaggatggctgcaattggcacagacaaggagctgagtgatctgttagacttttctgccatgttcagcccacccgtcaattcaggaaagacacgcccaaccaccctggggtcctcacaattctccggatctggaacaatccacgaaatgaagcagttaaattcgaaggccaggcaaaagggacagagaatcaaagggttcacagattcaccacattattcggaccacctcaacgacagcagacttggagctcatgaagggctcagtcccacaccctttatgaattctaatctcatggggaaaacctcggaacgaggaagtttctcactgtactctcgcgacaccggcctgcccggatgtcagtcaagcctgcttcgtcaggatctgggcctgggatcgcctgcccagctctcttcttcaggcaaacctggcaccgcatactactcattttcagcaacctctagccgtcggaggccattgcatgactccgcagctctggacccgttgcaggcaaagaaagtccgtaaggttcctcccggtctcccctccagcgtgtatgctccctcccccaattccgatgacttcaatcgcgaatctccctcctatcctagtcctaagcctcctacctcgatgttcgcttctactttttttatgcaggatggcacccacaatagctccgatttatggtcatccagcaatgggatgagccagccagggtttggcggtatcctcgggacgtctacatctcacatgtcccagagctcatcctacggcaatctccactctcacgataggcttagctatccaccacacagtgtctctccgactgatatcaatacttcactgcctccaatgtcatctttccaccgagggagcaccagctcttctccttatgtagccgcaagtcacacaccccctatcaacggctcagatagcatcctcggcactcgagggaacgcggcaggctcttcgcaaaccggagatgctctgggcaaggctttagccagcatctactcgcctgatcacaccagcagcagcttcccttccaaccccagcacgccagttggctctcctagtcctttgacggggacttctcagtggcctcggcctgggggacaggcccctagctctccaagttatgaaaacagccttcacagtttgaaaaaccgcgtggagcagcaactgcatgaacatctgcaggacgccatgtctttcctgaaagacgtctgcgagcagtcccgaatggaggataggctggacaggctagacgatgcaatccatgtattgaggaaccatgccgttgggcctagtacctcccttcctgctggacacagcgatatccattccttactggggcctagccataatgcacccattgggagcctgaattctaactacggaggcagttcacttgtggcaagttctaggagtgcttcaatggtgggcacccatcgggaggacagtgtttccttgaacggcaatcactctgtgctgtcctcaactgttaccacaagctctaccgatctgaaccataaaacacaggagaactatagaggagggctgcagtcgcagtcaggtactgtggtgaccaccgagatcaagactgagaataaggaaaaggatgagaacctccacgagcccccatcatcagatgatatgaagagcgacgacgagtcctctcagaaggatatcaaggtgtcttcaagggggagaacaagcagcaccaatgaagacgaagatcttaatccggagcagaaaatagagagggaaaaagagcgacgcatggccaacaacgccagggaaagactaagagttagggacattaatgaggccttcaaggagctgggacggatgtgccaactgcacctcaagtcagaaaaaccacagactaaattgctaatcctccatcaggccgtggcggtcatcttaagcctggaacagcaggttagagaaagaaatctgaaccccaaggcagcgtgtctcaagcgccgtgaagaagaaaaggtatccgcagtcagcgccgagcctccgaccactctgcccggtacccatcccggactttctgagactaccaatccgatgggacatatgtag

SEQ ID NO: 264907 - DNA, 4786 bp, Artificial Sequence
  derived and/or modified sequence
ggcgcggagggatccggaggcgagccgagcgcggtggtgaggccgcctcagcgaaaaaaatgtccgcctgaagagacccacaagttctattcggggggaccgacagcccgccccgggaggaaggggcggccaggcccgaaagccgcctccccctcccagacccgagagctcgtgcggggcaaagtgaaccgagccgctgggcggtgcaaggggaagcccaagcccgttctcccggccaaagtgaactttaatcggggtggttggatgcggagacggggcggcagaagtggccgaagatgaatccccagcaacaacgcatggccgctatagggaccgacaaggagctgagcgacctactggacttcagtgcgatgttttccccacctgttaatagtgggaaaactagaccaactacactgggaagcagtcaattcagtggatcaggtattgatgaaagaggaggtacaacatcttggggaacaagtggtcaaccaagtccttcctatgattcatctagaggttttacagacagccctcattacagtgatcacttgaatgacagtcgattaggagcccatgaaggcttgtccccaacacctttcatgaactcaaatctgatgggaaaaacatcagagagaggctcattttccctgtacagcagagatactggattaccaggctgtcaatctagtctcctgagacaagatctggggcttgggagcccagcacagctatcttcttcaggaaaacctgggacagcatactattcattctctgctacaagttccaggaggagaccactccatgactctgcagcgcttgatcccttgcaagcaaaaaaagtcagaaaggtgcctcctggtttgccttcttctgtatatgcaccatccccaaattcagatgatttcaaccgtgaatctcctagttatccatctcctaagccaccaaccagtatgttcgctagcactttctttatgcaagatgggacccacaattcttctgacctttggagttcatcaaatgggatgagccagcctggttttggtggaattctggggacctccacttcccacatgtctcaatccagtagttatggcaaccttcattcacatgaccgcttgagttatcctccacactcagtttcaccaacagacataaacacgagtcttccaccaatgtccagctttcatcgcggcagtaccagcagttcaccttacgttgctgcctcacacactcctcccatcaatggatcagacagcattctaggaaccagagggaatgctgctggaagctcacagacaggtgatgcacttggaaaggctttggcatctatttattctcctgaccataccagcagtagttttccgtcaaatccatcaacaccagttggatcaccttcacctctcacaggtaccagtcagtggccaagacctggagggcaagcaccttcatccccaagctatgaaaactcactccactccctgaaaaatcgagttgagcagcaacttcacgagcatttgcaagatgcaatgtccttcttaaaggatgtctgtgagcagtctcgaatggaggatcgtttagacagactggatgatgcaatccatgtgctgcggaaccatgctgtgggaccttccaccagtttgcctgctggtcacagtgatatacatagtttattgggaccatcccataatgcaccaattggaagcctcaattcaaactatggaggatcaagccttgttgcaagcagtcgatcagcttcaatggttggaactcatcgggaagactctgtcagtctcaatggcaatcattcagtcctgtctagtacagtcactacttcaagcacagacctgaaccataaaacacaagaaaattatagaggtggcttgcaaagtcagtctggaactgttgttacaacagaaatcaagactgaaaacaaagaaaaggatgaaaaccttcatgaacctccttcatcagatgacatgaagtcagatgatgaatcctcccaaaaagatatcaaggtttcatctagaggcagaacaagcagtactaatgaagatgaggatttgaaccctgaacagaagatagaaagggagaaggagaggcggatggctaacaatgccagagaacgcttacgcgtgcgggatattaatgaagcattcaaagagcttggccgaatgtgtcagcttcacttgaagagtgaaaaaccccaaacaaaactccttattcttcatcaagccgtggcagtcatccttagtctagaacagcaagtcagagagaggaaccttaaccccaaagcagcctgccttaagagaagggaagaagaaaaagtttctgccgtatcggcagagccgccaaccacactgccaggaacccatcctgggcttagtgaaactaccaaccctatgggtcatatgtaaacatcagccagttccagagttatcagtaggctagatagaaggtgacctctcctcataaggacttggacaactcagattatctgaagacacaaacctgacaggagggagaagaaaaaacaaaacacttgaaccaagaaactcaaatgtaatcctacgatcaaagcaactggtcaacacttccatcagaagtgaagataggaagctcatcagatagaacatcagcccatgagatgtttgcaacaaatcttttgttgcaagcagtgtgtcgcttctgcacaatcagagactgtctcgatctctccactcaccgtggaagttgccttgtgcctaaactgaattgacaaatgcattgtaactacaaattttatttattgttatgaaactgtaaggtctacatataaagggaaaaagttaatgtggaaagctgatctacactcagctgatgccagcatacattaaagcggttcacgtgcagagaacaaagcagtgacaaccattggcccttagcattcccggcatacctattagtgtcttaaaaaggaagggaaaagtcttttgttgccctctcctatcctcttgccatatgaatagcgttttccatgaaataggaaaatattacttggtatagcatttctcttgctctcattttttgatttatttttattttctctttgtgggtgttatatttgatctctaaatctgaacagtttatggtcacagtccagcctcctccgtgcagccctgtgtgctttgcacatttaccttacagtggtaagcagagaccatctgtgaccatagcctagctagcattttaaaaggggaaattttgttctctaggttttcccccaaataaacattgctttatttctaataataaccaagacttttcaagcttctagatctcataggaaagcttgtaatagcaaaattgtaaattacaagggaagaatctactttttagaaatcgctttgttttccaagcagtaagtactacatacagtacttgtaaagtgttagctgtaagtaagcacaaaatacatttaaaatacaaagacgattttttcaggctgtgattatggtgaacataacaaaacccagtagtcaccaaggcaggtagtgtgataaatgaacacaccactctgaggctaattacctaatggaatacaagagcaatggtcacccgtatttccttatcctagcctttatttctctgtcatttggatggctggtcaatggggaagaattgagtgggtgatttaatcaactgcaaaccatctgcccctgtcccaaaatgatgagccagattagcattaaaccagtacttgtcagtccatcttaatactgttcattaaggcactctctgtctctaatccttaggagttgttttaaaagacataatcactttgaacttccatgaaacctgtcttccaccacaacaaccctgggagagaaaaacatgctaaaggaggtatcttggcttaataattccttatagccaatatcaacagtggcaatcagcacacagaggaaaggacccaaatcactatgtagcttaaagatttctgttaatttgaaagaacaaaaacaagacagaacttctggtactctaatcaggatgattcctaacaagtcagtcatttgtgaacttagtggactttttggttactttaatttgcatatattctccagttacatcggactctatctgtggccttgttcttcatttcagtgttaatcagctaaacagaagttgttgcttatgatgtgtgagtgaacatatgccactgcctggcctttttttcttcagagcttgttgtctttttcgctatattagactttgcagtatgcccagaagctttccttcataaaatagaaagaaaaaaacatttggcttatttttcactgtagctagtcttttatacaataatcttgtaagaaaatttcttgaattctaaatattactctttctagatttttgaaatcaaaaagttttcagtaaaaagtttcttactttattttattatattaggtagtaaaaaatgtagggttatttaccataacctgttcattaatatcagaaatttacaatagcattttaagaccatagtaggattctagcataccgtgtagtacctatggagtattgtaagagctaattgttggagatgaattgcttctcatcttgttctccagtttccattgttggtttattgcagatttgtatcctgtgtcaaattcaaggtattattgataaaccttttcaaccagcagcaagaagttcaaatttttttctgtcactgtaacagaaaacacaatatgtatataacatttatgtagcaataaatgtgccatcttttttttaacacagt

SEQ ID NO: 264908 - DNA, 4772 bp, Artificial Sequence
  derived and/or modified sequence
tccggaggcgagccgagcgcggtggtgaggccgcctcagcgaaaaaaatgtccgcctgaagagacccacaagttctattcggggggaccgacagcccgccccgggaggaaggggcggccaggcccgaaagccgcctccccctcccagacccgagagctcgtgcggggcaaagtgaaccgagccgctgggcggtgcaaggggaagcccaagcccgttctcccggccaaagtgaactttaatcggggtggttggatgcggagacggggcggcaggacctgctagaagtggccgaagatgaatccccagcaacaacgcatggccgctatagggaccgacaaggagctgagcgacctactggacttcagtgcgatgttttccccacctgttaatagtgggaaaactagaccaactacactgggaagcagtcaattcagtggatcaggtacaatacacgagatgaagcagttaaatagcaaagcaagacagaagggtcagagaattaaaggttttacagacagccctcattacagtgatcacttgaatgacagtcgattaggagcccatgaaggcttgtccccaacacctttcatgaactcaaatctgatgggaaaaacatcagagagaggctcattttccctgtacagcagagatactggattaccaggctgtcaatctagtctcctgagacaagatctggggcttgggagcccagcacagctatcttcttcaggaaaacctgggacagcatactattcattctctgctacaagttccaggaggagaccactccatgactctgcagcgcttgatcccttgcaagcaaaaaaagtcagaaaggtgcctcctggtttgccttcttctgtatatgcaccatccccaaattcagatgatttcaaccgtgaatctcctagttatccatctcctaagccaccaaccagtatgttcgctagcactttctttatgcaagatgggacccacaattcttctgacctttggagttcatcaaatgggatgagccagcctggttttggtggaattctggggacctccacttcccacatgtctcaatccagtagttatggcaaccttcattcacatgaccgcttgagttatcctccacactcagtttcaccaacagacataaacacgagtcttccaccaatgtccagctttcatcgcggcagtaccagcagttcaccttacgttgctgcctcacacactcctcccatcaatggatcagacagcattctaggaaccagagggaatgctgctggaagctcacagacaggtgatgcacttggaaaggctttggcatctatttattctcctgaccataccagcagtagttttccgtcaaatccatcaacaccagttggatcaccttcacctctcacaggtaccagtcagtggccaagacctggagggcaagcaccttcatccccaagctatgaaaactcactccactccctgaaaaatcgagttgagcagcaacttcacgagcatttgcaagatgcaatgtccttcttaaaggatgtctgtgagcagtctcgaatggaggatcgtttagacagactggatgatgcaatccatgtgctgcggaaccatgctgtgggaccttccaccagtttgcctgctggtcacagtgatatacatagtttattgggaccatcccataatgcaccaattggaagcctcaattcaaactatggaggatcaagccttgttgcaagcagtcgatcagcttcaatggttggaactcatcgggaagactctgtcagtctcaatggcaatcattcagtcctgtctagtacagtcactacttcaagcacagacctgaaccataaaacacaagaaaattatagaggtggcttgcaaagtcagtctggaactgttgttacaacagaaatcaagactgaaaacaaagaaaaggatgaaaaccttcatgaacctccttcatcagatgacatgaagtcagatgatgaatcctcccaaaaagatatcaaggtttcatctagaggcagaacaagcagtactaatgaagatgaggatttgaaccctgaacagaagatagaaagggagaaggagaggcggatggctaacaatgccagagaacgcttacgcgtgcgggatattaatgaagcattcaaagagcttggccgaatgtgtcagcttcacttgaagagtgaaaaaccccaaacaaaactccttattcttcatcaagccgtggcagtcatccttagtctagaacagcaagtcagagagaggaaccttaaccccaaagcagcctgccttaagagaagggaagaagaaaaagtttctgccgtatcggcagagccgccaaccacactgccaggaacccatcctgggcttagtgaaactaccaaccctatgggtcatatgtaaacatcagccagttccagagttatcagtaggctagatagaaggtgacctctcctcataaggacttggacaactcagattatctgaagacacaaacctgacaggagggagaagaaaaaacaaaacacttgaaccaagaaactcaaatgtaatcctacgatcaaagcaactggtcaacacttccatcagaagtgaagataggaagctcatcagatagaacatcagcccatgagatgtttgcaacaaatcttttgttgcaagcagtgtgtcgcttctgcacaatcagagactgtctcgatctctccactcaccgtggaagttgccttgtgcctaaactgaattgacaaatgcattgtaactacaaattttatttattgttatgaaactgtaaggtctacatataaagggaaaaagttaatgtggaaagctgatctacactcagctgatgccagcatacattaaagcggttcacgtgcagagaacaaagcagtgacaaccattggcccttagcattcccggcatacctattagtgtcttaaaaaggaagggaaaagtcttttgttgccctctcctatcctcttgccatatgaatagcgttttccatgaaataggaaaatattacttggtatagcatttctcttgctctcattttttgatttatttttattttctctttgtgggtgttatatttgatctctaaatctgaacagtttatggtcacagtccagcctcctccgtgcagccctgtgtgctttgcacatttaccttacagtggtaagcagagaccatctgtgaccatagcctagctagcattttaaaaggggaaattttgttctctaggttttcccccaaataaacattgctttatttctaataataaccaagacttttcaagcttctagatctcataggaaagcttgtaatagcaaaattgtaaattacaagggaagaatctactttttagaaatcgctttgttttccaagcagtaagtactacatacagtacttgtaaagtgttagctgtaagtaagcacaaaatacatttaaaatacaaagacgattttttcaggctgtgattatggtgaacataacaaaacccagtagtcaccaaggcaggtagtgtgataaatgaacacaccactctgaggctaattacctaatggaatacaagagcaatggtcacccgtatttccttatcctagcctttatttctctgtcatttggatggctggtcaatggggaagaattgagtgggtgatttaatcaactgcaaaccatctgcccctgtcccaaaatgatgagccagattagcattaaaccagtacttgtcagtccatcttaatactgttcattaaggcactctctgtctctaatccttaggagttgttttaaaagacataatcactttgaacttccatgaaacctgtcttccaccacaacaaccctgggagagaaaaacatgctaaaggaggtatcttggcttaataattccttatagccaatatcaacagtggcaatcagcacacagaggaaaggacccaaatcactatgtagcttaaagatttctgttaatttgaaagaacaaaaacaagacagaacttctggtactctaatcaggatgattcctaacaagtcagtcatttgtgaacttagtggactttttggttactttaatttgcatatattctccagttacatcggactctatctgtggccttgttcttcatttcagtgttaatcagctaaacagaagttgttgcttatgatgtgtgagtgaacatatgccactgcctggcctttttttcttcagagcttgttgtctttttcgctatattagactttgcagtatgcccagaagctttccttcataaaatagaaagaaaaaaacatttggcttatttttcactgtagctagtcttttatacaataatcttgtaagaaaatttcttgaattctaaatattactctttctagatttttgaaatcaaaaagttttcagtaaaaagtttcttactttattttattatattaggtagtaaaaaatgtagggttatttaccataacctgttcattaatatcagaaatttacaatagcattttaagaccatagtaggattctagcataccgtgtagtacctatggagtattgtaagagctaattgttggagatgaattgcttctcatcttgttctccagtttccattgttggtttattgcagatttgtatcctgtgtcaaattcaaggtattattgataaaccttttcaaccagcagcaagaagttcaaatttttttctgtcactgtaacagaaaacacaatatgtatataacatttatgtagcaataaatgtgccatcttttttttaacacagt

SEQ ID NO: 264909 - protein, 512 aa, Artificial Sequence
  derived and/or modified sequence
MYCAYPVPGMGSNSLMYYYNGKTVYAPSPNSDDFNRESPSYPSPKPPTSMFASTFFMQDGTHNSSDLWSSSNGMSQPGFGGILGTSTSHMSQSSSYGNLHSHDRLSYPPHSVSPTDINTSLPPMSSFHRGSTSSSPYVAASHTPPINGSDSILGTRGNAAGSSQTGDALGKALASIYSPDHTSSSFPSNPSTPVGSPSPLTGTSQWPRPGGQAPSSPSYENSLHSLQSRMEDRLDRLDDAIHVLRNHAVGPSTSLPAGHSDIHSLLGPSHNAPIGSLNSNYGGSSLVASSRSASMVGTHREDSVSLNGNHSVLSSTVTTSSTDLNHKTQENYRGGLQSQSGTVVTTEIKTENKEKDENLHEPPSSDDMKSDDESSQKDIKVSSRGRTSSTNEDEDLNPEQKIEREKERRMANNARERLRVRDINEAFKELGRMCQLHLKSEKPQTKLLILHQAVAVILSLEQQVRERNLNPKAACLKRREEEKVSAVSAEPPTTLPGTHPGLSETTNPMGHM

SEQ ID NO: 264910 - DNA, 1539 bp, Artificial Sequence
  derived and/or modified sequence
atgtactgcgcctaccccgtgcccggcatgggcagcaacagcctgatgtactactacaacggcaagaccgtgtacgcccccagccccaacagcgacgacttcaacagagagagccccagctaccccagccccaagccccccaccagcatgttcgccagcaccttcttcatgcaggacggcacccacaacagcagcgacctgtggagcagcagcaacggcatgagccagcccggcttcggcggcatcctgggcaccagcaccagccacatgagccagagcagcagctacggcaacctgcacagccacgacagactgagctaccccccccacagcgtgagccccaccgacatcaacaccagcctgccccccatgagcagcttccacagaggcagcaccagcagcagcccctacgtggccgccagccacaccccccccatcaacggcagcgacagcatcctgggcaccagaggcaacgccgccggcagcagccagaccggcgacgccctgggcaaggccctggccagcatctacagccccgaccacaccagcagcagcttccccagcaaccccagcacccccgtgggcagccccagccccctgaccggcaccagccagtggcccagacccggcggccaggcccccagcagccccagctacgagaacagcctgcacagcctgcagagcagaatggaggacagactggacagactggacgacgccatccacgtgctgagaaaccacgccgtgggccccagcaccagcctgcccgccggccacagcgacatccacagcctgctgggccccagccacaacgcccccatcggcagcctgaacagcaactacggcggcagcagcctggtggccagcagcagaagcgccagcatggtgggcacccacagagaggacagcgtgagcctgaacggcaaccacagcgtgctgagcagcaccgtgaccaccagcagcaccgacctgaaccacaagacccaggagaactacagaggcggcctgcagagccagagcggcaccgtggtgaccaccgagatcaagaccgagaacaaggagaaggacgagaacctgcacgagccccccagcagcgacgacatgaagagcgacgacgagagcagccagaaggacatcaaggtgagcagcagaggcagaaccagcagcaccaacgaggacgaggacctgaaccccgagcagaagatcgagagagagaaggagagaagaatggccaacaacgccagagagagactgagagtgagagacatcaacgaggccttcaaggagctgggcagaatgtgccagctgcacctgaagagcgagaagccccagaccaagctgctgatcctgcaccaggccgtggccgtgatcctgagcctggagcagcaggtgagagagagaaacctgaaccccaaggccgcctgcctgaagagaagagaggaggagaaggtgagcgccgtgagcgccgagccccccaccaccctgcccggcacccaccccggcctgagcgagaccaccaaccccatgggccacatgtag

SEQ ID NO: 264911 - DNA, 1539 bp, Artificial Sequence
  derived and/or modified sequence
atgtactgcgcataccctgtcccaggcatgggctctaacagcctaatgtattactacaatggaaagaccgtttacgcgccatcccccaactccgatgatttcaatcgggaaagcccatcctacccctctccaaaaccgcccacaagtatgtttgcgtcaacctttttcatgcaggacgggacccataactcttccgacctgtggagtagctcgaacggaatgagccagcccggattcggcggtatcctgggcacctcaaccagtcacatgtcccagtctagtagctacgggaacctccattctcatgatcgcctgagctatccaccacattccgtgagcccaacagatattaacacttctctgcctcccatgtccagcttccatcgtggaagtaccagtagctccccctatgtggcagcttctcacaccccaccaatcaacggtagcgatagcattctgggcacccggggcaatgctgccggatccagtcagaccggggacgccctcggaaaagccctggcgtcaatctactctcctgatcacacttcgtcaagttttccaagcaacccttccacccccgtgggtagccctagtccactgaccgggacctcccagtggccccgacccgggggacaggcgcccagcagcccctcatatgagaattcactgcactccctgcagtcccgtatggaggatcgccttgaccgactcgatgacgccatacacgtgttgcgaaaccatgccgtcgggccttccacctctctccccgctggccactctgatattcatagcttactcggaccctcccataatgccccaattggatcccttaattctaactacggcgggagttcgcttgtggccagtagccgctcagcaagcatggtcggcacacacagagaggatagtgtctcgctaaatggtaatcatagcgtcctgtcttctacggtcacaacttcttctacggatttgaaccataaaacccaagagaattaccggggtgggttgcagagtcaatcggggaccgtggtaaccaccgaaattaagaccgagaacaaagaaaaggacgagaacttgcatgaacccccaagttctgatgatatgaaatctgatgatgagtcttcacagaaggacatcaaagtgagctcgcgggggagaacgagcagcaccaatgaagacgaggatcttaatccagaacagaaaatcgagagggagaaagagcggagaatggcaaacaacgcgcgggagcgtctccgggtgcgagatattaatgaggctttcaaagagcttgggcgaatgtgccagctgcatctcaagtccgagaagccccagacgaaattgcttattctccaccaggccgtggcggtaattttgtctctggagcagcaggtccgcgaaagaaaccttaaccccaaggccgcctgcttaaagcgaagggaggaagagaaagtgagtgcggtctccgccgagccccctaccacattgcccgggacacatcctggcctctccgaaacaacaaaccctatggggcatatgtag

SEQ ID NO: 264912 - DNA, 1539 bp, Artificial Sequence
  derived and/or modified sequence
atgtactgtgcctaccctgtgcccggcatgggcagcaacagcctgatgtactactacaacgggaagacagtgtatgcccccagccccaacagtgatgacttcaaccgggagagccccagctaccccagccccaagccacccacctccatgtttgccagcaccttcttcatgcaggacggcacccacaacagcagtgacctgtggagcagcagcaatggcatgagccagcccggctttggaggcatcctgggcaccagcaccagccacatgagccagagcagcagctatggcaacctgcacagccatgaccggctgagctacccaccccacagcgtgagccccacagacatcaacaccagcctgccccccatgagcagcttccaccggggcagcaccagcagcagcccctacgtggccgccagccacaccccacccatcaatggaagtgacagcatcctgggcaccagaggaaatgctgctggcagcagccagacaggagatgccctgggcaaggccctggccagcatctacagcccagaccacaccagcagcagcttccccagcaaccccagcacccctgtgggcagccccagccccctgaccggcaccagccagtggcccaggcctgggggccaggcccccagcagccccagctatgagaacagcctgcacagcctgcagagcaggatggaggaccggctggaccggctggatgatgccatccacgtgctgagaaatcatgctgtgggccccagcaccagcctgcctgctggccacagcgacatccacagcctgctgggccccagccacaatgcccccatcggcagcctgaacagcaactatggaggcagcagcctggtggccagcagccgcagcgcctccatggtgggcacccacagagaagattctgtgtccctgaatggaaaccacagcgtgctgagcagcacagtgaccaccagcagcacagacctgaaccacaagacccaggagaactaccggggcggcctgcagagccagagcggcaccgtggtgaccacagagatcaagacagagaacaaggagaaggatgagaacctgcacgagccccccagcagtgatgacatgaagagtgatgatgagagcagccagaaggacatcaaggtgagcagccggggccgcaccagcagcaccaatgaagatgaggacctgaaccctgagcagaagattgaaagagagaaggagaggaggatggccaacaatgcccgggagcggctgcgggtgcgggacatcaatgaggccttcaaggagctgggccgcatgtgccagctgcacctgaagtctgagaagccccagaccaagctgctgatcctgcaccaggccgtggccgtcatcctgagcctggagcagcaggtgcgggagaggaacctgaaccccaaggccgcctgcctgaagaggcgggaggaggagaaggtgtctgctgtgtctgctgagccccccaccaccctgcccggcacccaccctggcctgtctgagaccaccaaccccatgggccacatgtag

SEQ ID NO: 264913 - DNA, 1539 bp, Artificial Sequence
  derived and/or modified sequence
atgtactgcgcctaccccgtgcccggcatgggcagcaacagcctgatgtattattacaatggaaaaaccgtgtatgcacctagccccaactctgacgatttcaacagggaatcaccatcctacccttccccaaagcccccaacttctatgttcgcttccaccttctttatgcaggacggaacccacaacagtagtgacctgtggtcatctagcaacggaatgagtcagccgggcttcgggggaatactgggcacctctacctctcacatgtcccagagcagcagctatggcaatctgcacagtcacgaccggctgagttatccccctcatagcgtctcacctactgacattaacacttctctcccccctatgagtagctttcatcgtggatccactagcagttccccatacgtggctgcgtcccatactcccccaataaatggctccgatagcatcttgggtacaagaggaaatgcagcgggaagctcacagaccggggatgcattaggaaaggctttggcgtctatctacagccctgaccacaccagcagcagcttcccgtcaaatccatccacacccgtggggagtccatcgcccctaactggcacctctcagtggcctcgcccaggtgggcaggcgccatcctctccttcatatgagaattctctgcattcactgcagagcagaatggaggatcgtctcgaccgcctcgacgacgccatacacgtgctgcgtaaccatgcagtaggaccgagcacctctttgcctgccggtcattcagatatacacagcttgctgggtcccagccacaacgctccaatcggtagtcttaacagcaactacggggggagtagcctggtcgcttcctctcgaagcgcctcaatggttggcacccacagagaggattccgttagccttaatggaaaccactcagttcttagctctacagtcactacctcgtcaacagacctgaatcacaaaacacaggaaaattacaggggagggctgcagtcgcagtctggaactgtggttaccacagaaattaagactgaaaacaaagaaaaagatgaaaacctgcacgaacccccgagctccgacgatatgaagagcgatgacgagtcctcacagaaggatattaaggtctcttcaaggggtcgcacgtccagcacaaatgaagacgaggatctgaatcctgaacagaaaattgagagagaaaaggagaggagaatggcaaataatgccagggaacggcttagggtcagggatatcaatgaggccttcaaagaattaggcagaatgtgccagttacatctgaaatccgaaaagcctcagacgaagctccttatcctgcatcaagctgtggcggtgattcttagcctagaacagcaggtgcgtgagaggaacctcaacccaaaggctgcctgcctgaaacggcgcgaggaagaaaaagtgagcgccgtgtccgccgagccccccacaaccctccctggcacccaccctggcctgtcagagactaccaatcctatgggccatatgtag

SEQ ID NO: 264914 - DNA, 1539 bp, Artificial Sequence
  derived and/or modified sequence
atgtattgtgcatacccagtgcctggcatggggagcaattctcttatgtactattacaatggaaaaactgtgtatgctccaagtccaaattcagatgatttcaacagagagtctccctcctaccccagtcccaaaccacccacctctatgttcgcatctacctttttcatgcaggacgggacccacaacagctcagatttgtggtcatcctctaacggaatgagccaaccaggttttgggggtatcctgggcacttctaccagtcacatgagtcagagctccagctatggaaatcttcattcgcatgataggttatcctaccccccacactccgtgtcccctaccgacataaacacaagtctgccccctatgtcctcgttccacaggggtagtacaagcagctcaccttacgtggccgcttcacatacgcccccaattaatggctctgatagcatcctggggactcggggtaacgccgcaggttcatctcaaacgggagacgcgctcgggaaagcacttgcatccatttatagtcccgatcatacgtccagcagcttcccgagcaacccctctacacctgtggggtccccgagccctttaactgggacttctcagtggcccagacccggaggccaggctccatcttccccttcttacgagaatagccttcacagcctgcagtccagaatggaagatcgtcttgatcgtttggatgatgctatccatgtcctgagaaaccatgcagtgggcccatctacatcactccctgctggccactcggatatacactcacttctcggaccctcccataacgccccaatcggcagcctgaatagcaattacgggggttcctcccttgttgcaagtagtagatctgcctccatggtgggcacacatcgggaagactcagtctcacttaatggtaaccatagtgtcttatcctccactgtaacaacttcaagcactgatttaaaccataagacgcaggagaactacaggggtggcctgcagtcacaatctggcaccgtggtgaccaccgagattaagaccgagaacaaggagaaggatgagaatctgcacgagccgccatctagtgacgacatgaaatccgacgacgagagctcccagaaggacataaaggtttcctcgagggggagaacctcatctacgaatgaggacgaagatctcaatcccgaacagaagatcgagagggagaaagagcggaggatggctaataatgcacgtgagcgtctgcgggtgagggatatcaacgaagcgtttaaggagttgggcagaatgtgccagctccatcttaaaagcgaaaaaccacaaaccaaattgttaattttgcaccaggctgtcgccgtcattctttcactggaacagcaggttcgagaacggaacctaaacccaaaggccgcatgtctgaagcgtagagaggaggagaaagtcagcgctgtctctgccgaacccccaacaaccttgcctggaacacaccccggactctctgagacaacgaaccccatgggccacatgtag

SEQ ID NO: 264915 - DNA, 3956 bp, Artificial Sequence
  derived and/or modified sequence
gtcttggagagaggctgtgtgcattagctacaaatagtaacattttcaaaatcaacatgtattgtgcttatcctgtccctggaatgggcagcaattctttgatgtattactacaatgggaaaacggtatatgcaccatccccaaattcagatgatttcaaccgtgaatctcctagttatccatctcctaagccaccaaccagtatgttcgctagcactttctttatgcaagatgggacccacaattcttctgacctttggagttcatcaaatgggatgagccagcctggttttggtggaattctggggacctccacttcccacatgtctcaatccagtagttatggcaaccttcattcacatgaccgcttgagttatcctccacactcagtttcaccaacagacataaacacgagtcttccaccaatgtccagctttcatcgcggcagtaccagcagttcaccttacgttgctgcctcacacactcctcccatcaatggatcagacagcattctaggaaccagagggaatgctgctggaagctcacagacaggtgatgcacttggaaaggctttggcatctatttattctcctgaccataccagcagtagttttccgtcaaatccatcaacaccagttggatcaccttcacctctcacaggtaccagtcagtggccaagacctggagggcaagcaccttcatccccaagctatgaaaactcactccactccctgcagtctcgaatggaggatcgtttagacagactggatgatgcaatccatgtgctgcggaaccatgctgtgggaccttccaccagtttgcctgctggtcacagtgatatacatagtttattgggaccatcccataatgcaccaattggaagcctcaattcaaactatggaggatcaagccttgttgcaagcagtcgatcagcttcaatggttggaactcatcgggaagactctgtcagtctcaatggcaatcattcagtcctgtctagtacagtcactacttcaagcacagacctgaaccataaaacacaagaaaattatagaggtggcttgcaaagtcagtctggaactgttgttacaacagaaatcaagactgaaaacaaagaaaaggatgaaaaccttcatgaacctccttcatcagatgacatgaagtcagatgatgaatcctcccaaaaagatatcaaggtttcatctagaggcagaacaagcagtactaatgaagatgaggatttgaaccctgaacagaagatagaaagggagaaggagaggcggatggctaacaatgccagagaacgcttacgcgtgcgggatattaatgaagcattcaaagagcttggccgaatgtgtcagcttcacttgaagagtgaaaaaccccaaacaaaactccttattcttcatcaagccgtggcagtcatccttagtctagaacagcaagtcagagagaggaaccttaaccccaaagcagcctgccttaagagaagggaagaagaaaaagtttctgccgtatcggcagagccgccaaccacactgccaggaacccatcctgggcttagtgaaactaccaaccctatgggtcatatgtaaacatcagccagttccagagttatcagtaggctagatagaaggtgacctctcctcataaggacttggacaactcagattatctgaagacacaaacctgacaggagggagaagaaaaaacaaaacacttgaaccaagaaactcaaatgtaatcctacgatcaaagcaactggtcaacacttccatcagaagtgaagataggaagctcatcagatagaacatcagcccatgagatgtttgcaacaaatcttttgttgcaagcagtgtgtcgcttctgcacaatcagagactgtctcgatctctccactcaccgtggaagttgccttgtgcctaaactgaattgacaaatgcattgtaactacaaattttatttattgttatgaaactgtaaggtctacatataaagggaaaaagttaatgtggaaagctgatctacactcagctgatgccagcatacattaaagcggttcacgtgcagagaacaaagcagtgacaaccattggcccttagcattcccggcatacctattagtgtcttaaaaaggaagggaaaagtcttttgttgccctctcctatcctcttgccatatgaatagcgttttccatgaaataggaaaatattacttggtatagcatttctcttgctctcattttttgatttatttttattttctctttgtgggtgttatatttgatctctaaatctgaacagtttatggtcacagtccagcctcctccgtgcagccctgtgtgctttgcacatttaccttacagtggtaagcagagaccatctgtgaccatagcctagctagcattttaaaaggggaaattttgttctctaggttttcccccaaataaacattgctttatttctaataataaccaagacttttcaagcttctagatctcataggaaagcttgtaatagcaaaattgtaaattacaagggaagaatctactttttagaaatcgctttgttttccaagcagtaagtactacatacagtacttgtaaagtgttagctgtaagtaagcacaaaatacatttaaaatacaaagacgattttttcaggctgtgattatggtgaacataacaaaacccagtagtcaccaaggcaggtagtgtgataaatgaacacaccactctgaggctaattacctaatggaatacaagagcaatggtcacccgtatttccttatcctagcctttatttctctgtcatttggatggctggtcaatggggaagaattgagtgggtgatttaatcaactgcaaaccatctgcccctgtcccaaaatgatgagccagattagcattaaaccagtacttgtcagtccatcttaatactgttcattaaggcactctctgtctctaatccttaggagttgttttaaaagacataatcactttgaacttccatgaaacctgtcttccaccacaacaaccctgggagagaaaaacatgctaaaggaggtatcttggcttaataattccttatagccaatatcaacagtggcaatcagcacacagaggaaaggacccaaatcactatgtagcttaaagatttctgttaatttgaaagaacaaaaacaagacagaacttctggtactctaatcaggatgattcctaacaagtcagtcatttgtgaacttagtggactttttggttactttaatttgcatatattctccagttacatcggactctatctgtggccttgttcttcatttcagtgttaatcagctaaacagaagttgttgcttatgatgtgtgagtgaacatatgccactgcctggcctttttttcttcagagcttgttgtctttttcgctatattagactttgcagtatgcccagaagctttccttcataaaatagaaagaaaaaaacatttggcttatttttcactgtagctagtcttttatacaataatcttgtaagaaaatttcttgaattctaaatattactctttctagatttttgaaatcaaaaagttttcagtaaaaagtttcttactttattttattatattaggtagtaaaaaatgtagggttatttaccataacctgttcattaatatcagaaatttacaatagcattttaagaccatagtaggattctagcataccgtgtagtacctatggagtattgtaagagctaattgttggagatgaattgcttctcatcttgttctccagtttccattgttggtttattgcagatttgtatcctgtgtcaaattcaaggtattattgataaaccttttcaaccagcagcaagaagttcaaatttttttctgtcactgtaacagaaaacacaatatgtatataacatttatgtagcaataaatgtgccatctttttttt

SEQ ID NO: 264916 - protein, 866 aa, Artificial Sequence
  derived and/or modified sequence
MEEGNNNEEVIHLNNFHCHRGQEWINLRDGPITISDSSDEERIPMLVTPAPQQHEEEDLDDDVILTEDDSEDDYGEFLDLGPPGISEFTKPSGQTEREPKPGPSHNQAANDIVNPRSEQKVIILEEGSLLYTESDPLETQNQSSEDSETELLSNLGESAALADDQAIEEDCWLDHPYFQSLNQQPREITNQVVPQERQPEAELGRLLFQHEFPGPAFPRPEPQQGGISGPSSPQPAHPLGEFEDQQLASDDEEPGPAFPMQESQEPNLENIWGQEAAEVDQELVELLVKETEARFPDVANGFIEEIIHFKNYYDLNVLCNFLLENPDYPKREDRIIINPSSSLLASQDETKLPKIDFFDYSKLTPLDQRCFIQAADLLMADFKVLSSQDIKWALHELKGHYAITRKALSDAIKKWQELSPETSGKRKKRKQMNQYSYIDFKFEQGDIKIEKRMFFLENKRRHCRSYDRRALLPAVQQEQEFYEQKIKEMAEHEDFLLALQMNEEQYQKDGQLIECRCCYGEFPFEELTQCADAHLFCKECLIRYAQEAVFGSGKLELSCMEGSCTCSFPTSELEKVLPQTILYKYYERKAEEEVAAAYADELVRCPSCSFPALLDSDVKRFSCPNPHCRKETCRKCQGLWKEHNGLTCEELAEKDDIKYRTSIEEKMTAARIRKCHKCGTGLIKSEGCNRMSCRCGAQMCYLCRVSINGYDHFCQHPRSPGAPCQECSRCSLWTDPTEDDEKLIEEIQKEAEEEQKRKNGENTFKRIGPPLEKPVEKVQRVEALPRPVPQNLPQPQMPPYAFAHPPFPLPPVRPVFNNFPLNMGPIPAPYVPPLPNVRVNYDFGPIHMPLEHNLPMHFGPQPRHRF

SEQ ID NO: 264917 - DNA, 2601 bp, Artificial Sequence
  derived and/or modified sequence
atggaggagggaaataataacgaagaggtgatccacttgaataatttccattgccacagggggcaagagtggatcaacctgcgcgacggcccaatcaccatttctgacagttccgacgaggaacggatacctatgttagttactcccgccccccagcagcacgaagaagaggacctcgacgacgatgtgatattgacagaggacgactcggaggacgactatggggagttcctcgacctcgggccacccggcatatcagagtttacgaaaccatccggacagaccgagcgggagcccaagccaggaccatctcataaccaggcagccaatgacatcgtgaatcctcggtccgaacagaaggtcatcatcctggaagaagggagcctgttgtacaccgaatccgaccccctagagacacagaatcagtccagtgaggactcagaaacagagcttttgtccaacctcggtgaatcggccgcactcgctgacgaccaggccattgaggaggactgttggctcgaccatccctatttccaatcattgaaccagcaaccacgagaaatcaccaatcaagttgtaccccaggaacggcagcccgaagccgaactcggccgccttctcttccagcacgaatttccaggcccggcatttcctaggcccgaacctcaacagggcggcatctctggtcctagtagccctcagcccgcccatccactgggtgagtttgaagaccagcagctcgcctctgacgacgaggaacctggtcccgcattcccgatgcaggagagtcaggaaccgaacttggaaaatatttggggtcaggaggccgccgaggttgatcaggagttagttgagctgctcgttaaggagactgaagcacgattccccgacgtagcaaacgggtttatagaggagatcatccactttaagaattattatgatttgaacgtcctatgtaactttctgctggagaatcctgactaccctaaacgagaagacagaatcataattaaccccagttcatctctcctagccagccaggacgagaccaaactccccaagattgattttttcgattatagcaagcttacccctctcgaccagcggtgctttatccaggcagccgatctgctcatggctgacttcaaggtgctatcaagtcaggatataaagtgggcgctccatgaattgaagggccactacgctatcacacgtaaagctttatcagatgctattaagaagtggcaggagttgtccccggagacctcagggaagcggaagaaacgtaaacagatgaaccagtactcctatattgatttcaagttcgaacagggcgatataaaaattgagaagcggatgtttttcttggagaacaagcgacgacattgcaggtcctatgaccgaagggcactacttcccgccgtccaacaggagcaggagttctatgagcaaaagatcaaggagatggccgagcacgaagacttcctcctggcgctgcaaatgaacgaagaacagtatcagaaagacggccagctgatcgagtgccgatgctgttatggcgagtttccatttgaggagctgactcagtgtgcggatgcccacctgttctgcaaggagtgtctaatacggtatgctcaagaggccgtcttcggctcgggtaagctggagttatcctgtatggagggcagctgtacctgctcttttcccacctctgaacttgaaaaagtgctgccccagaccatactgtacaaatattatgagcgaaaagcggaagaggaagtggcggcagcttatgccgacgagctggtacgctgtccgtcctgtagttttcccgctttgctggactccgacgtgaaaaggtttagttgccctaatccacattgtaggaaggaaacttgccgcaagtgccaggggttgtggaaggaacataatggcctgacctgtgaggaactagctgagaaagacgatatcaagtaccggacaagtatcgaggagaaaatgaccgctgcccgcatccgtaaatgtcataaatgcggaaccggactgatcaagtccgagggttgtaataggatgagttgcagatgtggggctcaaatgtgttatctgtgcagggtgtcaatcaacggttacgaccacttctgccaacacccgcgatcacccggcgcgccttgtcaggagtgcagtaggtgctccctgtggaccgatcccaccgaggacgacgagaagctgatagaggagatccagaaagaggcagaggaggagcaaaaacgtaagaacggcgaaaacacatttaagcgcatcggacccccactcgaaaaaccggttgaaaaagtccaacgtgttgaagcccttccaaggcccgtgccccaaaacctgccccaaccacagatgccaccatacgcttttgcccaccccccgtttccgctccctcctgtacggcctgtgtttaataattttccattaaatatgggacccattcctgcaccttacgtgccccctctgccaaatgtgcgggtgaattacgacttcggccctattcacatgccactcgagcacaacttgcccatgcattttggccctcagcccagacatcggttttag

SEQ ID NO: 264918 - DNA, 2601 bp, Artificial Sequence
  derived and/or modified sequence
atggaggagggcaacaacaatgaggaggtgatccacctgaacaacttccactgccaccggggccaggagtggatcaacctgagagatggccccatcaccatcagtgacagcagtgatgaggagcgcatccccatgctggtgaccccagccccccagcagcacgaggaggaggacctggatgatgatgtgatcctgacagaagatgacagtgaagatgattatggagagttcctggacctgggccccccaggcatcagcgagttcaccaagcccagcggccagacagagcgggagcccaagccaggccccagccacaaccaggccgccaatgacatcgtgaaccccaggtctgagcagaaggtgatcatcctggaggagggcagcctgctgtacacagaaagtgaccccctggagacccagaaccagagcagtgaagattctgaaacagagctgctgagcaacctgggggagagcgctgccctggctgatgaccaggccatcgaggaggactgctggctggaccacccctacttccagagcctgaaccagcagccccgggagatcaccaaccaggtggtgccccaggagcggcagcctgaggccgagctgggccgcctgctcttccagcacgagttccctggccctgccttccccaggcctgagccccagcagggcggcatcagcggccccagcagcccccagcctgcccaccccctgggggagtttgaggaccagcagctggccagtgatgatgaggagcccggccctgccttccccatgcaggagagccaggagcccaacctggagaacatctggggccaggaggccgctgaggtggaccaggagctggtggagctgctggtgaaggagacagaggcccgcttcccagatgtggccaacggcttcatcgaggagatcatccacttcaagaactactatgacctgaatgtgctgtgcaacttcctgctggagaacccagactaccccaagcgggaggaccgcatcatcatcaaccccagcagcagcctgctggccagccaggatgagaccaagctgcccaagattgacttctttgactacagcaagctgacccccctggaccagcgctgcttcatccaggccgctgacctgctgatggctgacttcaaggtgctgagcagccaggacatcaagtgggccctgcacgagctgaagggccactacgccatcaccaggaaggccctgagtgatgccatcaagaagtggcaggagctgagccctgagaccagcggcaagaggaagaagaggaagcagatgaaccagtacagctacatcgacttcaagtttgagcagggcgacatcaagattgagaagaggatgttcttcctggagaacaagaggaggcactgccgctcctatgaccggcgggccctgctgcctgctgtgcagcaggagcaggagttctatgagcagaagatcaaggagatggccgagcacgaggacttcctgctggccctgcagatgaatgaggagcagtaccagaaggatggccagctgattgagtgccgctgctgctatggagagttcccctttgaggagctgacccagtgtgctgatgcccacctgttctgcaaggaatgtctcatccgctatgcccaggaggccgtgtttggcagcggcaagctggagctgagctgcatggagggcagctgcacctgcagcttccccaccagcgagctggagaaggtgctgccccagaccatcctgtacaagtactatgaaaggaaggccgaggaggaggtggccgccgcctatgcagatgagctggtgcgctgccccagctgcagcttccctgccctgctggacagtgatgtgaagcgcttcagctgccccaacccccactgcaggaaggagacctgcaggaagtgccagggcctgtggaaggagcacaacggcctgacctgtgaggagctggccgagaaggatgacatcaagtaccgcaccagcattgaggagaagatgacagctgcccgcatcaggaagtgccacaagtgtggcaccggcctcatcaagtctgagggctgcaacaggatgagctgccgctgtggggcccagatgtgctacctgtgccgggtgtccatcaatggctatgaccacttctgccagcaccccaggagccctggggccccctgccaggagtgcagccgctgcagcctgtggacagaccccacagaagatgatgagaagctgattgaggagatccagaaggaggccgaggaggagcagaagaggaagaatggagagaacaccttcaagagaattggcccccccctggagaagcctgtggagaaggtgcagagggtggaggccctgcccaggcctgtgccccagaacctgccccagccccagatgccaccctatgcctttgcccacccccccttccccctgccccctgtgcggcctgtgttcaacaacttccccctgaacatgggccccatcccagccccctacgtgccccccctgcccaacgtgcgggtgaactatgactttggccccatccacatgcccctggagcacaacctgcccatgcacttcggcccccagcccaggcaccgcttctag

SEQ ID NO: 264919 - DNA, 2601 bp, Artificial Sequence
  derived and/or modified sequence
atggaggagggcaacaacaacgaggaggtgatccacctgaacaactttcactgccatcgcggccaagagtggataaacctgcgcgatggcccaatcacgatatcagatagttctgacgaggaacgaataccaatgttagtgacgccggctccccagcagcacgaggaggaggaccttgacgatgacgtcatcctcaccgaggatgattccgaagatgattacggggagttcctggacctgggcccgcccggtatatctgagtttacaaagccaagtggacaaacagagagagagcccaaaccagggccatcacacaaccaagcagccaacgacatagtgaatccacgtagtgagcagaaggtcataattctggaagagggtagcctcctctacactgagagcgacccccttgagactcaaaaccaatctagcgaagactctgagaccgaactgcttagtaacctgggcgagtcagctgcacttgcggacgatcaggcaattgaggaagactgttggttagatcatccatattttcaatctctcaatcaacagcctcgcgagatcacaaatcaggtagtgcctcaggagcgacaaccggaggctgagctgggacgcctcctgttccagcatgaatttccaggaccggcctttccccgccccgaacctcagcaggggggaatttctggcccatcatcaccccagcctgcccatcctctgggcgagttcgaggaccagcagctggcaagcgatgacgaagaaccggggcccgctttcccaatgcaggagtctcaagaacctaatctggagaatatctggggacaggaagccgccgaggtggatcaggagctagtcgagttactggtgaaggagacagaagcgcggtttccagatgtggccaacggctttatcgaagagatcatccacttcaaaaactattacgatctcaacgtgctgtgcaactttcttctggaaaatcccgactatccaaagcgcgaggatcgtataattatcaatccctctagcagcctgctcgcctcccaggacgagactaagctgccaaaaattgacttcttcgattattccaagctgacaccgctcgatcaaaggtgcttcattcaggccgccgatctgctgatggcagacttcaaagtactcagttcccaggatataaagtgggctctgcacgaactgaagggccattacgcgatcacaaggaaagctctttccgacgctattaaaaagtggcaggaactgagcccagagacatcaggcaagcggaagaaacgcaagcagatgaatcaatattcctacatcgacttcaagttcgaacagggtgatattaagatcgaaaagcggatgttctttctcgaaaacaaacgcagacattgccgaagttacgatcggcgagccctcctgcctgcagtccaacaagagcaggagttttacgaacagaagatcaaagaaatggccgaacatgaggatttcctgctggccctccaaatgaacgaggagcaataccagaaagacggtcagctgattgaatgtagatgttgctacggtgagttcccattcgaggagctaactcagtgtgcagatgcccacctgttttgtaaggaatgccttattcgctacgcccaggaggccgtctttgggtctggtaaattggagctctcttgcatggaaggatcctgtacatgttcattcccaacttccgaactggagaaagtgttaccccaaaccatcctttacaagtactatgaaagaaaagccgaagaggaggtcgcagccgcctacgccgacgaactcgtgcgctgtcctagttgctccttcccggcacttctagattctgatgtgaagagattttcttgcccgaacccacattgcagaaaagagacctgtaggaaatgccagggtctgtggaaagagcataatgggcttacttgcgaggagttggccgaaaaagacgacataaagtacagaacttcaattgaggagaaaatgaccgcagctagaattcggaaatgccataaatgcggcacgggactcatcaaaagcgaaggttgcaaccggatgagctgtcgttgcggagcacagatgtgctatctgtgtcgggtctccataaatgggtatgatcatttttgtcagcaccctcgtagccctggagctccatgccaagaatgcagcagatgttcactgtggaccgaccctacagaagatgatgagaaactgattgaagaaattcaaaaggaggccgaagaggagcagaagagaaaaaatggcgagaacaccttcaagaggattgggcctccactggagaagcctgttgaaaaagttcagcgggtcgaagcacttcccagacctgtgccccagaacttgccgcagcctcaaatgcccccttatgcttttgcccatcccccatttccattgccccctgtccggcccgtgttcaataattttcctctaaacatgggtcccattccagcaccttatgttccgcccctgcccaacgtacgggtcaactatgacttcggaccaatccacatgccgctcgagcataatctgccgatgcacttcggacctcagcctcgacataggttctag

SEQ ID NO: 264920 - DNA, 2601 bp, Artificial Sequence
  derived and/or modified sequence
atggaggaaggaaataacaacgaagaagtgatccacttaaataactttcactgtcaccgtgggcaagagtggattaacctgcgcgatggacctattacaatcagcgattcctcagatgaagagagaatcccaatgcttgtgacccctgccccacagcagcacgaggaagaagacctcgatgacgatgtcattctgactgaggatgatagtgaagacgattacggggaattcctcgatctgggtcctccagggatcagcgagttcaccaaaccttccggacagaccgagcgagagccaaagccaggcccaagccacaaccaggcggctaatgatatcgtgaatcctaggtcagaacagaaggtgatcatactagaggagggtagcctgctctatactgagagtgaccccctggagacacagaaccagtcctctgaggattccgagaccgagctgctctcgaacctgggagagtccgccgcactagcagacgatcaggccatcgaagaggactgctggttggaccacccctactttcagtcgctgaatcagcaacctcgggagatcactaaccaagtcgtcccgcaggagcggcaacccgaggcagaactcggacggttactgtttcagcacgagttccccggacccgcttttcctagaccggagccgcagcagggcggaatttccggaccatcctcacctcagcctgctcaccctctaggtgagtttgaagatcaacaactggcgtcggatgatgaagaaccgggaccggcttttcccatgcaggagtcccaggaaccgaatttggaaaatatctggggtcaggaggccgctgaagtggaccaggagctggtggagctcctggtgaaggagacagaggcgaggtttcctgacgtggctaacggatttattgaggagattattcatttcaaaaactactacgacttaaatgtgctctgcaatttcttgctcgagaaccctgattacccgaagcgagaggacaggattataattaacccaagctcttcattacttgctagccaagacgaaacaaaactcccaaagatagacttttttgactatagcaagcttacccccctggaccagcgctgcttcatccaggccgctgatttactgatggcggactttaaggttctctcttctcaggacatcaagtgggctttgcatgagctaaaagggcattacgcgatcactcgcaaggcactctctgatgccatcaaaaaatggcaagaactatctcccgaaacttccggaaagagaaagaagcgaaagcagatgaatcagtattcatacatagactttaaattcgaacagggcgatatcaaaattgagaaacggatgttctttttggagaacaaaaggcgacactgtcgatcatacgaccgcagagcccttttgccagcagtccaacaggaacaagaattttatgaacagaagatcaaggaaatggctgaacacgaggactttttgcttgccttacagatgaacgaagaacagtaccagaaggacgggcagctgattgaatgccggtgctgttatggtgagtttccattcgaggaattgactcagtgcgctgatgcacacctgttttgcaaggagtgcctgatcagatatgcccaggaggcggtgttcggctcagggaaactagagctcagttgcatggaagggtcctgtacttgcagtttcccgacaagcgagcttgagaaggttttgccccagactattctttataagtattatgagcgtaaggcagaggaggaggtcgccgctgcctatgctgacgagctcgtccggtgccccagttgctcttttccagcgctcttggatagcgatgtcaagcgattctcttgtcctaatcctcattgtcgaaaggagacttgcagaaagtgtcagggcctgtggaaagaacacaacgggctcacatgtgaagaactcgctgaaaaagacgatatcaaataccgcacctctatcgaagagaaaatgacagctgcgaggatccggaagtgccacaaatgcggcacaggactaataaagagtgagggttgtaaccggatgagttgtaggtgcggcgcacagatgtgttatctgtgcagggtctccattaatggatacgaccacttttgtcagcatcctcggtcccctggggctccatgtcaagagtgttctcggtgctctctttggaccgatcctactgaggacgacgagaagcttattgaagaaattcaaaaggaggctgaagaagagcagaagagaaagaacggcgaaaacactttcaagagaatcggcccaccgcttgaaaaacctgtggagaaggttcagcgcgtggaagctctgcctcgacctgtaccacaaaacctcccacagccccagatgcctccctacgcttttgctcaccccccttttcctcttccacctgtgagacctgtgtttaataatttcccgttaaacatggggcctatcccagccccttacgtgcctcctttgcccaacgtcagagttaactacgacttcggcccaatccacatgccactcgaacacaatctgcccatgcattttgggcctcagcctcgtcacagattctag

SEQ ID NO: 264921 - DNA, 5639 bp, Artificial Sequence
  derived and/or modified sequence
agggggcgctgtgcgcaggcgcgaggtgacgccgcggcagggccggaaggagtgcagcggctgccacggagctcgcagctgcggcttctgaggagtaagcggcgcggtagcgaaggccgccgaacctgcctggctagccggcgacttgagtgacgattcttttgaaacagatggtcaccatgtttagatattagcagtcccatatatgcatgtctgcatttgaaaatggaagagggaaacaacaatgaagaggtaattcacttgaacaactttcactgccatcggggacaagagtggatcaatctccgagatgggcccatcaccatatctgactcctcagatgaggaaaggattccaatgctggtcaccccagctcctcagcagcatgaagaagaggacctggatgatgatgtcatcctgacagaagatgattctgaggatgactacggtgaatttctggatcttgggcctcctggaatctctgaattcactaagccaagtggccaaacagaaagagaacccaagcctggaccgagtcataaccaagcagcaaatgacattgtcaaccccagatcagagcagaaagtcatcatcttggaagaaggtagccttctttacacagaaagcgatcctttggaaactcagaaccagtcatccgaagactcagagacagagctgttatcaaatctaggagagtcagctgctctagcagatgatcaggccatcgaagaagactgctggttagatcatccttacttccagtctctgaaccaacagccccgtgaaataacaaaccaggtcgttcctcaggaacggcagcctgaagcagaactgggccgcttgttgtttcagcatgaattcccagggcccgcttttccaaggccggaaccccagcaaggtgggatttcaggcccctcttctcctcagcctgcccatcctctaggagagtttgaagaccagcagttagcaagtgatgatgaagagccaggtccagcctttccaatgcaagaatctcaagagcccaatttggaaaacatttgggggcaagaagctgcagaggtagatcaagagctcgttgaactactagtgaaagaaacggaagcaagatttccagatgtagcaaatgggtttattgaggaaataattcattttaagaattattatgatctgaatgtactttgtaattttcttctggaaaacccagattatccaaagagagaagacagaatcattataaatcccagtagcagtctgctggccagccaagatgagacaaagttgcctaaaatagacttttttgactattctaaattgacccctcttgaccagcgctgcttcatccaagctgctgacctcctcatggccgacttcaaagtgctcagtagtcaggacatcaagtgggccctgcacgagctcaaaggacactatgcaatcacccgaaaggccttgtctgatgccattaaaaaatggcaggagctgtcaccagaaaccagtggaaaaaggaagaagagaaaacaaatgaaccagtattcttacattgatttcaagtttgaacaaggtgacataaaaatagaaaagaggatgttctttcttgaaaataagcgacgacattgtaggtcctatgaccgacgtgctctccttccagctgtgcaacaagagcaggagttctatgagcagaaaatcaaagagatggcagagcatgaagactttttgcttgccctacagatgaatgaagaacagtatcaaaaggatggccagctgattgagtgtcgctgctgctatggggaatttccattcgaggagctgacgcagtgcgcagatgctcacttgttctgcaaagagtgtctcatcagatatgcccaagaggcagtctttggatctggaaagttggagctcagctgcatggaaggcagctgcacgtgttcgttcccaaccagtgagctggagaaggtgctcccccagaccatcctgtataagtactatgagcgaaaagccgaggaggaggttgcggcagcctacgccgacgagcttgtcaggtgcccgtcctgtagctttccggctctgttggacagtgatgtgaagaggttcagctgtcctaatcctcactgccgaaaggaaacctgtaggaagtgtcagggactctggaaagaacataatggcctcacctgtgaagagctggctgaaaaagacgacatcaagtaccgtacctctattgaagaaaaaatgactgctgcccgcattagaaaatgccacaagtgtgggactggcctcatcaaatctgaaggctgcaaccgcatgtcttgccgctgtggtgcccagatgtgctacctctgtcgagtttctattaatggatatgaccatttctgccaacatccccgctcaccaggagccccttgccaggagtgttcaagatgctctctctggaccgatcccactgaagatgatgagaagcttattgaggaaatccagaaggaggctgaagaggaacagaaaagaaagaatggagagaacaccttcaaacgcattggacccccgctggagaagcctgtggagaaggtgcagagggtggaggccctcccgaggcccgttccgcagaacctgccacagccacagatgccaccctatgccttcgcgcacccacccttccccctgcctcccgtgcggcctgtgttcaacaacttcccactcaacatggggcctatcccagccccgtacgtgccccctctgcccaacgtgcgggtcaactatgacttcggtcccatccacatgcccctggagcacaacctgcccatgcactttggcccccagccgcggcatcgcttctgatggccccgaatccccattgagcagcacaaagcccgtttggggtaggagtgtggatggagaaccctcccccaaggctggtgtctgtaccattgcatcctaagtcagcttgaagggtaggctggttttcttcccacccctttcctagaagggctactgctcctggaagagtggacggatccataataaagacgtcccaaatggtggagttcggagagagctgcgatgtgaactgcccctcccctcgcatcccccaggccaccaacggcagtccttctgccttgtccatggcataggccatagaccaggtccctgctgctcacacctgggcctctcctcggagccgacccctgggtagcaaggcagccgagagcatctccctggaggggcccacggttgggccaagggcagagggggctgcacctgcgggcctgggaagcattgctcagggtggggggctgggaccatggcccgcagaggcactgccacagctgtgagggccaagatgctgtccccccatccaaaacccgtgcgccactgcagtgagtgttgagggcacctctcctcccctcttacacctactcagatgaggcagcagcagacccatctcgcggcgggggttttgttctgttgccgcctaactttctcatcctcggtctctggaaagtcaggctgagaaatcctttcccaggccaggccgctgcggtacactggatggttctgaagctggcccattgaaagagcctcttaaggcagctgggacagaggcctggtggccctgctgggcagcccaactgctgggggagacgtttctgccaccctgggtgatgagcagcttttcccccctggctttctgggggaggagtgggcctccttagggagacaggtgaccctgggtgccacccctgccccgtgtgtgccccgggtgttctcagtggttgctgaaggcaggtagagggtgctgtccagtatcccccatgtgaaggtcacttcccttctcatggagtcagctgagcatcagctcagccctgccatgtccccactcaccctcctcgcctcctgtccggccctgggtttctagcggtgcctgaggcatcactctggcccattgacagatgagaggtctgaagccttcctggccacaggcatcactttctcctcctcctcatgccctgccttgtccttgtcgtgttgccatggggttctgagaggctgggagttcacagacctcagacacagctgagtccgacaaccattggggtggggctgcatcagtctccggagtggcccgccacctcctgaagcagggcctggcccacccaaggtgcctggggcaggcgggcaccgtcattcgctgccattggcttctcagatgtatttcaaggactaaagtgggctctaagatctaagatggcccggcgcggtggctcccgcctgtaatcccagcactttgggaggccgaggcgggcggatgagttgaggtcgggagtttgagtccccgtctctactaaaaatacaaaattagccggacaaggtggcgcatgcctataatcccaggtactcaggaggctgaggcaggagaatcacttgaacctgggaggcagaggttgcagtgagccaagattgtgccactgcactccagcctgagcaacaaaagcaaaactctatctttaaaaaaaaaaaaaaaaaaactaagatacccattctttctgcctttgcccaggatggaggctttgaagacaggtggtcacctggacctggggtaagggtgcgcagggaggccgggcttgggggcagcctgctgctatgtccttgctggcgcccatacctgttggactgcctgaactttgctactagcctgaacgacagtgccttggaaaggcaggctccatgcggcagcaacaggattgtcttcggtaccttaaatatgctccctgtgcttccccagggaggatctctgggagcagagggcggctgtagacatcacagctgaagaggtgacctcaggccctgggagcctcagctccctctgccctgtaccctaggcacgtggctccagcaagagccccaggcaggacaaagggagcaggcagcagctgcagaaacagccctagacaggtgctggcctcaaccctggcaggggagggggagcccagagtgatgtttctcctaaggccaaaccccaggggtgggtcatttgagaggagttccagctgttctggccacactgggctggtggggaaggagcggcggcctctttccttggagggtccctgattcctgaggatcctccccgagccaggcacgggggaccacagggctgccgtgagcacccaccctggttctccaggcccctctgtccagaggcagggcctgaacctcgggctcctgcctggaccagtgacagcattggggagagaagcactgggggtcttcagaccagccagcaaggggccgtgccagtgcccagagagcaggtcagacaacaggcaaccctgaggcagctggctccctctctctgccctgcagggcttgccgcagggcgtgaggctccccagccacagccccctcttacttgccttaaaactggagagaggaatctagtatttgcacttagcaaaatatttaaaaactgaaaaaaatgtgcatgatctgtcactttgtataaaaacaagaaacgattagttcattaaactttttctttaccttctggtagtaaaaatagataaaataattccgtttcaactactgtgtgtaaaaagcctgtatcatatgtaactgggacttttgtaaataaatgtttgtgcgctctgctc

SEQ ID NO: 264922 - DNA, 2601 bp, Artificial Sequence
  derived and/or modified sequence
atggaggagggcaacaacaacgaggaggtgatccacctgaacaacttccactgccacagaggccaggagtggatcaacctgagagacggccccatcaccatcagcgacagcagcgacgaggagagaatccccatgctggtgacccccgccccccagcagcacgaggaggaggacctggacgacgacgtgatcctgaccgaggacgacagcgaggacgactacggcgagttcctggacctgggcccccccggcatcagcgagttcaccaagcccagcggccagaccgagagagagcccaagcccggccccagccacaaccaggccgccaacgacatcgtgaaccccagaagcgagcagaaggtgatcatcctggaggagggcagcctgctgtacaccgagagcgaccccctggagacccagaaccagagcagcgaggacagcgagaccgagctgctgagcaacctgggcgagagcgccgccctggccgacgaccaggccatcgaggaggactgctggctggaccacccctacttccagagcctgaaccagcagcccagagagatcaccaaccaggtggtgccccaggagagacagcccgaggccgagctgggcagactgctgttccagcacgagttccccggccccgccttccccagacccgagccccagcagggcggcatcagcggccccagcagcccccagcccgcccaccccctgggcgagttcgaggaccagcagctggccagcgacgacgaggagcccggccccgccttccccatgcaggagagccaggagcccaacctggagaacatctggggccaggaggccgccgaggtggaccaggagctggtggagctgctggtgaaggagaccgaggccagattccccgacgtggccaacggcttcatcgaggagatcatccacttcaagaactactacgacctgaacgtgctgtgcaacttcctgctggagaaccccgactaccccaagagagaggacagaatcatcatcaaccccagcagcagcctgctggccagccaggacgagaccaagctgcccaagatcgacttcttcgactacagcaagctgacccccctggaccagagatgcttcatccaggccgccgacctgctgatggccgacttcaaggtgctgagcagccaggacatcaagtgggccctgcacgagctgaagggccactacgccatcaccagaaaggccctgagcgacgccatcaagaagtggcaggagctgagccccgagaccagcggcaagagaaagaagagaaagcagatgaaccagtacagctacatcgacttcaagttcgagcagggcgacatcaagatcgagaagagaatgttcttcctggagaacaagagaagacactgcagaagctacgacagaagagccctgctgcccgccgtgcagcaggagcaggagttctacgagcagaagatcaaggagatggccgagcacgaggacttcctgctggccctgcagatgaacgaggagcagtaccagaaggacggccagctgatcgagtgcagatgctgctacggcgagttccccttcgaggagctgacccagtgcgccgacgcccacctgttctgcaaggagtgcctgatcagatacgcccaggaggccgtgttcggcagcggcaagctggagctgagctgcatggagggcagctgcacctgcagcttccccaccagcgagctggagaaggtgctgccccagaccatcctgtacaagtactacgagagaaaggccgaggaggaggtggccgccgcctacgccgacgagctggtgagatgccccagctgcagcttccccgccctgctggacagcgacgtgaagagattcagctgccccaacccccactgcagaaaggagacctgcagaaagtgccagggcctgtggaaggagcacaacggcctgacctgcgaggagctggccgagaaggacgacatcaagtacagaaccagcatcgaggagaagatgaccgccgccagaatcagaaagtgccacaagtgcggcaccggcctgatcaagagcgagggctgcaacagaatgagctgcagatgcggcgcccagatgtgctacctgtgcagagtgagcatcaacggctacgaccacttctgccagcaccccagaagccccggcgccccctgccaggagtgcagcagatgcagcctgtggaccgaccccaccgaggacgacgagaagctgatcgaggagatccagaaggaggccgaggaggagcagaagagaaagaacggcgagaacaccttcaagagaatcggcccccccctggagaagcccgtggagaaggtgcagagagtggaggccctgcccagacccgtgccccagaacctgccccagccccagatgcccccctacgccttcgcccacccccccttccccctgccccccgtgagacccgtgttcaacaacttccccctgaacatgggccccatccccgccccctacgtgccccccctgcccaacgtgagagtgaactacgacttcggccccatccacatgcccctggagcacaacctgcccatgcacttcggcccccagcccagacacagattctag

SEQ ID NO: 264923 - protein, 68 aa, Artificial Sequence
  derived and/or modified sequence
MDFVAGAIGGVCGVAVGYPLDTVKVRIQTEPLYTGIWHCVRDTYHRERVWGFYRGLSLPVCTVSLVSS

SEQ ID NO: 264924 - protein, 308 aa, Artificial Sequence
  derived and/or modified sequence
MDFVAGAIGGVCGVAVGYPLDTVKVRIQTEPKYTGIWHCVRDTYHRERVWGFYRGLSLPVCTVSLVSSVSFGTYRHCLAHICRLRYGNPDAKPTKADITLSGCASGLVRVFLTSPTEVAKVRLQTQTQAQKQQRRLSASGPLAVPPMCPVPPACPEPKYRGPLHCLATVAREEGLCGLYKGSSALVLRDGHSFATYFLSYAVLCEWLSPAGHSRPDVPGVLVAGGCAGVLAWAVATPMDVIKSRLQADGQGQRRYRGLLHCMVTSVREEGPRVLFKGLVLNCCRAFPVNMVVFVAYEAVLRLARGLLT

SEQ ID NO: 264925 - DNA, 927 bp, Artificial Sequence
  derived and/or modified sequence
atggacttcgtggccggcgccatcggcggcgtgtgcggcgtggccgtgggctaccccctggacaccgtgaaggtgagaatccagaccgagcccaagtacaccggcatctggcactgcgtgagagacacctaccacagagagagagtgtggggcttctacagaggcctgagcctgcccgtgtgcaccgtgagcctggtgagcagcgtgagcttcggcacctacagacactgcctggcccacatctgcagactgagatacggcaaccccgacgccaagcccaccaaggccgacatcaccctgagcggctgcgccagcggcctggtgagagtgttcctgaccagccccaccgaggtggccaaggtgagactgcagacccagacccaggcccagaagcagcagagaagactgagcgccagcggccccctggccgtgccccccatgtgccccgtgccccccgcctgccccgagcccaagtacagaggccccctgcactgcctggccaccgtggccagagaggagggcctgtgcggcctgtacaagggcagcagcgccctggtgctgagagacggccacagcttcgccacctacttcctgagctacgccgtgctgtgcgagtggctgagccccgccggccacagcagacccgacgtgcccggcgtgctggtggccggcggctgcgccggcgtgctggcctgggccgtggccacccccatggacgtgatcaagagcagactgcaggccgacggccagggccagagaagatacagaggcctgctgcactgcatggtgaccagcgtgagagaggagggccccagagtgctgttcaagggcctggtgctgaactgctgcagagccttccccgtgaacatggtggtgttcgtggcctacgaggccgtgctgagactggccagaggcctgctgacctag

SEQ ID NO: 264926 - DNA, 927 bp, Artificial Sequence
  derived and/or modified sequence
atggacttcgtcgcaggagctatcggaggcgtttgtggggtcgccgtcggttatcccctcgatacggttaaagtccgcattcaaaccgaacccaaatacactgggatctggcactgtgttcgggacacttaccacagagaacgggtgtggggtttctatcgcgggctcagcctcccagtgtgtacagtgagcctcgtgtcttcggtctctttcggcacctataggcactgtttagcccatatctgcaggctgaggtatggaaatcccgacgctaagccgacaaaggccgatataacactgagcggctgcgcttccgggttggtcagggtcttcttaacatcacctaccgaagttgctaaggtccgactccagacccagacccaggcccagaagcagcagcgtcggctctctgcatcagggcccttggccgttccccctatgtgtcctgtcccgcctgcctgccctgagcccaaatacagggggcctctccattgtctagcgaccgtcgcccgggaggaaggtctgtgcgggctatacaaaggcagttccgcgctggttttgagggacggtcactcctttgccacatactttctatcatacgccgttctctgcgagtggctatctcctgccggccattctaggccagatgtgccaggcgttctcgtagccggaggttgcgctggcgttctggcatgggcagttgccacgcccatggatgtgatcaaatcaagattacaggcggacggtcagggtcagcgccgctatcgcggtcttctccactgcatggtcacaagcgtgcgggaggaaggcccccgcgtgctttttaaaggtcttgtgctgaactgctgccgtgcttttccagtaaacatggtcgtgtttgtggcctatgaggccgttctgaggctggctcgaggtctgctcacctag

SEQ ID NO: 264927 - DNA, 927 bp, Artificial Sequence
  derived and/or modified sequence
atggactttgtggccggggccatcggcggcgtgtgtggggtggccgtgggctaccccctggacacagtgaaggtgcgcatccagacagagcccaagtacacaggcatctggcactgtgtgcgggacacctaccaccgggagcgggtgtggggcttctaccggggcctgagcctgcctgtgtgcaccgtgtccctggtgtcctctgtgtcctttggcacctaccgccactgcctggcccacatctgccgcctgcgctatggcaacccagatgccaagcccaccaaggctgacatcaccctgagcggctgtgccagcggcctggtgcgggtcttcctgaccagccccacagaggtggccaaggtgcggctgcagacccagacccaggcccagaagcagcagaggcggctgagcgccagcggccccctggccgtgccccccatgtgccctgtgcccccagcctgcccagagcccaagtaccggggccccctgcactgcctggccaccgtggcccgggaggagggcctgtgtggcctgtacaagggcagcagcgccctggtgctgagagatggccacagctttgccacctacttcctgtcctatgctgtgctgtgtgagtggctgagccctgctggccacagcaggccagatgtgcctggggtgctggtggccggcggctgtgccggcgtgctggcctgggccgtggccacccccatggatgtgatcaagagccggctgcaggctgatggccagggccagaggcgctaccggggcctgctgcactgcatggtgacctctgtgcgggaggagggcccccgggtgctcttcaagggcctggtgctgaactgctgccgggccttccctgtgaacatggtggtgtttgtggcctatgaggccgtgctgcggctggcccggggcctgctgacctag

SEQ ID NO: 264928 - DNA, 927 bp, Artificial Sequence
  derived and/or modified sequence
atggacttcgtggccggcgccatcggcggcgtgtgcggcgtggccgtcggataccctctggatactgtgaaagttagaattcagaccgagcccaaatatactggaatctggcactgcgtgcgtgatacctaccatagggaacgggtctggggattctatcgggggttgtcactaccagtctgtactgtctcgctcgttagctcagtgtcttttggcacttacagacattgtctcgctcacatctgcagactcaggtatggaaacccagacgctaagcccactaaggctgatattaccttgtcaggctgcgcatccggccttgtgcgcgtgtttctcacctcccctacggaggtggccaaagtccggctgcagactcaaactcaggcccagaagcagcaaagacgactgagcgcgagcggccctctggcggtgccccccatgtgccccgtgcctcctgcgtgcccagaacccaaatacaggggacccttgcactgtcttgcaacagtggctcgggaggaggggttgtgtgggctgtacaagggaagctcagccctcgttctgagagatgggcacagctttgcaacttacttcctgtcctacgcagtgctgtgcgagtggctgtccccagccgggcactcacgaccagatgttcccggtgtgctggtagctggaggttgcgccggagtgcttgcttgggccgtggctacccctatggatgtaattaaatcaagactgcaggcggacggccaaggtcagagacgttatagaggcttgcttcactgcatggtgacctccgtgagagaggaagggccccgagtactgttcaaagggctggtgctcaattgctgccgagctttccctgttaacatggttgtgttcgtcgcctatgaagccgtcttgcgtttagcgcgcggcctgctgacttag

SEQ ID NO: 264929 - DNA, 927 bp, Artificial Sequence
  derived and/or modified sequence
atggactttgtagccggagctatcggaggtgtatgcggtgtggctgtcggatatccgctggatacagttaaagtccgcatccagacagaacccaaatacacaggaatatggcactgtgtgcgtgacacatatcatagggagcgcgtttggggcttctacagaggactgtcgcttcccgtgtgcacagtgagcctggtctcgtccgtgtcttttgggacctatcgacactgtctcgctcacatttgtcggctgaggtacggaaatcccgacgccaaacctacaaaggccgacatcacgcttagcgggtgtgctagcggcctcgtccgcgtgttcctgaccagcccaacggaagtcgcaaaagtgagactgcagacccagacccaggcccagaaacagcagagaagactatccgcttccggaccactggctgtcccacctatgtgccctgtacctccagcatgtcccgagcccaagtacagaggccctctgcattgtttagccaccgtcgctcgtgaggagggactgtgcgggttgtataaaggctcatccgccctcgttctccgggatgggcactccttcgctacttattttctgtcttacgcggtgctgtgtgagtggctgtctcccgcaggccattctcgccctgacgtgcctggcgtgctggtcgctgggggttgtgcaggggtcctggcctgggcagtcgcaacaccaatggatgtgatcaaatctaggctacaggccgacggccagggacagagacgctataggggtctgctccattgtatggtgacgtccgtgcgcgaggagggaccaagggtactattcaagggcctcgtgttgaattgctgccgcgcattccccgttaatatggtggtatttgtagcttatgaggcggtacttcggctcgcccgaggcttgctgacttag

SEQ ID NO: 264930 - DNA, 1738 bp, Artificial Sequence
  derived and/or modified sequence
gagctgttgaggccaccctggtggcaccaaagccctctcaggcaggcagacccagggcctccccgccacaccttgttcatggattttgtcgctggagccatcggaggcgtctgcggtgttgctgtgggctaccccctggacacggtgaaggtcaggatccagacggagccaaagtacacaggcatctggcactgcgtccgggatacgtatcaccgagagcgcgtgtggggcttctaccggggcctctcgctgcccgtgtgcacggtgtccctggtatcttccgtgtcttttggcacctaccgccactgcctggcgcacatctgccggctccggtacggcaaccctgacgccaagcccaccaaggccgacatcacgctctcgggatgcgcctccggcctcgtccgcgtgttcctgacgtcgcccactgaggtggccaaagtccgcttgcagacgcagacacaggcgcagaagcagcagcggcggctttcggcctcggggccgttggctgtgccccccatgtgtcctgtgcccccagcctgcccagagcccaagtaccgcgggccactgcactgcctggccacggtagcccgtgaggaggggctgtgcggcctctacaagggcagctcggccctggtcttacgggacggccactcctttgccacctacttcctttcctacgcggtcctctgcgagtggctcagccccgctggccacagccggccagatgtcccgggcgtgctggtggccgggggctgtgcaggagtcctggcctgggctgtggccacccccatggacgtgatcaagtcgagactgcaggcagacgggcagggccagaggcgctaccggggtctcctgcactgtatggtgaccagcgttcgagaggagggaccccgggtccttttcaaggggctggtactcaattgctgccgcgccttccctgtcaacatggtggtcttcgtcgcctatgaggcagtgctgaggctcgcccggggtctgctcacatagccggtccccacgcccagcggcccacccaccagcagctgctggaggtcgtagtggctggaggaggcaaggggtagtgtggctgggttcgggaccccacagggccattgcccaggagaatgaggagcctccctgcagtgttgtcggccgaggcctgagctcgccctgcccagctactgacctcaggtcgaggggcccgccagccatcagccagggttggcctagggtggcaggagccagggaggagtgggcctctttgatgagagcgttgagttgcatggagtcggttgttcatcccagcctccccatggccctcgcctcccatgtctttgaagcacccctccagggagtcaggtgtgtgctcagccaccctctgccccattcctagaccctcacccccaccactgttcctgtgtcttcacgagctgtcccttacaggcaggggcttcccacaggctgggggcctcggggcggggagcatgagctgggctggcaccacgactgagggctcccggctcggcttcttccccacagcaggctgctcagagggggtgctgccgggactgccatgcccacctgagaggggcctggggtggccgtcctcggccggttagggaatttggggtgaggttcctcaggagccctcactctgcctgtggacgctgcacctgccacttaaagaccccaaagactctgttgggaactgttgtcaataaaatgtttctgaggatgttca

SEQ ID NO: 264931 - DNA, 204 bp, Artificial Sequence
  derived and/or modified sequence
atggattttgtcgctggagccatcggaggcgtctgcggtgttgctgtgggctaccccctggacacggtgaaggtcaggatccagacggagccaaagtacacaggcatctggcactgcgtccgggatacgtatcaccgagagcgcgtgtggggcttctaccggggcctctcgctgcccgtgtgcacggtgtccctggtatcttcc

SEQ ID NO: 264932 - protein, 71 aa, Artificial Sequence
  derived and/or modified sequence
MVNVLKGVLIECDPAMKQFLLYLDESNALGKKFIIQDIDDTHVFVIAELVNVLQERVGELMDQNAFSLTQK

SEQ ID NO: 264933 - DNA, 216 bp, Artificial Sequence
  derived and/or modified sequence
atggtgaatgtactcaaaggcgtcctgatcgagtgcgatcccgccatgaagcagtttttactgtatctggatgaatccaacgctctgggtaaaaaatttattatacaggatatagacgatacacatgtcttcgtgatagcagagttggtgaacgtgctgcaggagcgcgtcggggaactcatggaccaaaatgctttcagtcttacccagaagtag

SEQ ID NO: 264934 - DNA, 2125 bp, Artificial Sequence
  derived and/or modified sequence
actctgccggcaacgccgaggcgcttctgcatctgtgggccgagcattcttcaggtcatctgaaccttctgagaaaacatggtcaacgtcttgaaaggagtgcttatagaatgtgatcctgccatgaagcagtttctgctgtacttggatgagtccaatgccctggggaagaagttcatcattcaagacattgatgacactcacgtctttgtaatagcagaattggttaatgtcctccaggagcgagtgggtgaattaatggaccaaaatgctttttcccttacccagaaatgaaaatactcaatatggaccatttaggaattataagcagcaactgtgaaagacttgccactcaatatcttaggtgactgattagacatagagggttgttttaggagcatgccacgggaaagactgagggatcatgatcatttgttcagaaaaaaagcccctgaactgattttgttaccatagaatttaaaaaaaaaaaaagctttaacagttggctgtaatttggcttttattatcctttattaaaatacaaatgtcaatgcttttcctgcctttttaataccatgtcagtgtaacataggtatttattttgctcatccctgtgatctgtgcatttttgctgcgtggatgtgattgtttggtttcagttagaaacgtcatagatttgctgtttgaatatgccaaggtggggacttagacattatgtacgtctcacaaatcctacctgcataccagtcagctctattgaggaagacaatgtaaaactaatgtaaactacagtttgcatttccctgaaaacagaatattgtttttaagagggttagaaacaaccagtgggaaaggcacatgctgctttgtttagtttttccttgttcaaactttgttggtcacattttcccatctgtattcttttttattaagaaaacagcttagggaggctgaggtgggaggattgcttgagcccaggagtccgaggttgctacaaaaacaccattgcactctggcctggacaacagagagaccctgcctcaaaaaaaaaaaaaaaaaaaaaaaaaattctacttgtaccttattccctatgagaatacttatcaaacttatctaaaaaagaaaaataggaacagccatatgcaaagtcagcccaacaggaaaggacatattagattaaaatacattgcggcctgggcttagtggctcacacctgtaatcccagcactttgggaggctgaggcaggcagatcgcttgagtccaggagtcgaaaccctgtctctacaaaaaaaaaaatacaaaaatctgcctgttgtcccagccactggggaggctgaggtaggaggtcaaggctgcagtgaaccttgatcattgctactgccactccagcctaggtgacagagtgagaccctgtctccaaaaaaaaaagtgtatatgtatgtgtgtatatatagcaagagagagttctgtgatcaattgaaggcaaaaacagtaacactgagaggggctttgcttcccttcctgaagatcatgtcattggggtgggttcctgtaaagggaattttccaagagaaaagagaattttcatgacctgtagactcttacaaatccattttacctgcttccttatggtatgtttattcaaagcacctgtgtaccatatttattcacttacacagcattactgaatctggaaattttcagttaggtatattttacataattcccacccatataactcagtccatacagttcacagttttcattccctcatagcaatgcaaaaaattttgatgagttactactactaaaactagttaagtaaaagatgattcttaagaatttccaggctgggcacggtggctcacgcctgtaatcccagcactttgggaggctgaggcaggcagctcacgaggtcaggagatcgagaccatcctgctcggtgaaaccccatctctattaaaaatacaaaaaattagccgggcctggtggcgggtgcctgtagtcccatctactcaggaggctgaggcaggagaatggcgtgaacccgggaggcggagcttgcagtaagctgagattgtgccactgcactccagcctgggcgacagagggagactccatctc

SEQ ID NO: 264935 - DNA, 216 bp, Artificial Sequence
  derived and/or modified sequence
atggtgaatgtgctgaagggcgtgctgattgaatgtgaccctgccatgaagcagttcctgctgtacctggatgagagcaatgccctgggcaagaagttcatcatccaggacattgatgacacccacgtgtttgtgattgctgagctggtgaatgtgctgcaggagcgggtgggggagctgatggaccagaatgccttcagcctgacccagaagtag

SEQ ID NO: 264936 - DNA, 216 bp, Artificial Sequence
  derived and/or modified sequence
atggtgaacgtgctgaagggcgtgctgatcgagtgcgaccccgccatgaagcaattccttctttatttggacgagtctaacgccctgggcaaaaagtttatcattcaggatatagacgatacgcacgtgtttgtcatagctgaactggtgaacgtgctgcaagagcgcgttggcgaactgatggatcagaacgccttctccctcacacaaaagtag

SEQ ID NO: 264937 - DNA, 216 bp, Artificial Sequence
  derived and/or modified sequence
atggtcaatgttctgaagggagtgcttatagaatgtgacccggctatgaagcagttccttctgtacctcgatgagagcaacgctttaggcaaaaagttcatcattcaagatatcgatgacacgcacgtgtttgtcatcgcagagttggtaaacgtgctgcaagagcgcgttggcgagctgatggaccagaatgctttttccctgacgcagaagtag

SEQ ID NO: 264938 - DNA, 216 bp, Artificial Sequence
  derived and/or modified sequence
atggtgaacgtgctgaagggcgtgctgatcgagtgcgaccccgccatgaagcagttcctgctgtacctggacgagagcaacgccctgggcaagaagttcatcatccaggacatcgacgacacccacgtgttcgtgatcgccgagctggtgaacgtgctgcaggagagagtgggcgagctgatggaccagaacgccttcagcctgacccagaagtag

SEQ ID NO: 264939 - DNA, 339 bp, Artificial Sequence
  derived and/or modified sequence
atgtgcgccagcgtgaagtacaacatcagaggccccgccctgatccccagaatgaagaccaagcacagaatctactacatcaccctgttcagcatcgtgctgctgggcctgatcgccaccggcatgttccagttctggccccacagcatcgagagcagcaacgactggaacgtggagaagagaagcatcagagacgtgcccgtggtgagactgcccgccgacagccccatccccgagagaggcgacctgagctgcagaatgcacacctgcttcgacgtgtacagatgcggcttcaaccccaagaacaagatcaaggtgtacatctacgccctgaagtag

SEQ ID NO: 264940 - DNA, 150 bp, Artificial Sequence
  derived and/or modified sequence
atgtgcgccagcgtgaagtacaacatcagaggccccgccctgatccccagaatgaagaccaagcacagaatctactacatcaccctgttcagcatcgtgctgctgggcctgatcgccaccggcatgttccagttctggccccacagctag

SEQ ID NO: 264941 - DNA, 339 bp, Artificial Sequence
  derived and/or modified sequence
atgtgtgcttcagttaaatataatatccgaggaccggccttgatccctcggatgaaaaccaaacaccggatctactacataaccctcttctctattgtactccttggcctcatcgcaaccggcatgtttcagttctggccgcactctatcgaaagcagtaacgattggaatgtggaaaaaagaagcattagggacgtgcctgtcgtccggctgcctgccgactcccctatccccgagcggggagaccttagttgtcgtatgcacacttgtttcgacgtctatcgttgcgggtttaaccccaagaacaagatcaaggtctatatctacgccctgaaatag

SEQ ID NO: 264942 - DNA, 150 bp, Artificial Sequence
  derived and/or modified sequence
atgtgtgccagcgtgaagtacaatatccgcggccctgcattgattccccgtatgaaaactaagcataggatctactacattacgctgtttagcatagttctcctgggcttgatagcaacagggatgtttcagttttggccccactcttag

SEQ ID NO: 264943 - DNA, 339 bp, Artificial Sequence
  derived and/or modified sequence
atgtgtgcctctgtgaagtacaacatccggggccctgccctgatccccaggatgaagaccaagcaccgcatctactacatcaccctcttcagcatcgtgctgctgggcctcatcgccaccggcatgttccagttctggccccacagcattgagagcagcaatgactggaatgtggagaagaggagcatcagagatgtgcctgtggtgcggctgcctgctgacagccccatccctgagcggggggacctgagctgcaggatgcacacctgctttgatgtgtaccgctgtggcttcaaccccaagaacaagatcaaggtgtacatctatgccctgaagtag

SEQ ID NO: 264944 - DNA, 150 bp, Artificial Sequence
  derived and/or modified sequence
atgtgtgcctctgtgaagtacaacatccggggccctgccctgatccccaggatgaagaccaagcaccgcatctactacatcaccctcttcagcatcgtgctgctgggcctcatcgccaccggcatgttccagttctggccccacagctag

SEQ ID NO: 264945 - DNA, 339 bp, Artificial Sequence
  derived and/or modified sequence
atgtgcgccagcgtgaagtacaacatccggggccccgccctgatcccccgaatgaagactaagcatcggatttattacattactctcttctcgattgtactgctgggattaatcgcaaccggtatgttccagttctggccacacagcatcgagagttccaatgactggaacgtggaaaagcgctctatccgggacgtccctgtcgtgaggctgcccgccgacagccccatcccagagcggggcgatctgtcttgccgtatgcatacatgttttgacgtctacagatgcgggttcaaccctaagaataaaattaaggtgtatatctacgcattaaagtag

SEQ ID NO: 264946 - DNA, 150 bp, Artificial Sequence
  derived and/or modified sequence
atgtgcgccagcgtgaagtacaacatccggggccccgccctgatccctagaatgaagacaaaacacagaatctattacatcacattgttctctattgtgctcctaggtctgatcgctactggcatgttccagttttggccacactcttag

SEQ ID NO: 264947 - DNA, 339 bp, Artificial Sequence
  derived and/or modified sequence
atgtgtgcatcagtgaaatataatatccggggacccgctctgatccctcggatgaaaaccaagcataggatctattatatcactctgttttccatcgtcctgctgggactaattgcaacaggaatgtttcagttttggccccactctatagaatcgtctaatgattggaacgtggaaaaaaggagcatacgcgacgttcccgtggtcagactccctgctgacagtccgattcccgagcgtggggatttatcctgccggatgcacacctgttttgacgtctaccgctgtgggttcaacccaaagaacaaaatcaaagtctatatttatgctttgaaatag

SEQ ID NO: 264948 - DNA, 150 bp, Artificial Sequence
  derived and/or modified sequence
atgtgcgcatcggtgaagtacaacatccgcggtcctgcgttgataccaaggatgaagactaaacaccggatctattacatcacattattctctatcgtgttattagggctgatagccaccgggatgttccagttttggcctcatagttag

SEQ ID NO: 264949 - protein, 724 aa, Artificial Sequence
  derived and/or modified sequence
MSGGEVVCSGWLRKSPPEKKLKRYAWKRRWFVLRSGRLTGDPDVLEYYKNDHAKKPIRIIDLNLCQQVDAGLTFNKKEFENSYIFDINTIDRIFYLVADSEEEMNKWVRCICDICGFNPTEEDPVKPPGSSLQAPADLPLAINTAPPSTQADSSSATLPPPYQLINVPPHLETLGIQEDPQDYLLLINCQSKKPEPTRTHADSAKSTSSETDCNDNVPSHKNPASSQSKHGMNGFFQQQMIYDSPPSRAPSASVDSSLYNLPRSYSHDVLPKVSPSSTEADGELYVFNTPSGTSSVETQMRHVSISYDIPPTPGNTYQIPRTFPEGTLGQTSKLDTIPDIPPPRPPKPHPAHDRSPVETCSIPRTASDTDSSYCIPTAGMSPSRSNTISTVDLNKLRKDASSQDCYDIPRAFPSDRSSSLEGFHNHFKVKNVLTVGSVSSEELDENYVPMNPNSPPRQHSSSFTEPIQEANYVPMTPGTFDFSSFGMQVPPPAHMGFRSSPKTPPRRPVPVADCEPPPVDRNLKPDRKGQSPKILRLKPHGLERTDSQTIGDFATRRKVKPAPLEIKPLPEWEELQAPVRSPITRSFARDSSRFPMSPRPDSVHSTTSSSDSHDSEENYVPMNPNLSSEDPNLFGSNSLDGGSSPMIKPKGDKQVEYLDLDLDSGKSTPPRKQKSSGSGSSVADERVDYVVVDQQKTLALKSTREAWTDGRQSTESETPAKSVK

SEQ ID NO: 264950 - DNA, 2175 bp, Artificial Sequence
  derived and/or modified sequence
atgtcaggtggggaggttgtgtgttcagggtggctgcgtaaatcccctcctgaaaagaaactgaagaggtacgcttggaaaaggcgctggtttgtcctgaggagcggccggctcaccggcgatcctgatgtgctcgagtattataaaaacgaccatgctaagaagcctattcgcataattgacctcaacctgtgtcagcaagtggatgccggacttacattcaacaagaaagagttcgaaaactcttacatttttgacatcaataccattgaccgcatattttatttagttgctgatagcgaggaggaaatgaacaagtgggtgcgctgcatatgtgacatctgtggctttaacccgacggaggaagatccggtgaaaccgcccggatcatccttacaagctcccgccgatctgcccctggccattaatactgcacctcccagcactcaggctgacagctccagcgctaccttgccaccaccgtatcagctgattaatgtgcctccacatcttgagacactgggcattcaggaagatcctcaggattacctgctgctcatcaactgtcagagtaagaagccagagccaacaagaacccatgccgattctgcaaaaagcacgtcttccgagactgactgcaatgataatgttcccagccataagaatcctgcaagtagccagtccaaacacggtatgaacggtttctttcagcagcaaatgatttatgactccccacccagcagggcgccctccgcttccgtggacagctccctttacaatctgccacggtcatactcacatgatgttctgcccaaggtctcaccaagctccactgaagccgacggggagctgtatgtattcaacacgccctcaggcacatcatcagtcgaaactcagatgagacacgtttccatatcttacgatataccacctacacccgggaatacatatcagatacctcgtactttccccgagggtacgttaggccagacgagtaagctggatacgattcccgacatccctcccccacgtccgcctaagcctcaccccgctcacgatcgctcacccgtggagacatgttccattccacgtacagcaagcgacacagattcctcttattgtattccaaccgccggcatgtcaccatcgaggagtaacacaatttctacagtggacctgaacaagctccgtaaggacgcctcatcccaggattgctatgatatacccagggcattccccagcgaccgatctagctccttggaaggcttccacaaccacttcaaggtcaaaaatgttctcacagttggttctgtctcttcggaagaattggacgaaaattatgtcccaatgaatccaaactctccacccaggcagcactctagttcttttacagagccaatccaagaagcaaactatgtgcctatgacgcctggaaccttcgacttctcttctttcggaatgcaggtccccccccctgctcatatgggatttaggtcatcgcccaaaactcctcctcggcggcctgtgcctgtagctgattgcgaaccaccgccggtggatagaaacctgaagcccgatcgcaaagggcagtcccccaagatactgagattaaagcctcatgggttggagcggacagactcccaaaccattggagacttcgctacgcgtcgcaaggtgaaacccgctcctttagagataaagccgctgcctgagtgggaagaactgcaggcccctgtcaggtcccccatcacccggtcgtttgctagagacagttcccggttccccatgagtccacgtccagatagtgtgcattcaacaacctctagctcagattcccacgattctgaggagaattatgtgccaatgaatccaaacctcagtagtgaagaccccaatctgttcggctctaactccctagacggagggtccagccccatgatcaagccaaaaggggataaacaggtcgaatacctggacctggatctggattctgggaaatcgactccccctaggaaacaaaagagtagtggtagcggaagctctgtggccgacgagagagtcgattacgttgtcgtggaccagcagaagaccttggccctcaaatctacacgagaggcctggactgatggcagacaatctacggagtctgagacaccagcaaagtccgtgaagtag

SEQ ID NO: 264951 - DNA, 7981 bp, Artificial Sequence
  derived and/or modified sequence
gtgtgtgtgtgtgtgtgtgagcagcgctgtgtctgtttcggaaagcgctctggggaggtcttgtccctagggggcggagcgcaaaggacagaagctccggcaccgagtcggggcagagtcccgctgagtccgagcgctgctgaggcagctggcgagacggcacgtctggaggcgaggcgggcgcactgaaaggaggccggcgcgcccgcggccccggctcgcgttctgttcaggttcgtgggcctgcagaggagagactcgaactcgtggaacccgcgcaccgtggagtctgtccgcccagtccgtccggggtgcgcgaccaggagagctaggttctcgccactgcgcgctcggcaggcgtcggctgtgtcgggagcgcgcccgccgcccctcagctgcccggcccggagcccgagacgcgcgcaccatgagcggtggtgaagtggtctgctccggatggctccgcaagtcccccccggagaaaaagttgaagcgttatgcatggaagaggagatggttcgtgttacgcagtggccgtttaactggagatccagatgttttggaatattacaaaaatgatcatgccaagaagcctattcgtattattgatttaaatttatgtcaacaagtagatgctggattgacatttaacaaaaaagagtttgaaaacagctacatttttgatatcaacactattgaccggattttctacttggtagcagacagcgaggaggagatgaataagtgggttcgttgtatttgtgacatctgtgggtttaatccaacagaagaagatcctgtgaagccacctggcagctctttacaagcaccagctgatttacctttagctataaatacagcaccaccatccacccaggcagattcatcctctgctactctacctcctccatatcagctaatcaatgttccaccacacctggaaactcttggcattcaggaggatcctcaagactacctgttgctcatcaactgtcaaagcaagaagcccgaacccaccagaacgcatgctgattctgcaaaatccacctcttctgaaacagactgcaatgataacgtcccttctcataaaaatcctgcttcctcccagagcaaacatggaatgaatggcttttttcagcagcaaatgatatacgactctccaccttcacgtgccccatctgcttcagttgactccagcctttataacctgcccaggagttattcccatgatgttttaccaaaggtgtctccatcaagtactgaagcagatggagaactctatgtttttaataccccatctgggacatcgagtgtagagactcaaatgaggcatgtatctattagttatgacattcctccaacacctggtaatacttatcagattccacgaacatttccagaaggaaccttgggacagacatcaaagctagacactattccagatattcctccacctcggccaccgaaaccacatccagctcatgaccgatctcctgtggaaacgtgtagtatcccacgcaccgcctcagacactgacagtagttactgtatccctacagcagggatgtcgccttcacgtagtaataccatttccactgtggatttaaacaaattgcgaaaagatgctagttctcaagactgctatgatattccacgagcatttccaagtgatagatctagttcacttgaaggcttccataaccactttaaagtcaaaaatgtgttgacagtgggaagtgtttcaagtgaagaactggatgaaaattacgtcccaatgaatcccaattcaccaccacgacaacattccagcagttttacagaaccaattcaggaagcaaattatgtgccaatgactccaggaacatttgatttttcctcatttggaatgcaagttcctcctcctgctcatatgggcttcaggtccagcccaaaaacccctcccagaaggccagttcctgttgcagactgtgaaccaccccccgtggataggaacctcaagccagacagaaaaggtcaaagtcctaaaattttaagactcaaaccccatggtttagagcgaactgattcacaaaccataggtgactttgctacaagaagaaaggtcaagccagcgcctttagaaataaaacctttgccagaatgggaagaattacaagccccagttagatctcccatcactaggagttttgctcgagactcttccaggtttcccatgtccccccgaccagattcagtgcatagcacaacttcaagcagtgactcacacgacagtgaagagaattatgttcccatgaacccaaacctgtccagtgaagacccaaatctctttggcagtaacagtcttgatggaggaagcagccctatgatcaagcccaaaggagacaaacaggtggaatacttagatctcgacttagattctgggaaatccacaccaccacgtaagcaaaagagcagtggctcaggcagcagtgtagcagatgagagagtggattatgttgttgttgaccaacagaagaccttggctctaaagagtacccgggaagcctggacagatgggagacagtccacagaatcagaaacgccagcgaagagtgtgaaatgaaaatattgccttgccatttctgaacaaaagaaaactgaattgtaaagataaatcccttttgaagaatgacttgacacttccactctaggtagatcctcaaatgagtagagttgaagtcaaaggacctttctgacataatcaagcaatttagacttaagtggtgctttgtggtatctgaacaattcataacatgtaaataatgtgggaaaatagtattgtttagctcccagagaaacatttgttccacagttaacacactcgtagtattactgtatttatgcactttttcatctaaaacattgttctgggttttcccaatgtaccttaccataattcctttgggagttcttgttttttgtcacactactttatataacaatactaagtcaactaagctacttttagatttggaaattgctgtttacagtctaacaacattaaaatgagaggtagattcacaagttagctttctacctgaagcttcaggtgataaccattagcttatacttggactcatcatttgttgccttccaaaatgctgaggataatgtatgtactggtgtcaggacctagttctctggttaatgtacatttagtttttaatggtggaactttgttatattttgttaattacagtgtttttggttcattgagtgaagattctgccgggtgggatcttgcacctttgaaagactgaataattacactaccaagtaagcctgcaaatcattgatggcatgcagtgatgatgtgctcttacacttgttaacatgtattaagtgttatttgcaaaaggtagattatgtaaccaatcaggtacgtaccaggcagtgatgtgctaatacactgatcaggtttagacaatgagctttggttgtgttcttgttagtcctaatattggttttcagtttggaattaataaagcagttgacattcactgttagttacagcaacatactgtgatttttaattagatagtaattcagatttattactctatgaaattctgtcttttgacaccatagtgccctttctatgattttttttacttaatattcttcttggccttatatttaattccctatgcaattaatattttatatctgcatttttttaaaaaaaatagatgttatataagtgattctcgtatgtagcacctgttgcttttccactgaaagaattacggattttgtactgtgatttatattcactgccccaattcaagaaatattggagccttgctacaatgtgaaatgttatagtcatggactccttccaaccagatttctgaaaacaccagagggatggtataattctgtctcacctataacatggtcctgtgacatagatattaagaccacaagttgtagtgaggctacaattatattcgtctgtcttggctttgcaacataatttagaaagcacgtatagttgttttttaaccaagttacatacaatctcatgtactgatttgagacttataacaatttttggagggggcatagagaaaggagtgcccacagttgaggcatgaccccctccattcagacctctaactgttgcctgagtacacagatgtgccctgatttctggcccattggccatagtactgtgcctaatcaatgtaataggtttattttcccaatcctcaaactaaaaatgttcataacaagatgaattgtagactagtaacatttgatgcttttaaatatttgcttctttttaaacaaaaactaaaacccagaagtgaatttttaggtggatttttaaataaaaaagattgattgagtttggtgtgcaagctgttttataatgaaacaacaaaatgaaatctaaaatcctgaaatgtgcctaaactatcaaaacacacgatacagctaatgtgtaaagatgctaaattctgttacttggaggatgaatatatttaagatttaaaacacaataataaatacatgattaattcaaaaataaaaatctttacagctgcctatcaagggtctaaagcacttaatgaatgtttttagtctaacttatcattaactttttacaagtcaccatatttgaagatctgtagcactctgattttcagaaaatttttcattctgaataatttaaaaatggtgatgtattagaaaggcagtttgctttagaaaactaaatcacattgaacattgtattagagaattaaattaaaagtttcttacagagcagtattttccaaacatttttagcactagaatctttttagatgaaattttatgtataaccccaatacataaagcctgaaaactcaattttatcaatataaatgtattttgggttcacatttatgcttattcattttggctcattactaagcataataagattctgagttatttctgaataacacaaatgtggagttatacatagttgatgaaaccagcagccaatttatagctatgccctgttttatttgtatactatcaagaaaattttgattcacacaaatgtaagcaaaaataataggttttaaacatacatctcaggaaattctttaattagagatagctaaagttattcaaggtctatacaaaaataagttatcctggtagtggaagttaatacataagcagtctccagtgtggtaaagtagggtatgtaacacatcagaatgtgcgtttttattaggttttaaaatatgcacgtataaaaactaaatttgaatcaaacccttttaactcacctccaagaagctagactttggccaggaatgggctaaaaaccactggttaacgatgtgacagttatgatcttggagattggaaatctttcttccacattagagttctttaccttaattccttattctgaaaaattgtaagattttatgaaggtttgaatactgaagcacagttctgctttcaaaaattaaaattcaaacttgaaaaagctgtttaacccatggaagatatcatttagtaagatgtaaaagattttttaaatctacacttcagtttatacatctttatcattatcaatactatataagttactgtgagcattttagagaattccataaaggtactatgagtgtgtctgtatgtgtgtgtatatatagcattgtatttaatcatagactaaatttaatttgatatagaaatactactttacttgtacattaaggtcataatttctgctggactcttttatatttaattaatggggattatagtcttccttcataaatgcatttaaacctgaaattgaacaccagtgtttttctttttctacttatgggaagttgtctgcttccccctttagagaaaacagtatttttatattttgttaaaatattaactactttatgcctacacactatgctgtagatactgatcataattcttgggtgttcacaaacactcctagtgcctcttttttggcccgttgaaagtgttggtattactactttcactacagagcctttggccctctaataatgctgaggtgggctgatccttcccatttctgtcttcgggtcattctggtaggtcttctcctccactgtcaagtaagcaatcaggtccgtgacagggattggacatatgaacaaattaagtggatacacacagtgagaaagatacatgcattctatggtaacaactactgtcaataacatctgatgttacatgcacatttatatatatataattttaaaaactgaactatgagaagccatggtataaatgaatattgtggacatcatggacttgatatgatagaaatcaattgtcagcttgagaaagttgtttttaatctgtctaaatagttcatgcattactacagttaaaaatagtttcatttgtcttctatagacttaattttattccggttcagtataatctctgttaacagagtttcagcaaactgattggtcaaggtattaacatagcttctacttcctttacttaaaaagatgtggttttatgtaagttcttgattactgatgatcatcccaaattttgacaacaaaatcatatgtataaatttatttctcccctcttgttcatcatcttttgtaaaggtcccattgtagatcttttctgctaccaaataaaacttttcaaacaatttggtttcaagaccttaaatagacaagttggatactaagattgtgaactgataaggacatataaatttatatttccagcccttccttagagtctttatctgcatcaaaaacccaattctgccattaactgtgcttcccagtcccacctctatatgtcactcattttctgcaacaaagatctcactaaatcatgttgaaacacaagtcatgatcctctctaagtaaatagaaaaagctccctggaaaaactctgttgccacatgcacgtgccctgttactcctccagccagccagtgctgccagcattttattgtgtaaaagtccaaataaataagggcctgcatgcaacctttatcttcagaaactaggttttatatgtaaaatgtgacttgggaaatgattctgtttattaactggctgggatttttcatttctatgaaagtttcaaacatctccagtactttataaaatcccaacaattgctgtaagtcagcactttggtccactcagcccacccagcccacttgcaactctgactcttcactgaatcatatttgggaagtttgggtagggtgaggctatcttcttcaagattattttctcatatgtctgtctgtcaccttgtaaaccatgagactcctgggtatttgcatgtaacttctttgaggaagttaccaccatctctgatatagacacactttttgagttgcagtttctgttagaattttttggagactaacttgccaattctgtgaatgttattgaatatttaaaaagctgggtctgtaatgggaggcattttattagctgttgtgattgggtaacatgtccccttagatttcctgatttaaaattatacaaaattactatttttgataaaataaaggaacacctacagaaaattaagtttctaagatgtttctatacttcattagaaaagattttattactattacttatggttattggtgattaacacttaatgcgtctcctctgattttgtgttccatgaggtgcttggaacatttggagtgctctgtgcgagggacatacagtgatataggaaatttaaaaattaaaataatacccaaaacccactttatcagatatggtattgtgatggttaatattatgtgtcaacttggtgaggctatggcgcccatgtgtttggtcaaacactagcctagatgttgctgtgaatatattttgtagatgtgattaacatttacaatcagttgattttaagtaaagcagattctcatccataa

SEQ ID NO: 264952 - DNA, 2175 bp, Artificial Sequence
  derived and/or modified sequence
atgtctggaggagaggtggtgtgcagcggctggctgaggaagagccccccagagaagaagctgaagagatatgcctggaagaggcgctggtttgtgctgcggagcggccgcctgactggagaccctgatgtgctggagtactacaagaatgaccacgccaagaagcccatccgcatcatcgacctgaacctgtgccagcaggtggatgctggcctgaccttcaacaagaaggagtttgagaacagctacatctttgacatcaacaccatcgaccgcatcttctacctggtggccgacagcgaggaggagatgaacaagtgggtgcgctgcatctgtgacatctgtggcttcaaccccacagaggaggaccctgtgaagcccccaggcagcagcctgcaggccccagctgacctgcccctggccatcaacacagccccacccagcacccaggccgacagcagcagcgccaccctgcccccaccctaccagctgatcaacgtgcccccccacctggagaccctgggcatccaggaggacccccaggactacctgctgctgatcaactgccagagcaagaagccagagcccaccaggacccatgctgacagcgccaagagcaccagcagcgagacagactgcaatgacaacgtgcccagccacaagaacccagccagcagccagagcaagcacggcatgaatggcttcttccagcagcagatgatctatgacagcccccccagccgggcccccagcgcctctgtggacagcagcctgtacaacctgcccaggagctacagccatgatgtgctgcccaaggtgagccccagcagcacagaagcagatggagagctgtatgtgttcaacaccccatctggcaccagctctgtggagacccagatgagacatgtgtccatctcctatgacatcccccccaccccaggcaacacctaccagatccccaggaccttccctgagggcaccctgggccagaccagcaagctggacaccatcccagacatccccccacccaggcctcccaagccccacccagcccatgacaggagccctgtggagacctgcagcatccccaggacagccagtgacacagacagcagctactgcatccccacagctggcatgagccccagccgcagcaacaccatcagcacagtggacctgaacaagctgaggaaggatgccagcagccaggactgctatgacatcccccgggccttccccagcgacaggagcagcagcctggagggcttccacaaccacttcaaggtgaagaatgtgctgactgtgggctctgtgagcagcgaggagctggatgaaaattatgtgcccatgaaccccaacagccccccccggcagcacagcagcagcttcacagagcccatccaggaggccaactacgtgcccatgaccccaggcacctttgacttcagcagctttggcatgcaggtgcccccaccagcccacatgggcttccgcagcagccccaagaccccaccccggcggcctgtgcctgtggccgactgtgagcccccacctgtggacaggaacctgaagccagacaggaagggccagagccccaagatcctgcggctgaagccccacggcctggagaggacagacagccagaccatcggggactttgccaccaggaggaaggtgaagccagcccccctggagatcaagcccctgcctgagtgggaggagctgcaggcccctgtgcgcagccccatcaccaggagctttgcccgggacagcagccgcttccccatgagccccaggccagacagcgtgcacagcaccaccagcagcagtgacagccatgattctgaagaaaattatgtgcccatgaaccccaacctgagcagcgaggaccccaacctgtttggcagcaacagcctggatggcggcagcagccccatgatcaagcccaagggggacaagcaggtggagtacctggacctggacctggacagcggcaagagcaccccacccaggaagcagaagagcagcggcagcggcagctctgtggctgatgagcgggtggactatgtggtggtggaccagcagaagaccctggccctgaagagcacccgggaggcctggacagatggccggcagagcacagagagcgagaccccagccaagtctgtgaagtag

SEQ ID NO: 264953 - DNA, 2175 bp, Artificial Sequence
  derived and/or modified sequence
atgagcggcggcgaggtggtgtgcagcggctggctgcggaagagccctcctgagaaaaaactgaaacgatacgcctggaagagacggtggtttgtgttgcgatccggcagattgaccggcgatcctgacgtgctggagtactataaaaacgaccatgcaaagaagcctatacgaataatcgacctgaacctctgtcaacaggtcgacgcgggactgactttcaataagaaggagtttgaaaatagttacatcttcgacattaacacaatcgaccggatcttttatctcgtggccgacagtgaggaggagatgaacaagtgggttaggtgtatctgcgatatatgcgggtttaaccccacagaggaagaccccgtgaagccgccggggagtagcctgcaggcccccgccgacctgcctctcgcaattaatacggcgccgccgagtacacaggctgactcctcatccgctactctccccccgccgtatcaactgatcaacgtgcctcctcatctggaaactctgggaattcaggaggacccacaggattatctgctcttgatcaattgtcagtccaaaaaaccagagccaacacggacgcacgctgattcagccaaaagcacaagttccgaaacggactgcaacgacaacgtccccagtcataagaacccagcctcctctcagtctaaacatggaatgaacggatttttccagcagcaaatgatctacgatagcccaccaagcagggccccctcggcctctgtcgatagttctttgtacaacctcccacgctcctactcacatgacgtgttaccgaaagtttctccctccagcacagaggctgatggcgagctgtacgtgttcaacaccccctcaggtacaagctcggtggagacgcagatgcgccatgtgagtatctcttacgatatcccccctaccccgggtaatacttaccaaattccccgcacgttccccgaaggtacactgggtcagacgtcaaagctagacacaatccctgacattcctcctcctaggcctcccaagccacaccctgcacacgaccggtctcctgtagagacatgtagcatcccaaggacagctagcgacaccgacagcagctactgtattcccaccgccggaatgtcgcctagtagatcaaacactatttccacagtcgacctcaataagcttcgaaaagacgctagtagccaggactgctatgatatcccacgagctttccccagtgaccgcagctcgtcactggagggcttccataaccacttcaaagttaaaaatgtgcttacagtaggaagtgtgtctagtgaggaactggatgaaaactacgttcctatgaacccaaacagtcctccccggcaacactcgtcatctttcacggagcccatccaggaggcaaactatgtccctatgactcccgggacattcgacttcagctcattcggcatgcaagtgcctccccctgcccacatgggcttcaggagcagtccaaagactcctcctaggcgccctgtgcccgtggcggactgcgaaccccctcccgtggaccgaaacctgaagcctgacaggaaaggccagtcccccaaaattctgcggttgaagcctcacgggctcgagaggactgactctcagaccataggagatttcgctaccaggagaaaagttaagcccgccccactggagattaagcccttgcctgaatgggaggagctgcaggctcctgtaaggtcaccaattacacgcagcttcgcacgagactcctcaagatttcccatgtcccctagaccagatagtgtgcacagcactacttcaagtagcgactctcacgattcggaagaaaattacgtgcctatgaatcctaatctctcttcggaagaccccaacctgttcggaagtaattctcttgatgggggaagcagccctatgatcaaacctaagggcgacaagcaggttgagtatctcgatctggatcttgactccgggaagtccactccgcctcgtaagcagaaatcaagcggatccggatcctccgtggccgacgagcgtgtggattatgtggtggtagatcagcaaaagacactggcactaaagagtactcgcgaagcatggacggacgggaggcagtccacagaatccgagacccccgccaaatccgtgaagtag

SEQ ID NO: 264954 - DNA, 2175 bp, Artificial Sequence
  derived and/or modified sequence
atgagcggcggagaggtcgtttgttcaggctggcttcggaaaagccctcctgagaaaaagctgaaaagatacgcctggaaacgaagatggttcgtgctcaggtcaggccgactgacaggcgacccagacgttcttgagtactacaagaatgatcatgccaagaaacccatcaggatcattgatctcaacttgtgtcagcaagttgacgctggtcttacctttaacaaaaaagagtttgagaactcctacatatttgatatcaatactatcgatcggatattttatttggtggcagattccgaggaggagatgaacaagtgggtgcgctgcatttgtgatatttgtgggttcaatcccacggaagaagacccagtaaaaccacccggaagttctctccaggcgccagcagatctgccacttgccatcaacactgctcccccttccactcaggccgatagctcctctgctactcttcctcctccttaccaactgattaatgtgcctccacacttggaaacccttggaattcaggaggatccacaggattacctgctgcttatcaactgccagtcaaagaaacccgaaccaacccgcactcatgctgattctgcaaaatctacatctagcgagactgactgcaacgacaacgtcccctctcataagaatccagcgagcagccaaagcaaacacggaatgaatggcttttttcaacagcaaatgatctatgatagcccaccatcaagggcaccttccgcttctgtagactctagcctttacaacctgccccgaagttatagtcacgacgttctgccgaaggtgtcacctagttctaccgaagctgacggcgagctgtatgttttcaatacaccaagcgggacttcttccgtcgagacccagatgcgccatgtgtcgatctcatatgacattcctcctacgcccggaaacacttaccagatccctaggacatttcctgaggggacattgggacagacttccaaattggacacaatcccagacatcccgccacccaggccccctaagccccatcccgctcatgaccgctcacctgtggaaacatgctctattccccgaacggcgtctgatacagattcttcgtactgtatccccaccgcaggaatgagtccatctagatctaacaccatctctactgtggacctgaataaacttcgcaaagacgctagctcccaggattgctatgatatccctcgcgcattcccttccgaccggtcatcctccctggagggttttcataaccatttcaaagtgaaaaacgtccttacggttggcagtgtgtcaagcgaggagctcgatgagaactacgtcccaatgaaccccaacagcccccctcggcagcacagcagctcctttaccgaaccgattcaagaagctaattacgtgccaatgacccctgggacctttgatttctcctctttcggcatgcaagtgccaccacctgctcacatgggcttccggtcaagccctaagacccctccaaggagaccggttccagtggcagattgcgagccgcctcctgttgatagaaatttaaagcccgataggaaaggccagagccctaaaatcctgaggctcaaaccccacgggttggagagaaccgacagccagaccatcggagatttcgcaacgagacgcaaggtgaaacccgctccgcttgaaatcaagcctttgccagagtgggaggagctgcaagcgcctgtgagatcgccaatcaccaggtcattcgctcgggactcaagcagattcccgatgagcccgagaccggactccgtccactcgacaacctcctcttcagactcgcatgactctgaggaaaactacgtacccatgaacccgaacctctcttctgaggaccctaacctgtttggctctaactcattggacgggggatcctcccctatgattaagccaaaaggagacaagcaggtggagtatctggacttggatcttgactcaggcaaaagcacgcccccacgcaaacagaagtcaagcggctctggctccagcgtcgctgatgagcgagtggattatgtggtggtcgaccagcagaagacccttgctttaaaaagtaccagagaggcctggactgacggaaggcagtctaccgagtctgaaactcctgccaaatcagttaagtag

SEQ ID NO: 264955 - DNA, 2175 bp, Artificial Sequence
  derived and/or modified sequence
atgagcggcggcgaggtggtgtgcagcggctggctgagaaagagcccccccgagaagaagctgaagagatacgcctggaagagaagatggttcgtgctgagaagcggcagactgaccggcgaccccgacgtgctggagtactacaagaacgaccacgccaagaagcccatcagaatcatcgacctgaacctgtgccagcaggtggacgccggcctgaccttcaacaagaaggagttcgagaacagctacatcttcgacatcaacaccatcgacagaatcttctacctggtggccgacagcgaggaggagatgaacaagtgggtgagatgcatctgcgacatctgcggcttcaaccccaccgaggaggaccccgtgaagccccccggcagcagcctgcaggcccccgccgacctgcccctggccatcaacaccgccccccccagcacccaggccgacagcagcagcgccaccctgccccccccctaccagctgatcaacgtgcccccccacctggagaccctgggcatccaggaggacccccaggactacctgctgctgatcaactgccagagcaagaagcccgagcccaccagaacccacgccgacagcgccaagagcaccagcagcgagaccgactgcaacgacaacgtgcccagccacaagaaccccgccagcagccagagcaagcacggcatgaacggcttcttccagcagcagatgatctacgacagcccccccagcagagcccccagcgccagcgtggacagcagcctgtacaacctgcccagaagctacagccacgacgtgctgcccaaggtgagccccagcagcaccgaggccgacggcgagctgtacgtgttcaacacccccagcggcaccagcagcgtggagacccagatgagacacgtgagcatcagctacgacatcccccccacccccggcaacacctaccagatccccagaaccttccccgagggcaccctgggccagaccagcaagctggacaccatccccgacatccccccccccagaccccccaagccccaccccgcccacgacagaagccccgtggagacctgcagcatccccagaaccgccagcgacaccgacagcagctactgcatccccaccgccggcatgagccccagcagaagcaacaccatcagcaccgtggacctgaacaagctgagaaaggacgccagcagccaggactgctacgacatccccagagccttccccagcgacagaagcagcagcctggagggcttccacaaccacttcaaggtgaagaacgtgctgaccgtgggcagcgtgagcagcgaggagctggacgagaactacgtgcccatgaaccccaacagcccccccagacagcacagcagcagcttcaccgagcccatccaggaggccaactacgtgcccatgacccccggcaccttcgacttcagcagcttcggcatgcaggtgcccccccccgcccacatgggcttcagaagcagccccaagaccccccccagaagacccgtgcccgtggccgactgcgagcccccccccgtggacagaaacctgaagcccgacagaaagggccagagccccaagatcctgagactgaagccccacggcctggagagaaccgacagccagaccatcggcgacttcgccaccagaagaaaggtgaagcccgcccccctggagatcaagcccctgcccgagtgggaggagctgcaggcccccgtgagaagccccatcaccagaagcttcgccagagacagcagcagattccccatgagccccagacccgacagcgtgcacagcaccaccagcagcagcgacagccacgacagcgaggagaactacgtgcccatgaaccccaacctgagcagcgaggaccccaacctgttcggcagcaacagcctggacggcggcagcagccccatgatcaagcccaagggcgacaagcaggtggagtacctggacctggacctggacagcggcaagagcaccccccccagaaagcagaagagcagcggcagcggcagcagcgtggccgacgagagagtggactacgtggtggtggaccagcagaagaccctggccctgaagagcaccagagaggcctggaccgacggcagacagagcaccgagagcgagacccccgccaagagcgtgaagtag

SEQ ID NO: 264956 - protein, 113 aa, Artificial Sequence
  derived and/or modified sequence
MATLFYGLIDQTREFLHAAETPVPSVGEYLKKEIGQHVAGWTEDEETRKLKLAVLNSFFNLECCVSGTHRRTGLCCRDGGRPTASSVCGPRRCSSPGPGSSWAQPTLFHPCRG

SEQ ID NO: 264957 - protein, 325 aa, Artificial Sequence
  derived and/or modified sequence
MESTGSVGEAPGGPRVLVVGGGIAGLGAAQRLCGHSAFPHLRVLEATARAGGRIRSERCFGGVVEVGAHWIHGPSRGNPVFQLAAEYGLLGEKELSQENQLVETGGHVGLPSVSYASSGASVSLQLVAEMATLFYGLIDQTREFLHAAETPVPSVGEYLKKEIGQHVAGWTEDEETRKLKLAVLNSFFNLECCVSGTHSMDLVALAPFGEYTVLPGLDCTFSKGYQGLTNCMMAALPEDTVVFEKPVKTIHWNGSFQEAAFPGETFPVSVECEDGDRFPAHHVIVTVPLGLSTFSVGSLPDLSLSSWRLCRMKKYFCVSPKCSGE

SEQ ID NO: 264958 - DNA, 342 bp, Artificial Sequence
  derived and/or modified sequence
atggccaccctgttctacggcctgatcgaccagaccagagagttcctgcacgccgccgagacccccgtgcccagcgtgggcgagtacctgaagaaggagatcggccagcacgtggccggctggaccgaggacgaggagaccagaaagctgaagctggccgtgctgaacagcttcttcaacctggagtgctgcgtgagcggcacccacagaagaaccggcctgtgctgcagagacggcggcagacccaccgccagcagcgtgtgcggccccagaagatgcagcagccccggccccggcagcagctgggcccagcccaccctgttccacccctgcagaggctag

SEQ ID NO: 264959 - DNA, 210 bp, Artificial Sequence
  derived and/or modified sequence
atggagagcaccggcagcgtgggcgaggcccccggcggccccagagtgctggtggtgggcggcggcatcgccggcctgggcgccgcccagagactgtgcggccacagcgccttcccccacctgagagtgctggaggccaccgccagagccggcggcagaatcagaagcgagagatgcttcggcgccatcaaggacagccagaccgcctag

SEQ ID NO: 264960 - DNA, 978 bp, Artificial Sequence
  derived and/or modified sequence
atggagagcaccggcagcgtgggcgaggcccccggcggccccagagtgctggtggtgggcggcggcatcgccggcctgggcgccgcccagagactgtgcggccacagcgccttcccccacctgagagtgctggaggccaccgccagagccggcggcagaatcagaagcgagagatgcttcggcggcgtggtggaggtgggcgcccactggatccacggccccagcagaggcaaccccgtgttccagctggccgccgagtacggcctgctgggcgagaaggagctgagccaggagaaccagctggtggagaccggcggccacgtgggcctgcccagcgtgagctacgccagcagcggcgccagcgtgagcctgcagctggtggccgagatggccaccctgttctacggcctgatcgaccagaccagagagttcctgcacgccgccgagacccccgtgcccagcgtgggcgagtacctgaagaaggagatcggccagcacgtggccggctggaccgaggacgaggagaccagaaagctgaagctggccgtgctgaacagcttcttcaacctggagtgctgcgtgagcggcacccacagcatggacctggtggccctggcccccttcggcgagtacaccgtgctgcccggcctggactgcaccttcagcaagggctaccagggcctgaccaactgcatgatggccgccctgcccgaggacaccgtggtgttcgagaagcccgtgaagaccatccactggaacggcagcttccaggaggccgccttccccggcgagaccttccccgtgagcgtggagtgcgaggacggcgacagattccccgcccaccacgtgatcgtgaccgtgcccctgggcctgagcaccttcagcgtgggcagcctgcccgacctgagcctgagcagctggagactgtgcagaatgaagaagtacttctgcgtgagccccaagtgcagcggcgagtag

SEQ ID NO: 264961 - DNA, 342 bp, Artificial Sequence
  derived and/or modified sequence
atggccacgcttttctacgggctgattgaccagacccgggagttcctccacgcggcagaaacaccggtgcctagcgtgggagagtatctgaagaaagagataggccagcacgttgctggctggacggaggacgaggaaacacgcaaactgaaactggccgtgctgaactcattcttcaacttggagtgctgcgtctcgggaacacacaggagaaccggtctgtgctgcagagatggggggagaccgaccgcctcaagcgtctgtggccctagacgctgtagctctccgggacccgggtcttcttgggctcaacctaccctgttccacccttgcagggggtag

SEQ ID NO: 264962 - DNA, 210 bp, Artificial Sequence
  derived and/or modified sequence
atggagtctactggcagcgtcggcgaggctccgggaggtccccgtgtgctggtggtgggagggggaattgctggcctgggcgcggcccagagactctgcgggcactccgcattcccccatctgagggtgctcgaagcaacggccagggcaggggggcgaatcagatccgagcgctgcttcggcgccatcaaggactcgcagaccgcttag

SEQ ID NO: 264963 - DNA, 978 bp, Artificial Sequence
  derived and/or modified sequence
atggagagtaccggcagcgtgggggaggcaccgggggggccaagggtcctggtggtcggaggaggaatagctggcctgggcgcggcccaaaggctgtgcggacacagcgcattcccacatctgcgtgttcttgaggccaccgcacgggccggtggcaggatcaggtctgaaagatgttttggtggggtggtcgaggttggagcacactggatccatggcccatcacgcggaaaccccgtgtttcaactggccgccgagtatggtcttctgggagagaaggagctaagtcaggaaaaccagctcgtcgagaccggaggccatgtgggcctgcccagcgttagctacgccagttcaggggcctcagtgtcactgcagcttgtcgcggagatggcaactctcttctacggactgattgaccagacacgggagtttctgcacgcagccgaaactcccgtgccgtccgtgggcgagtacctgaagaaggagatagggcagcatgtggccggctggaccgaggacgaggagacaagaaaattgaagcttgctgtgctaaatagttttttcaatttagaatgctgcgtgagcggtacacatagcatggatctggtggcactggccccttttggcgagtacacagtgctgcccgggttggactgcacattcagcaaaggataccaaggcctaacaaactgcatgatggccgctttacccgaggacaccgtggtgttcgagaagcccgttaagactattcactggaatggctcttttcaggaggcagcattccccggagaaactttccctgtgtccgttgagtgtgaagatggtgaccgctttcctgcgcatcatgtgattgtgactgtcccccttggattatcaacattttccgtggggtcgcttcccgacctgagcctatcttcgtggcggctctgcagaatgaaaaaatacttctgtgtgtcaccaaaatgctctggcgaatag

SEQ ID NO: 264964 - DNA, 342 bp, Artificial Sequence
  derived and/or modified sequence
atggccaccctcttctacggcctgattgaccagacccgggagttcctgcacgccgctgagacccctgtgcccagcgtgggggagtacctgaagaaggagatcggccagcacgtggccggctggacagaagatgaggagaccaggaagctgaagctggccgtgctgaacagcttcttcaacctggagtgctgcgtgtctggcacccacagaagaacaggcctgtgctgcagagatggcggccggcccacagccagctctgtgtgtggcccccggcgctgcagcagccctggccctggcagctcctgggcccagcccaccctcttccacccctgccggggctag

SEQ ID NO: 264965 - DNA, 210 bp, Artificial Sequence
  derived and/or modified sequence
atggagagcacaggctctgtgggggaggcccctgggggcccccgggtgctggtggtgggcggcggcattgctggcctgggcgccgcccagaggctgtgtggccacagcgccttcccccacctgcgggtgctggaggccacagcccgggccggcggccgcatccgctctgagcgctgcttcggggccatcaaggacagccagacagcctag

SEQ ID NO: 264966 - DNA, 978 bp, Artificial Sequence
  derived and/or modified sequence
atggagagcacaggctctgtgggggaggcccctgggggcccccgggtgctggtggtgggcggcggcattgctggcctgggcgccgcccagaggctgtgtggccacagcgccttcccccacctgcgggtgctggaggccacagcccgggccggcggccgcatccgctctgagcgctgcttcggcggcgtggtggaggtgggcgcccactggatccacggccccagccggggcaaccctgtgttccagctggccgcagaatatggcctgctgggggagaaggagctgagccaggagaaccagctggtggagaccggcggccacgtgggcctgcccagcgtgtcctatgccagcagcggggcctctgtgtccctgcagctggtggccgagatggccaccctcttctacggcctgattgaccagacccgggagttcctgcatgctgctgagacccctgtgcccagcgtgggggagtacctgaagaaggagatcggccagcacgtggccggctggacagaagatgaggagaccaggaagctgaagctggccgtgctgaacagcttcttcaacctggagtgctgcgtgtctggcacccacagcatggacctggtggccctggccccctttggagagtacacagtgctgcccggcctggactgcaccttcagcaagggctaccagggcctgaccaactgcatgatggccgccctgcctgaggacacagtggtgtttgagaagcctgtgaagaccatccactggaatggcagcttccaggaggccgccttccctggagagaccttccctgtgtctgtggagtgtgaagatggagaccgcttccctgcccaccacgtgattgtgacagtgcccctgggcctgagcaccttctctgtgggcagcctgcctgacctgagcctgagctcctggaggctgtgcaggatgaagaagtacttctgtgtgagccccaagtgcagcggggagtag

SEQ ID NO: 264967 - DNA, 342 bp, Artificial Sequence
  derived and/or modified sequence
atggccaccctgttctacggcctgatcgaccagacccgggagttcctccatgcggctgagacgcccgtgccatccgtgggagaatatctcaagaaagagataggacaacatgtagcgggatggaccgaagatgaggaaacacggaaactcaagttagctgttctgaatagtttcttcaacctcgagtgttgcgtgtctggcacgcatagacgaacaggcttgtgctgtcgcgacggcggacgtcctacagccagctctgtgtgtggacctcgccggtgcagttcccccggccctgggtcttcctgggcccagccaacactgttccatccctgtagaggatag

SEQ ID NO: 264968 - DNA, 210 bp, Artificial Sequence
  derived and/or modified sequence
atggagagcaccggcagcgtgggcgaggcccccggcggcccccgggtcctggtcgtgggtggaggaattgcgggtctgggagcagcacagaggctttgtggccatagcgcattcccacatctgagagtgcttgaggccacagcgcgagccggtggcagaattaggagcgagcgctgctttggtgcaataaaagacagtcagaccgcctag

SEQ ID NO: 264969 - DNA, 978 bp, Artificial Sequence
  derived and/or modified sequence
atggagagcaccggcagcgtgggcgaggcccccggcggcccccgggtactggtagtgggcggggggatcgccggcctgggggctgcacagaggctttgcgggcactcagcttttccacatctgcgcgtcttagaggccactgctcgagccggtggaaggattcggagcgagaggtgtttcggcggcgtggtggaagtgggcgcccactggatccatgggccctcccgaggcaacccggtgttccaattagctgcagaatatgggttgctgggcgaaaaggagttgtcccaggagaatcagctcgtcgaaacaggaggccacgtgggcttaccttcagtctcatacgcttcttctggggcgagtgtttccctgcagttggtggccgaaatggccaccctcttttacggactgatcgaccaaaccagagagtttctgcacgccgccgaaactcccgtgccgtcagtgggtgagtatttgaagaaggagattggccagcatgtagccggctggaccgaggacgaagagacccggaagttgaaacttgccgtgcttaatagcttcttcaatctcgaatgttgcgtgtcaggcacacattccatggacctagtggccttggccccttttggcgagtataccgtgctgcccgggcttgattgtactttcagcaagggttaccaaggtctgacaaattgtatgatggccgccctgcctgaagatacggtggtattcgagaaaccagtgaaaactatacattggaacgggtcgttccaggaagcagccttcccaggagagacctttcccgtttctgttgaatgtgaggacggcgatcggtttcctgcccaccatgtgatcgttaccgtgccactcggcctatcgacgttttcagtgggttcattgccagatctgtctttgtcgtcatggcgtctatgccggatgaagaaatatttttgtgtttctcccaaatgtagtggggaatag

SEQ ID NO: 264970 - DNA, 483 bp, Artificial Sequence
  derived and/or modified sequence
ctggctgctgagtacgggctgctgggggagaaggagctgtcccaggagaaccagctggtggagaccgggggtcacgtgggcctgccctccgtgagctacgccagctccggggccagcgtgagcctccagctggtggcggagatggcgactctgttctacggcctgatagaccagacccgggagttcctgcacgctgcagagaccccggtgcccagcgtcggggagtacctcaagaaggagattggccagcacgtggccggctggacagaggatgaggagaccaggaagctgaagctggccgtcctgaactccttcttcaacctggaatgctgtgtgagcggcacccacagacgcacggggctctgctgtcgggatggagggaggccgaccgcctcctcagtctgtgggccccgcaggtgcagcagcccaggcccaggctctagctgggcccagcctactctgttccacccgtgtcgggggtag

SEQ ID NO: 264971 - DNA, 1324 bp, Artificial Sequence
  derived and/or modified sequence
cagaagccctcggactgcccggaccgcgcgatggagtcgaccggcagcgtcggggaggccccgggcggaccccgggtgctggtggtgggcggcggcatcgcggggctgggcgcggcgcagaggctctgcggccactccgccttcccgcacctgcgggtcctggaggccacggcccgcgccgggggccgcatccgctcggagcgctgcttcggtggcgtggtggaggtgggcgcgcactggatccatgggccctcccggggtaaccccgtcttccagctggctgctgagtacgggctgctgggggagaaggagctgtcccaggagaaccagctggtggagaccgggggtcacgtgggcctgccctccgtgagctacgccagctccggggccagcgtgagcctccagctggtggcggagatggcgactctgttctacggcctgatagaccagacccgggagttcctgcacgctgcagagaccccggtgcccagcgtcggggagtacctcaagaaggagattggccagcacgtggccggctggacagaggatgaggagaccaggaagctgaagctggccgtcctgaactccttcttcaacctggaatgctgtgtgagcggcacccacagcatggacctggtggccctggcaccctttggggagtataccgtgctgccggggctggactgcaccttttctaagggctatcaaggactcacaaactgcatgatggccgccctgccggaggacactgtagtttttgagaagcctgtgaagaccatccactggaacgggtccttccaggaggcagcctttcccggggagacctttccagtgtcggtagagtgtgaggatggagaccggttcccggcgcaccatgtcatcgtcaccgtgcccttaggtctgtccacgttctctgtgggttcattgccggacttgagtctgagttcatggagactctgtcggatgaagaagtacttctgtgtctcacccaagtgctccggagagtgacagctccagatcctgtttgcgggggaagccacacatcgcacgttttactccacgacgcacggggctctgctgtcgggatggagggaggccgaccgcctcctcagtctgtgggccccgcaggtgcagcagcccaggcccaggctctagctgggcccagcctactctgttccacccgtgtcgggggtaggctgggaccctcatttcttctgacagatttcagtctggcttgaaatttggggatgttaatgagggtcctctggtttttggtaaccagggccaccttctcagttcttgtgtctgttattggagtctggcc

SEQ ID NO: 264972 - DNA, 342 bp, Artificial Sequence
  derived and/or modified sequence
atggccactctcttctacggattgatcgaccagactagagaatttctccacgcggcagaaacacccgttcccagcgtcggcgagtacctcaagaaagagattggtcagcacgtggcgggatggactgaggatgaggagactaggaagctgaagctcgctgtactcaattcttttttcaacctagaatgctgcgtgtcaggtacgcatagacgcaccggactctgctgtagagacggcggtcgacccacagcgagcagcgtgtgcgggccacgccgatgtagctccccaggccctggatctagctgggctcagccaaccctgtttcacccctgcagaggctag

SEQ ID NO: 264973 - DNA, 210 bp, Artificial Sequence
  derived and/or modified sequence
atggagagcactggaagcgttggagaagcccctgggggtccacgagttctggtggtggggggagggattgctggtttgggcgcagctcagaggctgtgtgggcactccgctttccctcacctcagagtactggaggccaccgctcgcgctggaggacgtataagaagcgagcggtgttttggcgcaattaaagatagccagaccgcgtag

SEQ ID NO: 264974 - DNA, 978 bp, Artificial Sequence
  derived and/or modified sequence
atggagtccaccggctccgtgggggaagctccgggtggaccgcgtgtgctggtggtcgggggtggcattgctggtctaggggctgcccagcggctgtgcggccacagtgcattcccgcatctgagagttctagaagctactgcgagagctgggggtaggatcaggtccgaaaggtgctttggcggagttgttgaggtcggcgcacactggattcacggcccttcccggggtaacccagtctttcagctcgccgctgagtatggcctgctgggagagaaagagttgagccaagagaaccagctggttgagacgggagggcatgtcggtctacccagtgtgtcgtatgcatctagcggcgcatccgtgtccctgcagctggtggctgagatggcaaccctgttctacggcctcatagaccagaccagagagttcctgcacgccgctgaaacacccgtgccctctgtgggggagtacctgaagaaagaaatcggacagcacgtcgccggatggaccgaggacgaggagacgcggaaattgaagcttgctgtcctgaatagttttttcaacttggagtgctgtgtctcaggaacacatagcatggacctcgtagccctggctccatttggcgagtatacggttctgcctggactcgactgtacgtttagcaaaggatatcaagggctcacgaattgtatgatggcagccctccctgaggacaccgtggtttttgaaaagccagtgaaaaccatccactggaatggatcattccaagaggcagcattcccaggtgagacttttcctgtcagcgtagaatgtgaagatggggacagatttcctgctcaccatgtgattgtgactgtgcctctcggacttagcacatttagcgtggggtccttgccagacttatccctgtcctcctggcggctctgccgcatgaagaaatatttctgtgtctctcccaaatgtagtggtgagtag

SEQ ID NO: 264975 - protein, 486 aa, Artificial Sequence
  derived and/or modified sequence
MESTGSVGEAPGGPRVLVVGGGIAGLGAAQRLCGHSAFPHLRVLEATARAGGRIRSERCFGGVVEVGAHWIHGPSRGNPVFQLAAEYGLLGEKELSQENQLVETGGHVGLPSVSYASSGASVSLQLVAEMATLFYGLIDQTREFLHAAETPVPSVGEYLKKEIGQHVAGWTEDEETRKLKLAVLNSFFNLECCVSGTHSMDLVALAPFGEYTVLPGLDCTFSKGYQGLTNCMMAALPEDTVVFEKPVKTIHWNGSFQEAAFPGETFPVSVECEDGDRFPAHHVIVTVPLGFLREHLDTFFDPPLPAEKAEAIRKIGFGTNNKIFLEFEEPFWEPDCQLIQLVWEDTSPLEDAAPELQDAWFRKLIGFVVLPAFASVHVLCGFIAGLESEFMETLSDEEVLLCLTQVLRRVTAPDPVCGGSHTSHVLLHDARGSAVGMEGGRPPPQSVGPAGAAAQAQALAGPSLLCSTRVGGRLGPSFLLTDFSLA

SEQ ID NO: 264976 - DNA, 1461 bp, Artificial Sequence
  derived and/or modified sequence
atggagagcaccggcagcgtgggcgaggcccccggcggccccagagtgctggtggtgggcggcggcatcgccggcctgggcgccgcccagagactgtgcggccacagcgccttcccccacctgagagtgctggaggccaccgccagagccggcggcagaatcagaagcgagagatgcttcggcggcgtggtggaggtgggcgcccactggatccacggccccagcagaggcaaccccgtgttccagctggccgccgagtacggcctgctgggcgagaaggagctgagccaggagaaccagctggtggagaccggcggccacgtgggcctgcccagcgtgagctacgccagcagcggcgccagcgtgagcctgcagctggtggccgagatggccaccctgttctacggcctgatcgaccagaccagagagttcctgcacgccgccgagacccccgtgcccagcgtgggcgagtacctgaagaaggagatcggccagcacgtggccggctggaccgaggacgaggagaccagaaagctgaagctggccgtgctgaacagcttcttcaacctggagtgctgcgtgagcggcacccacagcatggacctggtggccctggcccccttcggcgagtacaccgtgctgcccggcctggactgcaccttcagcaagggctaccagggcctgaccaactgcatgatggccgccctgcccgaggacaccgtggtgttcgagaagcccgtgaagaccatccactggaacggcagcttccaggaggccgccttccccggcgagaccttccccgtgagcgtggagtgcgaggacggcgacagattccccgcccaccacgtgatcgtgaccgtgcccctgggcttcctgagagagcacctggacaccttcttcgacccccccctgcccgccgagaaggccgaggccatcagaaagatcggcttcggcaccaacaacaagatcttcctggagttcgaggagcccttctgggagcccgactgccagctgatccagctggtgtgggaggacaccagccccctggaggacgccgcccccgagctgcaggacgcctggttcagaaagctgatcggcttcgtggtgctgcccgccttcgccagcgtgcacgtgctgtgcggcttcatcgccggcctggagagcgagttcatggagaccctgagcgacgaggaggtgctgctgtgcctgacccaggtgctgagaagagtgaccgcccccgaccccgtgtgcggcggcagccacaccagccacgtgctgctgcacgacgccagaggcagcgccgtgggcatggagggcggcagaccccccccccagagcgtgggccccgccggcgccgccgcccaggcccaggccctggccggccccagcctgctgtgcagcaccagagtgggcggcagactgggccccagcttcctgctgaccgacttcagcctggcctag

SEQ ID NO: 264977 - DNA, 1461 bp, Artificial Sequence
  derived and/or modified sequence
atggaatcaacaggaagcgtgggggaggccccgggagggcccagagtactggtggtggggggggggatcgccggtttaggggccgcacaaaggctttgcggccacagcgccttccctcatctacgcgttctagaggctactgcccgcgccggcgggcggatccgctctgaacggtgcttcggcggtgtggtggaggtcggcgcacactggatccatggcccctctagggggaatcctgtattccagttggctgcagagtacggattgctcggagagaaggagctgagtcaggagaatcagctggtggagacgggaggtcacgtgggtctcccctcagtgtcctacgccagtagcggagcatcggtctcactgcaacttgttgctgagatggcgaccctgttctacgggcttattgatcagacaagagagtttcttcacgccgccgagacacctgtgccttcagtgggcgagtatctcaagaaagaaattgggcagcacgtagccggatggacggaggatgaagagactcggaagttgaaactggccgttctcaactctttctttaacctggaatgttgcgtgagcggtactcactccatggaccttgtcgcacttgctccattcggtgagtacactgtcctcccaggccttgactgtactttttctaagggatatcaaggcctaaccaattgtatgatggccgctctgccagaagataccgtggtgtttgagaagcccgtgaagacaatccactggaatgggtccttccaggaagcagcctttcctggggaaaccttcccagtgtcagtggaatgtgaggacggcgaccgctttcctgctcatcacgttattgttactgtgcctcttggatttctgcgagaacatctcgacacattctttgatcctccactgcccgccgagaaggcggaagccattaggaaaattggctttggtactaataacaagatttttctcgaatttgaggaacccttctgggagcccgattgccagctaatccagttggtctgggaggatacatccccattggaggacgctgcaccagaactgcaggatgcctggtttcgcaagctgatagggttcgttgtgctgcccgcatttgcgtctgtgcacgtcctctgtgggttcatagccggactcgagagcgagttcatggaaactctgagcgacgaggaggtcctcctttgcctgacccaagtgctgaggagggtgaccgcaccagacccagtttgcgggggaagccacacctctcacgtccttttacatgacgcgcgaggtagtgcagtgggcatggagggaggccgccctcccccccagagcgtcggaccagcgggtgcagctgctcaggctcaggcactggccggccccagcctgttatgcagtaccagagtaggaggcaggctagggccctccttcctgctgacggatttttccttggcatag

SEQ ID NO: 264978 - DNA, 1461 bp, Artificial Sequence
  derived and/or modified sequence
atggagagcacaggctctgtgggggaggcccctgggggcccccgggtgctggtggtgggcggcggcattgctggcctgggcgccgcccagaggctgtgtggccacagcgccttcccccacctgcgggtgctggaggccacagcccgggccggcggccgcatccgctctgagcgctgcttcggcggcgtggtggaggtgggcgcccactggatccacggccccagccggggcaaccctgtgttccagctggccgcagaatatggcctgctgggggagaaggagctgagccaggagaaccagctggtggagaccggcggccacgtgggcctgcccagcgtgtcctatgccagcagcggggcctctgtgtccctgcagctggtggccgagatggccaccctcttctacggcctgattgaccagacccgggagttcctgcatgctgctgagacccctgtgcccagcgtgggggagtacctgaagaaggagatcggccagcacgtggccggctggacagaagatgaggagaccaggaagctgaagctggccgtgctgaacagcttcttcaacctggagtgctgcgtgtctggcacccacagcatggacctggtggccctggccccctttggagagtacacagtgctgcccggcctggactgcaccttcagcaagggctaccagggcctgaccaactgcatgatggccgccctgcctgaggacacagtggtgtttgagaagcctgtgaagaccatccactggaatggcagcttccaggaggccgccttccctggagagaccttccctgtgtctgtggagtgtgaagatggagaccgcttccctgcccaccacgtgattgtgacagtgcccctgggcttcctgcgggagcacctggacaccttctttgacccccccctgcctgctgagaaggccgaggccatcaggaagattggatttggcaccaacaacaagatcttcctggagtttgaggagcccttctgggagccagactgccagctgatccagctggtgtgggaggacaccagccccctggaggatgctgcccctgagctgcaggatgcctggttcaggaagctgattggatttgtggtgctgcctgcctttgcctctgtgcacgtgctgtgtggcttcatcgccggcctggagagcgagttcatggagaccctgagtgatgaggaggtgctgctgtgcctgacccaggtgctgcggcgggtgacagccccagaccctgtgtgtggcggcagccacaccagccacgtgctgctgcatgatgcccggggcagcgctgtgggcatggagggcggccggcccccaccccagagcgtgggccctgctggagctgctgcccaggcccaggccctggccggccccagcctgctgtgcagcaccagggtgggcggccgcctgggccccagcttcctgctgacagacttcagcctggcctag

SEQ ID NO: 264979 - DNA, 1461 bp, Artificial Sequence
  derived and/or modified sequence
atggagagcaccggcagcgtgggcgaggcccccggcggcccccgggtgctcgtagtcgggggcgggattgcaggactgggcgccgcccagcgactctgtggccattctgccttcccccatttgcgagttctggaagctactgccagagctgggggccggattagatctgaacgttgctttggcggcgttgttgaggttggagcacactggattcacggcccctctcgcgggaaccctgtattccagctcgccgcagaatatgggctcctcggagagaaagaactatctcaggagaaccagctggtcgaaacgggcggccacgtaggacttcccagtgtgagctacgcatctagcggagccagcgtcagccttcagttagtggccgaaatggcaacactgttctacgggctcatagatcagacacgtgaattccttcatgctgcagagaccccggttcctagtgttggcgaatacctgaaaaaggaaatcggacagcatgttgcgggatggacggaggacgaagagacccggaagctcaagctggcagttctgaactcctttttcaatttggaatgctgcgtgagcggcactcactcaatggatttagtcgcactcgctccatttggggagtacactgttctacccgggctggattgcaccttctcaaagggctatcagggactgaccaactgtatgatggctgcgctgcctgaggatactgtggtgttcgaaaaaccagtcaaaaccatccactggaacgggtccttccaggaggccgcgttccccggcgagacattccctgtgtccgtagagtgtgaagatggggatcgcttccctgctcaccatgtaatcgtaacagttcctcttggctttctcagggagcatctggataccttcttcgatccccccctacctgccgaaaaggctgaagccattcggaagataggctttggcaccaacaacaaaatctttttggagtttgaggagcctttctgggagccagactgtcagctgattcagctcgtctgggaagacaccagccccctcgaggatgccgccccagaactgcaggatgcctggttccggaagctgatcggatttgtggtgttgccagccttcgcaagtgttcacgttctgtgcgggtttattgctggactggaatctgaatttatggaaacccttagcgacgaagaggtactgctttgtcttacgcaggtactccggcgggtcactgcccccgacccagtgtgcggggggagccataccagccacgttcttctgcatgatgcaaggggatcagctgtgggaatggagggaggccgcccccccccacagagtgtcggaccggccggggccgcggctcaagcacaggctctagctggcccctcactcctgtgctccacacgcgtcggcggacgcttgggaccatcctttctcttgaccgatttcagcctcgcatag

SEQ ID NO: 264980 - DNA, 1633 bp, Artificial Sequence
  derived and/or modified sequence
cgagagctccagacctcccggctactcagaagccctcggactgcccggaccgcgcgatggagtcgaccggcagcgtcggggaggccccgggcggaccccgggtgctggtggtgggcggcggcatcgcggggctgggcgcggcgcagaggctctgcggccactccgccttcccgcacctgcgggtcctggaggccacggcccgcgccgggggccgcatccgctcggagcgctgcttcggtggcgtggtggaggtgggcgcgcactggatccatgggccctcccggggtaaccccgtcttccagctggctgctgagtacgggctgctgggggagaaggagctgtcccaggagaaccagctggtggagaccgggggtcacgtgggcctgccctccgtgagctacgccagctccggggccagcgtgagcctccagctggtggcggagatggcgactctgttctacggcctgatagaccagacccgggagttcctgcacgctgcagagaccccggtgcccagcgtcggggagtacctcaagaaggagattggccagcacgtggccggctggacagaggatgaggagaccaggaagctgaagctggccgtcctgaactccttcttcaacctggaatgctgtgtgagcggcacccacagcatggacctggtggccctggcaccctttggggagtataccgtgctgccggggctggactgcaccttttctaagggctatcaaggactcacaaactgcatgatggccgccctgccggaggacactgtagtttttgagaagcctgtgaagaccatccactggaacgggtccttccaggaggcagcctttcccggggagacctttccagtgtcggtagagtgtgaggatggagaccggttcccggcgcaccatgtcatcgtcaccgtgcccttaggttttcttagggaacatttggacaccttctttgaccctcccctgccggctgagaaggcagaagcaatcaggaagataggctttgggaccaacaacaaaatcttcctggagtttgaggagcccttctgggagccagactgccagctgatccagctggtgtgggaggacacgtcgcccctggaggatgctgcccctgagctacaggacgcctggttccggaagctcattggctttgtggtcctgcctgcctttgcgtctgtccacgttctctgtgggttcattgccggacttgagtctgagttcatggagactctgtcggatgaagaagtacttctgtgtctcacccaagtgctccggagagtgacagctccagatcctgtttgcgggggaagccacacatcgcacgttttactccacgacgcacggggctctgctgtcgggatggagggaggccgaccgcctcctcagtctgtgggccccgcaggtgcagcagcccaggcccaggctctagctgggcccagcctactctgttccacccgtgtcgggggtaggctgggaccctcatttcttctgacagatttcagtctggcttgaaatttggggatgttaatgagggtcctctggtttttggtaaccagggccaccttctcagttcttgtgtctgttattggagtctggccagggttgacttgagctgagacaccagatgc

SEQ ID NO: 264981 - DNA, 1461 bp, Artificial Sequence
  derived and/or modified sequence
atggaaagcaccggaagtgtgggagaggcaccgggaggacccagagtgctcgtcgtgggaggtggcattgcaggcttgggggcagctcagcgtttgtgtggccatagcgcttttccccatttaagggttctagaagccaccgctagagccggagggaggatccgctcagaacgatgttttggcggtgtagtcgaggttggcgcacactggatccatggtcctagtcggggaaaccctgtatttcagttagcagcagagtacggcctgctcggtgagaaggaactgagccaggagaaccagctggtggagacaggaggacatgtgggccttcccagcgtttcctacgcaagctcgggcgcttctgtcagtctccagttggtggcggagatggccacgctgttctatggcctgatcgaccagacacgcgagttcctgcacgcagccgagacgccagtgcctagcgtgggcgagtatcttaagaaggagatcggtcagcatgtggccggttggaccgaagatgaggaaacacggaaactcaagttggccgtgcttaactccttttttaatttggagtgttgcgtgtccggcactcatagcatggatttagtcgccctggcgccttttggggagtacacagtgttgccgggactggactgcactttttccaagggctatcagggcctgaccaactgcatgatggccgctctccctgaagacacagtggtgttcgaaaagcctgttaaaactattcattggaatggttcctttcaggaggcagccttcccaggagagacttttccggtgagcgtggagtgcgaggatggggatcgttttcccgctcaccatgtgatagtgactgtcccactcgggtttctacgcgagcacctggacaccttctttgatccacccctgccagccgagaaagcagaagcaatccgtaagataggattcgggacaaacaataaaatctttttggagttcgaggagccattctgggagccagactgccagttgattcaacttgtgtgggaggacaccagcccactggaggatgcagcgccagaactgcaggacgcctggtttaggaaacttatcggcttcgttgttctgcctgctttcgccagcgttcatgtcttgtgcggatttatcgccggactggagtcggaattcatggagactctctcggacgaagaagtgcttctctgtttaactcaggttctgcgaagggtcacagcgcctgaccctgtgtgcgggggatctcatacttcacacgtgttactccacgatgccagaggctccgccgtgggcatggaagggggacgccctccccctcagtctgttgggcctgcaggtgctgccgcacaggcccaagctttggcagggccttctctgctctgtagcacgcgggtgggcggacgacttgggcctagctttctgttgaccgacttctcactcgcatag

SEQ ID NO: 264982 - protein, 174 aa, Artificial Sequence
  derived and/or modified sequence
VVLLYASTYVLVSLSIDRYHAIVYPMKVLIVIAWSLSFLFSIPTLIIFGKRTLSNGEVQCWALWPDDSYWTPYMTIVAFLGSLITFICCWSPYFLFDILDNFNLLPDTQERFYASVIIQNLPALNSAINPLIYCVFSSSISFPCREQRSQDSRMTFRERTERHEMQILSKPEFI

SEQ ID NO: 264983 - protein, 371 aa, Artificial Sequence
  derived and/or modified sequence
MPANFTEGSFDSSGTGQTLDSSPVACTETVTFTEVVEGKEWGSFYYSFKTEQLITLWVLFVFTIVGNSVVLFSTWRRKKKSRMTFFVTQLAITDSFTGLVNILTDINWRFTGDFTAPDLVCRVVRYLQVVLLYASTYVLVSLSIDRYHAIVYPMKFLQGEKQARVLIVIAWSLSFLFSIPTLIIFGKRTLSNGEVQCWALWPDDSYWTPYMTIVAFLVYFIPLTIISIMYGIVIRTIWIKSKTYETVISNCSDGKLCSSYNRGLISKAKIKAIKYSIIIILAFICCWSPYFLFDILDNFNLLPDTQERFYASVIIQNLPALNSAINPLIYCVFSSSISFPCREQRSQDSRMTFRERTERHEMQILSKPEFI

SEQ ID NO: 264984 - protein, 143 aa, Artificial Sequence
  derived and/or modified sequence
MPANFTEGSFDSSGTGQTLDSSPVACTETVTFTEVVEGKEWGSFYYSFKTEQLITLWVLFVFTIVGNSVVLFSTWRRKKKSRMTFFVTQLAITDSFTGLVNILTDINWRFTGDFTAPDLVCRVVRYLQVMVMKLFHIQKMNME

SEQ ID NO: 264985 - protein, 94 aa, Artificial Sequence
  derived and/or modified sequence
MPANFTEGSFDSSGTGQTLDSSPVACTETVTFTEVVEGKEWGSFYYSFKTEQLITLWVLFVFTIVGNSVVLFSTWRRKKKSRMTFFVTQLAITV

SEQ ID NO: 264986 - DNA, 1116 bp, Artificial Sequence
  derived and/or modified sequence
atgcctgccaacttcacagaggggtccttcgacagctccggcactggacagaccctggatagctcacctgttgcttgcacagagactgtgactttcacggaggtggttgagggaaaggagtgggggtccttttactacagtttcaaaacagagcagctcatcacattatgggtcctctttgtttttaccattgtgggaaactcggtcgtcctcttcagcacatggaggaggaagaaaaaatccagaatgactttcttcgtgacacagctcgcaattacagacagttttacgggcctggtgaacatccttaccgatattaactggcgctttacgggagacttcacggcccctgacctggtttgcagagtggtcaggtacctccaggtggtcctcttatatgcctccacctacgtactggtcagcttgtctattgacagataccatgccatcgtctatcccatgaagtttctacagggggagaagcaggcgagagtgctcatagtgatcgcctggtctctgagcttcctgtttagtatcccaacacttatcatcttcggaaagcgcactctgtctaatggcgaggtgcagtgttgggcactgtggcctgacgactcgtattggaccccatatatgacaatcgtggcttttcttgtttattttatccccctcaccattatttctattatgtacgggattgttattcggaccatttggatcaaaagcaaaacttatgaaactgtcatcagtaactgtagcgacggaaagctgtgctccagctataataggggtctgatatccaaagctaaaatcaaggcaatcaaatattctattatcataatcttggcgtttatttgctgctggtctccttactttctcttcgatatcctcgacaactttaatcttctccctgatacgcaggagaggttttacgcatctgttattattcagaacttacccgcactgaacagtgctattaaccctctgatttactgcgtgttttcaagctccatcagtttcccatgccgggaacaaagatcccaagactcacgcatgacgttcagagagcggaccgaacgacacgagatgcaaattctgtcaaagccagagttcatctag

SEQ ID NO: 264987 - DNA, 432 bp, Artificial Sequence
  derived and/or modified sequence
atgccggcaaatttcacagagggttcgttcgactcaagcggaacgggtcagactttggacagtagccctgtggcctgtacagaaacagtgacgtttacagaggtcgttgaaggcaaagaatgggggtccttttattatagttttaagacggaacagctgattaccttgtgggttctgtttgtgttcactatcgttggcaattccgtggtcctcttttcaacatggcggagaaagaaaaagagtagaatgacattcttcgtaacccagctcgccatcacggatagcttcaccggcctggtgaatatcctgacggacattaactggcgtttcactggtgactttacagcccccgacttggtgtgccgtgtcgtgaggtatctgcaggtcatggtgatgaaattatttcacatccagaagatgaatatggaatag

SEQ ID NO: 264988 - DNA, 1116 bp, Artificial Sequence
  derived and/or modified sequence
atgcctgccaacttcacagagggcagctttgacagcagcggcaccggccagaccctggacagcagccctgtggcctgcacagaaacagtgaccttcacagaggtggtggagggcaaggagtggggcagcttctactacagcttcaagacagagcagctgatcaccctgtgggtgctgtttgtgttcaccatcgtgggcaacagcgtggtgctcttcagcacctggaggaggaagaagaagagcaggatgaccttctttgtgacccagctggccatcacagacagcttcaccggcctggtgaacatcctgacagacatcaactggaggttcaccggggacttcaccgccccagacctggtgtgccgggtggtgcgctacctgcaggtggtgctgctgtatgccagcacctacgtgctggtgtccctgagcattgaccgctaccacgccatcgtgtaccccatgaagttcctgcagggcgagaagcaggcccgggtgctgattgtgattgcctggagcctgtccttcctgttcagcatccccaccctcatcatctttgggaagaggaccctgagcaatggagaggtgcagtgctgggccctgtggccagatgacagctactggaccccctacatgaccatcgtggccttcctggtgtacttcatccccctgaccatcatcagcatcatgtatggcatcgtcatccgcaccatctggatcaagagcaagacctatgagaccgtcatcagcaactgcagtgatggcaagctgtgcagcagctacaacagaggcctcatcagcaaggccaagatcaaggccatcaagtacagcatcatcatcatcctggccttcatctgctgctggagcccctacttcctgtttgacatcctggacaacttcaacctgctgcctgacacccaggagcgcttctacgccagcgtcatcatccagaacctgcctgccctgaacagcgccatcaaccccctcatctactgtgtgttcagcagcagcatctccttcccctgccgggagcagaggagccaggacagcaggatgaccttccgggagaggacagaaagacatgagatgcagatcctgagcaagccagagttcatctag

SEQ ID NO: 264989 - DNA, 432 bp, Artificial Sequence
  derived and/or modified sequence
atgcctgccaacttcacagagggcagctttgacagcagcggcaccggccagaccctggacagcagccctgtggcctgcacagaaacagtgaccttcacagaggtggtggagggcaaggagtggggcagcttctactacagcttcaagacagagcagctgatcaccctgtgggtgctgtttgtgttcaccatcgtgggcaacagcgtggtgctcttcagcacctggaggaggaagaagaagagcaggatgaccttctttgtgacccagctggccatcacagacagcttcaccggcctggtgaacatcctgacagacatcaactggaggttcaccggggacttcaccgccccagacctggtgtgccgggtggtgcgctacctgcaggtgatggtgatgaagctgttccacatccagaagatgaacatggagtag

SEQ ID NO: 264990 - DNA, 1116 bp, Artificial Sequence
  derived and/or modified sequence
atgcccgccaacttcaccgagggcagcttcgacagcagcggcaccggacaaactcttgattcgtcccccgtcgcctgcaccgagacagtgacgttcaccgaagtggtcgagggaaaggagtggggcagcttttactacagtttcaagacagaacagcttattacgctatgggtgttgtttgtattcacgattgtaggaaatagtgtggtcctgttttccacatggcgacgtaaaaagaagagcagaatgactttctttgttacacagcttgctatcacggattcttttaccggtttggtgaacatactgacagacattaattggagattcacgggggattttactgccccagacctggtgtgcagagttgtgaggtatctgcaggtggtgttgttgtacgcctctacttacgtcctcgtttcattgagcatcgaccgataccacgccatcgtatatcctatgaagtttttacagggagagaaacaggcaagagttctgatcgtaattgcttggagtttaagtttcctgtttagcattcccaccttaattatctttggtaaacggacactatcaaatggtgaggttcagtgctgggccctctggcctgacgattcctactggactccttacatgacaattgtggcctttctggtttactttattccacttacaatcatctcaattatgtacggcatcgtgattcgcacaatttggattaaatccaagacatatgaaaccgtaatctctaattgctctgacggcaagctgtgttccagctataataggggattaatatccaaggccaagatcaaggcgataaagtattccataatcattatccttgcattcatctgctgttggtcgccttacttcctgtttgatatcctggataatttcaacctgctcccagatacccaagagcggttttacgcctcagtcattatccaaaatctccctgctctcaattccgccataaaccctttaatttactgcgttttcagcagtagcatctcattcccttgccgcgagcagaggtcacaggactcgaggatgaccttcagagagcgaaccgaacgtcacgagatgcagattctgtccaagcccgagttcatctag

SEQ ID NO: 264991 - DNA, 432 bp, Artificial Sequence
  derived and/or modified sequence
atgcccgccaacttcaccgagggcagcttcgacagcagcggcaccggacagacattggacagttcccctgtggcttgtacggagacagtgacttttacagaggtggttgagggcaaagagtggggctcattttattattccttcaaaactgaacagttaattactctgtgggtgctctttgtttttacgattgtagggaattcggtagtcctattttccacctggcgacggaagaagaagtcacggatgacattttttgtgactcagctcgccattacagactctttcacagggctcgtgaatattctgaccgacattaattggaggttcacgggagatttcacggcccctgacctcgtctgcagagtggtgaggtatctccaggtaatggttatgaagctgttccacattcaaaaaatgaacatggaatag

SEQ ID NO: 264992 - DNA, 1567 bp, Artificial Sequence
  derived and/or modified sequence
gggctcagggagggctctgtgcctccgttcagcagagctgcagctgctgcccagctctcaggaggcaagctggactccctcactcagctgcaggagcaaggacagtgaggctcaaccccgcctgagccatgccagccaacttcacagagggcagcttcgattccagtgggaccgggcagacgctggattcttccccagtggcttgcactgaaacagtgacttttactgaagtggtggaaggaaaggaatggggttccttctactactcctttaagactgagcaattgataactctgtgggtcctctttgtttttaccattgttggaaactccgttgtgcttttttccacatggaggagaaagaagaagtcaagaatgaccttctttgtgactcagctggccatcacagattctttcacaggactggtcaacatcttgacagatattaattggcgattcactggagacttcacggcacctgacctggtttgccgagtggtccgctatttgcaggttgtgctgctctacgcctctacctacgtcctggtgtccctcagcatagacagataccatgccatcgtctaccccatgaagttccttcaaggagaaaagcaagccagggtcctcattgtgatcgcctggagcctgtcttttctgttctccattcccaccctgatcatatttgggaagaggacactgtccaacggtgaagtgcagtgctgggccctgtggcctgacgactcctactggaccccatacatgaccatcgtggccttcctggtgtacttcatccctctgacaatcatcagcatcatgtatggcattgtgatccgaactatttggattaaaagcaaaacctacgaaacagtgatttccaactgctcagatgggaaactgtgcagcagctataaccgaggactcatctcaaaggcaaaaatcaaggctatcaagtatagcatcatcatcattcttgccttcatctgctgttggagtccatacttcctgtttgacattttggacaatttcaacctccttccagacacccaggagcgtttctatgcctctgtgatcattcagaacctgccagcattgaatagtgccatcaaccccctcatctactgtgtcttcagcagctccatctctttcccctgcagggagcaaagatcacaggattccagaatgacgttccgggagagaactgagaggcatgagatgcagattctgtccaagccagaattcatctagaccctagggcagtgccagtgctaggctgagcaccatcagctctcccaggtccttgtcacctgcttgggcacgtgcatggaacccgagccaacttcaccccaccctcgtcattacctgggagatgcacaagacaaatgttctaatgactgcatgcactgcttaagtattggccaacacgaactccccagttattcatgccagccaggaaggaaacgccttccttccccaccattcccagccctccttcccactggccagcacctgaacccagtgaacacaggcattagtggtccagggtcctggcttggagccagtgagtagac

SEQ ID NO: 264993 - DNA, 856 bp, Artificial Sequence
  derived and/or modified sequence
agcacgtagatcctccctgtcatcaggcagagctcttcagtgaggtgggctcagggagggctctgtgcctccgttcagcagagctgcagctgctgcccagctctcaggaggcaagctggactccctcactcagctgcaggagcaaggacagtgaggctcaaccccgcctgagccatgccagccaacttcacagagggcagcttcgattccagtgggaccgggcagacgctggattcttccccagtggcttgcactgaaacagtgacttttactgaagtggtggaaggaaaggaatggggttccttctactactcctttaagactgagcaattgataactctgtgggtcctctttgtttttaccattgttggaaactccgttgtgcttttttccacatggaggagaaagaagaagtcaagaatgaccttctttgtgactcagctggccatcacagattctttcacaggactggtcaacatcttgacagatattaattggcgattcactggagacttcacggcacctgacctggtttgccgagtggtccgctatttgcaggtcatggtaatgaagttattccatattcagaaaatgaatatggaatagttacaatcttcttttgtgctctgaatataaccttgaaagtttggtatgtctgaaagagccttttctattatgtacggctagtattttctcaggggaaatttttaaaaacatatttcaatttctttctgaggatatttgcttccttgtaaataaatgctttcaattgcttattatattagcaatcaattgctgatacacaaattatgacaaaacatggtggcttaaaacaataaacatttattatctcaca

SEQ ID NO: 264994 - DNA, 1116 bp, Artificial Sequence
  derived and/or modified sequence
atgcccgctaatttcacagaaggttctttcgactctagcgggaccggccagacactcgactcctcgcctgtagcatgtacggagaccgtcacttttactgaggttgtagaaggcaaggagtggggatccttctattactcattcaaaacggaacaactcatcaccctgtgggtgctcttcgtgttcactatagtggggaatagcgtggtcttgttttccacctggaggagaaagaaaaagtctagaatgaccttcttcgtgacccagctggctattaccgattcgtttaccgggctcgttaacatcctgactgacatcaattggagattcaccggagactttaccgccccagacctcgtctgccgcgtcgtgcgctatctgcaggtcgtcctcctgtatgcttccacctatgtcctggtttccttgtctattgataggtaccacgccattgtataccccatgaaatttctgcaaggagaaaagcaggccagggttctgatcgttattgcctggtctctctctttccttttctctatacccacacttataatattcggaaaacgtactctttcaaacggtgaagttcagtgttgggccttatggcccgacgactcttactggacaccctacatgactattgtggcttttctggtgtacttcatccccctcaccattatttctatcatgtacgggattgtgatcagaacaatttggatcaaatcaaaaacatatgaaactgtaatctcgaactgcagcgacggaaaactgtgtagctcatacaataggggccttatttccaaggctaagatcaaggctattaaatactctatcatcataatcttggcattcatctgttgttggtctccttacttcttgttcgatatcctggacaactttaaccttttacctgacacccaagagcggttttatgctagcgtgattattcagaaccttccagccctcaattctgccatcaatcccctgatttactgtgtgttttcctcttccatctccttcccgtgtcgtgagcaacgaagccaggattctaggatgacttttcgagaaagaactgagcgccacgagatgcagattctgagcaagcccgagttcatttag

SEQ ID NO: 264995 - DNA, 432 bp, Artificial Sequence
  derived and/or modified sequence
atgcccgcaaattttaccgaaggaagctttgactcgtctggtacaggtcagacacttgactcttcgccagtcgcttgcactgagacagtaacgttcaccgaggtcgtggagggcaaagaatggggtagtttctattattcttttaaaactgagcagctgatcacgctgtgggtgctcttcgttttcactatcgtgggaaattccgtggtgctgttttctacttggcgcaggaaaaagaaaagtagaatgacatttttcgtgactcagctcgccatcacggacagctttactggcctggtgaacatccttacagatattaactggcgttttactggagactttaccgcccctgatctggtgtgtagagtagttcgttacctgcaggtgatggttatgaagctgttccacatccaaaagatgaacatggagtag

SEQ ID NO: 264996 - DNA, 1116 bp, Artificial Sequence
  derived and/or modified sequence
atgcccgccaacttcaccgagggcagcttcgacagcagcggcaccggccagaccctggacagcagccccgtggcctgcaccgagaccgtgaccttcaccgaggtggtggagggcaaggagtggggcagcttctactacagcttcaagaccgagcagctgatcaccctgtgggtgctgttcgtgttcaccatcgtgggcaacagcgtggtgctgttcagcacctggagaagaaagaagaagagcagaatgaccttcttcgtgacccagctggccatcaccgacagcttcaccggcctggtgaacatcctgaccgacatcaactggagattcaccggcgacttcaccgcccccgacctggtgtgcagagtggtgagatacctgcaggtggtgctgctgtacgccagcacctacgtgctggtgagcctgagcatcgacagataccacgccatcgtgtaccccatgaagttcctgcagggcgagaagcaggccagagtgctgatcgtgatcgcctggagcctgagcttcctgttcagcatccccaccctgatcatcttcggcaagagaaccctgagcaacggcgaggtgcagtgctgggccctgtggcccgacgacagctactggaccccctacatgaccatcgtggccttcctggtgtacttcatccccctgaccatcatcagcatcatgtacggcatcgtgatcagaaccatctggatcaagagcaagacctacgagaccgtgatcagcaactgcagcgacggcaagctgtgcagcagctacaacagaggcctgatcagcaaggccaagatcaaggccatcaagtacagcatcatcatcatcctggccttcatctgctgctggagcccctacttcctgttcgacatcctggacaacttcaacctgctgcccgacacccaggagagattctacgccagcgtgatcatccagaacctgcccgccctgaacagcgccatcaaccccctgatctactgcgtgttcagcagcagcatcagcttcccctgcagagagcagagaagccaggacagcagaatgaccttcagagagagaaccgagagacacgagatgcagatcctgagcaagcccgagttcatctag

SEQ ID NO: 264997 - DNA, 432 bp, Artificial Sequence
  derived and/or modified sequence
atgcccgccaacttcaccgagggcagcttcgacagcagcggcaccggccagaccctggacagcagccccgtggcctgcaccgagaccgtgaccttcaccgaggtggtggagggcaaggagtggggcagcttctactacagcttcaagaccgagcagctgatcaccctgtgggtgctgttcgtgttcaccatcgtgggcaacagcgtggtgctgttcagcacctggagaagaaagaagaagagcagaatgaccttcttcgtgacccagctggccatcaccgacagcttcaccggcctggtgaacatcctgaccgacatcaactggagattcaccggcgacttcaccgcccccgacctggtgtgcagagtggtgagatacctgcaggtgatggtgatgaagctgttccacatccagaagatgaacatggagtag

SEQ ID NO: 264998 - protein, 377 aa, Artificial Sequence
  derived and/or modified sequence
MPANFTEGSFDSSGTGQTLDSSPVACTETVTFTEVVEGKEWGSFYYSFKTEQLITLWVLFVFTIVGNSVVLFSTWRRKKKSRMTFFVTQLAITDSFTGLVNILTDINWRFTGDFTAPDLVCRVVRYLQVVLLYASTYVLVSLSIDRYHAIVYPMKFLQGEKQARVLIVIAWSLSFLFSIPTLIIFGKRTLSNGEVQCWALWPDDSYWTPYMTIVAFLVYFIPLTIISIMYGIVIRTIWIKSKTYETVISNCSDGKLCSSYNRGLISKAKIKAIKYSIIIILAFICCWSPYFLFDILDNFNLLPDTQERFYASVIIQNLPALNSAINPLIYCVFSSSISFPCRVIRLRQLQEAALMLCPQRENWKGTWPGVPSWALPR

SEQ ID NO: 264999 - DNA, 1134 bp, Artificial Sequence
  derived and/or modified sequence
atgcctgcaaacttcaccgaaggatcattcgatagctccggaacaggccagaccttggactctagccctgtggcctgtacagagacggtgacgtttactgaagtcgtggaggggaaggaatggggttcattctactactcattcaagactgaacagcttattacactgtgggtcctttttgttttcactatagtggggaattcagtcgtcctgttctccacatggagacggaaaaagaagagcagaatgaccttctttgtgacccagctggctattacagatagctttaccggcctggttaatatattgacagatatcaattggcgattcaccggtgatttcacagctcctgatctggtatgtagggtggtccgctatttgcaggttgtcttactttacgcctctacctatgtcctggtgtccctgagcatcgatcgataccacgctattgtgtacccgatgaagttccttcagggtgagaaacaagcaagggtccttattgtgattgcctggtcactctccttccttttctcaatccctacactcattatttttggaaaacgcacactgagtaatggcgaggtgcaatgctgggccctctggccagacgattcctactggaccccatatatgacaatagtagcgttccttgtgtactttataccacttactataatcagcattatgtacgggatcgtcataaggacgatttggataaagtccaaaacctacgaaacagtcataagtaactgctctgacggcaaactgtgttcaagttacaacaggggcctgattagcaaagctaaaatcaaagctattaaatactctatcataatcatcttggcatttatctgctgctggtcaccttatttcctctttgacatcttggacaatttcaatctgcttccagacacacaggaacgcttctacgccagtgtgatcatacagaatttaccagccctgaacagcgccattaatcctctcatttattgcgttttctcttcttccatctcattcccctgcagggtgatccgactgcggcaactgcaagaggcagctttgatgctctgtccacaacgggagaattggaagggtacctggcctggcgtgccctcctgggccctgcccaggtag

SEQ ID NO: 265000 - DNA, 1134 bp, Artificial Sequence
  derived and/or modified sequence
atgcctgccaacttcacagagggcagctttgacagcagcggcaccggccagaccctggacagcagccctgtggcctgcacagaaacagtgaccttcacagaggtggtggagggcaaggagtggggcagcttctactacagcttcaagacagagcagctgatcaccctgtgggtgctgtttgtgttcaccatcgtgggcaacagcgtggtgctcttcagcacctggaggaggaagaagaagagcaggatgaccttctttgtgacccagctggccatcacagacagcttcaccggcctggtgaacatcctgacagacatcaactggaggttcaccggggacttcaccgccccagacctggtgtgccgggtggtgcgctacctgcaggtggtgctgctgtatgccagcacctacgtgctggtgtccctgagcattgaccgctaccacgccatcgtgtaccccatgaagttcctgcagggcgagaagcaggcccgggtgctgattgtgattgcctggagcctgtccttcctgttcagcatccccaccctcatcatctttgggaagaggaccctgagcaatggagaggtgcagtgctgggccctgtggccagatgacagctactggaccccctacatgaccatcgtggccttcctggtgtacttcatccccctgaccatcatcagcatcatgtatggcatcgtcatccgcaccatctggatcaagagcaagacctatgagaccgtcatcagcaactgcagtgatggcaagctgtgcagcagctacaacagaggcctcatcagcaaggccaagatcaaggccatcaagtacagcatcatcatcatcctggccttcatctgctgctggagcccctacttcctgtttgacatcctggacaacttcaacctgctgcctgacacccaggagcgcttctacgccagcgtcatcatccagaacctgcctgccctgaacagcgccatcaaccccctcatctactgtgtgttcagcagcagcatctccttcccctgcagggtcatccggctgcggcagctgcaggaggccgccctgatgctgtgcccccagcgggagaactggaagggcacctggccaggagtgcccagctgggccctgcccaggtag

SEQ ID NO: 265001 - DNA, 1134 bp, Artificial Sequence
  derived and/or modified sequence
atgcccgccaacttcaccgagggcagcttcgacagcagcggcaccggtcaaactttggatagttcccctgtggcttgtacagagacggtgaccttcaccgaggttgtcgagggcaaagagtggggctctttctactactcctttaagactgagcagcttattacgttatgggtcttgtttgttttcacaattgtggggaatagcgtcgtactattcagcacttggaggcgcaagaagaagtcacggatgacgttcttcgttactcagctggcaatcaccgacagctttacgggcctggttaacatactaaccgatatcaactggagattcacaggagacttcacagcacctgatctggtgtgtagggtcgtgcgatacctgcaggtggtgctgctgtacgcgtcgacatacgtactggtatcgttgagtattgacagatatcatgcgattgtgtacccaatgaagtttctacaaggagagaaacaagctagggtgctgatcgttattgcctggtccctttccttccttttctcaatacccacacttatcatcttcggcaagcgcactctgtccaacggggaagtgcagtgttgggccctgtggccagatgactcttactggacgccctatatgacaatagtggccttccttgtctacttcatccccttgacaattataagcatcatgtatggaatcgtgatccgaaccatctggattaagagtaagacatacgaaactgtgattagtaactgcagcgacggtaaactgtgctcttcttataatcgcggactgatcagtaaagccaaaataaaagcgatcaagtattctatcataattatcttagccttcatttgttgttggtccccatacttcctgtttgacatcctggataatttcaatctgttaccagacacccaggaaagattctatgcctcggtgataatacagaacctacctgctctcaattcagctatcaatcccctgatctactgtgttttctccagtagcattagctttccatgtcgagtaatccgcctgagacagctccaggaggccgccctaatgctatgcccacagcgggaaaactggaaagggacatggccaggcgtgccatcatgggccttgccaaggtag

SEQ ID NO: 265002 - DNA, 1410 bp, Artificial Sequence
  derived and/or modified sequence
gggctcagggagggctctgtgcctccgttcagcagagctgcagctgctgcccagctctcaggaggcaagctggactccctcactcagctgcaggagcaaggacagtgaggctcaaccccgcctgagccatgccagccaacttcacagagggcagcttcgattccagtgggaccgggcagacgctggattcttccccagtggcttgcactgaaacagtgacttttactgaagtggtggaaggaaaggaatggggttccttctactactcctttaagactgagcaattgataactctgtgggtcctctttgtttttaccattgttggaaactccgttgtgcttttttccacatggaggagaaagaagaagtcaagaatgaccttctttgtgactcagctggccatcacagattctttcacaggactggtcaacatcttgacagatattaattggcgattcactggagacttcacggcacctgacctggtttgccgagtggtccgctatttgcaggttgtgctgctctacgcctctacctacgtcctggtgtccctcagcatagacagataccatgccatcgtctaccccatgaagttccttcaaggagaaaagcaagccagggtcctcattgtgatcgcctggagcctgtcttttctgttctccattcccaccctgatcatatttgggaagaggacactgtccaacggtgaagtgcagtgctgggccctgtggcctgacgactcctactggaccccatacatgaccatcgtggccttcctggtgtacttcatccctctgacaatcatcagcatcatgtatggcattgtgatccgaactatttggattaaaagcaaaacctacgaaacagtgatttccaactgctcagatgggaaactgtgcagcagctataaccgaggactcatctcaaaggcaaaaatcaaggctatcaagtatagcatcatcatcattcttgccttcatctgctgttggagtccatacttcctgtttgacattttggacaatttcaacctccttccagacacccaggagcgtttctatgcctctgtgatcattcagaacctgccagcattgaatagtgccatcaaccccctcatctactgtgtcttcagcagctccatctctttcccctgcagggtcatccgtctccgtcagctccaggaggctgcgctaatgctctgccctcaacgagagaactggaagggtacttggccaggtgtaccttcctgggctcttccaaggtgacagctctcaccctgtgctgcaggtggccctgtgcctggtgccacttctcactgcttaccagggcacaaggacaccagtggttcccaaaatgggtcacagcaggatggcctgcatcagattcaccagggagggctataagaaggcagac

SEQ ID NO: 265003 - DNA, 1134 bp, Artificial Sequence
  derived and/or modified sequence
atgcccgctaattttactgagggcagtttcgattcctctgggaccggtcagacgcttgattccagtccggttgcctgcaccgagactgtcacatttaccgaggtggtggaaggaaaggaatgggggagcttctattactccttcaagacggaacagttgataacactgtgggtgctgttcgtgtttactatcgtgggcaactcagtggtcctgttctctacctggcgccgaaagaaaaagtcccggatgactttctttgttactcagctcgctattactgatagctttacggggcttgtgaacattcttactgacatcaactggcgattcacaggagattttactgctcctgacctagtctgccgggtggtgcgatatctccaggtggtgctcctgtacgccagcacttacgtattggtgtcactgtcaatagacagataccacgctatagtataccctatgaagttcctgcagggggagaagcaggccagggttctcatcgttattgcttggtccctttccttcctgttctctatcccgacactgatcatttttgggaagcgaaccctgagcaatggggaggtgcagtgctgggccctgtggccggatgactcttactggacaccttacatgacgatcgtcgcattcctcgtgtactttatcccattgacaatcatctctatcatgtacggcattgttatccgcaccatatggattaagtctaaaacctatgagaccgtcatttccaattgctccgatggcaaactatgctcttcgtacaataggggactgatttctaaggcgaagatcaaggccatcaaatactctattattattatcctggctttcatctgctgttggtccccttatttcctgttcgatatcctggacaactttaaccttctacctgacacccaggaacgcttttatgcgtctgtgattatccagaatttgccggctctcaatagcgctattaatccgttgatctattgtgtgttcagttccagcatcagctttccatgtcgggtgattagactgaggcagcttcaggaggccgcactgatgctatgtccacagcgggaaaactggaagggcacatggcccggtgtcccgagttgggcactgcctaggtag

SEQ ID NO: 265004 - DNA, 1134 bp, Artificial Sequence
  derived and/or modified sequence
atgcccgccaacttcaccgagggcagcttcgacagcagcggcaccggccagaccctggacagcagccccgtggcctgcaccgagaccgtgaccttcaccgaggtggtggagggcaaggagtggggcagcttctactacagcttcaagaccgagcagctgatcaccctgtgggtgctgttcgtgttcaccatcgtgggcaacagcgtggtgctgttcagcacctggagaagaaagaagaagagcagaatgaccttcttcgtgacccagctggccatcaccgacagcttcaccggcctggtgaacatcctgaccgacatcaactggagattcaccggcgacttcaccgcccccgacctggtgtgcagagtggtgagatacctgcaggtggtgctgctgtacgccagcacctacgtgctggtgagcctgagcatcgacagataccacgccatcgtgtaccccatgaagttcctgcagggcgagaagcaggccagagtgctgatcgtgatcgcctggagcctgagcttcctgttcagcatccccaccctgatcatcttcggcaagagaaccctgagcaacggcgaggtgcagtgctgggccctgtggcccgacgacagctactggaccccctacatgaccatcgtggccttcctggtgtacttcatccccctgaccatcatcagcatcatgtacggcatcgtgatcagaaccatctggatcaagagcaagacctacgagaccgtgatcagcaactgcagcgacggcaagctgtgcagcagctacaacagaggcctgatcagcaaggccaagatcaaggccatcaagtacagcatcatcatcatcctggccttcatctgctgctggagcccctacttcctgttcgacatcctggacaacttcaacctgctgcccgacacccaggagagattctacgccagcgtgatcatccagaacctgcccgccctgaacagcgccatcaaccccctgatctactgcgtgttcagcagcagcatcagcttcccctgcagagtgatcagactgagacagctgcaggaggccgccctgatgctgtgcccccagagagagaactggaagggcacctggcccggcgtgcccagctgggccctgcccagatag

SEQ ID NO: 265005 - protein, 677 aa, Artificial Sequence
  derived and/or modified sequence
MRISLPRAPERDGGVSASSLLDTVTNASSYSAEMTEPKSVCVSVDEVVSSNMEATETDLLNGHLKKVDNNLTEAQRFSSLPRRAAVNIEFRDLSYSVPEGPWWRKKGYKTLLKGISGKFNSGELVAIMGPSGAGKSTLMNILAGYRETGMKGAVLINGLPRDLRCFRKVSCYIMQDDMLLPHLTVQEAMMVSAHLKLQEKDEGRREMVKEILTALGLLSCANTRTGSLSGGQRKRLAIALELVNNPPVMFFDEPTSGLDSASCFQVVSLMKGLAQGGRSIICTIHQPSAKLFELFDQLYVLSQGQCVYRGKVCNLVPYLRDLGLNCPTYHNPADFVMEVASGEYGDQNSRLVRAVREGMCDSDHKRDLGGDAEVNPFLWHRPSEEDSSSMEGCHSFSASCLTQFCILFKRTFLSIMRDSVLTHLRITSHIGIGLLIGLLYLGIGNEAKKVLSNSGFLFFSMLFLMFAALMPTVLTFPLEMGVFLREHLNYWYSLKAYYLAKTMADVPFQIMFPVAYCSIVYWMTSQPSDAVRFVLFAALGTMTSLVAQSLGLLIGAASTSLQVATFVGPVTAIPVLLFSGFFVSFDTIPTYLQWMSYISYVRYGFEGVILSIYGLDREDLHCDIDETCHFQKSEAILRELDVENAKLYLDFIVLGIFFISLRLIAYFVLRYKIRAER

SEQ ID NO: 265006 - DNA, 2034 bp, Artificial Sequence
  derived and/or modified sequence
atgagaatcagcctgccaagagcccccgaaagagacggaggcgtgagtgcgtcctctctgttggatacggtcactaacgcttctagttactctgcagaaatgactgagcccaaaagcgtctgtgttagcgtcgatgaggtagttagttctaacatggaggcaaccgagacggatctactgaacggccatttgaagaaggtggataataatcttacagaggcccagcggttctccagtcttcccaggcgagcagccgtcaacatcgagtttcgcgacctgtcctactccgttccagaggggccttggtggcgcaagaaggggtataagacactcctgaaaggaatttctggcaagttcaattctggcgagttagtcgccattatgggaccatccggggctggaaagagcacactgatgaacatcctggctggataccgcgagacagggatgaaaggggcagttctaattaatggcctgccaagagaccttagatgtttcaggaaggtgtcctgctacattatgcaagacgacatgctgctgccgcatctgaccgtccaggaagccatgatggtttcagcgcaccttaaactccaggaaaaggatgagggtcggagagagatggtcaaggaaattctcaccgctcttgggttactgagttgcgcaaacaccagaacaggaagcctctctgggggccagcgaaaaaggctggctatcgctcttgagctggttaataacccccctgtcatgttttttgacgagccaacctcaggtctggattctgccagttgcttccaagtggtctcacttatgaagggcttggcccagggaggccgctcaatcatctgcaccattcatcagcctagcgccaagctattcgaacttttcgaccagttgtacgtgctgtcgcaaggccagtgtgtgtaccgaggaaaagtgtgcaacttggtcccatacctgcgggatttgggattgaattgccctacctaccacaatccagctgatttcgtgatggaagtggcttctggcgagtatggggaccagaactcaaggttagtcagggccgttcgagaagggatgtgcgactcggatcacaaacgagatttaggcggcgacgcagaagttaaccccttcctctggcacagaccctccgaggaggactcttcctctatggaaggatgccattcattttccgcttcctgtctgacacagttctgtattctattcaaacggacctttctttccataatgcgggactccgtcctgacccatctgcggatcacctcccatattgggattggcctcctgatcggtttgctctacctgggcatcggcaatgaggcaaagaaggtcttgtcaaatagcgggttcttgttcttttcgatgctgtttttgatgttcgccgcgctgatgcctacagtactgacttttcctctggaaatgggagtctttttgcgtgagcacctgaattactggtacagtttgaaggcatattatttggccaagacgatggcggatgtaccgtttcagatcatgtttcctgtcgcctattgttcaattgtttattggatgacaagtcaaccttctgatgcggtccggtttgttctgttcgcagcacttggcacgatgacttcactggtggcccagtcgctgggcctattaatcggcgccgcatccacttcacttcaggttgccacattcgttggccctgtgactgccatccctgtgctcctgtttagcggtttctttgtgagttttgataccattcctacatatcttcagtggatgagctacatttcgtacgtccgctacggattcgagggagttatcctgagtatatacggcctcgaccgagaagatctgcattgcgacatcgatgagacatgtcacttccagaaatccgaggccattctgcgtgagttggacgtggaaaatgccaaactctatctggatttcatagtcctgggaatttttttcatctctctgcgccttattgcctattttgtcctgaggtataaaattcgggccgaaaggtag

SEQ ID NO: 265007 - DNA, 2034 bp, Artificial Sequence
  derived and/or modified sequence
atgaggatcagcctgccccgggcccctgagagagatggcggcgtgtctgccagcagcctgctggacacagtgaccaatgccagcagctacagcgctgagatgacagagcccaagtctgtgtgtgtgtctgtggatgaggtggtgagcagcaacatggaggccacagaaacagacctgctgaatggccacctgaagaaggtggacaacaacctgacagaggcccagcgcttcagcagcctgccccggcgggctgctgtgaacatcgagttccgggacctgagctacagcgtgcctgagggcccctggtggaggaagaagggctacaagaccctgctgaagggcatcagcggcaagttcaacagcggggagctggtggccatcatgggccccagcggggccggcaagagcaccctgatgaacatcctggccggctaccgggagaccggcatgaagggagctgtgctgatcaatggcctgccccgggacctgcgctgcttcaggaaggtgtcctgctacatcatgcaggatgacatgctgctgccccacctgactgtgcaggaggccatgatggtgtctgcccacctgaagctgcaggagaaggatgagggccggcgggagatggtgaaggagatcctgacagccctgggcctgctgagctgtgccaacaccaggacaggcagcctgagcggcggccagaggaagaggctggccatcgccctggagctggtgaacaacccccctgtgatgttctttgatgagcccaccagcggcctggacagcgccagctgcttccaggtggtgtccctgatgaagggcctggcccagggcggccgcagcatcatctgcaccatccaccagcccagcgccaagctgtttgagctgtttgaccagctgtatgtgctgagccagggccagtgtgtgtaccggggcaaggtgtgcaacctggtgccctacctgcgggacctgggcctgaactgccccacctaccacaacccagctgactttgtgatggaggtggccagcggggagtatggagaccagaacagccggctggtgcgggctgtgcgggagggcatgtgtgacagcgaccacaagagggacctgggcggagatgctgaggtgaaccccttcctgtggcaccggcccagcgaggaggacagcagctccatggagggctgccacagcttcagcgccagctgcctgacccagttctgcatcctcttcaagaggaccttcctgagcatcatgagggacagcgtgctgacccacctgcgcatcaccagccacatcggcatcggcctgctgattggcctgctgtacctgggcattggaaatgaggccaagaaggtgctgagcaacagcggcttcctgttcttctccatgctgttcctgatgtttgctgccctgatgcccaccgtgctgaccttccccctggagatgggcgtcttcctgcgggagcacctgaactactggtacagcctgaaggcctactacctggccaagaccatggctgatgtgcccttccagatcatgtttcctgtggcctactgcagcatcgtgtactggatgaccagccagcccagtgatgctgtgcgctttgtgctgtttgctgccctgggcaccatgaccagcctggtggcccagagcctgggcctgctgattggagctgccagcaccagcctgcaggtggccacctttgtgggccctgtgacagccatccctgtgctgctcttcagcggcttctttgtgtcctttgacaccatccccacctacctgcagtggatgagctacatctcctatgtgcgctatggctttgaaggagtcatcctgagcatctacggcctggaccgggaggacctgcactgtgacattgatgagacctgccacttccagaagtctgaggccatcctgcgggagctggatgtggagaatgccaagctgtacctggacttcatcgtgctgggcatcttcttcatcagcctgcggctcatcgcctactttgtgctgcgctacaagatccgggcagagaggtag

SEQ ID NO: 265008 - DNA, 2034 bp, Artificial Sequence
  derived and/or modified sequence
atgcggatcagcctgccccgggcccccgagcgggacggcggcgtgagtgcctcttctcttctggataccgtgacaaatgcatcatcttactcagccgagatgactgagcctaagtcagtctgcgtgtcagtcgatgaggtggtgtccagcaatatggaagctacagagactgatttgctgaatggccatctgaagaaggtcgacaacaatctgacagaggcgcagaggtttagctcgctgccccggcgtgcggccgtgaatatcgaatttcgcgatctttcctacagcgtccctgaggggccttggtggagaaagaaaggctacaaaactttgctcaagggtatcagcgggaaatttaattctggagagctggttgctattatgggccctagcggcgccggcaagagtactctgatgaatatccttgctggatacagagaaaccggaatgaaaggcgccgttcttatcaatggactgccccgagaccttcgctgcttcaggaaggtgagttgctacattatgcaagacgacatgctgttacctcacctaactgtccaggaagcgatgatggtgtccgcccatctgaagttacaggaaaaggatgaaggtcgcagggaaatggtaaaggagatactcacagccctgggtctgctcagctgcgccaatacccggactggctctctctccggagggcaaagaaaaagactcgcaatagcactggagctggtaaataaccccccagtgatgtttttcgacgagcccaccagcggacttgattctgctagctgtttccaggtggtaagtctcatgaaaggactcgcccagggcggcagatccatcatatgtaccattcatcagccctctgctaaactgttcgaactttttgaccagctttacgtcctgagtcagggccagtgcgtctaccgaggtaaggtgtgcaatttggtgccatacctcagagaccttggccttaactgcccaacctaccacaacccagcagacttcgtgatggaggtggccagcggtgaatatggggatcagaattcgaggctggtcagagcagtacgggaggggatgtgtgactctgaccataagagggatctgggaggggacgctgaggtgaatccttttctgtggcaccggccgtctgaggaggacagcagttctatggaaggctgccactcgttttcggcatcttgcctcactcaattttgtatcctttttaaacgcaccttcctgagcatcatgagagactctgtcctgacccacttacgcattacgtcgcatattggtatcggcctgttgattggtctcctgtacttggggattggcaacgaggccaaaaaggtgctatccaacagtggattcctgtttttctccatgctcttcctgatgtttgctgcactcatgccgaccgttctgacctttcctctggagatgggcgtgttcttacgcgagcacttgaactactggtattcacttaaagcctattatctggcgaagactatggccgatgtccctttccaaattatgtttccggtagcttattgttctatcgtctattggatgactagccaaccaagtgacgccgttcggttcgtgctgtttgccgccctgggcaccatgacttccctcgttgcccagtctctcgggctgttgatcggagccgctagcacaagcctacaagtcgctacattcgtgggtcccgttactgcaatccccgtcctccttttttccggctttttcgtctccttcgacactatacccacttacttgcaatggatgagttatatttcatacgtgcggtatggtttcgagggagtcatcctgtcgatatacggactcgaccgcgaagaccttcactgcgatatcgacgagacatgccatttccagaaatcagaagctatccttcgggagctggatgtagaaaatgccaaactctacctggatttcattgtcctggggattttttttatcagcttacggctgatcgcttattttgtcctgcgttacaaaattagggccgagcgttag

SEQ ID NO: 265009 - DNA, 2034 bp, Artificial Sequence
  derived and/or modified sequence
atgaggatttctttgcccagagcccctgaacgcgatgggggagtatccgctagttctctgctagacactgtcactaacgcctcttcctacagcgctgagatgaccgagcccaaaagtgtatgcgtatcggtggacgaggtggtgtcatccaacatggaggcaacggagaccgacctcctgaatggccacctgaagaaggtggataataatctcaccgaggcccaacgcttttcttcactgccaagacgcgcagctgtaaacattgaatttagggacctcagttattctgtcccagaaggaccttggtggagaaagaaggggtataaaaccctgttaaagggaattagcggaaaatttaatagcggagagctggttgccattatgggtcctagcggggcaggcaaatctactctgatgaacatactcgcgggataccgagagacgggcatgaagggcgctgtgctgattaacgggctgccgagggacctgcggtgcttccggaaggtttcatgctacataatgcaagacgatatgcttctccctcatctgacagtgcaagaggcaatgatggtgtcagcgcacttgaagcttcaagagaaagatgagggtcgcagagagatggttaaagagatactcacagctcttgggctgctgtcttgcgccaacaccagaacgggatcattgtccgggggtcaacgcaagaggctggccatagccctagagctggtgaacaacccacctgttatgtttttcgacgagcccacatctggcttggatagtgcttcctgtttccaagtggtgagcctcatgaaaggactcgcccaagggggtcgatctattatttgcaccatacaccagccctcggccaagctgtttgaactgttcgatcagctgtacgtgttgtctcagggacagtgcgtctaccgcggaaaagtgtgtaatctggtgccatatttgcgggacctgggtctgaactgccctacgtaccataatcccgcagattttgtcatggaagtggcaagcggtgagtacggagatcaaaactctcggctggtaagagcggtccgagagggcatgtgtgactctgaccataaacgcgatctgggaggggatgcagaggtcaatccctttctatggcacagaccatccgaggaagatagctcttctatggagggatgtcacagtttcagtgcaagttgtctaacacagttttgcattctgtttaagaggacattcctatcgatcatgagagactccgtgctgacgcacctacgcataaccagtcatattggaatcggcttgctcatagggcttctgtacctgggaattggcaacgaagcaaaaaaagttctgagcaattccggttttctatttttttccatgctttttctgatgtttgccgcactgatgccgacggttctaacatttccactcgaaatgggagttttcctgcgcgaacacctgaactactggtattcattgaaggcttactatctcgctaagacaatggctgacgtgccctttcaaatcatgttccctgtggcgtactgttccatcgtttactggatgacctcacaaccctccgacgcggtcagattcgtcctctttgctgctctaggtactatgacatcattggtcgcccagagccttggtctgctcattggcgctgccagcacctctcttcaagtggctaccttcgtggggcctgtgaccgccatcccagtgctcctattttctggttttttcgtctcttttgacacaattccaacttacctgcagtggatgtcttatatttcatacgtgcgctatggcttcgagggcgtcatactgagtatatacggtttggatcgggaagacctgcactgtgatatcgatgagacctgtcattttcaaaagtccgaagctatcctcagagaactggacgtcgaaaacgccaaactttatctggactttattgtgctcggaatattcttcatcagcttgcgactgattgcatattttgtcttgagatacaagatcagggccgagaggtag

SEQ ID NO: 265010 - DNA, 3037 bp, Artificial Sequence
  derived and/or modified sequence
agcctgcgactgcactcccggggacaccctctcccggacccactcggggaggcggcggcgaaggcccggggagacccgcgaggggcaagcccggattcctgccggccgcctttctgcgcgcgccggagagagagacgcggtggggacagggatgcgcatttcacttccccgagctccggagagggatggcggggtgtcggcgagttcactgctggacacagttactaatgccagcagttactctgcagagatgacggagcccaagtcggtgtgtgtctcggtggatgaggtggtgtccagcaacatggaggccactgagacggacctgctgaatggacatctgaaaaaagtagataataacctcacggaagcccagcgcttctcctccttgcctcggagggcagctgtgaacattgaattcagggacctttcctattcggttcctgaaggaccctggtggaggaagaaaggatacaagaccctcctgaaaggaatttccgggaagttcaatagtggtgagttggtggccattatgggtccttccggggccgggaagtccacgctgatgaacatcctggctggatacagggagacgggcatgaagggggccgtcctcatcaacggcctgccccgggacctgcgctgcttccggaaggtgtcctgctacatcatgcaggatgacatgctgctgccgcatctcactgtgcaggaggccatgatggtgtcggcacatctgaagcttcaggagaaggatgaaggcagaagggaaatggtcaaggagatactgacagcgctgggcttgctgtcttgcgccaacacgcggaccgggagcctgtcaggtggtcagcgcaagcgcctggccatcgcgctggagctggtgaacaaccctccagtcatgttcttcgatgagcccaccagcggcctggacagcgcctcctgcttccaggtggtctcgctgatgaaagggctcgctcaagggggtcgctccatcatttgcaccatccaccagcccagcgccaaactcttcgagctgttcgaccagctttacgtcctgagtcaaggacaatgtgtgtaccggggaaaagtctgcaatcttgtgccatatttgagggatttgggtctgaactgcccaacctaccacaacccagcagattttgtcatggaggttgcatccggcgagtacggtgatcagaacagtcggctggtgagagcggttcgggagggcatgtgtgactcagaccacaagagagacctcgggggtgatgccgaggtgaacccttttctttggcaccggccctctgaagaggactcctcgtccatggaaggctgccacagcttctctgccagctgcctcacgcagttctgcatcctcttcaagaggaccttcctcagcatcatgagggactcggtcctgacacacctgcgcatcacctcgcacattgggatcggcctcctcattggcctgctgtacttggggatcgggaacgaagccaagaaggtcttgagcaactccggcttcctcttcttctccatgctgttcctcatgttcgcggccctcatgcctactgttctgacatttcccctggagatgggagtctttcttcgggaacacctgaactactggtacagcctgaaggcctactacctggccaagaccatggcagacgtgccctttcagatcatgttcccagtggcctactgcagcatcgtgtactggatgacgtcgcagccgtccgacgccgtgcgctttgtgctgtttgccgcgctgggcaccatgacctccctggtggcacagtccctgggcctgctgatcggagccgcctccacgtccctgcaggtggccactttcgtgggcccagtgacagccatcccggtgctcctgttctcggggttcttcgtcagcttcgacaccatccccacgtacctacagtggatgtcctacatctcctatgtcaggtatgggttcgaaggggtcatcctctccatctatggcttagaccgggaagatctgcactgtgacatcgacgagacgtgccacttccagaagtcggaggccatcctgcgggagctggacgtggaaaatgccaagctgtacctggacttcatcgtactcgggattttcttcatctccctccgcctcattgcctattttgtcctcaggtacaaaatccgggcagagaggtaaaacacctgaatgccaggaaacaggaagattagacactgtggccgagggcacgtctagaatcgaggaggcaagcctgtgcccgaccgacgacacagagactcttctgatccaacccctagaaccgcgttgggtttgtgggtgtctcgtgctcagccactctgcccagctgggttggatcttctctccattcccctttctagctttaactaggaagatgtaggcagattggtggtttttttttttttaacatacagaattttaaataccacaactggggcagaatttaaagctgcaacacagctggtgatgagaggcttcctcagtccagtcgctccttagcaccaggcaccgtgggtcctggatggggaactgcaagcagcctctcagctgatggctgcacagtcagatgtctggtggcagagagtccgagcatggagcgattccattttatgactgttgtttttcacattttcatctttctaaggtgtgtctcttttccaatgagaagtcatttttgcaagccaaaagtcgatcaatcgcattcattttaagaaattatacctttttagtacttgctgaagaatgattcagggtaaatcacatactttgtttagagaggcgaggggtttaaccgagtcacccagctggtctcatacatagacagcacttgtgaaggattgaatgcaggttccaggtggagggaagacgtggacaccatctccactgagccatgcagacatttttaaaagctatacaaaaaattgtgagaagacattggccaactctttcaaagtctttctttttccacgtgcttcttattttaagcgaaatatattgtttgtttcttcctaa

SEQ ID NO: 265011 - DNA, 2034 bp, Artificial Sequence
  derived and/or modified sequence
atgagaatcagcctgcccagagcccccgagagagacggcggcgtgagcgccagcagcctgctggacaccgtgaccaacgccagcagctacagcgccgagatgaccgagcccaagagcgtgtgcgtgagcgtggacgaggtggtgagcagcaacatggaggccaccgagaccgacctgctgaacggccacctgaagaaggtggacaacaacctgaccgaggcccagagattcagcagcctgcccagaagagccgccgtgaacatcgagttcagagacctgagctacagcgtgcccgagggcccctggtggagaaagaagggctacaagaccctgctgaagggcatcagcggcaagttcaacagcggcgagctggtggccatcatgggccccagcggcgccggcaagagcaccctgatgaacatcctggccggctacagagagaccggcatgaagggcgccgtgctgatcaacggcctgcccagagacctgagatgcttcagaaaggtgagctgctacatcatgcaggacgacatgctgctgccccacctgaccgtgcaggaggccatgatggtgagcgcccacctgaagctgcaggagaaggacgagggcagaagagagatggtgaaggagatcctgaccgccctgggcctgctgagctgcgccaacaccagaaccggcagcctgagcggcggccagagaaagagactggccatcgccctggagctggtgaacaacccccccgtgatgttcttcgacgagcccaccagcggcctggacagcgccagctgcttccaggtggtgagcctgatgaagggcctggcccagggcggcagaagcatcatctgcaccatccaccagcccagcgccaagctgttcgagctgttcgaccagctgtacgtgctgagccagggccagtgcgtgtacagaggcaaggtgtgcaacctggtgccctacctgagagacctgggcctgaactgccccacctaccacaaccccgccgacttcgtgatggaggtggccagcggcgagtacggcgaccagaacagcagactggtgagagccgtgagagagggcatgtgcgacagcgaccacaagagagacctgggcggcgacgccgaggtgaaccccttcctgtggcacagacccagcgaggaggacagcagcagcatggagggctgccacagcttcagcgccagctgcctgacccagttctgcatcctgttcaagagaaccttcctgagcatcatgagagacagcgtgctgacccacctgagaatcaccagccacatcggcatcggcctgctgatcggcctgctgtacctgggcatcggcaacgaggccaagaaggtgctgagcaacagcggcttcctgttcttcagcatgctgttcctgatgttcgccgccctgatgcccaccgtgctgaccttccccctggagatgggcgtgttcctgagagagcacctgaactactggtacagcctgaaggcctactacctggccaagaccatggccgacgtgcccttccagatcatgttccccgtggcctactgcagcatcgtgtactggatgaccagccagcccagcgacgccgtgagattcgtgctgttcgccgccctgggcaccatgaccagcctggtggcccagagcctgggcctgctgatcggcgccgccagcaccagcctgcaggtggccaccttcgtgggccccgtgaccgccatccccgtgctgctgttcagcggcttcttcgtgagcttcgacaccatccccacctacctgcagtggatgagctacatcagctacgtgagatacggcttcgagggcgtgatcctgagcatctacggcctggacagagaggacctgcactgcgacatcgacgagacctgccacttccagaagagcgaggccatcctgagagagctggacgtggagaacgccaagctgtacctggacttcatcgtgctgggcatcttcttcatcagcctgagactgatcgcctacttcgtgctgagatacaagatcagagccgagagatag

SEQ ID NO: 265012 - protein, 732 aa, Artificial Sequence
  derived and/or modified sequence
MLARRQRDPLQALRRRNQELKQQVDSLLSESQLKEALEPNKRQHIYQRCIQLKQAIDENKNALQKLSKADESAPVANYNQRKEEEHTLLDKLTQQLQGLAVTISRENITEVGAPTEEEEESESEDSEDSGGEEEDAEEEEEEKEENESHKWSTGEEYIAVGDFTAQQVGDLTFKKGEILLVIEKKPDGWWIAKDAKGNEGLVPRTYLEPYSEEEEGQESSEEGSEEDVEAVDETADGAEVKQRTDPHWSAVQKAISEAGIFCLVNHVSFCYLIVLMRNRMETVEDTNGSETGFRAWNVQSRGRIFLVSKPVLQINTVDVLTTMGAIPAGFRPSTLSQLLEEGNQFRANYFLQPELMPSQLAFRDLMWDATEGTIRSRPSRISLILTLWSCKMIPLPGMSIQVLSRHVRLCLFDGNKVLSNIHTVRATWQPKKPKTWTFSPQVTRILPCLLDGDCFIRSNSASPDLGILFELGISYIRNSTGERGELSCGWVFLKLFDASGVPIPAKTYELFLNGGTPYEKGIEVDPSISRRAHGSVFYQIMTMRRQPQLLVKLRSLNRRSRNVLSLLPETLIGNMCSIHLLIFYRQILGDVLLKDRMSLQSTDLISHPMLATFPMLLEQPDVMDALRSSWAGKESTLKRSEKRDKEFLKSTFLLVYHDCVLPLLHSTRLPPFRWAEEETETARWKVITDFLKQNQENQGALQALLSPDGVHEPFDLSEQTYDFLGEMRKNAV

SEQ ID NO: 265013 - DNA, 2199 bp, Artificial Sequence
  derived and/or modified sequence
atgctggctcggcggcagcgcgacccacttcaggctctgcgccgcagaaaccaagagctgaagcagcaggttgatagtttgctcagcgaatcccagcttaaggaggccctcgagcccaataagagacaacacatttaccaaaggtgcatccaattaaaacaggcgatcgacgagaataagaatgccctgcagaaattatctaaggccgacgagtcggcgccggtggctaactacaatcaacggaaggaagaggagcacaccctgcttgataaactgacacaacagctccaaggcttggccgtgacgatcagtcgcgagaacatcactgaggtaggcgctccaacggaagaggaagaagaatctgagtctgaagacagtgaagattcagggggcgaagaggaagacgccgaagaggaagaagaggagaaagaggagaatgaaagccacaagtggagcactggggaggagtatatcgccgtcggagatttcaccgctcagcaggtaggggaccttacctttaagaagggcgagatcctgttagtcatagagaaaaaaccagatggctggtggatcgccaaggatgccaaagggaatgagggcctggtccctcgcacataccttgaaccgtactctgaagaagaagaaggacaggaaagttctgaggaaggatctgaggaggacgtggaggcggtggacgagactgctgacggcgctgaggtcaagcagagaactgatccacattggagcgctgtccagaaggctatcagtgaagctggtattttctgcttagtgaaccatgtcagcttctgctatcttatcgtactcatgcgcaataggatggagactgtcgaagacacgaacgggtccgagactggatttcgagcttggaacgtccagtcacgcggtagaatcttcctggttagtaagcccgtgttgcagataaataccgtggatgttttgacaactatgggtgctatcccggcagggttcagaccatctacactttcccagctcttggaagaaggcaaccagttcagagccaattacttcctgcagcccgaactgatgccttcacagttagcttttagagatttaatgtgggatgctactgaaggaacgatcagatcccgcccctcccggatttctctgattttgaccctgtggagctgcaagatgatccccctccccgggatgtctatccaagtcttatctcgccatgtgaggctgtgcctatttgatgggaacaaggtgctgagtaatatacacacagttagagcaacttggcaacccaagaagccaaaaacttggacctttagtccccaggtgacacgcattctgccgtgcctacttgacggagactgttttatccgcagcaattctgcctcccccgatctgggaatcttgtttgaactgggaattagctacatcagaaatagcaccggagagcggggagaattatcctgcggatgggtattcctgaagctgtttgatgcgagtggcgtgccgattccagccaagacatatgagctgtttcttaatggggggaccccttacgagaaaggcattgaagtagaccctagcatctccaggcgcgcccatggatcagtcttctaccagatcatgaccatgagacgccaaccccagctcctagtgaagctgcgctctcttaataggaggagccgcaatgtactgagtcttctgccagagacgctcatcgggaacatgtgtagtatccatctacttatattctaccgacaaattttgggagatgttctcctcaaggataggatgtctctccagtcaactgacctgatttcacatcccatgcttgcgacttttccaatgcttttagagcagccagacgtaatggacgcccttcgcagctcttgggcgggtaaggagtctactctcaaaaggagcgagaaacgcgataaagagttcctcaagagcacatttctgctggtgtaccacgattgtgtgcttcctctcttgcacagcactagactgccaccgttcaggtgggccgaggaagaaactgaaacagctcgctggaaggttatcaccgacttccttaagcagaatcaggaaaaccagggcgccctgcaggcactgctgtcccccgacggagtgcatgaacccttcgatctgtccgaacaaacttacgatttcctgggggaaatgagaaagaacgcggtgtag

SEQ ID NO: 265014 - DNA, 2199 bp, Artificial Sequence
  derived and/or modified sequence
atgctggcccggcggcagagggaccccctgcaggccctgcggcggaggaaccaggagctgaagcagcaggtggacagcctgctgtctgagagccagctgaaggaggccctggagcccaacaagaggcagcacatctaccagcgctgcatccagctgaagcaggccattgatgagaacaagaatgccctgcagaagctgagcaaggcagatgagagcgcccctgtggccaactacaaccagaggaaggaggaggagcacaccctgctggacaagctgacccagcagctgcagggcctggccgtgaccatcagccgggagaacatcacagaggtgggcgcccccacagaggaggaggaggagagcgagagcgaggacagtgaagattctggaggagaggaggaggatgctgaggaggaggaggaggagaaggaggagaatgaaagccacaagtggagcactggagaggagtacatcgctgtgggggacttcaccgcccagcaggtgggggacctgaccttcaagaagggggagatcctgctggtgattgagaagaagccagatggctggtggatcgccaaggatgccaagggaaatgaaggcctggtgcccaggacctacctggagccctacagcgaggaggaggagggccaggagagcagcgaggagggcagcgaggaggatgtggaggccgtggatgaaacagcagatggagctgaggtgaagcagaggacagacccccactggagcgctgtgcagaaggccatcagcgaggccggcatcttctgcctggtgaaccacgtgtccttctgctacctgattgtgctgatgaggaacaggatggagaccgtggaggacaccaatggaagtgaaacaggcttccgggcctggaatgtgcagagccggggccgcatcttcctggtgtccaagcctgtgctgcagatcaacacagtggatgtgctgaccaccatgggcgccatcccagctggcttccggcccagcaccctgagccagctgctggaggagggcaaccagttccgggccaactacttcctgcagcctgagctgatgcccagccagctggccttccgggacctgatgtgggatgccacagagggcaccatccgcagccggcccagccgcatcagcctcatcctgaccctgtggagctgcaagatgatccccctgcccggcatgagcatccaggtgctgagccgccacgtgcggctgtgcctgtttgatggcaacaaggtgctgagcaacatccacacagtgcgggccacctggcagcccaagaagcccaagacctggaccttcagcccccaggtgacccgcatcctgccctgcctgctggatggagactgcttcatccgcagcaacagcgccagcccagacctgggcatcctgtttgagctgggcatctcctacatccggaacagcactggagagcggggggagctgagctgtggctgggtgttcctgaagctgtttgatgccagcggcgtgcccatcccagccaagacctatgagctgttcctgaatggaggcaccccctatgagaagggcatcgaggtggaccccagcatcagccggcgggcccacggctctgtgttctaccagatcatgaccatgaggcggcagccccagctgctggtgaagctgcggagcctgaacagaagaagcagaaatgtgctgagcctgctgcctgagaccctcatcggcaacatgtgcagcatccacctgctgatcttctaccggcagatcctgggagatgtgctgctgaaggacaggatgagcctgcagagcacagacctgatcagccaccccatgctggccaccttccccatgctgctggagcagccagatgtgatggatgccctgcggagctcctgggccggcaaggagagcaccctgaagaggtctgagaagagggacaaggagttcctgaagagcaccttcctgctggtgtaccatgactgtgtgctgcccctgctgcacagcacccggctgccccccttccgctgggccgaggaggagacagaaacagcccgctggaaggtgatcacagacttcctgaagcagaaccaggagaaccagggcgccctgcaggccctgctgagcccagatggagtgcatgagccctttgacctgtctgagcagacctatgacttcctgggggagatgaggaagaatgctgtgtag

SEQ ID NO: 265015 - DNA, 2199 bp, Artificial Sequence
  derived and/or modified sequence
atgctggcccggcggcagcgggaccccctgcaggccctgcggcggaggaaccaggaacttaaacagcaggtcgacagtctgttgagcgagtctcagctaaaagaggcccttgaaccaaataagcgccagcacatttatcagagatgtattcaattaaagcaggctatagacgagaacaaaaatgctctgcagaaactgtccaaggctgatgaatcagctcctgtcgctaactacaatcaacgcaaggaggaggaacataccctgctcgataaactgactcaacagcttcagggccttgccgtgacaatttctcgcgagaatatcaccgaggttggtgcacctaccgaggaggaggaagagagcgagagtgaggactcagaggacagcggcggggaagaagaggacgcggaagaagaggaggaggagaaagaagagaatgagtcacataaatggtccaccggtgaggagtacatcgccgtgggcgattttaccgcccaacaggttggagatctcacctttaagaaaggcgagatactgttggttatcgaaaagaagcctgatgggtggtggattgcaaaagatgccaaggggaacgaggggctggtccccaggacatacctcgagccttattctgaggaggaggagggccaggaatcgtctgaggagggctctgaagaggacgtggaggcagtggatgagaccgccgatggggcggaagtcaagcagcggacagatccacattggagcgccgtgcagaaagcgatatcagaagccggcattttctgcctcgtgaatcacgtatccttctgctatctgatagtgttaatgagaaatcgaatggagaccgttgaggatactaacggtagcgagaccggctttcgggcctggaacgttcagagtcgcggaaggatatttttagtgagcaagcccgtgctacagataaataccgtggatgtgctcacaacaatgggggcaattcctgctggtttcagaccatcaacattgagccaactgctggaggagggtaatcagtttagagcaaactacttcctacaacctgagctgatgccatctcagctcgcttttcgggatttaatgtgggatgctactgaagggaccatccgatcgcggcctagtcgtatctccttgatccttactctctggtcctgcaagatgatccccctgcccggcatgagcatacaggtgctgagcagacatgtccgattatgtttattcgacggtaataaggtactctccaacatccatacagtgagggctacctggcagcccaagaagcccaagacatggaccttctctccgcaggtgacacgcatactaccgtgtctgctagacggcgactgctttattaggtctaactcagccagcccagacctgggcatcctctttgaactaggcatctcctatatccgaaattcaaccggggagcgcggggagttgtcatgtggctgggtgttcctgaaactctttgatgcaagcggtgttcccatacccgccaagacctatgaactcttcctaaatgggggaactccttatgaaaaagggatagaggtcgatccaagcattagtcgccgcgctcacgggtcagtgttttaccagatcatgaccatgagacgccagcctcaacttctggtgaagctgcgaagcctgaatagaaggtcgaggaatgtcctttctttgttgccggagaccctgatcggaaacatgtgcagcatccatctgctcattttttatagacaaatcttgggcgatgtgctcctgaaggatagaatgagcctccagtcgactgatttgatttcgcatcctatgctcgctacctttcccatgctgctagaacaaccagacgtgatggacgctctgaggagttcttgggccggcaaggagagtacacttaaacggtctgagaagagagataaggaattccttaagtccacttttttgcttgtatatcacgattgtgtgcttccactattacacagtacaaggcttcccccttttcggtgggcagaggaggagaccgaaaccgctaggtggaaagtgatcacagactttctgaagcagaatcaagaaaaccagggcgccctgcaagcgcttctatcccccgacggtgtccacgaaccctttgacctttccgaacaaacctacgattttctcggagaaatgagaaagaacgccgtctag

SEQ ID NO: 265016 - DNA, 2752 bp, Artificial Sequence
  derived and/or modified sequence
ggggctgggaggcgggcgcacatcgatggcgtcaccttctggcgccgccggttggtttccctggcaactggagcaatcagagcaccgcagccagggagatgctggcgagacgacagcgagatcctctccaggccctgcggcgccgcaatcaggagctgaagcaacaggttgatagtttgctttctgagagccaactgaaagaagctctagaacccaataaaagacaacatatttatcaaagatgtatccagttaaagcaggcaatagatgaaaataaaaatgctcttcaaaaattaagcaaagctgatgaatctgcacctgttgcaaactataatcagagaaaagaagaggagcatactcttttggacaagcttacccaacaactgcagggccttgctgtgacaataagcagagaaaatataactgaagttggggcacctactgaagaagaggaagaaagtgaaagtgaagatagtgaagacagtggtggggaggaagaagatgcagaggaggaagaggaagagaaagaggaaaatgaatctcacaaatggtcaaccggtgaagaatacatcgctgttggagattttactgctcagcaagttggagatcttacatttaagaaaggggaaattctccttgtaattgaaaaaaaacctgatggttggtggatagctaaggatgccaaaggaaatgaaggtcttgttcccagaacctacctagagccttatagtgaagaagaagaaggccaagagtcaagtgaagagggcagtgaagaagatgtagaggcggtggatgaaacagcagatggagcagaagttaagcaaagaactgatccccactggagtgctgttcagaaagcgatttcagaggcgggcatcttctgtcttgttaatcatgtctcgttttgctacctaatagttctgatgcgaaataggatggagactgtggaagacaccaatggatctgaaacagggttcagggcatggaatgtacagagcagaggacgtatatttctggtttctaagcctgtgctccaaataaacactgttgatgtgttaactacgatgggagctattcctgcagggttcaggccttccacgctctcacagcttctggaggaagggaatcaatttcgagcaaattacttcttacaaccagagctcatgccttcacaactggccttcagagatctgatgtgggatgctacagaaggcactattaggtcgagaccaagtcgtatttcattgattctgacattatggagctgtaaaatgattcctcttccaggaatgagcatacaggttctcagcagacatgtacgcctctgtctatttgatggtaataaggttctgagcaacattcatacagtcagagccacatggcaacctaaaaagcccaaaacatggaccttttctccccaggttactcgcatcttaccatgtttgcttgatggtgattgctttatcaggtctaattctgcatctccagatcttggaatattatttgaacttggaatttcttatattcgcaattcaactggtgaaagaggagagttaagctgtggctgggtgtttcttaaactttttgatgccagtggagttcctattccagcaaaaacttatgagcttttcttgaatggtggtactccttatgaaaaaggtattgaagtggacccttcaatatccagaagagcacacggcagtgttttctaccagattatgacaatgagaaggcagcctcaacttctagtgaaactgagatccttgaacagaagatcaagaaatgtactaagtctactgccagaaacattaattggaaatatgtgttctattcacttgttgatattttatcgacaaattcttggagatgtgctcctgaaagacaggatgagcttgcaaagtactgatttaattagccatcccatgctggccaccttccccatgctcttggagcagcctgatgtgatggatgctctcaggagttcgtgggctggaaaagaaagcacattaaaaagatcagagaagagagacaaagagttcctgaagtccacgtttctcctggtttaccatgactgcgtgctcccacttctccactccacacgcctacccccattcaggtgggcagaagaagagactgagactgcacggtggaaagttatcactgacttccttaagcaaaaccaagaaaaccagggcgccctccaagctctgctgtcaccagacggagttcatgaaccttttgacctttcagagcagacctatgacttcttgggtgaaatgagaaagaatgcagtgtgacagtggcagcctctagccctcagcttcccacggaatcagatggatcctccacgattacgtgaataaaatgatggaaccaaaaatcactgtcactttacaacttaggttttactcttttctttctacagaccatatttttaaagaaatgtttatacaataatttaaatattttttaaaaccataaaataaatttttataaggaatactgttatatctaaatttaaacagtatttattttttcaaaaacagctacttaagttaatggtatagatttctataaaagcaagattttgtcaaaaactaaatttatgattattcaagaaagtgaaaaaaacaacctacagaatgggaaaacatatttgcaaatcatctaactgataaaggtctagtatccaaaatatttaaatttatgagtgttaataaaatttatcttgttcaatgaagaggaagttaaa

SEQ ID NO: 265017 - DNA, 2199 bp, Artificial Sequence
  derived and/or modified sequence
atgctggccaggcggcagagggacccactgcaagcactccgcaggcggaatcaagagctcaaacagcaagttgactcactcctctctgagagtcagctgaaggaggccttggagcccaacaagagacagcacatctaccagcgatgcattcagctgaagcaggctatcgacgaaaacaaaaatgccctccaaaaactaagcaaggccgatgagagtgcgccagtggctaattataaccagagaaaggaagaggaacatacccttttggacaaacttacccagcagttgcagggcctggctgtgactatctcacgagagaatatcaccgaagttggggctccaaccgaggaagaggaggagagcgagtctgaggactccgaagattctggtggggaggaggaagacgctgaggaggaggaagaggagaaggaggagaatgaaagtcacaaatggagcactggcgaagagtacatagccgtgggagactttacagctcagcaggtgggtgacctgactttcaagaaaggggagatccttttggtaatcgagaaaaaacctgatggttggtggatagccaaggacgcgaagggcaacgagggcctggtacctcggacatatctcgaaccttactcggaagaagaagaaggccaggagagcagtgaggagggaagtgaggaagatgttgaggccgtggacgaaaccgcagatggcgcagaagtgaagcagcgcaccgatccccattggtcagctgtgcaaaaagcgatttctgaggctggcatcttctgcctcgtgaaccatgtttcattctgttacctcattgtgctgatgcgaaacaggatggagactgtcgaggataccaatggatctgaaacgggtttccgcgcttggaatgtgcaatccagaggccgaatcttcctcgtgtctaaacccgttctgcagatcaacacagttgatgtgctcaccaccatgggcgctatacccgcaggtttcaggccaagtacgctgtcccaacttctggaggaaggcaaccagttccgggcaaactactttctgcaaccggagctcatgccctcgcagctggcgttcagagacttgatgtgggatgcaactgaaggaacaattcgatcccggccttcacggatttcactgatcctaacactttggagctgtaagatgattcctctgcctggcatgtcaatccaggtgctgtcaagacacgtgaggttatgcctgtttgacgggaataaggttttgagtaacatccacacagtcagggcgacatggcagccaaaaaagcctaaaacatggacgtttagccctcaggtgacacgcattttgccctgcctcctggatggtgattgcttcatcaggagcaatagcgcaagccccgacctgggaattctgttcgaactggggatttcctatatccgcaactccacaggagaacgcggagagctctcctgcggctgggtgtttctgaaactgttcgacgctagcggggtaccaatccctgctaagacttacgagctgttcctgaacggcggtaccccctacgaaaaaggcatcgaagtggaccctagtatcagccgaagagcccacggcagcgtgttctaccaaataatgactatgcggaggcaacctcagctactcgtgaagcttcgcagcttaaatcggagatcaagaaacgtattgagcttactccctgagactctcattgggaatatgtgctccatacacctgctaatcttttacaggcaaatcctgggggatgtgcttctcaaagaccgtatgagcctccagagtactgatctgattagtcaccctatgctggcaacgtttcctatgcttttggaacagcccgacgtgatggacgctctcaggagctcttgggcgggaaaagagtccaccctgaaaaggagcgagaagcgcgataaagagttcctcaaatccactttcttactcgtctatcacgactgcgtgctgccgcttctccattctactcgactccccccattccggtgggctgaggaagaaactgagaccgcgaggtggaaagtgatcacagacttcttaaagcagaatcaggaaaatcagggagcattgcaggctctccttagcccagacggggtgcacgagcccttcgacctctccgagcagacctatgacttcctgggcgaaatgcggaagaacgcagtttag

SEQ ID NO: 265018 - DNA, 2199 bp, Artificial Sequence
  derived and/or modified sequence
atgctggccagaagacagagagaccccctgcaggccctgagaagaagaaaccaggagctgaagcagcaggtggacagcctgctgagcgagagccagctgaaggaggccctggagcccaacaagagacagcacatctaccagagatgcatccagctgaagcaggccatcgacgagaacaagaacgccctgcagaagctgagcaaggccgacgagagcgcccccgtggccaactacaaccagagaaaggaggaggagcacaccctgctggacaagctgacccagcagctgcagggcctggccgtgaccatcagcagagagaacatcaccgaggtgggcgcccccaccgaggaggaggaggagagcgagagcgaggacagcgaggacagcggcggcgaggaggaggacgccgaggaggaggaggaggagaaggaggagaacgagagccacaagtggagcaccggcgaggagtacatcgccgtgggcgacttcaccgcccagcaggtgggcgacctgaccttcaagaagggcgagatcctgctggtgatcgagaagaagcccgacggctggtggatcgccaaggacgccaagggcaacgagggcctggtgcccagaacctacctggagccctacagcgaggaggaggagggccaggagagcagcgaggagggcagcgaggaggacgtggaggccgtggacgagaccgccgacggcgccgaggtgaagcagagaaccgacccccactggagcgccgtgcagaaggccatcagcgaggccggcatcttctgcctggtgaaccacgtgagcttctgctacctgatcgtgctgatgagaaacagaatggagaccgtggaggacaccaacggcagcgagaccggcttcagagcctggaacgtgcagagcagaggcagaatcttcctggtgagcaagcccgtgctgcagatcaacaccgtggacgtgctgaccaccatgggcgccatccccgccggcttcagacccagcaccctgagccagctgctggaggagggcaaccagttcagagccaactacttcctgcagcccgagctgatgcccagccagctggccttcagagacctgatgtgggacgccaccgagggcaccatcagaagcagacccagcagaatcagcctgatcctgaccctgtggagctgcaagatgatccccctgcccggcatgagcatccaggtgctgagcagacacgtgagactgtgcctgttcgacggcaacaaggtgctgagcaacatccacaccgtgagagccacctggcagcccaagaagcccaagacctggaccttcagcccccaggtgaccagaatcctgccctgcctgctggacggcgactgcttcatcagaagcaacagcgccagccccgacctgggcatcctgttcgagctgggcatcagctacatcagaaacagcaccggcgagagaggcgagctgagctgcggctgggtgttcctgaagctgttcgacgccagcggcgtgcccatccccgccaagacctacgagctgttcctgaacggcggcaccccctacgagaagggcatcgaggtggaccccagcatcagcagaagagcccacggcagcgtgttctaccagatcatgaccatgagaagacagccccagctgctggtgaagctgagaagcctgaacagaagaagcagaaacgtgctgagcctgctgcccgagaccctgatcggcaacatgtgcagcatccacctgctgatcttctacagacagatcctgggcgacgtgctgctgaaggacagaatgagcctgcagagcaccgacctgatcagccaccccatgctggccaccttccccatgctgctggagcagcccgacgtgatggacgccctgagaagcagctgggccggcaaggagagcaccctgaagagaagcgagaagagagacaaggagttcctgaagagcaccttcctgctggtgtaccacgactgcgtgctgcccctgctgcacagcaccagactgccccccttcagatgggccgaggaggagaccgagaccgccagatggaaggtgatcaccgacttcctgaagcagaaccaggagaaccagggcgccctgcaggccctgctgagccccgacggcgtgcacgagcccttcgacctgagcgagcagacctacgacttcctgggcgagatgagaaagaacgccgtgtag

SEQ ID NO: 265019 - protein, 315 aa, Artificial Sequence
  derived and/or modified sequence
MMWENWTIVSEFVLVSFSALSTELQALLFLLFLTIYLVTLMGNVLIILVTIADSALQSPMYFFLRNLSFLEIGFNLVIVPKMLGTLIIQDTTISFLGCATQMYFFFFFGAAECCLLATMAYDRYVAICDPLHYPVIMGHISCAQLAAASWFSGFSVATVQTTWIFSFPFCGPNRVNHFFCDSPPVIALVCADTSVFELEALTATVLFILFPFLLILGSYVRILSTIFRMPSAEGKHQAFSTCSAHLLVVSLFYSTAILTYFRPQSSASSESKKLLSLSSTVVTPMLNPIIYSSRNKEVKAALKRLIHRTLGSQKL

SEQ ID NO: 265020 - DNA, 948 bp, Artificial Sequence
  derived and/or modified sequence
atgatgtgggagaactggaccatcgtgagcgagttcgtgctggtgagcttcagcgccctgagcaccgagctgcaggccctgctgttcctgctgttcctgaccatctacctggtgaccctgatgggcaacgtgctgatcatcctggtgaccatcgccgacagcgccctgcagagccccatgtacttcttcctgagaaacctgagcttcctggagatcggcttcaacctggtgatcgtgcccaagatgctgggcaccctgatcatccaggacaccaccatcagcttcctgggctgcgccacccagatgtacttcttcttcttcttcggcgccgccgagtgctgcctgctggccaccatggcctacgacagatacgtggccatctgcgaccccctgcactaccccgtgatcatgggccacatcagctgcgcccagctggccgccgccagctggttcagcggcttcagcgtggccaccgtgcagaccacctggatcttcagcttccccttctgcggccccaacagagtgaaccacttcttctgcgacagcccccccgtgatcgccctggtgtgcgccgacaccagcgtgttcgagctggaggccctgaccgccaccgtgctgttcatcctgttccccttcctgctgatcctgggcagctacgtgagaatcctgagcaccatcttcagaatgcccagcgccgagggcaagcaccaggccttcagcacctgcagcgcccacctgctggtggtgagcctgttctacagcaccgccatcctgacctacttcagaccccagagcagcgccagcagcgagagcaagaagctgctgagcctgagcagcaccgtggtgacccccatgctgaaccccatcatctacagcagcagaaacaaggaggtgaaggccgccctgaagagactgatccacagaaccctgggcagccagaagctgtag

SEQ ID NO: 265021 - DNA, 948 bp, Artificial Sequence
  derived and/or modified sequence
atgatgtgggaaaactggactatcgtgtccgagttcgtgttggtttcctttagtgccctctctacagagcttcaggctctcctgttcctcttgttcctaacgatttatctcgtgacactcatgggtaacgtccttatcatcctagtgacaatcgccgatagtgccttgcaatctcctatgtatttcttcctcagaaacctcagcttcctcgagatcggattcaacctggtgatcgttcccaagatgctcggcactttgataattcaagacactacgatctctttcctgggttgcgccacacagatgtacttttttttcttcttcggtgccgctgagtgttgtctgcttgctaccatggcttatgatagatacgttgcaatctgcgatccgctccattatcctgtgattatgggtcatatctcatgtgctcaactggccgccgcttcctggttttccggcttctcggtggctacagtgcagactacatggattttctcatttcctttctgtggaccaaatcgcgtcaaccatttcttttgcgacagtcctcctgtgattgccctggtgtgcgcagacacctctgtgttcgaactggaagcattgactgccaccgtgttattcattctgttcccttttcttctgattctgggttcttatgtgaggattctgtcaactattttccgcatgccatctgccgagggcaagcaccaggctttcagtacttgttcagcccatcttctcgtggtgagccttttctactccactgcgatcctcacctatttccggccccagtcttctgcctcctccgagagcaagaagctgctgtcactctccagcaccgtcgtgaccccaatgctgaacccaataatttattctagtagaaataaggaggtgaaggccgcactgaagagactgatccacaggaccttaggatcccaaaagctgtag

SEQ ID NO: 265022 - DNA, 948 bp, Artificial Sequence
  derived and/or modified sequence
atgatgtgggagaactggaccatcgtgtctgaatttgtgctggtgtccttcagcgccctgagcacagagctgcaggccctgctcttcctgctcttcctgaccatctacctggtgaccctgatgggaaatgtgctgatcatcctggtgaccatcgctgacagcgccctgcagagccccatgtacttcttcctgaggaacctgtccttcctggagatcggcttcaacctggtgattgtgcccaagatgctgggcaccctcatcatccaggacaccaccatctccttcctgggctgtgccacccagatgtacttcttcttcttcttcggggctgctgagtgctgcctgctggccaccatggcctatgaccgctacgtggccatctgtgaccccctgcactaccctgtgatcatgggccacatcagctgtgcccagctggccgccgcctcctggttcagcggcttctctgtggccaccgtgcagaccacctggatcttctccttccccttctgtggccccaacagagtgaaccacttcttctgtgacagcccccctgtgattgccctggtgtgtgccgacacctctgtgtttgagctggaggccctgacagccaccgtgctcttcatcctcttccccttcctgctgatcctgggcagctatgtgcgcatcctgagcaccatcttcaggatgcccagcgctgagggcaagcaccaggccttcagcacctgcagcgcccacctgctggtggtgtccctcttctacagcacagccatcctgacctacttccggccccagagcagcgccagcagcgagagcaagaagctgctgagcctgagcagcacagtggtgacccccatgctgaaccccatcatctacagcagcaggaacaaggaggtgaaggccgccctgaagaggctcatccacaggaccctgggcagccagaagctgtag

SEQ ID NO: 265023 - DNA, 995 bp, Artificial Sequence
  derived and/or modified sequence
ccagtgaagtcctgggcagaagaatgatgtgggaaaactggacaattgtcagtgaatttgttctcgtgagcttctcagccctgtccactgagcttcaggctctactgtttctccttttcttgaccatttacttggttactttaatgggcaatgtcctcatcatcctggtcactatagctgactctgcactacaaagtcctatgtacttcttcctcagaaacttgtccttcctggagataggtttcaacttggtcattgtgcccaagatgctggggaccctgatcattcaagacacaaccatctccttccttggatgtgccactcagatgtatttcttcttcttttttggggctgctgagtgctgcctcctggccaccatggcatatgaccgctacgtggccatctgtgaccccttgcactacccagtcatcatgggccacatatcctgtgcccagctggcagctgcctcttggttctcagggttttcagtggccactgtgcaaaccacatggattttcagtttccctttttgtggccccaacagggtgaaccacttcttctgtgacagccctcctgttattgcactggtctgtgctgacacctctgtgtttgaactggaggctctgacagccactgtcctattcattctctttcctttcttgctgatcctgggatcctatgtccgcatcctctccactatcttcaggatgccgtcagctgaggggaaacatcaggcattctccacctgttccgcccacctcttggttgtctctctcttctatagcactgccatcctcacgtatttccgaccccaatccagtgcctcttctgagagcaagaagctgctgtcactctcttccacagtggtgactcccatgttgaaccccatcatctacagctcaaggaataaagaagtgaaggctgcactgaagcggcttatccacaggaccctgggctctcagaaactatgattggcttagatggaaactgaaggg

SEQ ID NO: 265024 - DNA, 948 bp, Artificial Sequence
  derived and/or modified sequence
atgatgtgggagaactggaccatcgtgagcgagttcgtgctggtgtcattcagtgcactgtccacagagttgcaggcactcctatttctcctgttcctcactatttatctagttactctcatgggaaacgtgctaattatcctggttacaattgccgactctgccctccagtcacctatgtacttcttcctgcgaaatctgtcttttctcgaaataggatttaacttggtgatcgttccaaagatgctgggcacgctcattatccaggacacaacaatcagcttcctgggctgtgcaacccagatgtatttttttttttttttcggcgctgcggaatgttgcctcctcgctactatggcctatgatcgctacgtggcaatatgcgacccgttacactatccagtgatcatgggacatattagctgcgctcagttagcggccgcgagctggtttagcggcttcagtgtggcaacagtgcagaccacatggattttcagtttcccgttttgtggccccaaccgggttaaccactttttctgcgacagtccccccgtgattgcactggtgtgcgctgacactagtgttttcgagctggaagctctgaccgctacagttctgttcatcctgtttccatttctactgatcttgggatcctacgtcaggattctttccaccatcttccgcatgcctagtgccgaaggcaagcatcaagccttctcaacttgctccgcccacctcctggtggtgtctttgttttattccacagctatcctcacctatttcaggccacaatcctccgctagcagcgagagcaagaagctgttgagcctgtcatccactgtagtaacacctatgctcaacccaatcatctactcatcccgaaataaggaggtgaaagcagccctcaagcggctaattcaccgcacactgggctcgcagaaactgtag

SEQ ID NO: 265025 - DNA, 948 bp, Artificial Sequence
  derived and/or modified sequence
atgatgtgggagaattggactatagtttccgaattcgttctcgtgtcgttctctgccctgtcaactgagctgcaggcactcctgttcttactttttctcactatttatctggtcactctaatggggaatgtactcatcattctggtcactattgctgacagcgcattgcagtcacccatgtatttttttctccgtaatttgagcttccttgaaatcggcttcaacttggtgattgtccccaagatgctggggaccttaataattcaggacaccactatctcttttctggggtgcgctacccagatgtacttttttttcttcttcggcgctgctgagtgttgtctgctggcaactatggcttatgacagatacgtggccatctgtgatccattacactaccccgtgataatgggacacatatcatgtgctcagctcgccgcagccagttggttctccggattttcagtggccacagtccaaaccacctggatcttctcctttcccttttgtggccctaatagagtgaatcattttttctgcgattccccaccagtcattgctctggtgtgcgccgacacttctgtgttcgaacttgaggcactcactgccactgtgctgtttatccttttccccttcctgctaatactggggagttatgtgcgcattctttctacaatctttcggatgcccagtgcagaaggcaaacaccaggcatttagtacatgtagcgcacaccttttggtcgttagcctattttacagcaccgcaattctgacgtattttagacctcagtcatcagctagctccgaaagcaagaaactgttgtccctgagctctaccgtcgtcacacccatgctcaaccctatcatttacagcagcaggaacaaggaggtgaaagcagcactgaaacgcttgattcatcggactcttggcagccagaaactgtag

SEQ ID NO: 265026 - protein, 772 aa, Artificial Sequence
  derived and/or modified sequence
MRLALLWALGLLGAGSPLPSWPLPNIGGTEEQQAESEKAPREPLEPQVLQDDLPISLKKVLQTSLPEPLRIKLELDGDSHILELLQNRELVPGRPTLVWYQPDGTRVVSEGHTLENCCYQGRVRGYAGSWVSICTCSGLRGLVVLTPERSYTLEQGPGDLQGPPIISRIQDLHLPGHTCALSWRESVHTQKPPEHPLGQRHIRRRRDVVTETKTVELVIVADHSEAQKYRDFQHLLNRTLEVALLLDTFFRPLNVRVALVGLEAWTQRDLVEISPNPAVTLENFLHWRRAHLLPRLPHDSAQLVTGTSFSGPTVGMAIQNSICSPDFSGGVNMDHSTSILGVASSIAHELGHSLGLDHDLPGNSCPCPGPAPAKTCIMEASTDFLPGLNFSNCSRRALEKALLDGMGSCLFERLPSLPPMAAFCGNMFVEPGEQCDCGFLDDCVDPCCDSLTCQLRPGAQCASDGPCCQNCQLRPSGWQCRPTRGDCDLPEFCPGDSSQCPPDVSLGDGEPCAGGQAVCMHGRCASYAQQCQSLWGPGAQPAAPLCLQTANTRGNAFGSCGRNPSGSYVSCTPRDAICGQLQCQTGRTQPLLGSIRDLLWETIDVNGTELNCSWVHLDLGSDVAQPLLTLPGTACGPGLVCIDHRCQRVDLLGAQECRSKCHGHGVCDSNRHCYCEEGWAPPDCTTQLKATSSLTTGLLLSLLVLLVLVMLGASYWYRARLHQRLCQLKGPTCQYSLRGQPSPHPQGSHCLPTPRAGAHRVTCPAQGLESRP

SEQ ID NO: 265027 - DNA, 2319 bp, Artificial Sequence
  derived and/or modified sequence
atgcgactcgctctcttgtgggcccttggtctgctgggcgccggttcccctctcccctcttggcccctgcccaacatcggcggcacagaggagcaacaggccgaaagtgagaaggcccctcgagaacccttagagccacaggtgcttcaggatgatttgcctattagcctgaaaaaagtgctgcaaacgtctttacctgaaccactgcggatcaaactagagttggatggcgacagccacatcctcgaattgcttcagaaccgagaactcgtgccgggccggccaaccttggtttggtatcagcctgatggcacgcgcgtggtctccgaaggccatacgctggaaaactgctgctaccaggggagggtcagaggttatgccggatcatgggtttccatttgcacatgcagtggcctccgcggtcttgttgttctcacaccagagcgctcctacacactagaacagggaccgggagatctccagggaccacctattatatctcggatacaagatttacatctaccgggccacacctgcgccctgagctggcgggagtctgtccatactcaaaagccccccgagcatcctctgggccaacggcatattcggaggagacgtgatgtggtcactgagactaaaactgttgagttggtcatcgtagcagatcacagtgaggcccagaagtacagggactttcagcacctactgaatagaaccctcgaagtcgctctgctgctagacacctttttccggccgctcaatgtgagggtggctctggtcggcctggaggcctggacgcagagagatttggtagaaatctcaccgaaccccgccgtgacccttgagaacttcctccactggcgacgggctcatctcctaccacggctgccccatgatagtgcacaactggttaccggaaccagctttagtggtccaaccgtgggcatggccattcaaaactcgatctgctcccccgatttcagtggaggagtgaacatggatcactctacttccattctaggagtggcctcatcaatcgcccacgaactgggacactctttgggattggatcacgacctgcccgggaattcatgtccctgtccgggtcctgccccagcgaagacctgtatcatggaggcatctactgattttttacccggtctcaacttctctaactgctctcgaagggcccttgaaaaagccctgctcgacggaatggggagctgtttgttcgagaggctaccctctttgccacctatggccgccttttgtggaaatatgttcgttgagccaggcgaacagtgtgactgcggtttcttggacgactgcgtggacccgtgttgcgatagtttaacatgccagctgaggcctggggcacagtgtgcctctgatggtccgtgctgccagaactgtcaactcaggccctcaggttggcagtgccgacccacccgcggagattgcgacctacccgagttttgtcccggtgattcgagccagtgtccacccgacgtctcgctgggggatggcgaaccttgcgcggggggccaggccgtctgtatgcatggaagatgtgcatcatatgctcaacagtgccaatctctatggggaccaggcgcgcagcctgccgcgcctctgtgcttgcagactgccaacacaagagggaatgcctttggaagttgtggcagaaacccatccgggtcctatgtcagctgcacaccaagggacgccatctgtgggcagctacagtgccagactggccgcacgcaaccactcctcggcagcatacgagatctcctgtgggaaacaatcgatgtgaacggcaccgagctgaactgcagttgggtccacttggatcttggctctgatgtggcccaaccgctgctgacacttcccggcacagcatgtgggccaggtctggtgtgtatagatcataggtgccaacgggttgatctgctgggcgctcaggagtgtagaagtaagtgtcacggccacggtgtttgcgatagcaaccgtcattgctattgtgaggaaggctgggcccctcccgattgcaccactcagctgaaggctacttcgagtctgaccactggcctgctcctttctctgctcgtgctactggtgttggttatgctgggcgcgtcttattggtaccgtgctcggttacaccagagattgtgtcaactcaaagggcctacgtgtcagtactcacttcgcggccaaccttcaccccacccacaggggagccattgcctgcccaccccacgggcaggcgcacatagagtgacatgccccgcacagggactggaatcaagaccctag

SEQ ID NO: 265028 - DNA, 2319 bp, Artificial Sequence
  derived and/or modified sequence
atgaggctggccctgctgtgggccctgggcctgctgggcgccggcagccccctgcccagctggcccctgcccaacatcggcggcacagaggagcagcaggccgagagcgagaaggccccccgggagcccctggagccccaggtgctgcaggatgacctgcccatcagcctgaagaaggtgctgcagaccagcctgcctgagcccctgcgcatcaagctggagctggatggagacagccacatcctggagctgctgcagaaccgggagctggtgcccggccggcccaccctggtgtggtaccagccagatggcaccagggtggtgtctgagggccacaccctggagaactgctgctaccagggccgggtgcggggctacgccggctcctgggtgtccatctgcacctgcagcggcctgcggggcctggtggtgctgaccccagagaggagctacaccctggagcagggccctggggacctgcagggcccccccatcatcagccgcatccaggacctgcacctgcccggccacacctgtgccctgtcctggagggagagcgtgcacacccagaagcccccagagcaccccctgggccagaggcacatcagaagaagaagagatgtggtgacagagaccaagacagtggagctggtgattgtggccgaccacagcgaggcccagaagtacagagacttccagcacctgctgaacagaaccctggaggtggccctgctgctggacaccttcttccggcccctgaatgtgcgggtggccctggtgggcctggaggcctggacccagagggacctggtggagatcagccccaacccagctgtgaccctggagaacttcctgcactggaggcgggcccacctgctgccccggctgccccatgacagcgcccagctggtgacaggcaccagcttcagcggccccaccgtgggcatggccatccagaacagcatctgcagcccagacttcagcggcggcgtgaacatggaccacagcaccagcatcctgggcgtggccagcagcatcgcccacgagctgggccacagcctgggcctggaccatgacctgcccggcaacagctgcccctgccccggccctgccccagccaagacctgcatcatggaggccagcacagacttcctgcccggcctgaacttcagcaactgcagcagaagagccctggagaaggccctgctggatggcatgggcagctgcctgtttgagcggctgcccagcctgccccccatggccgccttctgtggcaacatgtttgtggagcctggagagcagtgtgactgtggcttcctggatgactgtgtggacccctgctgtgacagcctgacctgccagctgcggcctggggcccagtgtgccagtgatggcccctgctgccagaactgccagctgcggcccagcggctggcagtgccggcccaccaggggggactgtgacctgcctgagttctgccctggggacagcagccagtgccccccagatgtgtccctgggagatggagagccctgtgccggcggccaggccgtgtgcatgcacggccgctgtgccagctatgcccagcagtgccagagcctgtggggccctggggcccagcctgctgcccccctgtgcctgcagacagccaacaccagaggaaatgccttcggcagctgtggcaggaaccccagcggcagctatgtgtcctgcaccccaagagatgccatctgtggccagctgcagtgccagacaggccgcacccagcccctgctgggcagcatccgggacctgctgtgggagaccattgatgtgaatggaacagagctgaactgctcctgggtgcacctggacctgggcagtgatgtggcccagcccctgctgaccctgcctggaacagcctgtggccctggcctggtgtgcatcgaccaccgctgccagagggtggacctgctgggcgcccaggagtgccgcagcaagtgccacggccacggcgtgtgtgacagcaacagacactgctactgtgaggagggctgggcccccccagactgcaccacccagctgaaggccaccagcagcctgaccaccggcctgctgctgagcctgctggtgctgctggtgctggtgatgctgggcgccagctactggtaccgggcccggctgcaccagaggctgtgccagctgaagggccccacctgccagtacagcctgcggggccagcccagcccccacccccagggcagccactgcctgcccaccccccgggccggggcccaccgggtgacctgcccagcccagggcctggagagccggccctag

SEQ ID NO: 265029 - DNA, 2319 bp, Artificial Sequence
  derived and/or modified sequence
atgcggctggccctgctgtgggccctgggcctgctgggcgccggctccccactgcctagttggccccttcctaatatcgggggcacggaggagcagcaggccgagtcagagaaagcaccccgcgaacctctcgagccacaggtgctgcaggacgaccttcccatcagcctgaagaaagtcttgcagacgagcctccctgaaccactcagaattaagctggagctggacggcgactcccatattctcgagctgctgcagaaccgtgaactagtccctggacggccgaccctggtatggtatcagcctgacggcacaagagtcgtctccgaaggacacacccttgagaactgctgttaccaaggacgtgtgcggggatacgctggttcatgggtgagcatctgtacttgctccggtctgaggggcctggtagttctgacgccagaaagatcctacacactggaacagggtcccggcgacctgcaaggtccacccatcatctctcgtattcaggatctgcacctccccgggcacacctgcgccctgtcctggagagaatccgtgcatacccagaaacctccggaacaccctttgggccaacgccatatccgtcggcgtagggatgtcgtcaccgagactaagaccgtggagctggtgatcgtagccgatcatagtgaggcgcagaagtacagagacttccagcatctcctgaaccgaaccctggaggtcgcattactcttggatacattttttaggcccttaaacgttcgagtggctctggtcggtttggaagcctggacacagagggatttagtcgagatctcgccaaacccggccgtgaccctcgaaaatttcctgcattggaggagagcccacctcttacctagactgccccacgacagcgcccagctggtcactggcacgtctttctcaggacccacggtaggaatggccatccaaaatagtatctgtagtccagatttcagcggcggagtgaacatggaccactccactagcatcctaggcgtggcatcctccattgcgcatgagttaggtcattctctcggtttagaccatgatcttccagggaacagttgcccctgccccggtccggctccagcgaagacatgcatcatggaggctagcactgactttctcccaggactcaatttctctaattgctcccgacgtgcgctggagaaagcactcctggatggaatggggtcgtgcttgttcgaaagactgccgtccctgccccccatggcagctttctgtggcaatatgttcgtggagcccggagagcagtgcgattgcggcttccttgatgattgcgttgacccgtgctgtgacagtctcacttgccagctgcggcctggtgcccagtgcgcttcagacggcccctgttgtcaaaattgtcaactccggccatccggatggcaatgtagaccaactcgcggggattgcgacctgcccgagttttgtccgggcgactcatcacaatgccctcctgacgtgtccttaggagatggcgagccttgcgcgggcggacaggcagtgtgtatgcatggacgatgcgcctcctatgctcaacaatgccagtccctgtggggccctggcgcacagcctgcggctccattatgcctgcaaactgcgaacacgcgggggaatgcgttcggaagctgcgggaggaacccctcggggagttacgtgtcctgtacccctcgggatgccatttgcggccagctccagtgccagactggtagaacccaacctctcctaggctccatcagggatctactatgggaaaccatcgacgtgaacgggacagagctaaactgcagttgggtccatctggacctggggtctgacgtcgcccagccactgctgactttgcccggtaccgcttgcggacctggactggtgtgcattgaccaccgctgtcagcgagtggacttgctgggcgctcaagaatgtcggagcaagtgtcacggccacggtgtttgtgactccaacagacactgttattgtgaagagggctgggcaccacccgactgcacaacccagctcaaagccacgagctcattaaccaccggcctgctactgagcctcctagtcctgctggtccttgtcatgttgggtgccagctattggtaccgagccagactgcatcaaagactttgtcagctgaagggccccacgtgtcagtacagtctgcgtggacaaccctcaccacacccgcagggatctcattgcctgccaactcctagagctggtgcccatagggtgacctgcccagcgcagggtctcgaaagcagaccctag

SEQ ID NO: 265030 - DNA, 2319 bp, Artificial Sequence
  derived and/or modified sequence
atgcggttagcactgctgtgggcactcggcttgctgggcgctggctctccactgcctagttggcctcttccaaatatcgggggaaccgaggaacagcaggccgagagcgaaaaagcccctagagagcctttagaaccgcaggttctgcaggacgatctgcctatatcccttaagaaagtattgcagacgtctctacctgaacctttaaggattaaactagagttagacggggacagccacatactggaactcctgcagaatagggaactcgtgcccggtcgcccaaccctggtgtggtaccaaccagatggaacgagagtggtctctgagggacatactctggaaaactgctgctatcagggaagagtgaggggatatgccggaagttgggtcagtatctgcacttgttccggcctaaggggtctagttgtgttgacacccgagaggtcatacactctggagcaggggccaggggatctgcagggccctccaatcatatcccgcatacaggacctccacctgcccggtcacacctgcgccctgagctggcgggaaagcgtgcatacacagaaacccccagagcacccacttgggcaacgccatattcgcaggcgcagggacgtagttaccgaaacaaaaacagtcgagctggttattgtcgcggatcactctgaagcacagaaatatcgcgattttcagcaccttctcaacagaacacttgaagtagcactgttgctggacaccttcttcaggccgttaaatgtccgggtagccttagtgggcctggaagcatggacccagagagacctggtagagatcagccccaatcctgcagtcaccctggagaacttcctgcactggagaagggcccatttactgccccgtcttccgcacgacagcgcgcagctcgtcaccggaacttcttttagtggacccacggtgggcatggcaatacagaattccatctgcagccccgacttctctggaggggtgaacatggaccattcaaccagcattctgggcgtagcctctagcattgctcacgaactcggccacagcttaggactggaccacgacctgccaggtaacagttgcccgtgtcccggaccggctccagctaagacatgcattatggaggcgtctaccgactttctgcccggactgaattttagtaattgctctaggcgcgcactggagaaagcgctgctggacggcatgggctcttgcctttttgaacgtctccccagtcttccccctatggccgcattttgcggcaacatgttcgtggagccaggcgagcaatgcgactgtggctttctggatgactgcgtcgatccatgttgcgatagcctgacgtgccagttgagaccaggcgctcagtgcgcctcagacggtccttgttgccagaactgtcagctcagaccttcaggatggcagtgtcgacccaccaggggagattgcgacctcccagagttttgcccaggcgactcctcacaatgtcccccagatgtctctctcggtgacggagagccatgcgccggaggtcaagctgtctgtatgcatggcaggtgcgccagttatgcccaacagtgtcagtcgctctggggacccggtgctcagccagcagcaccactctgcctgcagacagctaacaccagggggaatgcgtttggatcatgtggcaggaacccttctggcagttatgtgtcgtgtacacccagagatgcaatctgtggtcagctccaatgtcaaaccggtcggactcagccactgctggggagtatccgtgacctcctctgggagaccattgacgtcaacggaaccgagttgaattgttcctgggtccatcttgatctcgggtctgatgtggcccaaccactcttgaccctgccagggactgcttgcggcccaggattagtttgtattgaccatagatgtcagagagttgatctcctgggggcacaggagtgcaggagcaagtgtcacgggcatggagtttgtgattccaatagacactgttactgcgaggaaggctgggcccctcctgactgcaccactcagctgaaggccaccagttcccttacaactggactccttttgtcactgctggtgttactcgttctggttatgctgggtgcctcctattggtacagagccagacttcaccagcgcctctgtcagctgaagggtcccacctgccagtatagtctcagaggacaaccctccccccatcctcagggatcccattgtctgcctacacccagggcaggtgcccaccgagtaacctgccctgctcagggactcgaatctcgcccttag

SEQ ID NO: 265031 - DNA, 2319 bp, Artificial Sequence
  derived and/or modified sequence
atgagactggccctgctgtgggccctgggcctgctgggcgccggcagccccctgcccagctggcccctgcccaacatcggcggcaccgaggagcagcaggccgagagcgagaaggcccccagagagcccctggagccccaggtgctgcaggacgacctgcccatcagcctgaagaaggtgctgcagaccagcctgcccgagcccctgagaatcaagctggagctggacggcgacagccacatcctggagctgctgcagaacagagagctggtgcccggcagacccaccctggtgtggtaccagcccgacggcaccagagtggtgagcgagggccacaccctggagaactgctgctaccagggcagagtgagaggctacgccggcagctgggtgagcatctgcacctgcagcggcctgagaggcctggtggtgctgacccccgagagaagctacaccctggagcagggccccggcgacctgcagggcccccccatcatcagcagaatccaggacctgcacctgcccggccacacctgcgccctgagctggagagagagcgtgcacacccagaagccccccgagcaccccctgggccagagacacatcagaagaagaagagacgtggtgaccgagaccaagaccgtggagctggtgatcgtggccgaccacagcgaggcccagaagtacagagacttccagcacctgctgaacagaaccctggaggtggccctgctgctggacaccttcttcagacccctgaacgtgagagtggccctggtgggcctggaggcctggacccagagagacctggtggagatcagccccaaccccgccgtgaccctggagaacttcctgcactggagaagagcccacctgctgcccagactgccccacgacagcgcccagctggtgaccggcaccagcttcagcggccccaccgtgggcatggccatccagaacagcatctgcagccccgacttcagcggcggcgtgaacatggaccacagcaccagcatcctgggcgtggccagcagcatcgcccacgagctgggccacagcctgggcctggaccacgacctgcccggcaacagctgcccctgccccggccccgcccccgccaagacctgcatcatggaggccagcaccgacttcctgcccggcctgaacttcagcaactgcagcagaagagccctggagaaggccctgctggacggcatgggcagctgcctgttcgagagactgcccagcctgccccccatggccgccttctgcggcaacatgttcgtggagcccggcgagcagtgcgactgcggcttcctggacgactgcgtggacccctgctgcgacagcctgacctgccagctgagacccggcgcccagtgcgccagcgacggcccctgctgccagaactgccagctgagacccagcggctggcagtgcagacccaccagaggcgactgcgacctgcccgagttctgccccggcgacagcagccagtgcccccccgacgtgagcctgggcgacggcgagccctgcgccggcggccaggccgtgtgcatgcacggcagatgcgccagctacgcccagcagtgccagagcctgtggggccccggcgcccagcccgccgcccccctgtgcctgcagaccgccaacaccagaggcaacgccttcggcagctgcggcagaaaccccagcggcagctacgtgagctgcacccccagagacgccatctgcggccagctgcagtgccagaccggcagaacccagcccctgctgggcagcatcagagacctgctgtgggagaccatcgacgtgaacggcaccgagctgaactgcagctgggtgcacctggacctgggcagcgacgtggcccagcccctgctgaccctgcccggcaccgcctgcggccccggcctggtgtgcatcgaccacagatgccagagagtggacctgctgggcgcccaggagtgcagaagcaagtgccacggccacggcgtgtgcgacagcaacagacactgctactgcgaggagggctgggccccccccgactgcaccacccagctgaaggccaccagcagcctgaccaccggcctgctgctgagcctgctggtgctgctggtgctggtgatgctgggcgccagctactggtacagagccagactgcaccagagactgtgccagctgaagggccccacctgccagtacagcctgagaggccagcccagcccccacccccagggcagccactgcctgcccacccccagagccggcgcccacagagtgacctgccccgcccagggcctggagagcagaccctag

SEQ ID NO: 265032 - DNA, 2732 bp, Artificial Sequence
  derived and/or modified sequence
gcgcggcgctgctgggttctccgaggcgacctggccgccggccgctcctccgcgcgctgttccgcacttgctgccctcgcccggcccggagcgccgctgccatgcggctggcgctgctctgggccctggggctcctgggcgcgggcagccctctgccttcctggccgctcccaaatataggtggcactgaggagcagcaggcagagtcagagaaggccccgagggagcccttggagccccaggtccttcaggacgatctcccaattagcctcaaaaaggtgcttcagaccagtctgcctgagcccctgaggatcaagttggagctggacggtgacagtcatatcctggagctgctacagaatagggagttggtcccaggccgcccaaccctggtgtggtaccagcccgatggcactcgggtggtcagtgagggacacactttggagaactgctgctaccagggaagagtgcggggatatgcaggctcctgggtgtccatctgcacctgctctgggctcagaggcttggtggtcctgaccccagagagaagctataccctggagcaggggcctggggaccttcagggtcctcccattatttcgcgaatccaagatctccacctgccaggccacacctgtgccctgagctggcgggaatctgtacacactcagaagccaccagagcaccccctgggacagcgccacattcgccggaggcgggatgtggtaacagagaccaagactgtggagttggtgattgtggctgatcactcggaggcccagaaataccgggacttccagcacctgctaaaccgcacactggaagtggccctcttgctggacacattcttccggcccctgaatgtacgagtggcactagtgggcctggaggcctggacccagcgtgacctggtggagatcagcccaaacccagctgtcaccctcgaaaacttcctccactggcgcagggcacatttgctgcctcgattgccccatgacagtgcccagctggtgactggtacttcattctctgggcctacggtgggcatggccattcagaactccatctgttctcctgacttctcaggaggtgtgaacatggaccactccaccagcatcctgggagtcgcctcctccatagcccatgagttgggccacagcctgggcctggaccatgatttgcctgggaatagctgcccctgtccaggtccagccccagccaagacctgcatcatggaggcctccacagacttcctaccaggcctgaacttcagcaactgcagccgacgggccctggagaaagccctcctggatggaatgggcagctgcctcttcgaacggctgcctagcctaccccctatggctgctttctgcggaaatatgtttgtggagccgggcgagcagtgtgactgtggcttcctggatgactgcgtcgatccctgctgtgattctttgacctgccagctgaggccaggtgcacagtgtgcatctgacggaccctgttgtcaaaattgccagctgcgcccgtctggctggcagtgtcgtcctaccagaggggattgtgacttgcctgaattctgcccaggagacagctcccagtgtccccctgatgtcagcctaggggatggcgagccctgcgctggcgggcaagctgtgtgcatgcacgggcgttgtgcctcctatgcccagcagtgccagtcactttggggacctggagcccagcccgctgcgccactttgcctccagacagctaatactcggggaaatgcttttgggagctgtgggcgcaaccccagtggcagttatgtgtcctgcacccctagagatgccatttgtgggcagctccagtgccagacaggtaggacccagcctctgctgggctccatccgggatctactctgggagacaatagatgtgaatgggactgagctgaactgcagctgggtgcacctggacctgggcagtgatgtggcccagcccctcctgactctgcctggcacagcctgtggccctggcctggtgtgtatagaccatcgatgccagcgtgtggatctcctgggggcacaggaatgtcgaagcaaatgccatggacatggggtctgtgacagcaacaggcactgctactgtgaggagggctgggcaccccctgactgcaccactcagctcaaagcaaccagctccctgaccacagggctgctcctcagcctcctggtcttattggtcctggtgatgcttggtgccagctactggtaccgtgcccgcctgcaccagcgactctgccagctcaagggacccacctgccagtacagtctcaggggccagccaagcccccacccccaaggaagccactgcctgccgacccccagggccggtgcccatcgggtgacctgcccggcccaggggctggaatcccgcccctagtggtaccctccagaccagcgccaccgcctccgacagtgtcctcgctctacctctgacctctccggaggttccgctgcctccaagccggacttagggcttcaagaggcgggcgtgccctctggagtcccctaccatgactgaaggcgccagagactggcggtgtcttaagactccgggcaccgccacgcgctgtcaagcaacactctgcggacctgccggcgtagttgcagcgggggcttggggaggggctgggggttggacgggattgaggaaggtccgcacagcctgtctctgctcagttgcaataaacgt

SEQ ID NO: 265033 - protein, 839 aa, Artificial Sequence
  derived and/or modified sequence
MRLALLWALGLLGAGSPLPSWPLPNIGGTEEQQAESEKAPREPLEPQVLQDDLPISLKKVLQTSLPEPLRIKLELDGDSHILELLQNRELVPGRPTLVWYQPDGTRVVSEGHTLENCCYQGRVRGYAGSWVSICTCSGLRGLVVLTPERSYTLEQGPGDLQGPPIISRIQDLHLPGHTCALSWRESVHTQKPPEHPLGQRHIRRRRDVVTETKTVELVIVADHSEAQKYRDFQHLLNRTLEVALLLDTFFRPLNVRVALVGLEAWTQRDLVEISPNPAVTLENFLHWRRAHLLPRLPHDSAQLVTGTSFSGPTVGMAIQNSICSPDFSGGVNMDHSTSILGVASSIAHELGHSLGLDHDLPGNSCPCPGPAPAKTCIMEASTDFLPGLNFSNCSRRALEKALLDGMGSCLFERLPSLPPMAAFCGNMFVEPGEQCDCGFLDDCVDPCCDSLTCQLRPGAQCASDGPCCQNCQLRPSGWQCRPTRGDCDLPEFCPGDSSQCPPDVSLGDGEPCAGGQAVCMHGRCASYAQQCQSLWGPGAQPAAPLCLQTANTRGNAFGSCGRNPSGSYVSCTPRDAICGQLQCQTGRTQPLLGSIRDLLWETIDVNGTELNCSWVHLDLGSDVAQPLLTLPGTACGPGLVCIDHRCQRVDLLGAQECRSKCHGHGVCDSNRHCYCEEGWAPPDCTTQLKATSSLTTGLLLSLLVLLVLVMLGASYWYRARLHQRLCQLKGPTCQYRAAQSGPSERPGPPQRALLARGTKQASALSFPAPPSRPLPPDPVSKRLQSQGPAKPPPPRKPLPADPQGRCPSGDLPGPGAGIPPLVVPSRPAPPPPTVSSLYL

SEQ ID NO: 265034 - DNA, 2520 bp, Artificial Sequence
  derived and/or modified sequence
atgaggctggcactcctgtgggcactaggcctacttggtgccggcagccctctgccgtcatggcctttgcccaacattggggggactgaggaacagcaggccgagagtgaaaaggccccgagggaacctctagaaccacaagtcctgcaggacgatcttccaataagtcttaagaaggtgctgcaaactagcctcccagagccactgagaatcaaactcgaactagacggggattctcatattctggaactcctacagaacagagaacttgttccaggacggccgaccctcgtgtggtatcagcctgatgggacgagagtggtatctgaagggcacacacttgagaattgttgctaccaaggcagggttcggggctacgcaggatcctgggtctctatctgtacctgttcaggactcagagggctcgtagtcctcaccccagagaggtcttataccctggagcagggacctggcgatcttcagggcccccccatcattagcaggattcaggacttacacttacctggacatacatgcgctctgtcctggagggaatcagtacacactcaaaagcccccggaacatcctctgggacagcgtcatattcgtcgccgacgcgatgtggtgacagagaccaaaacggtggaactggtgattgtagccgatcacagcgaggcgcagaaatacagggatttccagcacctcctcaatagaacgttagaggtagcactgctcctagatactttcttcagacctttaaacgtcagagtcgccctggttggcctagaggcatggacccagcgggaccttgtggagatttctcccaacccggcagtaactctggaaaactttctccactggcggcgtgcccatctcctgccgcggctccctcacgattctgcgcagctcgtgacaggcacttccttcagtggtcccactgtcgggatggctatccagaactctatctgctccccagatttcagcggtggagtgaatatggatcattctactagtatcctcggcgtggcaagctccattgcgcacgagctcggccactccctagggctggaccacgatctccccggaaactcgtgtccatgtcccggccctgcgccggccaagacctgcatcatggaagcctcaaccgacttcctgccgggactgaacttcagcaattgcagccgccgtgctctggaaaaagctctgttggacggcatggggtcatgcctgtttgaaagattgccaagtctgcctccaatggctgccttttgcggtaacatgtttgttgaaccgggagaacagtgcgactgcggatttttagatgactgcgtagacccttgttgtgacagtcttacatgccagctgagaccaggcgctcagtgtgccagtgacggcccatgctgtcagaactgtcaattaagaccatccggatggcaatgccgacctaccagaggggactgcgacttgcccgagttctgtcccggtgatagctcccagtgccctccagatgtgtcccttggcgatggcgagccctgcgccggcggacaggcagtttgtatgcacggccggtgcgcgtcttatgctcagcagtgccaatcactctggggccccggtgcccagccagcggccccactctgtctgcaaaccgcaaacacccgtgggaacgccttcggcagttgcggaagaaatccttccggaagctatgtctcttgcaccccccgggacgcgatatgcggccaactgcagtgtcaaacaggcagaacccagcccctgctcggcagcatcagggatctgctgtgggagactatcgacgtgaacggcaccgagttgaattgtagctgggtccacttggatctaggaagtgacgtggctcagccactattaactctgccagggaccgcgtgtggacctggattggtgtgtatcgatcaccgatgccagcgcgtggatctgcttggagcccaggaatgcaggtcaaaatgtcatgggcacggtgtgtgcgatagcaatagacattgttattgtgaggaggggtgggccccgccggattgcactactcagctgaaggctacctctagccttaccaccgggctcctcttgagccttctagtgctgctggtcctggtgatgctaggcgctagctactggtaccgggctcgattacatcagaggctgtgtcaactgaagggtcccacatgtcagtacagggcagcccagtctggtccatccgaaagaccggggcctccacagcgcgccctgctggcaaggggcaccaagcaagcttccgccttaagctttcccgcacctcctagcagacctcttccccccgatcctgtgagtaaacggctgcagtcccaggggcctgcaaaacccccgccgcctcgcaaaccactaccggccgacccccagggccgctgccccagcggagaccttccaggccccggcgccggcataccaccattagttgttcccagccgccccgcccctccgcctccgactgtgagttccttgtacttgtag

SEQ ID NO: 265035 - DNA, 2520 bp, Artificial Sequence
  derived and/or modified sequence
atgaggctggccctgctgtgggccctgggcctgctgggcgccggcagccccctgcccagctggcccctgcccaacatcggcggcacagaggagcagcaggccgagagcgagaaggccccccgggagcccctggagccccaggtgctgcaggatgacctgcccatcagcctgaagaaggtgctgcagaccagcctgcctgagcccctgcgcatcaagctggagctggatggagacagccacatcctggagctgctgcagaaccgggagctggtgcccggccggcccaccctggtgtggtaccagccagatggcaccagggtggtgtctgagggccacaccctggagaactgctgctaccagggccgggtgcggggctacgccggctcctgggtgtccatctgcacctgcagcggcctgcggggcctggtggtgctgaccccagagaggagctacaccctggagcagggccctggggacctgcagggcccccccatcatcagccgcatccaggacctgcacctgcccggccacacctgtgccctgtcctggagggagagcgtgcacacccagaagcccccagagcaccccctgggccagaggcacatcagaagaagaagagatgtggtgacagagaccaagacagtggagctggtgattgtggccgaccacagcgaggcccagaagtacagagacttccagcacctgctgaacagaaccctggaggtggccctgctgctggacaccttcttccggcccctgaatgtgcgggtggccctggtgggcctggaggcctggacccagagggacctggtggagatcagccccaacccagctgtgaccctggagaacttcctgcactggaggcgggcccacctgctgccccggctgccccatgacagcgcccagctggtgacaggcaccagcttcagcggccccaccgtgggcatggccatccagaacagcatctgcagcccagacttcagcggcggcgtgaacatggaccacagcaccagcatcctgggcgtggccagcagcatcgcccacgagctgggccacagcctgggcctggaccatgacctgcccggcaacagctgcccctgccccggccctgccccagccaagacctgcatcatggaggccagcacagacttcctgcccggcctgaacttcagcaactgcagcagaagagccctggagaaggccctgctggatggcatgggcagctgcctgtttgagcggctgcccagcctgccccccatggccgccttctgtggcaacatgtttgtggagcctggagagcagtgtgactgtggcttcctggatgactgtgtggacccctgctgtgacagcctgacctgccagctgcggcctggggcccagtgtgccagtgatggcccctgctgccagaactgccagctgcggcccagcggctggcagtgccggcccaccaggggggactgtgacctgcctgagttctgccctggggacagcagccagtgccccccagatgtgtccctgggagatggagagccctgtgccggcggccaggccgtgtgcatgcacggccgctgtgccagctatgcccagcagtgccagagcctgtggggccctggggcccagcctgctgcccccctgtgcctgcagacagccaacaccagaggaaatgccttcggcagctgtggcaggaaccccagcggcagctatgtgtcctgcaccccaagagatgccatctgtggccagctgcagtgccagacaggccgcacccagcccctgctgggcagcatccgggacctgctgtgggagaccattgatgtgaatggaacagagctgaactgctcctgggtgcacctggacctgggcagtgatgtggcccagcccctgctgaccctgcctggaacagcctgtggccctggcctggtgtgcatcgaccaccgctgccagagggtggacctgctgggcgcccaggagtgccgcagcaagtgccacggccacggcgtgtgtgacagcaacagacactgctactgtgaggagggctgggcccccccagactgcaccacccagctgaaggccaccagcagcctgaccaccggcctgctgctgagcctgctggtgctgctggtgctggtgatgctgggcgccagctactggtaccgggcccggctgcaccagaggctgtgccagctgaagggccccacctgccagtacagagctgcccagagcggccccagcgagcggcccggccccccccagagggccctgctggcccggggcaccaagcaggccagcgccctgtccttccctgccccacccagccggcccctgcccccagaccctgtgtccaagaggctgcagagccagggccctgccaagcccccaccacccaggaagcccctgcctgctgacccccagggccgctgccccagcggggacctgcccggccctggggccggcatcccccccctggtggtgcccagcaggcctgcccctcctccacccaccgtgagcagcctgtacctgtag

SEQ ID NO: 265036 - DNA, 2520 bp, Artificial Sequence
  derived and/or modified sequence
atgcggctggccctgctgtgggccctgggcctgctgggcgccggctctcccctgccttcttggcccttgcccaatattggtgggaccgaagaacagcaggctgaatctgagaaggctcctcgtgaacctctagaaccccaggtgttgcaggatgatctccctatttccttgaagaaggtgctgcagacatcccttcctgagccactgcgcatcaaacttgaactggacggggacagccatattttggaattgcttcagaaccgagagttagttcccggacggcctaccctcgtctggtatcagcctgatggaacgcgtgttgtttccgaaggccacacgctagagaactgctgttatcaggggagggtcaggggctacgcagggtcttgggtgtcaatttgcacatgctcaggcctgagaggactggtagttttgacccccgaacgctcttataccctggagcaaggcccaggggacctgcaggggccccctataatctcccgtatccaggatcttcacttgcctggacacacctgtgcactaagctggcgcgagtccgttcatacccagaagccgcctgagcaccccctcggacagcgccacatcaggcggcgccgggacgttgtcaccgagacaaaaactgtggagctcgtgatcgttgcagaccattctgaggctcaaaaatatagagactttcaacaccttctgaatagaaccttggaggtcgcgctcctcttagacactttcttccgtccgctcaacgtgagggtggcgctggtaggattggaggcttggacacaacgcgacctcgtcgaaatttcgccaaatcccgcagtgacattggagaacttcctgcattggcgccgtgcccacctacttccccggcttcctcatgactccgcacaactagtcaccgggacatcattctccgggcccacggtgggaatggccatccagaatagcatctgctcacccgacttcagcgggggcgtgaatatggaccactcgacctccatcctgggcgtggcttcttctatcgcccacgaactaggtcactctttaggcctggaccacgatctgccagggaactcttgcccatgccccggaccggcccccgccaagacctgcatcatggaagcatctactgatttcctccctgggctgaactttagcaactgtagcagacgcgcactggagaaggcactgctggacggtatgggatcttgccttttcgaaaggctgcctagccttccccccatggctgcattctgcggtaatatgttcgtcgaacccggggagcagtgcgattgtggtttccttgatgattgcgttgacccctgttgtgactcacttacctgtcagctcagacccggggctcagtgcgcgagcgacggtccctgttgccaaaattgccagctccgacccagcggctggcagtgccggcctacgcggggtgactgcgatctgccagagttctgtccaggcgactcttctcagtgcccccccgacgtgagcctcggagacggggagccttgtgccggtggtcaggccgtgtgcatgcatggccgctgcgccagctacgcgcagcagtgtcagtcactctggggaccaggagcgcagcccgctgcccccttgtgtctgcagacggccaacaccaggggaaacgcttttggttcctgcgggaggaatcctagcggctcttacgtgtcctgcacacctcgagacgccatatgtggtcaactgcagtgccagactggcagaactcagcccctgctgggcagcatccgcgatctgctgtgggagacgatcgacgtgaacggaaccgaactcaactgcagctgggtgcacttggacctgggatccgacgtggcacagccattacttaccctgcctggaactgcctgtggccccggcctggtttgcattgaccaccgatgtcagcgagtggatttgcttggcgcacaggagtgtaggagtaaatgccatggacatggagtgtgcgatagtaatcgacactgctattgcgaggaagggtgggcacctccggattgcacaacgcagctaaaggctacatcgagtctgaccacagggctgcttctctcacttttggtgctgctggttcttgtgatgctcggcgctagttattggtaccgcgctagacttcaccaacggctatgtcaactgaaaggccccacatgtcagtatcgagccgcccagagcggcccttcagagagaccaggtcccccacaacgcgccctgctggccaggggtaccaagcaagccagcgcactgtctttccctgcacctcccagcagacccctgccgccggatccagtaagcaagcgtctgcagagccagggtcccgctaaacctccaccaccacggaagccgttaccagccgatccacagggacgctgcccttcaggcgacctgcccgggccaggggccggtattcctccattggtcgtaccatctagacccgctcctcctcctcccaccgtgagcagtttgtatctctag

SEQ ID NO: 265037 - DNA, 2520 bp, Artificial Sequence
  derived and/or modified sequence
atgaggctggccttactctgggcccttggcctgctaggagctggatcccccctccccagctggccactcccgaacattggcggtactgaagagcaacaagccgagtccgagaaagcccctagagagccactcgaaccacaggtcttgcaggatgacctgcctatcagcctcaaaaaggtgttacagacatccctgcccgaaccactgcggatcaagctggagctggatggggactctcacatactcgaactgttgcagaatagagaactggtgcccggtcgacctaccctagtgtggtatcaacctgatggcaccagggtagtgtctgaagggcacacattagaaaactgttgttatcagggccgagtccggggatatgccggttcctgggttagtatttgcacttgctccgggctgaggggtttagtggtgctgacaccggaacgttcatacactctggagcaaggccctggcgatctccaaggacccccaatcatctccagaattcaagaccttcacctgccaggacacacttgcgccctctcttggagggaatcagtccacacacagaaacctcctgagcatccccttggacaacgacacatacgacgcaggcgcgacgttgtgacagaaacaaagactgtggaactggtcatcgtggccgaccactctgaggcacaaaagtaccgggacttccagcacctcttgaaccggacactggaagtcgctctgctcctggacacgttttttcggcctttgaacgtgcgcgttgcacttgtcggtctcgaggcgtggacccagcgcgatctggtggaaatttcccccaacccagctgttacactggaaaacttcctgcattggagacgcgctcatctactcccccgtttgcctcatgattcagctcagctggtgacaggtacatctttcagtggtccaacagtgggaatggcaattcagaatagtatctgctctccggacttcagcggcggagtgaacatggatcactctacgtctatactgggagtggcgtcctctatcgcccacgaacttggccacagcttgggccttgatcacgacctgcccggtaactcatgcccttgtcctggtcccgctcccgctaagacctgtatcatggaggcctctacggacttcctccctggcctgaacttctcaaactgttccagaagagcactggagaaagccctgttggacggaatgggaagctgtctgttcgagaggctgccgtctttgccaccaatggctgcattttgcggcaatatgttcgtggagcctggggagcagtgtgactgcggatttttggatgactgtgtggacccctgttgcgattccttgacatgtcagctgcgtccgggagctcagtgcgcttcggatggcccttgttgtcagaattgtcaactgcgaccctcggggtggcagtgtaggcccacccgcggtgactgcgacctccctgaattctgcccgggagattcctcccagtgtcctcctgatgtctccctgggagacggcgaaccatgcgcagggggtcaggctgtgtgcatgcacggcagatgtgcatcttacgcccaacagtgtcagtccctctggggtccgggagcacagccagcagcacctctctgcctgcaaactgccaatactcgagggaacgcctttggttcctgcggcaggaatccatccggatcatacgtgtcttgtacacccagagacgcgatctgcggccagctccagtgccaaaccggccgtacccagcccctcttgggatctatcagggacctcctttgggaaacaatcgacgtcaatggaacagagctaaattgttcttgggtacatctggacctggggtccgatgtggcacagcccttactgacactcccgggtacagcctgcgggccaggcctcgtatgcatcgaccatagatgccagcgagtggacctccttggggctcaggaatgccgctcaaagtgtcacggacacggcgtctgtgacagcaaccgtcactgttattgtgaggaagggtgggcccctcccgattgtaccactcagctaaaggccacctcctctctgaccacaggtctactgctgagtttactggtcttgctggttctggtcatgttgggggcttcctattggtatcgcgcaaggctgcatcagcgcctctgccagctgaagggtcctacctgccagtatagagcagcccagtccgggccatccgagagacccggtcctcctcagagagctctgcttgcccgaggtaccaagcaggcatccgctctgtcctttccagctcctccttcccggccattgccacctgatccagtttctaagcggctacaaagccaggggccagctaagcctccccctcccaggaaacccctcccagccgacccacaaggcaggtgtcccagtggggacctccctggtcctggggctgggattccccctctggttgtcccgagtcggccagctccccctcctcctactgtttcctcattgtatttatag

SEQ ID NO: 265038 - DNA, 2520 bp, Artificial Sequence
  derived and/or modified sequence
atgagactggccctgctgtgggccctgggcctgctgggcgccggcagccccctgcccagctggcccctgcccaacatcggcggcaccgaggagcagcaggccgagagcgagaaggcccccagagagcccctggagccccaggtgctgcaggacgacctgcccatcagcctgaagaaggtgctgcagaccagcctgcccgagcccctgagaatcaagctggagctggacggcgacagccacatcctggagctgctgcagaacagagagctggtgcccggcagacccaccctggtgtggtaccagcccgacggcaccagagtggtgagcgagggccacaccctggagaactgctgctaccagggcagagtgagaggctacgccggcagctgggtgagcatctgcacctgcagcggcctgagaggcctggtggtgctgacccccgagagaagctacaccctggagcagggccccggcgacctgcagggcccccccatcatcagcagaatccaggacctgcacctgcccggccacacctgcgccctgagctggagagagagcgtgcacacccagaagccccccgagcaccccctgggccagagacacatcagaagaagaagagacgtggtgaccgagaccaagaccgtggagctggtgatcgtggccgaccacagcgaggcccagaagtacagagacttccagcacctgctgaacagaaccctggaggtggccctgctgctggacaccttcttcagacccctgaacgtgagagtggccctggtgggcctggaggcctggacccagagagacctggtggagatcagccccaaccccgccgtgaccctggagaacttcctgcactggagaagagcccacctgctgcccagactgccccacgacagcgcccagctggtgaccggcaccagcttcagcggccccaccgtgggcatggccatccagaacagcatctgcagccccgacttcagcggcggcgtgaacatggaccacagcaccagcatcctgggcgtggccagcagcatcgcccacgagctgggccacagcctgggcctggaccacgacctgcccggcaacagctgcccctgccccggccccgcccccgccaagacctgcatcatggaggccagcaccgacttcctgcccggcctgaacttcagcaactgcagcagaagagccctggagaaggccctgctggacggcatgggcagctgcctgttcgagagactgcccagcctgccccccatggccgccttctgcggcaacatgttcgtggagcccggcgagcagtgcgactgcggcttcctggacgactgcgtggacccctgctgcgacagcctgacctgccagctgagacccggcgcccagtgcgccagcgacggcccctgctgccagaactgccagctgagacccagcggctggcagtgcagacccaccagaggcgactgcgacctgcccgagttctgccccggcgacagcagccagtgcccccccgacgtgagcctgggcgacggcgagccctgcgccggcggccaggccgtgtgcatgcacggcagatgcgccagctacgcccagcagtgccagagcctgtggggccccggcgcccagcccgccgcccccctgtgcctgcagaccgccaacaccagaggcaacgccttcggcagctgcggcagaaaccccagcggcagctacgtgagctgcacccccagagacgccatctgcggccagctgcagtgccagaccggcagaacccagcccctgctgggcagcatcagagacctgctgtgggagaccatcgacgtgaacggcaccgagctgaactgcagctgggtgcacctggacctgggcagcgacgtggcccagcccctgctgaccctgcccggcaccgcctgcggccccggcctggtgtgcatcgaccacagatgccagagagtggacctgctgggcgcccaggagtgcagaagcaagtgccacggccacggcgtgtgcgacagcaacagacactgctactgcgaggagggctgggccccccccgactgcaccacccagctgaaggccaccagcagcctgaccaccggcctgctgctgagcctgctggtgctgctggtgctggtgatgctgggcgccagctactggtacagagccagactgcaccagagactgtgccagctgaagggccccacctgccagtacagagccgcccagagcggccccagcgagagacccggccccccccagagagccctgctggccagaggcaccaagcaggccagcgccctgagcttccccgccccccccagcagacccctgccccccgaccccgtgagcaagagactgcagagccagggccccgccaagccccccccccccagaaagcccctgcccgccgacccccagggcagatgccccagcggcgacctgcccggccccggcgccggcatcccccccctggtggtgcccagcagacccgccccccccccccccaccgtgagcagcctgtacctgtag

SEQ ID NO: 265039 - DNA, 2877 bp, Artificial Sequence
  derived and/or modified sequence
gcgcggcgctgctgggttctccgaggcgacctggccgccggccgctcctccgcgcgctgttccgcacttgctgccctcgcccggcccggagcgccgctgccatgcggctggcgctgctctgggccctggggctcctgggcgcgggcagccctctgccttcctggccgctcccaaatataggtggcactgaggagcagcaggcagagtcagagaaggccccgagggagcccttggagccccaggtccttcaggacgatctcccaattagcctcaaaaaggtgcttcagaccagtctgcctgagcccctgaggatcaagttggagctggacggtgacagtcatatcctggagctgctacagaatagggagttggtcccaggccgcccaaccctggtgtggtaccagcccgatggcactcgggtggtcagtgagggacacactttggagaactgctgctaccagggaagagtgcggggatatgcaggctcctgggtgtccatctgcacctgctctgggctcagaggcttggtggtcctgaccccagagagaagctataccctggagcaggggcctggggaccttcagggtcctcccattatttcgcgaatccaagatctccacctgccaggccacacctgtgccctgagctggcgggaatctgtacacactcagaagccaccagagcaccccctgggacagcgccacattcgccggaggcgggatgtggtaacagagaccaagactgtggagttggtgattgtggctgatcactcggaggcccagaaataccgggacttccagcacctgctaaaccgcacactggaagtggccctcttgctggacacattcttccggcccctgaatgtacgagtggcactagtgggcctggaggcctggacccagcgtgacctggtggagatcagcccaaacccagctgtcaccctcgaaaacttcctccactggcgcagggcacatttgctgcctcgattgccccatgacagtgcccagctggtgactggtacttcattctctgggcctacggtgggcatggccattcagaactccatctgttctcctgacttctcaggaggtgtgaacatggaccactccaccagcatcctgggagtcgcctcctccatagcccatgagttgggccacagcctgggcctggaccatgatttgcctgggaatagctgcccctgtccaggtccagccccagccaagacctgcatcatggaggcctccacagacttcctaccaggcctgaacttcagcaactgcagccgacgggccctggagaaagccctcctggatggaatgggcagctgcctcttcgaacggctgcctagcctaccccctatggctgctttctgcggaaatatgtttgtggagccgggcgagcagtgtgactgtggcttcctggatgactgcgtcgatccctgctgtgattctttgacctgccagctgaggccaggtgcacagtgtgcatctgacggaccctgttgtcaaaattgccagctgcgcccgtctggctggcagtgtcgtcctaccagaggggattgtgacttgcctgaattctgcccaggagacagctcccagtgtccccctgatgtcagcctaggggatggcgagccctgcgctggcgggcaagctgtgtgcatgcacgggcgttgtgcctcctatgcccagcagtgccagtcactttggggacctggagcccagcccgctgcgccactttgcctccagacagctaatactcggggaaatgcttttgggagctgtgggcgcaaccccagtggcagttatgtgtcctgcacccctagagatgccatttgtgggcagctccagtgccagacaggtaggacccagcctctgctgggctccatccgggatctactctgggagacaatagatgtgaatgggactgagctgaactgcagctgggtgcacctggacctgggcagtgatgtggcccagcccctcctgactctgcctggcacagcctgtggccctggcctggtgtgtatagaccatcgatgccagcgtgtggatctcctgggggcacaggaatgtcgaagcaaatgccatggacatggggtctgtgacagcaacaggcactgctactgtgaggagggctgggcaccccctgactgcaccactcagctcaaagcaaccagctccctgaccacagggctgctcctcagcctcctggtcttattggtcctggtgatgcttggtgccagctactggtaccgtgcccgcctgcaccagcgactctgccagctcaagggacccacctgccagtacagggcagcccaatctggtccctctgaacggccaggacctccgcagagggccctgctggcacgaggcactaagcaggctagtgctctcagcttcccggcccccccttccaggccgctgccgcctgaccctgtgtccaagagactccagtctcaggggccagccaagcccccacccccaaggaagccactgcctgccgacccccagggccggtgcccatcgggtgacctgcccggcccaggggctggaatcccgcccctagtggtaccctccagaccagcgccaccgcctccgacagtgtcctcgctctacctctgacctctccggaggttccgctgcctccaagccggacttagggcttcaagaggcgggcgtgccctctggagtcccctaccatgactgaaggcgccagagactggcggtgtcttaagactccgggcaccgccacgcgctgtcaagcaacactctgcggacctgccggcgtagttgcagcgggggcttggggaggggctgggggttggacgggattgaggaaggtccgcacagcctgtctctgctcagttgcaataaacgt

SEQ ID NO: 265040 - protein, 838 aa, Artificial Sequence
  derived and/or modified sequence
MRLALLWALGLLGAGSPLPSWPLPNIGGTEEQQAESEKAPREPLEPQVLQDDLPISLKKVLQTSLPEPLRIKLELDGDSHILELLQNRELVPGRPTLVWYQPDGTRVVSEGHTLENCCYQGRVRGYAGSWVSICTCSGLRGLVVLTPERSYTLEQGPGDLQGPPIISRIQDLHLPGHTCALSWRESVHTQKPPEHPLGQRHIRRRRDVVTETKTVELVIVADHSEAQKYRDFQHLLNRTLEVALLLDTFFRPLNVRVALVGLEAWTQRDLVEISPNPAVTLENFLHWRRAHLLPRLPHDSAQLVTGTSFSGPTVGMAIQNSICSPDFSGGVNMDHSTSILGVASSIAHELGHSLGLDHDLPGNSCPCPGPAPAKTCIMEASTDFLPGLNFSNCSRRALEKALLDGMGSCLFERLPSLPPMAAFCGNMFVEPGEQCDCGFLDDCVDPCCDSLTCQLRPGAQCASDGPCCQNCQLRPSGWQCRPTRGDCDLPEFCPGDSSQCPPDVSLGDGEPCAGGQAVCMHGRCASYAQQCQSLWGPGAQPAAPLCLQTANTRGNAFGSCGRNPSGSYVSCTPRDAICGQLQCQTGRTQPLLGSIRDLLWETIDVNGTELNCSWVHLDLGSDVAQPLLTLPGTACGPGLVCIDHRCQRVDLLGAQECRSKCHGHGVCDSNRHCYCEEGWAPPDCTTQLKATSSLTTGLLLSLLVLLVLVMLGASYWYRARLHQRLCQLKGPTCQYRAAQSGPSERPGPPQRALLARGTKAELADRPNPPTRPLPADPVVRSPKSQGPAKPPPPRKPLPADPQGRCPSGDLPGPGAGIPPLVVPSRPAPPPPTVSSLYL

SEQ ID NO: 265041 - DNA, 2517 bp, Artificial Sequence
  derived and/or modified sequence
atgcggctggccctgctgtgggccctagggctgctgggcgctggcagcccactcccctcctggcctcttcctaacattggtggaaccgaggagcagcaagccgagtctgagaaggcccctcgcgaacctctggagcctcaggtgctgcaggacgatcttcctatctcactgaaaaaagtgctgcagacttccctgcccgagccacttcgcataaagctcgaactggacggtgactctcacattttggaattgctccagaacagggaactggtgcctggcaggcctaccctggtttggtatcaacccgatgggaccagggtcgtgagcgagggccacactctggagaactgctgttaccagggtcgagttcgaggatacgcagggagttgggtgtcgatttgcacctgctcaggcttgagagggctggtggtcctgacaccagagagatcttacacccttgagcagggacctggcgacttgcaggggccccctattatctctagaatccaggatctccacttacctggtcatacgtgcgctttgtcatggcgtgagtccgtgcatacccagaagcctcccgagcaccccttgggacaacgacatatccgccgaaggagagacgtggttactgagacaaaaaccgtggagctggtcatagtcgccgatcacagcgaagctcagaagtatcgcgatttccagcacctgctgaacaggacactcgaggtcgccctcctattggataccttctttagacccctgaatgtgcgggtcgcattagtcggcctggaagcatggactcagagggacctggtcgagattagccccaaccccgcagttacattggagaattttcttcattggcggagagcacacctgttaccccggctcccccatgactcggcccagttggtgacagggacttctttcagcggcccgaccgtagggatggcgattcaaaatagtatatgttctccggattttagcggtggggtcaacatggaccatagcacaagtatcctgggcgtggcgtcctcaatagcccacgagcttgggcatagcctggggctagaccacgacctcccgggcaacagctgtccctgtcctggaccagctcctgcaaaaacttgcatcatggaggcatcaactgacttcctcccgggactgaatttctccaattgttctcgtcgggccttggagaaagctctcttggatggcatgggctcttgtctcttcgaacggttgccgagcctgccccctatggccgccttctgcgggaatatgtttgtggaacccggggagcagtgcgactgtggcttcctggacgactgcgtcgacccatgctgtgacagcctgacttgccagttgcgaccaggggctcagtgcgctagcgacgggccctgctgccagaactgccagctgcgacccagtgggtggcagtgtcgaccaacccgcggggactgcgacctcccggagttctgtcctggcgattcatcccagtgtccacccgacgttagcttgggtgacggggaaccttgcgccggcggccaggcagtttgtatgcacggacgctgtgcctcatatgcacagcaatgtcaaagcctatggggccctggagcccagcccgccgccccattgtgcctgcaaactgcgaatactagaggtaatgccttcggcagttgcggccgaaatccctcaggcagttacgtctcttgtactccgcgtgacgccatttgcgggcaacttcagtgtcaaacgggacggacccagcctctgcttggtagcattagggatttgctgtgggagaccatcgacgttaacggcacggagttaaattgctcctgggtccacttagatctgggaagcgacgttgctcagcctctccttacgctacctggcacagcctgtggccccggtttagtctgcatagaccataggtgtcaaagggtggatctgctcggtgctcaggaatgccgatcaaagtgccatggccacggggtgtgcgactccaatcggcattgctactgcgaggaggggtgggctcctccggactgtacgacacagctgaaagcgaccagctcactcaccacagggctgcttctgagcttgctagtactgcttgtactggttatgctcggggcctcctactggtatcgggcccgcctgcaccagagactgtgccagttgaagggtcctacctgtcagtatcgcgcagcccagtccggcccctccgagaggcccggacccccacagcgcgcccttctggcgcgaggcacgaaagcagaactcgccgaccggcccaacccccccacccgacctctgcccgctgatcccgtcgtacggagccctaaatcacagggccccgcgaaaccacctcctccacgcaagcccctgccggccgacccccaaggccgctgtccaagtggtgatctgccaggcccgggggccgggattcctccactcgttgtgccttcccgacccgccccacctccaccaactgtttcgagcttatacctgtag

SEQ ID NO: 265042 - DNA, 2517 bp, Artificial Sequence
  derived and/or modified sequence
atgaggctggccctgctgtgggccctgggcctgctgggcgccggcagccccctgcccagctggcccctgcccaacatcggcggcacagaggagcagcaggccgagagcgagaaggccccccgggagcccctggagccccaggtgctgcaggatgacctgcccatcagcctgaagaaggtgctgcagaccagcctgcctgagcccctgcgcatcaagctggagctggatggagacagccacatcctggagctgctgcagaaccgggagctggtgcccggccggcccaccctggtgtggtaccagccagatggcaccagggtggtgtctgagggccacaccctggagaactgctgctaccagggccgggtgcggggctacgccggctcctgggtgtccatctgcacctgcagcggcctgcggggcctggtggtgctgaccccagagaggagctacaccctggagcagggccctggggacctgcagggcccccccatcatcagccgcatccaggacctgcacctgcccggccacacctgtgccctgtcctggagggagagcgtgcacacccagaagcccccagagcaccccctgggccagaggcacatcagaagaagaagagatgtggtgacagagaccaagacagtggagctggtgattgtggccgaccacagcgaggcccagaagtacagagacttccagcacctgctgaacagaaccctggaggtggccctgctgctggacaccttcttccggcccctgaatgtgcgggtggccctggtgggcctggaggcctggacccagagggacctggtggagatcagccccaacccagctgtgaccctggagaacttcctgcactggaggcgggcccacctgctgccccggctgccccatgacagcgcccagctggtgacaggcaccagcttcagcggccccaccgtgggcatggccatccagaacagcatctgcagcccagacttcagcggcggcgtgaacatggaccacagcaccagcatcctgggcgtggccagcagcatcgcccacgagctgggccacagcctgggcctggaccatgacctgcccggcaacagctgcccctgccccggccctgccccagccaagacctgcatcatggaggccagcacagacttcctgcccggcctgaacttcagcaactgcagcagaagagccctggagaaggccctgctggatggcatgggcagctgcctgtttgagcggctgcccagcctgccccccatggccgccttctgtggcaacatgtttgtggagcctggagagcagtgtgactgtggcttcctggatgactgtgtggacccctgctgtgacagcctgacctgccagctgcggcctggggcccagtgtgccagtgatggcccctgctgccagaactgccagctgcggcccagcggctggcagtgccggcccaccaggggggactgtgacctgcctgagttctgccctggggacagcagccagtgccccccagatgtgtccctgggagatggagagccctgtgccggcggccaggccgtgtgcatgcacggccgctgtgccagctatgcccagcagtgccagagcctgtggggccctggggcccagcctgctgcccccctgtgcctgcagacagccaacaccagaggaaatgccttcggcagctgtggcaggaaccccagcggcagctatgtgtcctgcaccccaagagatgccatctgtggccagctgcagtgccagacaggccgcacccagcccctgctgggcagcatccgggacctgctgtgggagaccattgatgtgaatggaacagagctgaactgctcctgggtgcacctggacctgggcagtgatgtggcccagcccctgctgaccctgcctggaacagcctgtggccctggcctggtgtgcatcgaccaccgctgccagagggtggacctgctgggcgcccaggagtgccgcagcaagtgccacggccacggcgtgtgtgacagcaacagacactgctactgtgaggagggctgggcccccccagactgcaccacccagctgaaggccaccagcagcctgaccaccggcctgctgctgagcctgctggtgctgctggtgctggtgatgctgggcgccagctactggtaccgggcccggctgcaccagaggctgtgccagctgaagggccccacctgccagtacagagctgcccagagcggccccagcgagcggcccggccccccccagagggccctgctggcccggggcaccaaggccgagctggccgaccggcccaacccccccacccggcccctgcctgctgaccctgtggtgcgcagccccaagagccagggccctgccaagcccccaccacccaggaagcccctgcctgctgacccccagggccgctgccccagcggggacctgcccggccctggagctggcatcccccccctggtggtgcccagcaggcctgcccctcctccacccaccgtgagcagcctgtacctgtag

SEQ ID NO: 265043 - DNA, 2517 bp, Artificial Sequence
  derived and/or modified sequence
atgcggctggccctgctgtgggccctgggcctgctgggcgccggctctcctctcccttcatggccactcccgaatattggtggaactgaagagcaacaggctgagtctgagaaggcgcctagagaacctctggagccacaagtgttgcaggatgaccttccaattagtctgaagaaggtattgcagacctctcttcctgaaccactccgcatcaaacttgagctggatggtgattctcacatccttgagcttcttcagaacagagagctggtgccagggagaccaacgcttgtatggtatcagcccgacggcacgagggtcgtaagcgagggccatactttggagaactgctgttatcaaggtcgtgtcagggggtacgcagggagctgggtcagtatatgtacttgcagcggactccgcggactggtcgtgctcacaccagagcggagttacaccctagagcaagggcccggggacctccaggggccacccatcatttcacgcatccaggatctccatcttccggggcatacctgtgctctttcctggcgggaatccgtccacacccaaaagcctcctgagcatcctttgggacagcgacacatcaggcgtaggagagacgttgtgaccgagactaaaaccgttgagttggtaattgtggccgatcactccgaagctcagaagtaccgcgacttccaacaccttcttaaccggacattagaggtggctctcctcctggatacctttttcaggcccctgaacgtgcgggtggccttagtaggcctggaagcgtggacccagagagacttagtagagattagccccaatcccgccgtgacactggagaacttcctgcattggaggagagctcacctactgccgcgcctcccacacgatagcgcacagttagtgaccggtacatctttctctggcccaacggtgggcatggccattcagaactccatctgctctcctgacttctcaggtggggtgaacatggaccattcgacctctatccttggcgtggcaagttccatcgcccatgagctgggtcactcgcttggccttgaccacgatctgcccggcaattcatgcccttgccctgggcccgcacccgcaaagacatgtatcatggaggcaagcaccgattttctaccagggctcaattttagcaactgctcacgaagggcattggagaaggctcttctagacgggatgggatcctgcctgtttgaaagactcccgtccttgcctcccatggccgccttttgtgggaacatgttcgtggagccaggcgagcagtgcgattgtgggttcctggatgactgtgtggatccatgctgcgatagtctgacctgtcaactaaggccaggcgcacaatgcgccagtgatggtccctgctgccagaactgtcagctgcgccctagtggttggcagtgtcgtcccaccagaggggactgcgatttgcctgaattttgtcccggtgattcatcccagtgcccccccgacgtgagccttggggacggcgaaccctgtgcagggggtcaggctgtgtgtatgcacggacggtgcgcctcctacgcccaacagtgccaatctctgtggggtcccggagcccagcctgccgcaccactgtgcctgcagacggccaacacgcggggcaatgctttcggaagttgcggcagaaatccttctggcagctatgtttcttgtacccccagagacgctatctgtggccagctccaatgtcagacaggtagaacccagcccctgctgggcagcatcagggatttactgtgggagaccatcgacgttaacggaacagagttaaactgtagctgggtacatctcgacctgggttctgacgttgcccagccactgcttaccctacctggaactgcctgcgggcctggattagtgtgtattgatcatcgctgccagcgtgtggacctgctcggcgctcaggaatgtcgtagtaagtgccatggacatggcgtctgtgattccaatcgacactgctactgcgaagaaggatgggcacccccggactgcacaacacaacttaaagctacttcatctttgaccaccggattgctgcttagtctgctggtgctattggtgcttgtgatgttgggtgccagttactggtaccgtgccagactccaccaacggctttgccagctcaagggcccaacttgtcagtaccgggcagcccagtccggaccgtctgaacggccaggtccaccccagcgcgcccttctcgctcggggcaccaaagccgagctggccgaccggccaaacccacctaccaggcctctgcctgctgaccccgtcgtacggtctccaaaatctcagggccccgcaaaaccacctccgccgaggaagcctcttcccgctgacccccaggggcggtgcccaagcggtgatctaccggggcctggcgccggcatccctccgctggtggttcccagccggcccgcacctcccccacccaccgtcagttctctgtacctgtag

SEQ ID NO: 265044 - DNA, 2517 bp, Artificial Sequence
  derived and/or modified sequence
atgagactggccttgttgtgggcccttggcctgctcggtgctgggtctccactcccctcctggcccttgcccaacatcggaggcacagaggagcagcaagcggaaagcgagaaagcgcctcgggagcccctcgagccacaggtcttgcaggacgatttgcccatctcactcaagaaggtgcttcagacctctttgccagagcccttgagaatcaaacttgaattagatggtgactctcatatcttggaactcctgcagaaccgggagttggtgcccggacggccaaccctggtttggtaccagccagacgggacaagggtggtgtccgaggggcacaccttggaaaactgttgctaccagggacgtgtcagggggtacgctggcagctgggtctctatctgcacttgtagcggactgaggggtctggtggtccttactccagagagaagctatactcttgagcagggaccaggtgacttacagggaccacctatcatctcacggattcaggatctgcatctgcccggacacacttgtgctctgagctggcgcgagagcgttcatactcagaagccgccagagcatccgctgggacagaggcacatacgaagacgccgtgacgtcgtaacagagaccaaaacggtggaactggtcatcgttgcagatcattctgaggcgcaaaaatacagagacttccagcatttgctgaatcgcactctggaggtcgccctcttactggacactttttttcggccattaaacgtgcgagtagctcttgtcggcctcgaggcctggacccagagagatcttgtcgagatttctccgaatcccgctgtgacactggaaaactttctacactggcgcagggcccacttgctccccaggctgcctcacgacagtgctcaactggtgacagggacaagttttagcggacccacagtcggcatggctatccagaattctatctgctcacccgatttttcgggtggcgtaaatatggaccatagtacaagtatattaggcgtggcaagcagcattgcacacgagcttgggcactcactcgggttggaccacgaccttcctggcaactcgtgcccttgtccagggcctgctcctgccaaaacatgtattatggaagcatcaactgatttcctgcctggcctcaacttttctaactgctccaggagagctcttgaaaaggctctgctcgacggcatgggcagctgccttttcgagagactgccgtcacttcctcctatggcagctttctgtggcaacatgtttgtggagcctggcgagcagtgcgattgcggcttcttggatgactgtgtcgatccgtgttgcgacagcctgacttgccaactgcgcccaggggctcagtgcgcaagcgatggtccttgctgccagaattgccaactcagaccaagtgggtggcagtgccgaccaactagaggcgattgtgaccttcccgagttttgtcccggagactcctcgcaatgtcctcccgacgtatcactgggggatggggaaccttgtgctggaggccaggccgtgtgcatgcacggtagatgcgcctcatacgctcagcagtgccagagtttgtggggacccggagctcagcctgctgccccactatgcctacaaaccgccaacacccgcggaaatgctttcggatcatgcgggcgaaaccctagcggtagctacgtgagctgtaccccacgggacgcaatatgtggtcaactgcagtgccagaccggcaggacccagccgctgcttgggagtattcgcgatctgctttgggaaactatcgacgtgaacgggacagagctgaactgctcatgggtccacttagatctgggttccgatgtggcccagcccctcttgactctgcccggtactgcatgtggccctggccttgtgtgcatcgatcatcgatgtcagcgagtggatctgctgggcgctcaggagtgcaggagcaagtgccatgggcatggcgtctgcgatagtaacagacattgttactgtgaagagggctgggctcctccagactgcaccacacagctgaaggcaacctcttctctaaccacgggactcctgctctctcttcttgtacttttggtgctcgtcatgcttggagcctcctattggtatcgcgcacggctgcatcagcgtctctgtcagctgaagggacctacttgccagtaccgcgcagcccagtctggcccttcggaacgccctggccctccccagagggcactgctggcaaggggcactaaagccgaactcgccgaccggccaaacccccctacacggccactgcctgcagacccagttgttcggtcccctaaatcacaggggccagcaaaacccccaccaccgagaaagcctctgcccgctgatccacaggggagatgtccaagtggggatcttcctggccctggggcaggaattccacccctggtggtgcctagtcgacctgctccccctcctccaactgttagctccctatatctgtag

SEQ ID NO: 265045 - DNA, 2517 bp, Artificial Sequence
  derived and/or modified sequence
atgagactggccctgctgtgggccctgggcctgctgggcgccggcagccccctgcccagctggcccctgcccaacatcggcggcaccgaggagcagcaggccgagagcgagaaggcccccagagagcccctggagccccaggtgctgcaggacgacctgcccatcagcctgaagaaggtgctgcagaccagcctgcccgagcccctgagaatcaagctggagctggacggcgacagccacatcctggagctgctgcagaacagagagctggtgcccggcagacccaccctggtgtggtaccagcccgacggcaccagagtggtgagcgagggccacaccctggagaactgctgctaccagggcagagtgagaggctacgccggcagctgggtgagcatctgcacctgcagcggcctgagaggcctggtggtgctgacccccgagagaagctacaccctggagcagggccccggcgacctgcagggcccccccatcatcagcagaatccaggacctgcacctgcccggccacacctgcgccctgagctggagagagagcgtgcacacccagaagccccccgagcaccccctgggccagagacacatcagaagaagaagagacgtggtgaccgagaccaagaccgtggagctggtgatcgtggccgaccacagcgaggcccagaagtacagagacttccagcacctgctgaacagaaccctggaggtggccctgctgctggacaccttcttcagacccctgaacgtgagagtggccctggtgggcctggaggcctggacccagagagacctggtggagatcagccccaaccccgccgtgaccctggagaacttcctgcactggagaagagcccacctgctgcccagactgccccacgacagcgcccagctggtgaccggcaccagcttcagcggccccaccgtgggcatggccatccagaacagcatctgcagccccgacttcagcggcggcgtgaacatggaccacagcaccagcatcctgggcgtggccagcagcatcgcccacgagctgggccacagcctgggcctggaccacgacctgcccggcaacagctgcccctgccccggccccgcccccgccaagacctgcatcatggaggccagcaccgacttcctgcccggcctgaacttcagcaactgcagcagaagagccctggagaaggccctgctggacggcatgggcagctgcctgttcgagagactgcccagcctgccccccatggccgccttctgcggcaacatgttcgtggagcccggcgagcagtgcgactgcggcttcctggacgactgcgtggacccctgctgcgacagcctgacctgccagctgagacccggcgcccagtgcgccagcgacggcccctgctgccagaactgccagctgagacccagcggctggcagtgcagacccaccagaggcgactgcgacctgcccgagttctgccccggcgacagcagccagtgcccccccgacgtgagcctgggcgacggcgagccctgcgccggcggccaggccgtgtgcatgcacggcagatgcgccagctacgcccagcagtgccagagcctgtggggccccggcgcccagcccgccgcccccctgtgcctgcagaccgccaacaccagaggcaacgccttcggcagctgcggcagaaaccccagcggcagctacgtgagctgcacccccagagacgccatctgcggccagctgcagtgccagaccggcagaacccagcccctgctgggcagcatcagagacctgctgtgggagaccatcgacgtgaacggcaccgagctgaactgcagctgggtgcacctggacctgggcagcgacgtggcccagcccctgctgaccctgcccggcaccgcctgcggccccggcctggtgtgcatcgaccacagatgccagagagtggacctgctgggcgcccaggagtgcagaagcaagtgccacggccacggcgtgtgcgacagcaacagacactgctactgcgaggagggctgggccccccccgactgcaccacccagctgaaggccaccagcagcctgaccaccggcctgctgctgagcctgctggtgctgctggtgctggtgatgctgggcgccagctactggtacagagccagactgcaccagagactgtgccagctgaagggccccacctgccagtacagagccgcccagagcggccccagcgagagacccggccccccccagagagccctgctggccagaggcaccaaggccgagctggccgacagacccaacccccccaccagacccctgcccgccgaccccgtggtgagaagccccaagagccagggccccgccaagccccccccccccagaaagcccctgcccgccgacccccagggcagatgccccagcggcgacctgcccggccccggcgccggcatcccccccctggtggtgcccagcagacccgccccccccccccccaccgtgagcagcctgtacctgtag

SEQ ID NO: 265046 - DNA, 2874 bp, Artificial Sequence
  derived and/or modified sequence
gcgcggcgctgctgggttctccgaggcgacctggccgccggccgctcctccgcgcgctgttccgcacttgctgccctcgcccggcccggagcgccgctgccatgcggctggcgctgctctgggccctggggctcctgggcgcgggcagccctctgccttcctggccgctcccaaatataggtggcactgaggagcagcaggcagagtcagagaaggccccgagggagcccttggagccccaggtccttcaggacgatctcccaattagcctcaaaaaggtgcttcagaccagtctgcctgagcccctgaggatcaagttggagctggacggtgacagtcatatcctggagctgctacagaatagggagttggtcccaggccgcccaaccctggtgtggtaccagcccgatggcactcgggtggtcagtgagggacacactttggagaactgctgctaccagggaagagtgcggggatatgcaggctcctgggtgtccatctgcacctgctctgggctcagaggcttggtggtcctgaccccagagagaagctataccctggagcaggggcctggggaccttcagggtcctcccattatttcgcgaatccaagatctccacctgccaggccacacctgtgccctgagctggcgggaatctgtacacactcagaagccaccagagcaccccctgggacagcgccacattcgccggaggcgggatgtggtaacagagaccaagactgtggagttggtgattgtggctgatcactcggaggcccagaaataccgggacttccagcacctgctaaaccgcacactggaagtggccctcttgctggacacattcttccggcccctgaatgtacgagtggcactagtgggcctggaggcctggacccagcgtgacctggtggagatcagcccaaacccagctgtcaccctcgaaaacttcctccactggcgcagggcacatttgctgcctcgattgccccatgacagtgcccagctggtgactggtacttcattctctgggcctacggtgggcatggccattcagaactccatctgttctcctgacttctcaggaggtgtgaacatggaccactccaccagcatcctgggagtcgcctcctccatagcccatgagttgggccacagcctgggcctggaccatgatttgcctgggaatagctgcccctgtccaggtccagccccagccaagacctgcatcatggaggcctccacagacttcctaccaggcctgaacttcagcaactgcagccgacgggccctggagaaagccctcctggatggaatgggcagctgcctcttcgaacggctgcctagcctaccccctatggctgctttctgcggaaatatgtttgtggagccgggcgagcagtgtgactgtggcttcctggatgactgcgtcgatccctgctgtgattctttgacctgccagctgaggccaggtgcacagtgtgcatctgacggaccctgttgtcaaaattgccagctgcgcccgtctggctggcagtgtcgtcctaccagaggggattgtgacttgcctgaattctgcccaggagacagctcccagtgtccccctgatgtcagcctaggggatggcgagccctgcgctggcgggcaagctgtgtgcatgcacgggcgttgtgcctcctatgcccagcagtgccagtcactttggggacctggagcccagcccgctgcgccactttgcctccagacagctaatactcggggaaatgcttttgggagctgtgggcgcaaccccagtggcagttatgtgtcctgcacccctagagatgccatttgtgggcagctccagtgccagacaggtaggacccagcctctgctgggctccatccgggatctactctgggagacaatagatgtgaatgggactgagctgaactgcagctgggtgcacctggacctgggcagtgatgtggcccagcccctcctgactctgcctggcacagcctgtggccctggcctggtgtgtatagaccatcgatgccagcgtgtggatctcctgggggcacaggaatgtcgaagcaaatgccatggacatggggtctgtgacagcaacaggcactgctactgtgaggagggctgggcaccccctgactgcaccactcagctcaaagcaaccagctccctgaccacagggctgctcctcagcctcctggtcttattggtcctggtgatgcttggtgccagctactggtaccgtgcccgcctgcaccagcgactctgccagctcaagggacccacctgccagtacagggcagcccaatctggtccctctgaacggccaggacctccgcagagggccctgctggcacgaggcactaaggctgagctggctgaccgacccaatccccctacccgccctctgcccgctgacccggtggtgagaagcccgaagtctcaggggccagccaagcccccacccccaaggaagccactgcctgccgacccccagggccggtgcccatcgggtgacctgcccggcccaggggctggaatcccgcccctagtggtaccctccagaccagcgccaccgcctccgacagtgtcctcgctctacctctgacctctccggaggttccgctgcctccaagccggacttagggcttcaagaggcgggcgtgccctctggagtcccctaccatgactgaaggcgccagagactggcggtgtcttaagactccgggcaccgccacgcgctgtcaagcaacactctgcggacctgccggcgtagttgcagcgggggcttggggaggggctgggggttggacgggattgaggaaggtccgcacagcctgtctctgctcagttgcaataaacgt

SEQ ID NO: 265047 - protein, 862 aa, Artificial Sequence
  derived and/or modified sequence
MRLALLWALGLLGAGSPLPSWPLPNIGGTEEQQAESEKAPREPLEPQVLQDDLPISLKKVLQTSLPEPLRIKLELDGDSHILELLQNRELVPGRPTLVWYQPDGTRVVSEGHTLENCCYQGRVRGYAGSWVSICTCSGLRGLVVLTPERSYTLEQGPGDLQGPPIISRIQDLHLPGHTCALSWRESVHTQKPPEHPLGQRHIRRRRDVVTETKTVELVIVADHSEAQKYRDFQHLLNRTLEVALLLDTFFRPLNVRVALVGLEAWTQRDLVEISPNPAVTLENFLHWRRAHLLPRLPHDSAQLVTGTSFSGPTVGMAIQNSICSPDFSGGVNMDHSTSILGVASSIAHELGHSLGLDHDLPGNSCPCPGPAPAKTCIMEASTDFLPGLNFSNCSRRALEKALLDGMGSCLFERLPSLPPMAAFCGNMFVEPGEQCDCGFLDDCVDPCCDSLTCQLRPGAQCASDGPCCQNCQLRPSGWQCRPTRGDCDLPEFCPGDSSQCPPDVSLGDGEPCAGGQAVCMHGRCASYAQQCQSLWGPGAQPAAPLCLQTANTRGNAFGSCGRNPSGSYVSCTPRDAICGQLQCQTGRTQPLLGSIRDLLWETIDVNGTELNCSWVHLDLGSDVAQPLLTLPGTACGPGLVCIDHRCQRVDLLGAQECRSKCHGHGVCDSNRHCYCEEGWAPPDCTTQLKATSSLTTGLLLSLLVLLVLVMLGASYWYRARLHQRLCQLKGPTCQYRAAQSGPSERPGPPQRALLARGTKASALSFPAPPSRPLPPDPVSKRLQAELADRPNPPTRPLPADPVVRSPKSQGPAKPPPPRKPLPADPQGRCPSGDLPGPGAGIPPLVVPSRPAPPPPTVSSLYL

SEQ ID NO: 265048 - DNA, 2589 bp, Artificial Sequence
  derived and/or modified sequence
atgcggctagctctgctgtgggcattaggccttctaggggccgggtccccattgccctcttggcccctgcctaatataggtggtacagaggagcaacaggctgaatcggaaaaggcgccgcgggagccgttggaacctcaggtactccaggacgacctgcctattagcctgaaaaaggtgttgcagacaagcctgcccgagcccctcaggattaagctggaactcgatggcgatagtcatatccttgaacttttacaaaacagagaattagtgccagggcgaccaaccttagtttggtatcagcccgatgggactcgagtggtatccgaaggccatacgttggagaactgctgctaccagggccgcgttagaggctacgccggcagctgggtctcaatctgcacttgctctgggctgcgtggactagtcgtgctcacccctgagcgcagttacacactcgagcagggaccaggcgacctccaaggtccccccattattagcagaatacaggaccttcatctgccaggtcatacctgtgccctcagttggcgggagtcagtgcacacgcagaaacctcctgaacaccctcttgggcagcgacacattcgaaggagacgggacgtggtgaccgagactaagacagtggagctagtgatcgtggctgaccacagtgaggcccagaagtaccgagacttccagcacctccttaatagaacactggaggtggcgctgcttttggacacattctttagacctttgaacgtgcgtgttgccctggtgggtttggaggcttggactcagcgcgatctggttgaaatctcaccaaatcctgctgtaactctcgagaatttcctacattggcggcgcgcgcacctgctccctagactgcctcatgatagtgcacagttggtcacggggacctcatttagtgggcctaccgtgggcatggccatccaaaattctatttgtagccccgatttttccggcggggtaaatatggaccattccacatcaatcctgggcgtcgccagcagtatcgcccacgaactcggccactcgcttgggctggatcacgatcttccaggtaactcatgcccgtgtcctggtccagcccccgccaagacctgtattatggaagcaagcaccgattttctccctggactaaacttttccaactgttccagaagggccttagaaaaggccctgctggacgggatggggagctgtctctttgaaaggctaccaagcctgccgccaatggctgctttttgcgggaacatgtttgttgaaccaggagagcagtgcgactgtgggtttttggacgactgcgtcgatccatgttgtgacagccttacctgccagctgcgcccgggcgcccaatgcgcctccgatggtccgtgttgtcagaattgtcaactcaggcctagcggttggcagtgcaggcccacccgaggagattgtgacctcccagagttttgcccgggagacagctctcaatgcccacccgacgtcagtttgggcgacggcgaaccctgtgccggcggtcaggcagtgtgcatgcatggtcgttgtgctagctatgctcagcagtgtcagtctctgtgggggcctggagcccagcctgctgcaccactgtgcctgcagacagccaatactagaggcaacgccttcgggagctgtggccggaatcccagcggatcttatgtatcctgcacacccagagacgcaatctgtgggcagttgcaatgccagacagggaggacacagcccctgttaggatccattagggacttattgtgggagacgatcgatgtcaacggcaccgaactcaattgttcttgggttcatttggatcttggatccgatgtcgctcaacctctccttaccttgccggggaccgcctgtggcccagggctcgtctgcatcgatcaccgctgccaacgcgttgatctcctgggcgctcaggagtgccgtagtaagtgtcatgggcacggagtgtgcgacagcaacagacactgctattgcgaagagggttgggctccacccgactgtactacacagttaaaagccactagctcgttaacaactgggctgttactgtctcttctcgtgttgcttgtgctggtaatgctgggggcctcttactggtacagagcccgactgcaccagcggctgtgccaactaaaagggccaacctgccagtacagggcggcccaatcaggcccatccgaaaggcctggaccacctcagcgggctctcctggctagggggacgaaagcctctgccttgtctttccctgccccaccatcacggcccctgccccccgatcccgtgtcaaaaaggttgcaggccgagctcgctgatcgacccaatccgcccacgcgccccctccccgctgatcctgtggtgcgctcccctaagagtcagggccctgctaaaccaccccctccaaggaagccccttcctgctgatcctcaggggcgatgcccaagtggggatcttcccggacccggggccggtattccacctctcgtggtgccatctcgaccagcacctccaccaccaacagtaagcagcttatacctttag

SEQ ID NO: 265049 - DNA, 2589 bp, Artificial Sequence
  derived and/or modified sequence
atgaggctggccctgctgtgggccctgggcctgctgggcgccggcagccccctgcccagctggcccctgcccaacatcggcggcacagaggagcagcaggccgagagcgagaaggccccccgggagcccctggagccccaggtgctgcaggatgacctgcccatcagcctgaagaaggtgctgcagaccagcctgcctgagcccctgcgcatcaagctggagctggatggagacagccacatcctggagctgctgcagaaccgggagctggtgcccggccggcccaccctggtgtggtaccagccagatggcaccagggtggtgtctgagggccacaccctggagaactgctgctaccagggccgggtgcggggctacgccggctcctgggtgtccatctgcacctgcagcggcctgcggggcctggtggtgctgaccccagagaggagctacaccctggagcagggccctggggacctgcagggcccccccatcatcagccgcatccaggacctgcacctgcccggccacacctgtgccctgtcctggagggagagcgtgcacacccagaagcccccagagcaccccctgggccagaggcacatcagaagaagaagagatgtggtgacagagaccaagacagtggagctggtgattgtggccgaccacagcgaggcccagaagtacagagacttccagcacctgctgaacagaaccctggaggtggccctgctgctggacaccttcttccggcccctgaatgtgcgggtggccctggtgggcctggaggcctggacccagagggacctggtggagatcagccccaacccagctgtgaccctggagaacttcctgcactggaggcgggcccacctgctgccccggctgccccatgacagcgcccagctggtgacaggcaccagcttcagcggccccaccgtgggcatggccatccagaacagcatctgcagcccagacttcagcggcggcgtgaacatggaccacagcaccagcatcctgggcgtggccagcagcatcgcccacgagctgggccacagcctgggcctggaccatgacctgcccggcaacagctgcccctgccccggccctgccccagccaagacctgcatcatggaggccagcacagacttcctgcccggcctgaacttcagcaactgcagcagaagagccctggagaaggccctgctggatggcatgggcagctgcctgtttgagcggctgcccagcctgccccccatggccgccttctgtggcaacatgtttgtggagcctggagagcagtgtgactgtggcttcctggatgactgtgtggacccctgctgtgacagcctgacctgccagctgcggcctggggcccagtgtgccagtgatggcccctgctgccagaactgccagctgcggcccagcggctggcagtgccggcccaccaggggggactgtgacctgcctgagttctgccctggggacagcagccagtgccccccagatgtgtccctgggagatggagagccctgtgccggcggccaggccgtgtgcatgcacggccgctgtgccagctatgcccagcagtgccagagcctgtggggccctggggcccagcctgctgcccccctgtgcctgcagacagccaacaccagaggaaatgccttcggcagctgtggcaggaaccccagcggcagctatgtgtcctgcaccccaagagatgccatctgtggccagctgcagtgccagacaggccgcacccagcccctgctgggcagcatccgggacctgctgtgggagaccattgatgtgaatggaacagagctgaactgctcctgggtgcacctggacctgggcagtgatgtggcccagcccctgctgaccctgcctggaacagcctgtggccctggcctggtgtgcatcgaccaccgctgccagagggtggacctgctgggcgcccaggagtgccgcagcaagtgccacggccacggcgtgtgtgacagcaacagacactgctactgtgaggagggctgggcccccccagactgcaccacccagctgaaggccaccagcagcctgaccaccggcctgctgctgagcctgctggtgctgctggtgctggtgatgctgggcgccagctactggtaccgggcccggctgcaccagaggctgtgccagctgaagggccccacctgccagtacagagctgcccagagcggccccagcgagcggcccggccccccccagagggccctgctggcccggggcaccaaggccagcgccctgtccttccctgccccacccagccggcccctgcccccagaccctgtgtccaagaggctgcaggccgagctggccgaccggcccaacccccccacccggcccctgcctgctgaccctgtggtgcgcagccccaagagccagggccctgccaagcccccaccacccaggaagcccctgcctgctgacccccagggccgctgccccagcggggacctgcccggccctggagctggcatcccccccctggtggtgcccagcaggcctgcccctcctccacccaccgtgagcagcctgtacctgtag

SEQ ID NO: 265050 - DNA, 2589 bp, Artificial Sequence
  derived and/or modified sequence
atgcggctggccctgctgtgggccctgggcctgctgggcgccggcagccccttgcccagctggccgctcccaaacatcgggggcactgaggagcagcaagctgagagtgagaaagccccccgagagccactcgagcctcaggttctccaggacgatttaccaattagtttgaaaaaagtgctgcagacttccctgcccgagcctctacggattaaactggaattagacggcgatagtcatatcctggagctgctccagaaccgggaattagttcctggacgccccactttggtgtggtatcaaccagatggtaccagggtcgtgtctgaaggccacaccttagaaaactgctgttatcaaggacgagttcgagggtacgccggctcatgggtgtccatctgcacctgttccgggctccggggccttgtggtcctgaccccagaacggagctatacactcgaacaagggccaggcgatctccaggggccccccattattagcagaatacaggacttacacttgcctggccatacctgcgccctgagttggagagaatccgtgcatacccagaagcctcccgaacacccactgggccagcggcatatccgtcgtcgcagagatgtagtgactgaaaccaagaccgtcgagctcgttatcgttgccgatcatagtgaagctcagaaataccgagattttcaacacctactcaaccgtaccctggaggtcgctctgctgttagacactttcttccgtccactgaatgttagggttgccttagtaggtctggaagcctggactcagcgtgacctggttgaaatatccccaaacccagccgttaccctcgagaactttctccattggaggagagcccacctacttccgagactgccccacgatagcgctcagctagtcacaggcacaagttttagcgggccaacggtcggcatggctatacagaatagcatttgctcccctgactttagcggcggtgtgaacatggatcacagtacatctattctgggcgttgccagttctatagcccacgagctggggcactcgctggggctggaccacgacctgccagggaattcttgcccctgtccgggcccagcgccagccaaaacatgcatcatggaggcctcgactgactttctgccgggactgaatttttctaattgcagccggcgggccctggaaaaagccctgcttgacgggatgggatcttgcctctttgagaggctaccttcactgccaccgatggctgccttttgtggcaatatgtttgtggagcctggtgaacagtgtgattgcggattcctcgacgactgtgttgatccctgttgcgactccttgacttgtcagctcagacctggtgcccagtgcgcttctgacggcccttgttgtcagaactgtcagcttaggccaagtggatggcagtgtaggcctacccgcggagactgcgacctgcctgagttctgcccgggtgatagcagtcagtgtccaccggatgtgtccctaggtgacggcgaaccctgtgcaggaggtcaagctgtgtgtatgcacggtcggtgtgcctcatacgctcagcagtgccagagcctctggggaccgggcgcgcagcctgcagccccactctgccttcagacggcgaacacacgcgggaatgcctttggctcctgcggcaggaaccctagtggttcttatgtgagctgtacgcctcgagatgccatttgtggacagctgcaatgtcagacaggaagaactcagcccctgctgggctccatcagggacctgctgtgggagacaatagatgtgaacggtacggaactaaactgctcttgggtgcatctagacttaggcagtgatgtggcgcagccattactcacactccctggaaccgcctgtggcccaggactcgtgtgtatcgatcatcggtgtcagagggtggacctgctcggcgcccaagagtgccggtccaagtgtcacgggcacggggtatgcgattccaatcgccactgttattgcgaggagggatgggctcccccggattgcaccactcaactgaaggctacctcgtccttaacaaccggcctgctgctatccctcctggtcctgttagttctggtaatgctgggggcatcgtattggtatcgcgccagattgcaccagcgcctgtgtcagcttaagggaccaacatgccagtaccgagcagcgcagtccggaccaagcgagaggcctgggccaccccagcgagcactgttagccagaggaactaaagcctcggctctgagcttcccagcccccccctctcgccctctcccccctgatccggtgtccaagagactgcaggcagagttagccgaccgcccaaacccgcccacacggcccctgcccgccgatccggtcgtgagaagtccaaagtcgcagggtcccgcaaaacctcctccacctcgtaaaccactgcctgccgatcctcagggccgttgtccatccggcgatttacccggccctggggccggaatcccccccttggtggtgccctccagacccgcgccacctccaccgaccgtgtcaagtctgtacttatag

SEQ ID NO: 265051 - DNA, 2589 bp, Artificial Sequence
  derived and/or modified sequence
atgaggttggcactgctgtgggccctggggctcttgggcgcaggctcaccgctgcctagctggcctcttcctaacattggcggtaccgaggagcagcaggcggagagtgagaaggctccaagggagccattggaaccacaggtgctgcaagacgacctcccgatctctctcaagaaggtcttgcagaccagcttacccgaacctctgaggatcaagttggaattagacggagactctcacattctggagctgctacagaacagggagcttgtgcccggtcggccaacacttgtttggtaccagccagacggaaccagagtagtttctgaagggcatacgcttgaaaactgctgttatcaaggcagagtgagaggatacgccggatcttgggtaagtatctgcacctgctctggcttacgcggtctcgtagtactcaccccagagaggtcatatactcttgagcaaggcccaggtgaccttcaggggcctccaataattagccggatacaggacctgcacctacctgggcacacatgcgctctttcttggagagagtccgtccacactcagaaacccccagagcatccactggggcagaggcacatccggcgtcgccgtgacgtggtgactgaaaccaagaccgtggagctcgttatcgtcgctgaccatagcgaagcccaaaagtatagagacttccaacacttactgaacaggaccctggaggtagcgctactcctggataccttcttcaggcccctcaacgtgagagttgcgcttgttggtctcgaggcttggacacagcgggacctggtggagatctcacctaaccccgctgtcacactggaaaactttttgcattggagacgggcacacttgctgccccgtctgccacacgattctgctcagctggtcactggaacatcgttctccgggccaaccgtgggcatggctatccaaaactcaatttgcagtccagacttcagtggtggggtgaatatggatcattctaccagtatccttggcgtggcttcttccattgcacacgagctgggacatagtctgggcctagatcatgacttgccgggaaacagctgcccctgtcctggcccagctccagccaaaacttgtatcatggaggcgagcaccgactttctgcccggattgaatttctctaactgctcacggagggccctagagaaagcccttctcgatggtatgggaagttgcctgtttgaacggctaccttcactccccccaatggctgctttttgcggaaatatgttcgtcgagcctggggaacagtgcgattgcggattcttagacgactgcgtagacccttgctgcgacagcctgacttgccagctccggccaggggcacagtgtgcctctgacggtccttgttgccagaattgtcaactgagaccctcaggctggcagtgtaggccaacaaggggagactgcgaccttccggagttctgccccggtgacagctctcaatgcccgcctgacgtcagtctaggagacggcgagccttgcgccggtggccaggccgtctgtatgcatggcagatgcgcctcctacgcccaacagtgtcagtcactctgggggccaggcgcacagccagccgctccactgtgcttacagactgccaatactcggggtaatgcattcgggagctgcggacgcaatccatctggatcttacgtgtcttgtacccctcgggatgcaatctgcggccagctccagtgccaaaccggacgcacgcaaccgctgttaggttctatcagagacttgctctgggaaacaatcgatgtcaatggaactgagctgaactgtagttgggtgcacttagaccttggtagcgatgtggcccagccgctgctgaccttaccaggcactgcatgcggtcctggactggtgtgcatcgaccaccggtgccagagggtcgatctgctgggggctcaggagtgtagatcaaagtgtcatgggcacggggtatgcgacagcaaccggcactgttattgtgaggagggttgggccccaccagattgcaccacacaacttaaagcgacctcttctcttacgaccggtctcctgctctcactgctggtcctcctagtactggtcatgctgggtgcttcatactggtatcgcgctagactacaccagcgcctgtgtcagctgaaaggacctacttgtcaatatcgcgctgcccagtctggtccatccgagcgacctggcccaccacagcgcgctttgctcgccaggggcaccaaggccagcgccctgagctttccagcccctccatctaggcctctgccacctgatcccgtgtctaaacgactccaggccgagttggcagaccgtccaaatccgcctacccgaccgctcccagctgaccctgtcgtgagatcccctaaaagccaggggccagcaaagcctccaccccctagaaagcctctgcccgcagacccacagggtcgctgcccgagcggtgatctcccgggacctggtgccggtattcctcctctcgttgtgcctagtcgccctgcacctcctccgccaacggttagctctttgtacctctag

SEQ ID NO: 265052 - DNA, 2589 bp, Artificial Sequence
  derived and/or modified sequence
atgagactggccctgctgtgggccctgggcctgctgggcgccggcagccccctgcccagctggcccctgcccaacatcggcggcaccgaggagcagcaggccgagagcgagaaggcccccagagagcccctggagccccaggtgctgcaggacgacctgcccatcagcctgaagaaggtgctgcagaccagcctgcccgagcccctgagaatcaagctggagctggacggcgacagccacatcctggagctgctgcagaacagagagctggtgcccggcagacccaccctggtgtggtaccagcccgacggcaccagagtggtgagcgagggccacaccctggagaactgctgctaccagggcagagtgagaggctacgccggcagctgggtgagcatctgcacctgcagcggcctgagaggcctggtggtgctgacccccgagagaagctacaccctggagcagggccccggcgacctgcagggcccccccatcatcagcagaatccaggacctgcacctgcccggccacacctgcgccctgagctggagagagagcgtgcacacccagaagccccccgagcaccccctgggccagagacacatcagaagaagaagagacgtggtgaccgagaccaagaccgtggagctggtgatcgtggccgaccacagcgaggcccagaagtacagagacttccagcacctgctgaacagaaccctggaggtggccctgctgctggacaccttcttcagacccctgaacgtgagagtggccctggtgggcctggaggcctggacccagagagacctggtggagatcagccccaaccccgccgtgaccctggagaacttcctgcactggagaagagcccacctgctgcccagactgccccacgacagcgcccagctggtgaccggcaccagcttcagcggccccaccgtgggcatggccatccagaacagcatctgcagccccgacttcagcggcggcgtgaacatggaccacagcaccagcatcctgggcgtggccagcagcatcgcccacgagctgggccacagcctgggcctggaccacgacctgcccggcaacagctgcccctgccccggccccgcccccgccaagacctgcatcatggaggccagcaccgacttcctgcccggcctgaacttcagcaactgcagcagaagagccctggagaaggccctgctggacggcatgggcagctgcctgttcgagagactgcccagcctgccccccatggccgccttctgcggcaacatgttcgtggagcccggcgagcagtgcgactgcggcttcctggacgactgcgtggacccctgctgcgacagcctgacctgccagctgagacccggcgcccagtgcgccagcgacggcccctgctgccagaactgccagctgagacccagcggctggcagtgcagacccaccagaggcgactgcgacctgcccgagttctgccccggcgacagcagccagtgcccccccgacgtgagcctgggcgacggcgagccctgcgccggcggccaggccgtgtgcatgcacggcagatgcgccagctacgcccagcagtgccagagcctgtggggccccggcgcccagcccgccgcccccctgtgcctgcagaccgccaacaccagaggcaacgccttcggcagctgcggcagaaaccccagcggcagctacgtgagctgcacccccagagacgccatctgcggccagctgcagtgccagaccggcagaacccagcccctgctgggcagcatcagagacctgctgtgggagaccatcgacgtgaacggcaccgagctgaactgcagctgggtgcacctggacctgggcagcgacgtggcccagcccctgctgaccctgcccggcaccgcctgcggccccggcctggtgtgcatcgaccacagatgccagagagtggacctgctgggcgcccaggagtgcagaagcaagtgccacggccacggcgtgtgcgacagcaacagacactgctactgcgaggagggctgggccccccccgactgcaccacccagctgaaggccaccagcagcctgaccaccggcctgctgctgagcctgctggtgctgctggtgctggtgatgctgggcgccagctactggtacagagccagactgcaccagagactgtgccagctgaagggccccacctgccagtacagagccgcccagagcggccccagcgagagacccggccccccccagagagccctgctggccagaggcaccaaggccagcgccctgagcttccccgccccccccagcagacccctgccccccgaccccgtgagcaagagactgcaggccgagctggccgacagacccaacccccccaccagacccctgcccgccgaccccgtggtgagaagccccaagagccagggccccgccaagccccccccccccagaaagcccctgcccgccgacccccagggcagatgccccagcggcgacctgcccggccccggcgccggcatcccccccctggtggtgcccagcagacccgccccccccccccccaccgtgagcagcctgtacctgtag

SEQ ID NO: 265053 - DNA, 2946 bp, Artificial Sequence
  derived and/or modified sequence
gcgcggcgctgctgggttctccgaggcgacctggccgccggccgctcctccgcgcgctgttccgcacttgctgccctcgcccggcccggagcgccgctgccatgcggctggcgctgctctgggccctggggctcctgggcgcgggcagccctctgccttcctggccgctcccaaatataggtggcactgaggagcagcaggcagagtcagagaaggccccgagggagcccttggagccccaggtccttcaggacgatctcccaattagcctcaaaaaggtgcttcagaccagtctgcctgagcccctgaggatcaagttggagctggacggtgacagtcatatcctggagctgctacagaatagggagttggtcccaggccgcccaaccctggtgtggtaccagcccgatggcactcgggtggtcagtgagggacacactttggagaactgctgctaccagggaagagtgcggggatatgcaggctcctgggtgtccatctgcacctgctctgggctcagaggcttggtggtcctgaccccagagagaagctataccctggagcaggggcctggggaccttcagggtcctcccattatttcgcgaatccaagatctccacctgccaggccacacctgtgccctgagctggcgggaatctgtacacactcagaagccaccagagcaccccctgggacagcgccacattcgccggaggcgggatgtggtaacagagaccaagactgtggagttggtgattgtggctgatcactcggaggcccagaaataccgggacttccagcacctgctaaaccgcacactggaagtggccctcttgctggacacattcttccggcccctgaatgtacgagtggcactagtgggcctggaggcctggacccagcgtgacctggtggagatcagcccaaacccagctgtcaccctcgaaaacttcctccactggcgcagggcacatttgctgcctcgattgccccatgacagtgcccagctggtgactggtacttcattctctgggcctacggtgggcatggccattcagaactccatctgttctcctgacttctcaggaggtgtgaacatggaccactccaccagcatcctgggagtcgcctcctccatagcccatgagttgggccacagcctgggcctggaccatgatttgcctgggaatagctgcccctgtccaggtccagccccagccaagacctgcatcatggaggcctccacagacttcctaccaggcctgaacttcagcaactgcagccgacgggccctggagaaagccctcctggatggaatgggcagctgcctcttcgaacggctgcctagcctaccccctatggctgctttctgcggaaatatgtttgtggagccgggcgagcagtgtgactgtggcttcctggatgactgcgtcgatccctgctgtgattctttgacctgccagctgaggccaggtgcacagtgtgcatctgacggaccctgttgtcaaaattgccagctgcgcccgtctggctggcagtgtcgtcctaccagaggggattgtgacttgcctgaattctgcccaggagacagctcccagtgtccccctgatgtcagcctaggggatggcgagccctgcgctggcgggcaagctgtgtgcatgcacgggcgttgtgcctcctatgcccagcagtgccagtcactttggggacctggagcccagcccgctgcgccactttgcctccagacagctaatactcggggaaatgcttttgggagctgtgggcgcaaccccagtggcagttatgtgtcctgcacccctagagatgccatttgtgggcagctccagtgccagacaggtaggacccagcctctgctgggctccatccgggatctactctgggagacaatagatgtgaatgggactgagctgaactgcagctgggtgcacctggacctgggcagtgatgtggcccagcccctcctgactctgcctggcacagcctgtggccctggcctggtgtgtatagaccatcgatgccagcgtgtggatctcctgggggcacaggaatgtcgaagcaaatgccatggacatggggtctgtgacagcaacaggcactgctactgtgaggagggctgggcaccccctgactgcaccactcagctcaaagcaaccagctccctgaccacagggctgctcctcagcctcctggtcttattggtcctggtgatgcttggtgccagctactggtaccgtgcccgcctgcaccagcgactctgccagctcaagggacccacctgccagtacagggcagcccaatctggtccctctgaacggccaggacctccgcagagggccctgctggcacgaggcactaaggctagtgctctcagcttcccggcccccccttccaggccgctgccgcctgaccctgtgtccaagagactccaggctgagctggctgaccgacccaatccccctacccgccctctgcccgctgacccggtggtgagaagcccgaagtctcaggggccagccaagcccccacccccaaggaagccactgcctgccgacccccagggccggtgcccatcgggtgacctgcccggcccaggggctggaatcccgcccctagtggtaccctccagaccagcgccaccgcctccgacagtgtcctcgctctacctctgacctctccggaggttccgctgcctccaagccggacttagggcttcaagaggcgggcgtgccctctggagtcccctaccatgactgaaggcgccagagactggcggtgtcttaagactccgggcaccgccacgcgctgtcaagcaacactctgcggacctgccggcgtagttgcagcgggggcttggggaggggctgggggttggacgggattgaggaaggtccgcacagcctgtctctgctcagttgcaataaacgt

SEQ ID NO: 265054 - protein, 863 aa, Artificial Sequence
  derived and/or modified sequence
MRLALLWALGLLGAGSPLPSWPLPNIGGTEEQQAESEKAPREPLEPQVLQDDLPISLKKVLQTSLPEPLRIKLELDGDSHILELLQNRELVPGRPTLVWYQPDGTRVVSEGHTLENCCYQGRVRGYAGSWVSICTCSGLRGLVVLTPERSYTLEQGPGDLQGPPIISRIQDLHLPGHTCALSWRESVHTQKPPEHPLGQRHIRRRRDVVTETKTVELVIVADHSEAQKYRDFQHLLNRTLEVALLLDTFFRPLNVRVALVGLEAWTQRDLVEISPNPAVTLENFLHWRRAHLLPRLPHDSAQLVTGTSFSGPTVGMAIQNSICSPDFSGGVNMDHSTSILGVASSIAHELGHSLGLDHDLPGNSCPCPGPAPAKTCIMEASTDFLPGLNFSNCSRRALEKALLDGMGSCLFERLPSLPPMAAFCGNMFVEPGEQCDCGFLDDCVDPCCDSLTCQLRPGAQCASDGPCCQNCQLRPSGWQCRPTRGDCDLPEFCPGDSSQCPPDVSLGDGEPCAGGQAVCMHGRCASYAQQCQSLWGPGAQPAAPLCLQTANTRGNAFGSCGRNPSGSYVSCTPRDAICGQLQCQTGRTQPLLGSIRDLLWETIDVNGTELNCSWVHLDLGSDVAQPLLTLPGTACGPGLVCIDHRCQRVDLLGAQECRSKCHGHGVCDSNRHCYCEEGWAPPDCTTQLKATSSLTTGLLLSLLVLLVLVMLGASYWYRARLHQRLCQLKGPTCQYRAAQSGPSERPGPPQRALLARGTKQASALSFPAPPSRPLPPDPVSKRLQAELADRPNPPTRPLPADPVVRSPKSQGPAKPPPPRKPLPADPQGRCPSGDLPGPGAGIPPLVVPSRPAPPPPTVSSLYL

SEQ ID NO: 265055 - DNA, 2592 bp, Artificial Sequence
  derived and/or modified sequence
atgcgtcttgctctgctctgggcattgggcctgttgggtgccggttcaccgctgccaagctggccgctcccaaacatcggcggaacagaggaacaacaagcagaatcggaaaaagcaccccgagaaccccttgaaccccaggtgttgcaggatgacttgccaatctcactcaagaaagtcctgcaaacttctctaccagagccgctccgtattaagctcgagctcgatggggactctcatatcttagagctgttgcagaaccgtgagctggtcccaggacgcccgaccttggtctggtaccagccagatggcacccgggtggtttccgagggccatactctggagaactgctgctatcagggacgcgtccgaggttacgctggctcctgggtgagcatttgcacctgcagcggcctccgagggcttgtggtgcttacacctgaacgatcctacaccctggaacaggggccgggcgatctgcagggtcctcctattatctcgcggatccaggatcttcatctgccaggtcatacttgcgctttgagctggagagagtccgtccacacccagaagccacccgagcatccactggggcagcgacatataagaagacgtagggacgtggtcaccgagaccaagacagttgagcttgtaattgttgccgaccatagcgaggcccagaagtatcgagacttccagcatttgctaaatcggaccctcgaagttgcgctcctcttggatacattttttcggccactcaatgtaagggtcgccctggtgggcttggaggcctggacccagcgggatttggtggaaatatcccctaatcccgcagtaaccctggaaaattttcttcattggagacgtgcccacctcttaccacgcctcccacatgattctgcacagcttgtgaccggcacttctttttcaggaccgacagtcgggatggctatccaaaactctatttgctcacccgatttctccgggggcgttaacatggaccattcaacgagtattctgggggtggcctcttctatagcccacgaactgggacatagcttagggctggaccacgacttgcccgggaactcatgcccttgtccagggcccgcccctgctaaaacgtgcattatggaggcctcgaccgactttttacctggtttaaatttttccaactgcagtagaagggcgctcgaaaaggccctgctggacggtatgggctcctgtctcttcgagcggttgccttcactgcctccaatggcggccttctgtgggaatatgtttgtggagcctggcgagcagtgcgactgcgggttcctggacgactgtgtagatccctgttgtgattcgctaacatgccaactgcgtccaggcgcccagtgcgcctcggatgggccctgctgccagaattgtcagttgaggccttccgggtggcagtgtcggccgacccggggcgattgtgatctgcctgaattctgccctggagatagcagtcagtgcccgcctgatgtatcgctgggcgacggtgaaccttgtgccggagggcaggccgtttgcatgcatgggaggtgtgcgtcctacgcacagcagtgtcagtcactgtggggccctggagcccaacccgcagcccctctgtgcctacaaaccgccaacactcgaggaaacgcatttggtagctgcgggagaaacccgtcaggttcttatgtgtcctgtacacctagagatgctatctgtgggcagctccagtgtcagaccggccgcactcaacctctgctcggtagcatccgcgatctcctttgggagaccattgatgtgaatggaactgagctgaattgctcttgggtccatctcgatctggggtcagacgtggcccagcctttgttgacactgcccgggacagcatgcggccctggactcgtgtgtattgaccacaggtgccagcgggttgatctgttgggagcccaagaatgccgttccaaatgtcacggtcacggcgtttgtgatagtaacaggcactgttactgcgaagagggatgggctccccctgactgcaccacacagctgaaagccacatcatccctgactactggcctgttgctgtccttactggtactcctggttttagtcatgctcggggcatcttattggtatcgtgccagattgcaccagagactatgccagctcaagggacccacatgccaataccgggctgcccagagcgggccgagcgaaaggccaggcccacctcagagagcgttgctcgcgagaggaactaagcaggcctctgccctgtccttccccgcccctcccagcaggccactgccaccggacccagtgagtaaacgcctgcaagctgagttggcggaccggcctaacccccctaccaggcctcttcccgctgacccagtggttcggtcccctaagtctcagggtcccgccaagcctccccccccccgcaagcctctgccagccgatcctcaggggaggtgcccaagtggggacctgcctggcccgggagctggtattccgccattggtcgtgccctccagaccggcccctccccctccaacagtttccagtctgtatctatag

SEQ ID NO: 265056 - DNA, 2592 bp, Artificial Sequence
  derived and/or modified sequence
atgaggctggccctgctgtgggccctgggcctgctgggcgccggcagccccctgcccagctggcccctgcccaacatcggcggcacagaggagcagcaggccgagagcgagaaggccccccgggagcccctggagccccaggtgctgcaggatgacctgcccatcagcctgaagaaggtgctgcagaccagcctgcctgagcccctgcgcatcaagctggagctggatggagacagccacatcctggagctgctgcagaaccgggagctggtgcccggccggcccaccctggtgtggtaccagccagatggcaccagggtggtgtctgagggccacaccctggagaactgctgctaccagggccgggtgcggggctacgccggctcctgggtgtccatctgcacctgcagcggcctgcggggcctggtggtgctgaccccagagaggagctacaccctggagcagggccctggggacctgcagggcccccccatcatcagccgcatccaggacctgcacctgcccggccacacctgtgccctgtcctggagggagagcgtgcacacccagaagcccccagagcaccccctgggccagaggcacatcagaagaagaagagatgtggtgacagagaccaagacagtggagctggtgattgtggccgaccacagcgaggcccagaagtacagagacttccagcacctgctgaacagaaccctggaggtggccctgctgctggacaccttcttccggcccctgaatgtgcgggtggccctggtgggcctggaggcctggacccagagggacctggtggagatcagccccaacccagctgtgaccctggagaacttcctgcactggaggcgggcccacctgctgccccggctgccccatgacagcgcccagctggtgacaggcaccagcttcagcggccccaccgtgggcatggccatccagaacagcatctgcagcccagacttcagcggcggcgtgaacatggaccacagcaccagcatcctgggcgtggccagcagcatcgcccacgagctgggccacagcctgggcctggaccatgacctgcccggcaacagctgcccctgccccggccctgccccagccaagacctgcatcatggaggccagcacagacttcctgcccggcctgaacttcagcaactgcagcagaagagccctggagaaggccctgctggatggcatgggcagctgcctgtttgagcggctgcccagcctgccccccatggccgccttctgtggcaacatgtttgtggagcctggagagcagtgtgactgtggcttcctggatgactgtgtggacccctgctgtgacagcctgacctgccagctgcggcctggggcccagtgtgccagtgatggcccctgctgccagaactgccagctgcggcccagcggctggcagtgccggcccaccaggggggactgtgacctgcctgagttctgccctggggacagcagccagtgccccccagatgtgtccctgggagatggagagccctgtgccggcggccaggccgtgtgcatgcacggccgctgtgccagctatgcccagcagtgccagagcctgtggggccctggggcccagcctgctgcccccctgtgcctgcagacagccaacaccagaggaaatgccttcggcagctgtggcaggaaccccagcggcagctatgtgtcctgcaccccaagagatgccatctgtggccagctgcagtgccagacaggccgcacccagcccctgctgggcagcatccgggacctgctgtgggagaccattgatgtgaatggaacagagctgaactgctcctgggtgcacctggacctgggcagtgatgtggcccagcccctgctgaccctgcctggaacagcctgtggccctggcctggtgtgcatcgaccaccgctgccagagggtggacctgctgggcgcccaggagtgccgcagcaagtgccacggccacggcgtgtgtgacagcaacagacactgctactgtgaggagggctgggcccccccagactgcaccacccagctgaaggccaccagcagcctgaccaccggcctgctgctgagcctgctggtgctgctggtgctggtgatgctgggcgccagctactggtaccgggcccggctgcaccagaggctgtgccagctgaagggccccacctgccagtacagagctgcccagagcggccccagcgagcggcccggccccccccagagggccctgctggcccggggcaccaagcaggccagcgccctgtccttccctgccccacccagccggcccctgcccccagaccctgtgtccaagaggctgcaggccgagctggccgaccggcccaacccccccacccggcccctgcctgctgaccctgtggtgcgcagccccaagagccagggccctgccaagcccccaccacccaggaagcccctgcctgctgacccccagggccgctgccccagcggggacctgcccggccctggggccggcatcccccccctggtggtgcccagcaggcctgcccctcctccacccaccgtgagcagcctgtacctgtag

SEQ ID NO: 265057 - DNA, 2592 bp, Artificial Sequence
  derived and/or modified sequence
atgcggctggccctgctgtgggccctgggcctgctgggcgccggcagtccccttccgtcctggccattgccaaatattggcggcaccgaagaacagcaggcagaatctgaaaaggcccccagggaacctttagagccgcaagtgttacaggatgatctccctatctccctcaagaaagtgcttcaaacaagtctacctgagccactccggataaaactggagctcgatggagacagtcacattctcgaactattgcaaaaccgcgaactcgtgccgggtcggccaaccctcgtgtggtatcagcccgatggcacgagggtcgtgtccgagggtcataccctcgagaattgctgctatcaggggcgggttcgcggctatgctggtagctgggtgtccatctgcacttgtagcggcctcaggggtttagtcgtgctcactcctgaacgtagctacaccctggaacaagggcccggtgatttgcaaggccctccgatcatatcccggatccaggacctccacttacctggccacacttgcgccctgagctggcgagagtccgtgcacactcaaaaaccacctgaacatccactcgggcagcgtcatattaggcgccgaagagacgtcgtgactgagaccaagacggtggaactagtgatcgtcgccgaccatagtgaagctcaaaagtatcgggattttcaacatctgttgaatagaaccctggaggtggctctcctccttgacacatttttccgccctctcaatgtccgggtcgcactggtgggactcgaagcctggactcagcgggacctggtagagatctctcccaatccggctgtgacactcgaaaatttcctccattggaggcgggcacacctgctgcctagactccctcatgattctgcccagctggtaaccggaacttctttcagcggaccaactgtcggaatggctatccagaactctatctgttcacctgatttctctgggggtgtaaacatggatcactctacgtccatattgggagtcgcgtcctccattgctcatgagctcggtcatagcctcgggctcgaccacgaccttcctggaaacagctgtccttgtcctggaccggcacctgcaaagacttgcattatggaggcctccactgatttcctgcctggccttaattttagtaattgcagcagaagggcactcgaaaaggctctgctggacggtatggggagctgtttgtttgaaaggctacccagcttacctcctatggccgctttctgtggaaatatgttcgtcgagccgggcgaacagtgtgattgtggcttccttgacgattgcgtggacccttgctgtgactccctcacatgccaactgcgccccggggcccaatgtgcctcagatggaccgtgctgccaaaattgccagctcaggccttcagggtggcagtgtaggcccactcggggcgattgtgacctgccagagttctgcccaggcgactccagtcagtgccctcccgatgtgagcttgggagacggcgaaccctgcgccggaggccaggccgtctgcatgcacggacgttgcgcatcctatgctcagcagtgtcagtcgctttggggcccaggagcccagcctgctgctcccctgtgcctgcaaactgcaaatacccgcggtaacgcatttgggtcctgtggtaggaatccctcaggctcctatgtctcttgcacacctagggacgccatttgtggccaactgcagtgccagaccggccggacccagcccctgctcgggagcatacgcgacctgctctgggaaacaatcgatgtgaatggtactgaactgaattgtagttgggtgcacctggacctcggaagcgacgtggcccagcccttgctgacgctcccagggacggcttgcggcccaggactggtctgcatcgaccaccgctgccaaagagttgacttactgggagcgcaggagtgtaggagcaagtgtcacggccatggggtatgcgattcaaataggcattgttactgcgaagaggggtgggctcccccagattgcacgacccagttgaaggccacctcctcgctgaccacgggactgctactatctctcctagtgctgcttgtattggtcatgctgggggcaagctattggtatcgggcgaggctgcatcagcgcctgtgtcagctgaagggaccgacgtgccagtatcgggctgcccagtcggggccctccgagcgacctggccccccacagcgggccctcctggctcgagggactaagcaggccagcgccctgtcattcccagctccaccttcacgccctctgccccctgatccagtctcaaagcgattgcaggctgaactggctgaccgccccaacccccctacccgcccactgcctgctgatcctgttgtaagaagccctaagtctcaaggtccggccaagcctccgcctcccaggaaaccactgccggccgatcctcaaggaaggtgtccctcaggagatttgccagggcccggggcaggtatcccccccctcgtggtgccaagtcggcccgcacctcctcctcctaccgtgtcctctctatatttgtag

SEQ ID NO: 265058 - DNA, 2592 bp, Artificial Sequence
  derived and/or modified sequence
atgagattggcgctgctatgggcccttggcctgctcggcgctgggagcccactgccatcctggccactgcccaatattggaggcacagaagagcagcaggcagaatcagagaaagcgcctcgcgaacctcttgaaccccaggtgctgcaggatgacttacctattagcttgaagaaggtgctgcagacctccctccccgagcctttaaggatcaaactcgaacttgatggcgactcgcatatactagagctactgcagaatcgcgagttggtccccggaagacctaccctcgtgtggtaccagccggacggaactcgggtcgtctctgaaggccacacgctcgagaactgttgctaccaaggacgtgttcgtgggtatgcagggtcatgggtcagtatttgcacgtgtagcgggcttcgagggctcgtcgtgttgacccccgaacgctcctacacactggagcagggacctggcgatctgcagggcccaccaattattagtaggattcaggacttacatttacctggacacacctgtgcactttcatggcgggaaagcgtgcatactcagaagccaccagaacatcccctgggccaaagacatattcgcagacggcgagatgttgtaaccgaaaccaagaccgttgaactcgtgatcgttgcagatcacagcgaagcgcaaaaatatcgggactttcagcaccttttaaatcgaaccttggaggtggcccttcttctggatacgttcttccgcccactcaacgtccgggtagccttggtgggcctggaggcttggactcagcgggatctggtagagatatcacctaacccagcagtaacactagaaaactttctgcattggcggagggcccacttgctgccacgcttaccacacgatagcgctcagctagttactgggacttccttctcaggaccgacagtcggaatggctattcagaattccatctgctcccccgacttctccggcggtgtgaacatggaccactccacttcaatcctgggcgtggcctcatcaatcgcgcacgaactgggccattctttggggctggaccatgacctccctggcaatagctgtccttgccccggtcccgctcctgccaagacctgcattatggaagcgagcactgactttctgcccggactcaacttttccaattgtagtcggagagccctcgaaaaggccctgctcgatggcatggggagttgccttttcgaaaggctgccttcgttgccccctatggctgctttctgtggaaatatgtttgtcgagcctggagagcagtgtgactgtggcttcctagacgactgcgttgatccatgttgcgacagccttacatgccagctgcggcctggtgcccagtgtgcaagcgacgggccatgttgtcagaattgtcaactgcgccctagcggttggcagtgtcggccaactcgtggggactgcgaccttccagagttttgtcctggagactcgtcacagtgtccaccagacgtatccctgggcgatggcgagccctgtgcaggtgggcaggccgtgtgtatgcatggacgttgcgcctcttatgctcagcagtgccagtctctgtggggacccggtgcccaacctgcagcgcctctgtgtctacagacggcaaatacccggggtaacgccttcggctcctgtggccgaaatccctctggctcctacgtatcatgcacccctagagatgccatttgtggtcagttacagtgccagacagggaggacccagccgctgctgggttccattcgggacctcctctgggagacgatcgacgtcaacggcacggagcttaactgttcgtgggttcatctcgatcttggctccgatgtggcccaacctctgctaactctgcccggaactgcctgtggacctgggctcgtgtgcatcgaccatcggtgtcaaagagtggacctgctgggtgcccaggagtgtagatccaagtgtcacggtcacggcgtctgtgactcaaaccggcactgttattgcgaagaaggctgggctcctcctgactgcaccacccagctgaaagcaacgagttcactcaccacggggttgctgctgagcctcctggtattgcttgttctcgtcatgctcggggcatcttattggtaccgggctaggttgcatcagagattatgtcaactcaaggggcctacctgccagtacagagcagcccagtcaggcccttccgaacgccctggcccaccgcagcgggctctccttgcacggggaactaagcaggcttctgctctgtcgttccccgcaccaccaagcagaccacttcctcctgatcccgtgagtaagcgcttacaggccgagctcgccgacaggcctaacccgcctaccagaccccttcccgcagatcctgtcgtgcggagccccaaaagccaggggcctgctaaaccccctccaccacggaaaccccttccggctgaccctcagggcaggtgtccaagcggtgatctgccaggccctggggcaggcatcccacctctggtcgtccctagtagacccgcaccaccaccccctaccgtgagttctctttatctatag

SEQ ID NO: 265059 - DNA, 2592 bp, Artificial Sequence
  derived and/or modified sequence
atgagactggccctgctgtgggccctgggcctgctgggcgccggcagccccctgcccagctggcccctgcccaacatcggcggcaccgaggagcagcaggccgagagcgagaaggcccccagagagcccctggagccccaggtgctgcaggacgacctgcccatcagcctgaagaaggtgctgcagaccagcctgcccgagcccctgagaatcaagctggagctggacggcgacagccacatcctggagctgctgcagaacagagagctggtgcccggcagacccaccctggtgtggtaccagcccgacggcaccagagtggtgagcgagggccacaccctggagaactgctgctaccagggcagagtgagaggctacgccggcagctgggtgagcatctgcacctgcagcggcctgagaggcctggtggtgctgacccccgagagaagctacaccctggagcagggccccggcgacctgcagggcccccccatcatcagcagaatccaggacctgcacctgcccggccacacctgcgccctgagctggagagagagcgtgcacacccagaagccccccgagcaccccctgggccagagacacatcagaagaagaagagacgtggtgaccgagaccaagaccgtggagctggtgatcgtggccgaccacagcgaggcccagaagtacagagacttccagcacctgctgaacagaaccctggaggtggccctgctgctggacaccttcttcagacccctgaacgtgagagtggccctggtgggcctggaggcctggacccagagagacctggtggagatcagccccaaccccgccgtgaccctggagaacttcctgcactggagaagagcccacctgctgcccagactgccccacgacagcgcccagctggtgaccggcaccagcttcagcggccccaccgtgggcatggccatccagaacagcatctgcagccccgacttcagcggcggcgtgaacatggaccacagcaccagcatcctgggcgtggccagcagcatcgcccacgagctgggccacagcctgggcctggaccacgacctgcccggcaacagctgcccctgccccggccccgcccccgccaagacctgcatcatggaggccagcaccgacttcctgcccggcctgaacttcagcaactgcagcagaagagccctggagaaggccctgctggacggcatgggcagctgcctgttcgagagactgcccagcctgccccccatggccgccttctgcggcaacatgttcgtggagcccggcgagcagtgcgactgcggcttcctggacgactgcgtggacccctgctgcgacagcctgacctgccagctgagacccggcgcccagtgcgccagcgacggcccctgctgccagaactgccagctgagacccagcggctggcagtgcagacccaccagaggcgactgcgacctgcccgagttctgccccggcgacagcagccagtgcccccccgacgtgagcctgggcgacggcgagccctgcgccggcggccaggccgtgtgcatgcacggcagatgcgccagctacgcccagcagtgccagagcctgtggggccccggcgcccagcccgccgcccccctgtgcctgcagaccgccaacaccagaggcaacgccttcggcagctgcggcagaaaccccagcggcagctacgtgagctgcacccccagagacgccatctgcggccagctgcagtgccagaccggcagaacccagcccctgctgggcagcatcagagacctgctgtgggagaccatcgacgtgaacggcaccgagctgaactgcagctgggtgcacctggacctgggcagcgacgtggcccagcccctgctgaccctgcccggcaccgcctgcggccccggcctggtgtgcatcgaccacagatgccagagagtggacctgctgggcgcccaggagtgcagaagcaagtgccacggccacggcgtgtgcgacagcaacagacactgctactgcgaggagggctgggccccccccgactgcaccacccagctgaaggccaccagcagcctgaccaccggcctgctgctgagcctgctggtgctgctggtgctggtgatgctgggcgccagctactggtacagagccagactgcaccagagactgtgccagctgaagggccccacctgccagtacagagccgcccagagcggccccagcgagagacccggccccccccagagagccctgctggccagaggcaccaagcaggccagcgccctgagcttccccgccccccccagcagacccctgccccccgaccccgtgagcaagagactgcaggccgagctggccgacagacccaacccccccaccagacccctgcccgccgaccccgtggtgagaagccccaagagccagggccccgccaagccccccccccccagaaagcccctgcccgccgacccccagggcagatgccccagcggcgacctgcccggccccggcgccggcatcccccccctggtggtgcccagcagacccgccccccccccccccaccgtgagcagcctgtacctgtag

SEQ ID NO: 265060 - DNA, 2949 bp, Artificial Sequence
  derived and/or modified sequence
gcgcggcgctgctgggttctccgaggcgacctggccgccggccgctcctccgcgcgctgttccgcacttgctgccctcgcccggcccggagcgccgctgccatgcggctggcgctgctctgggccctggggctcctgggcgcgggcagccctctgccttcctggccgctcccaaatataggtggcactgaggagcagcaggcagagtcagagaaggccccgagggagcccttggagccccaggtccttcaggacgatctcccaattagcctcaaaaaggtgcttcagaccagtctgcctgagcccctgaggatcaagttggagctggacggtgacagtcatatcctggagctgctacagaatagggagttggtcccaggccgcccaaccctggtgtggtaccagcccgatggcactcgggtggtcagtgagggacacactttggagaactgctgctaccagggaagagtgcggggatatgcaggctcctgggtgtccatctgcacctgctctgggctcagaggcttggtggtcctgaccccagagagaagctataccctggagcaggggcctggggaccttcagggtcctcccattatttcgcgaatccaagatctccacctgccaggccacacctgtgccctgagctggcgggaatctgtacacactcagaagccaccagagcaccccctgggacagcgccacattcgccggaggcgggatgtggtaacagagaccaagactgtggagttggtgattgtggctgatcactcggaggcccagaaataccgggacttccagcacctgctaaaccgcacactggaagtggccctcttgctggacacattcttccggcccctgaatgtacgagtggcactagtgggcctggaggcctggacccagcgtgacctggtggagatcagcccaaacccagctgtcaccctcgaaaacttcctccactggcgcagggcacatttgctgcctcgattgccccatgacagtgcccagctggtgactggtacttcattctctgggcctacggtgggcatggccattcagaactccatctgttctcctgacttctcaggaggtgtgaacatggaccactccaccagcatcctgggagtcgcctcctccatagcccatgagttgggccacagcctgggcctggaccatgatttgcctgggaatagctgcccctgtccaggtccagccccagccaagacctgcatcatggaggcctccacagacttcctaccaggcctgaacttcagcaactgcagccgacgggccctggagaaagccctcctggatggaatgggcagctgcctcttcgaacggctgcctagcctaccccctatggctgctttctgcggaaatatgtttgtggagccgggcgagcagtgtgactgtggcttcctggatgactgcgtcgatccctgctgtgattctttgacctgccagctgaggccaggtgcacagtgtgcatctgacggaccctgttgtcaaaattgccagctgcgcccgtctggctggcagtgtcgtcctaccagaggggattgtgacttgcctgaattctgcccaggagacagctcccagtgtccccctgatgtcagcctaggggatggcgagccctgcgctggcgggcaagctgtgtgcatgcacgggcgttgtgcctcctatgcccagcagtgccagtcactttggggacctggagcccagcccgctgcgccactttgcctccagacagctaatactcggggaaatgcttttgggagctgtgggcgcaaccccagtggcagttatgtgtcctgcacccctagagatgccatttgtgggcagctccagtgccagacaggtaggacccagcctctgctgggctccatccgggatctactctgggagacaatagatgtgaatgggactgagctgaactgcagctgggtgcacctggacctgggcagtgatgtggcccagcccctcctgactctgcctggcacagcctgtggccctggcctggtgtgtatagaccatcgatgccagcgtgtggatctcctgggggcacaggaatgtcgaagcaaatgccatggacatggggtctgtgacagcaacaggcactgctactgtgaggagggctgggcaccccctgactgcaccactcagctcaaagcaaccagctccctgaccacagggctgctcctcagcctcctggtcttattggtcctggtgatgcttggtgccagctactggtaccgtgcccgcctgcaccagcgactctgccagctcaagggacccacctgccagtacagggcagcccaatctggtccctctgaacggccaggacctccgcagagggccctgctggcacgaggcactaagcaggctagtgctctcagcttcccggcccccccttccaggccgctgccgcctgaccctgtgtccaagagactccaggctgagctggctgaccgacccaatccccctacccgccctctgcccgctgacccggtggtgagaagcccgaagtctcaggggccagccaagcccccacccccaaggaagccactgcctgccgacccccagggccggtgcccatcgggtgacctgcccggcccaggggctggaatcccgcccctagtggtaccctccagaccagcgccaccgcctccgacagtgtcctcgctctacctctgacctctccggaggttccgctgcctccaagccggacttagggcttcaagaggcgggcgtgccctctggagtcccctaccatgactgaaggcgccagagactggcggtgtcttaagactccgggcaccgccacgcgctgtcaagcaacactctgcggacctgccggcgtagttgcagcgggggcttggggaggggctgggggttggacgggattgaggaaggtccgcacagcctgtctctgctcagttgcaataaacgt

SEQ ID NO: 265061 - protein, 279 aa, Artificial Sequence
  derived and/or modified sequence
MDMLDPGLDPAASATAAAAASHDKGPEAEEGVELQEGGDGPGAEEQTAVAITSVQQAAFGDHNIQYQFRTETNGGQAVIQNPFSNGGSPAAEAVSGEARFAYFPASSVGDTTAVSVQTTDQSLQAGGQFYVMMTPQDVLQTGTQRTIAPRTHPYSPKIDGTRTPRDERRRAQHNEVERRRRDKINNWIVQLSKIIPDCNADNSKTGASKGGILSKACDYIRELRQTNQRMQETFKEAERLQMDNELLRQQIEELKNENALLRAQLQQHNLEMVGEGTRQ

SEQ ID NO: 265062 - protein, 215 aa, Artificial Sequence
  derived and/or modified sequence
MDMLDPGLDPAASATAAAAASHDKGPEAEEGVELQEGGDGPGAEEQTAVAITSVQQAAFGDHNIQYQFRTETNGGQTGTQRTIAPRTHPYSPKIDGTRTPRDERRRAQHNEVERRRRDKINNWIVQLSKIIPDCNADNSKTGASKGGILSKACDYIRELRQTNQRMQETFKEAERLQMDNELLRQQIEELKNENALLRAQLQQHNLEMVGEGTRQ

SEQ ID NO: 265063 - DNA, 840 bp, Artificial Sequence
  derived and/or modified sequence
atggacatgctggaccccggcctggaccccgccgccagcgccaccgccgccgccgccgccagccacgacaagggccccgaggccgaggagggcgtggagctgcaggagggcggcgacggccccggcgccgaggagcagaccgccgtggccatcaccagcgtgcagcaggccgccttcggcgaccacaacatccagtaccagttcagaaccgagaccaacggcggccaggccgtgatccagaaccccttcagcaacggcggcagccccgccgccgaggccgtgagcggcgaggccagattcgcctacttccccgccagcagcgtgggcgacaccaccgccgtgagcgtgcagaccaccgaccagagcctgcaggccggcggccagttctacgtgatgatgaccccccaggacgtgctgcagaccggcacccagagaaccatcgcccccagaacccacccctacagccccaagatcgacggcaccagaacccccagagacgagagaagaagagcccagcacaacgaggtggagagaagaagaagagacaagatcaacaactggatcgtgcagctgagcaagatcatccccgactgcaacgccgacaacagcaagaccggcgccagcaagggcggcatcctgagcaaggcctgcgactacatcagagagctgagacagaccaaccagagaatgcaggagaccttcaaggaggccgagagactgcagatggacaacgagctgctgagacagcagatcgaggagctgaagaacgagaacgccctgctgagagcccagctgcagcagcacaacctggagatggtgggcgagggcaccagacagtag

SEQ ID NO: 265064 - DNA, 648 bp, Artificial Sequence
  derived and/or modified sequence
atggacatgctggaccccggcctggaccccgccgccagcgccaccgccgccgccgccgccagccacgacaagggccccgaggccgaggagggcgtggagctgcaggagggcggcgacggccccggcgccgaggagcagaccgccgtggccatcaccagcgtgcagcaggccgccttcggcgaccacaacatccagtaccagttcagaaccgagaccaacggcggccagaccggcacccagagaaccatcgcccccagaacccacccctacagccccaagatcgacggcaccagaacccccagagacgagagaagaagagcccagcacaacgaggtggagagaagaagaagagacaagatcaacaactggatcgtgcagctgagcaagatcatccccgactgcaacgccgacaacagcaagaccggcgccagcaagggcggcatcctgagcaaggcctgcgactacatcagagagctgagacagaccaaccagagaatgcaggagaccttcaaggaggccgagagactgcagatggacaacgagctgctgagacagcagatcgaggagctgaagaacgagaacgccctgctgagagcccagctgcagcagcacaacctggagatggtgggcgagggcaccagacagtag

SEQ ID NO: 265065 - DNA, 840 bp, Artificial Sequence
  derived and/or modified sequence
atggacatgctggacccggggctggaccctgctgcctctgctacagcagcagcagcggcttcgcacgataaagggcctgaagcagaggagggggttgagctgcaggaaggcggggacggccctggggctgaagagcagactgccgtggcaataacttccgtgcagcaggccgcctttggagaccacaatatccagtaccagttccgaacggaaactaatggcggccaggccgttatacagaaccctttctccaatggaggtagccctgccgccgaggcagtgtcaggagaggcacgctttgcttactttccagcttccagcgtcggcgacacaactgcagtgagtgtgcagaccacggatcaaagcctccaggcgggaggacagttctacgtaatgatgacccctcaggacgtgttgcaaacgggcacccagagaaccattgcgcctcggacacacccctattcacccaaaatagacggcacccgcacccctcgggacgaaaggagaagagcccagcataatgaggtggagcgccgtcggagagacaaaatcaataactggatcgtccagctgtctaagatcatcccagattgtaacgcagataacagcaaaaccggcgcgtccaaaggtggtattctctcaaaggcatgcgactatatccgcgaattacgacagacaaatcagagaatgcaagagacatttaaagaagccgagcgcctgcaaatggataacgaactgctccggcaacaaattgaggagttgaaaaatgaaaacgcactgctcagggcacaactccagcaacacaacttggaaatggtgggagaaggcacccgacaatag

SEQ ID NO: 265066 - DNA, 648 bp, Artificial Sequence
  derived and/or modified sequence
atggatatgctggatccggggctggacccagcggcgtccgcaaccgcagcagcagccgcctcacacgataaaggcccagaggccgaggaaggagtcgagctccaggaaggcggcgacggaccaggggccgaggaacaaactgcggtagccataactagcgtgcaacaagctgctttcggcgaccacaacatccagtaccagtttaggactgaaaccaatggaggacagactggtacacaaagaacaatcgctcctagaacccatccatatagtccaaaaattgacggcactaggactcctagggacgaacgcaggagggcccagcacaacgaagtggaaagaagacgacgggataagatcaataattggattgtccagctcagtaagatcattcccgattgcaacgcggataactccaaaaccggggcttctaagggaggcatactttcaaaagcctgtgactacattcgggagctcagacagactaatcagcgaatgcaagaaacattcaaggaagcagagcggctgcaaatggataatgaactcttgcggcagcagatagaggagttgaagaatgagaacgcccttctacgtgcccaactgcagcagcataatctggaaatggtcggtgaaggaactagacagtag

SEQ ID NO: 265067 - DNA, 840 bp, Artificial Sequence
  derived and/or modified sequence
atggacatgctggaccccggcctggaccctgctgccagcgccacagctgctgctgctgccagccatgacaagggccctgaggccgaggagggcgtggagctgcaggagggcggagatggccctggagctgaggagcagacagctgtggccatcacctctgtgcagcaggccgcctttggagaccacaacatccagtaccagttcagaacagagaccaatggaggccaggccgtcatccagaaccccttcagcaatggaggcagccctgctgctgaggccgtgtctggagaggccaggtttgcctacttccctgccagctctgtgggggacaccacagctgtgtctgtgcagaccacagaccagagcctgcaggccggcggccagttctacgtgatgatgaccccccaggatgtgctgcagacaggcacccagaggaccatcgcccccaggacccacccctacagccccaagattgatggcaccaggaccccaagagatgagaggagaagagcccagcacaatgaggtggagaggagaagaagagacaagatcaacaactggatcgtgcagctgagcaagatcatcccagactgcaatgctgacaacagcaagacaggagccagcaaaggaggcatcctgagcaaggcctgtgactacatccgggagctgcggcagaccaaccagaggatgcaggagaccttcaaggaggccgagcggctgcagatggacaatgagctgctgcggcagcagatcgaggagctgaagaatgaaaatgccctgctgcgggcccagctgcagcagcacaacctggagatggtgggggagggcacccggcagtag

SEQ ID NO: 265068 - DNA, 648 bp, Artificial Sequence
  derived and/or modified sequence
atggacatgctggaccccggcctggaccctgctgccagcgccacagctgctgctgctgccagccatgacaagggccctgaggccgaggagggcgtggagctgcaggagggcggagatggccctggagctgaggagcagacagctgtggccatcacctctgtgcagcaggccgcctttggagaccacaacatccagtaccagttcagaacagagaccaatggaggccagacaggcacccagaggaccatcgcccccaggacccacccctacagccccaagattgatggcaccaggaccccaagagatgagaggagaagagcccagcacaatgaggtggagaggagaagaagagacaagatcaacaactggatcgtgcagctgagcaagatcatcccagactgcaatgctgacaacagcaagacaggagccagcaaaggaggcatcctgagcaaggcctgtgactacatccgggagctgcggcagaccaaccagaggatgcaggagaccttcaaggaggccgagcggctgcagatggacaatgagctgctgcggcagcagatcgaggagctgaagaatgaaaatgccctgctgcgggcccagctgcagcagcacaacctggagatggtgggggagggcacccggcagtag

SEQ ID NO: 265069 - DNA, 840 bp, Artificial Sequence
  derived and/or modified sequence
atggacatgctggaccccggcctggaccccgccgccagcgccaccgctgctgccgcggcctctcatgacaaaggacctgaggctgaagagggggtagaactgcaggaaggaggagacgggcccggcgccgaggaacagacagccgtggcgatcacatctgttcagcaggctgctttcggcgaccacaatatacagtatcagttcaggactgaaactaatggaggtcaagcggtcattcaaaaccccttctctaatggtggctcaccagccgccgaagccgttagcggcgaggccagatttgcttatttccctgcaagttccgttggagatactaccgccgtgagcgtacaaactaccgatcagtctctccaggccggagggcagttctatgtcatgatgacaccacaggacgtgttgcagacaggcacccagaggaccatagcccccagaacccatccatattctcccaagattgacggtacccgcactcctagggatgagagacgccgagctcaacacaacgaagtcgagaggcggcggagggataagattaacaactggatagtgcagctgtctaagattataccagattgcaatgcagacaactccaaaacaggcgctagcaagggtgggatcttgagcaaagcttgtgactatataagagagttgcgacaaaccaaccaacggatgcaagagacatttaaggaagccgagcggctgcagatggacaatgagttgttgaggcagcagattgaagaacttaagaacgagaatgctttactgagagcccaactgcaacagcataaccttgaaatggtgggcgaggggaccagacaatag

SEQ ID NO: 265070 - DNA, 648 bp, Artificial Sequence
  derived and/or modified sequence
atggacatgctggaccccggcctggaccccgccgccagcgccaccgccgctgcggccgcctcccacgacaaggggcctgaggctgaggagggggtggaattacaggaaggaggtgacgggccaggtgctgaagaacagaccgccgtggctatcacaagtgtgcagcaagcggccttcggcgaccacaacatccagtaccaattccgcaccgagaccaacggtgggcagacagggactcaaaggaccattgccccgcgaacccatccttacagtcccaaaatagatgggacccggacacctagggacgagagacgaagggctcagcacaacgaagtggagaggagacgaagagacaaaattaacaactggattgtgcagctgtctaagatcatccccgactgcaatgctgacaattctaagactggtgcaagtaagggagggattctaagcaaggcttgcgattacatccgcgaactcaggcagaccaatcagaggatgcaggagacattcaaagaagctgagaggctgcagatggacaacgagctcctacggcaacagattgaggaactgaagaacgagaatgctctgctgcgggctcagttgcagcagcacaacttggagatggttggggagggaacgcgacaatag

SEQ ID NO: 265071 - DNA, 840 bp, Artificial Sequence
  derived and/or modified sequence
atggacatgctcgaccctggtctggacccggcagcctccgcaacagccgctgccgctgctagtcacgacaaagggccagaagcagaggaaggggtggaacttcaggagggcggtgatggaccaggggctgaagagcaaaccgccgtggccattacttctgttcagcaggctgcctttggagatcacaatatccagtaccagtttcgcacagagaccaacggcggacaggccgtgatccagaacccgttctccaacggcggaagccctgcagccgaagccgttagcggcgaggcaaggtttgcttattttcccgcaagctctgtgggcgatacaactgctgtgagtgtccaaaccaccgatcagagcctgcaagctgggggacagttctatgtgatgatgacacctcaggacgtcttgcagactggcacccagcgcacgatagcccctaggacccatccttattccccgaagatcgacgggactagaacccccagagatgagcgtcgtcgcgctcagcataacgaggtggagcgtcgcagacgggataagattaataactggatcgtgcagttgtccaagatcattccagactgtaacgccgacaactctaagacgggtgcctctaagggcggaatcctttctaaggcctgcgattacattagagaactcagacaaacaaaccagagaatgcaggaaacctttaaggaggcggaacgtctgcagatggataatgagctactgagacaacagattgaagaactcaaaaacgagaatgctctgctgagagctcagttgcaacaacacaacttggaaatggtcggcgaggggacccggcagtag

SEQ ID NO: 265072 - DNA, 648 bp, Artificial Sequence
  derived and/or modified sequence
atggacatgctcgaccctgggctggacccagcagcatctgccacagctgctgccgctgcttctcacgataagggaccagaagcagaagaaggggtggagttgcaggagggcggagacggccctggggctgaggaacaaacagcggtcgctattacgtccgtccagcaggccgcttttggtgatcacaatattcaataccagtttcgcactgagacaaacggcggtcagacggggactcagaggacgatcgccccacggacccatccgtactccccgaaaattgatggcacgagaactcccagggacgaacgccgtcgagcccaacataatgaggtggagagaaggcgtagggacaagattaacaattggatagttcagttgtcaaaaatcatccccgactgcaatgcggacaattctaagacaggcgctagtaagggtggaattctgtcaaaagcttgtgactatattagagaattgcggcagacgaatcagagaatgcaggagactttcaaggaggcggagcgtcttcaaatggacaacgaacttctgcgacaacagatagaggaactcaaaaatgagaatgccctgctccgcgctcaacttcagcagcacaatctcgaaatggtcggtgagggtactaggcagtag

SEQ ID NO: 265073 - DNA, 1508 bp, Artificial Sequence
  derived and/or modified sequence
gtgagcgccgggctcggggcccccccggccgcccgccccctcccctccctccctcccctcccctcccctcccccccgggccccgcgccccccccgcccccgccccccccatggacatgctggacccgggtctggatcccgctgcctcggccaccgctgctgccgccgccagccacgacaagggacccgaggcggaggagggcgtcgagctgcaggaaggcggggacggcccaggagcggaggagcagacagcggtggccatcaccagcgtccagcaggcggcgttcggcgaccacaacatccagtaccagttccgcacagagacaaatggaggacaggctgtgatccaaaatcccttcagcaatggtggcagtccggcggccgaggctgtcagcggggaggcacgatttgcctatttcccagcgtccagtgtgggagatactacggctgtgtccgtacagaccacagaccagagcttgcaggctggaggccagttctacgtcatgatgacgccccaggatgtgcttcagacaggaacacagaggacgatcgccccccggacacacccttactctccaaaaattgatggaaccagaacaccccgagatgagaggagaagagcccagcacaacgaagtggagcggaggcggagggacaagatcaacaactggatcgtccagctttcgaaaatcattccagactgtaacgcagacaacagcaagacgggagcgagtaaaggagggatcctgtccaaggcctgcgattacatccgggagttgcgccagaccaaccagcgcatgcaggagaccttcaaagaggccgagcggctgcagatggacaacgagctcctgaggcagcagatcgaggagctgaagaatgagaacgccctgcttcgagcccagctgcagcagcacaacctggagatggtgggcgagggcacccggcagtgacgcccgccaccaccacgcagccgccgccgcccacgccggcctctgctgcccccttccccagcccttagcacagagagggacacatgcccctcccccagctgcgtttttttatagtagatttttaacaaaaaacggggagaaataatgcatttctgtggatacagtgcccaccgccctcctccacttggaaacggtatcctccctgcccatccgtctgtctgtcgcccttctcccggccctcactaagccccggcacttctagtggtctcacctggaggcaagagggaggggacagaggccctgccacgtcccgctgcctcctgctctctggaggtactgagacagggtgctgatgggaaggaggggagcctttggggggccacccggggcctggacctatgcagggaggccacgtcccaccccacctcttgtttctgggtccctgctcccctttgggggtgtgtgtgtgtgttttaattttctttatggaaaaattgacaaaaaaaaaatagagagagaggtatttaactgcaataaactggccccatgtggcccccgc

SEQ ID NO: 265074 - DNA, 648 bp, Artificial Sequence
  derived and/or modified sequence
atggacatgctggacccgggtctggatcccgctgcctcggccaccgctgctgccgccgccagccacgacaagggacccgaggcggaggagggcgtcgagctgcaggaaggcggggacggcccaggagcggaggagcagacagcggtggccatcaccagcgtccagcaggcggcgttcggcgaccacaacatccagtaccagttccgcacagagacaaatggaggacagacaggaacacagaggacgatcgccccccggacacacccttactctccaaaaattgatggaaccagaacaccccgagatgagaggagaagagcccagcacaacgaagtggagcggaggcggagggacaagatcaacaactggatcgtccagctttcgaaaatcattccagactgtaacgcagacaacagcaagacgggagcgagtaaaggagggatcctgtccaaggcctgcgattacatccgggagttgcgccagaccaaccagcgcatgcaggagaccttcaaagaggccgagcggctgcagatggacaacgagctcctgaggcagcagatcgaggagctgaagaatgagaacgccctgcttcgagcccagctgcagcagcacaacctggagatggtgggcgagggcacccggcagtga

SEQ ID NO: 265075 - protein, 370 aa, Artificial Sequence
  derived and/or modified sequence
MAVSVTPIRDTKWLTLEVCREFQRGTCSRPDTECKFAHPSKSCQVENGRVIACFDSLKGRCSRENCKYLHPPPHLKTQLEINGRNNLIQQKNMAMLAQQMQLANAMMPGAPLQPVPMFSVAPSLATNASAAAFNPYLGPVSPSLVPAEILPTAPMLVTGNPGVPVPAAAAAAAQKLMRTDRLEVCREYQRGNCNRGENDCRFAHPADSTMIDTNDNTVTVCMDYIKGRCSREKCKYFHPPAHLQAKIKAAQYQVNQAAAAQAAATAAAMGIPQAVLPPLPKRPALEKTNGATAVFNTGIFQYQQALANMQLQQHTAFLPPVPMVHGATPATVSAATTSATSVPFAATATANQIPIISAEHLTSHKYVTQM

SEQ ID NO: 265076 - DNA, 1113 bp, Artificial Sequence
  derived and/or modified sequence
atggccgtctctgtcacgccaattcgcgatacaaagtggctgaccctcgaggtgtgcagagaattccaaaggggcacatgcagccgacctgacactgaatgtaaatttgcccatccgagcaagtcttgccaggtcgaaaatggtcgagtgatcgcctgcttcgactcccttaagggccggtgtagcagagagaactgtaagtacctacatccccctccccatctgaaaacccaattggagatcaacggccgcaacaatctgatccagcagaagaatatggcaatgctggcccagcagatgcagctagccaacgcaatgatgccaggcgcccccctccagccagtgccaatgttttccgtggcacccagcctcgctactaatgcgtcagcagcagccttcaacccctatctagggccggtctccccatcacttgtccctgcggagatcctgcccacagctcctatgctggttaccggaaatccaggggttccagttcctgctgcagctgctgccgctgctcagaagcttatgagaacggatagattggaggtgtgcagagagtatcagcgagggaattgcaataggggagagaacgattgtaggtttgcacatcctgctgactccacgatgatcgacacaaacgataacactgtgactgtatgtatggactatatcaaagggaggtgttctcgagagaagtgcaaatacttccatccacctgcccatttacaagcaaaaataaaagcagcccaatatcaggtcaatcaagcggcagctgctcaggcagcagctactgcagccgctatgggtatccctcaagccgtcctgcctcctcttcccaagagacccgctctggagaagacaaacggcgccactgctgtgttcaataccggcattttccagtaccagcaggccctggcaaatatgcagctgcagcagcacactgctttcctgccccctgtaccaatggtccacggggctacgcccgcaaccgttagcgctgccactacctcagccacgtccgtgccctttgcggccacagccactgctaaccagatacccattatttcagcagagcatctgacaagtcacaagtacgttactcaaatgtag

SEQ ID NO: 265077 - DNA, 1113 bp, Artificial Sequence
  derived and/or modified sequence
atggctgtgtctgtgacccccatccgggacaccaagtggctgaccctggaggtgtgccgggagttccagaggggcacctgcagcaggccagacacagagtgcaagtttgcccaccccagcaagagctgccaggtggagaatggccgggtgattgcctgctttgacagcctgaagggccgctgcagccgggagaactgcaagtacctgcaccccccaccccacctgaagacccagctggagatcaatggaagaaacaacctgatccagcagaagaacatggccatgctggcccagcagatgcagctggccaatgccatgatgcctggggcccccctgcagcctgtgcccatgttttctgtggcccccagcctggccaccaatgccagcgctgctgccttcaacccctacctgggccctgtgagccccagcctggtgcctgctgagatcctgcccacagcccccatgctggtgacaggcaaccctggggtgcctgtgcctgctgctgctgctgctgctgcccagaagctgatgaggacagaccggctggaggtgtgccgggagtaccagaggggcaactgcaacagaggagaaaatgactgccgctttgcccaccctgctgacagcaccatgattgacaccaatgacaacacagtgacagtgtgcatggactacatcaagggccgctgcagccgggagaagtgcaagtacttccaccccccagcccacctgcaggccaagatcaaggccgcccagtaccaggtgaaccaggccgctgctgcccaggccgccgccacagctgctgccatgggcatcccccaggccgtgctgccccccctgcccaagaggcctgccctggagaagaccaatggagccacagctgtgttcaacacaggcatcttccagtaccagcaggccctggccaacatgcagctgcagcagcacacagccttcctgccccctgtgcccatggtgcatggagccaccccagccaccgtgtctgctgccaccaccagcgccacctctgtgccctttgctgccacagccacagccaaccagatccccatcatctctgctgagcacctgaccagccacaagtatgtgacccagatgtag

SEQ ID NO: 265078 - DNA, 5941 bp, Artificial Sequence
  derived and/or modified sequence
cttgccggcttccttgcaaagcccggtgcaagggcctctttcaaaatgaacccactggtgtgcctagcagtcggtagaagaagcgggagggcgtccggtctgcacgcccgccgcgaggttacaatgctgaacgcatgagatggaagataccaacgggaggccgaggggatccacggcgcccgcgcgggctccggcttcctcctgctctcggcgccgctgggcgaccgcccatgacccgctcttgcgggctctgtccggttgacaggcgaccctgtggcccggggaagcgcgggagggcgccggcggaaagttgaagagcgtttttctcgccgccgcgtgcattaggagctcgacgagtccgccctgggcttcctggtggggctgggcgggcgggggaggggccgcgcagcagcagcggaagccagacctcggcgataagaggctgcacagcgacatgcaacagtcttttcactgcagctgaatgagttgtggcgcccacaatgctcccatgacaaggagctgacaagttccattttccgtcgcgggcatcttggaatcatgactcccacaatgccttgggcacttggtcgacagtggggccgcctctgaaaaaaaaatgtgagaggttggtactaagaagtgcctttcctgacgtctctgctgcttggaaccgcttctagagcagtctctgcttttgccttgcttgctgccagctagactgtgacgacagcacatccaccctccacctctagcccagacacccccatttctacttataatcaagagaaaagctctaagtatctggcattgccctaggctgctttagtgttaaaagaaaagtttgctgaaaaagtaagatatcttctgccaggaaatcaaggaggaaaaaaaaaatcattttctcgattttgctctaaactgctgcatctgtctatgccaaactaatcaataccgattgcaccaccaaactccattgcaaattcagctgtgaggagattccctttcagacaactttgctgaaagcagcttggaaattcggtgtcgaagggtctgccacgttttcatgcttgcattttgggctccaaattggcactgggaaggggttactgagagcacaaggctgataccaggccctacttttaaacgttcatctacttacaatcctagtatttctctaaaaaccaaaacctctttgaattaacagtttcatgctgtgaatttctagtgggagatcttttccttgatattgacgacacaattttccatgtacttttaaagcagggagtggggaaaagtattttgaggggacattttcatcatcagttcagctttttttttttggttgttgctcttttttgggggggttgggtttgttggtttcactgaaacatttaactacctgtaaaatctaaacatggctgttagtgtcacaccaattcgggacacaaaatggctaacactggaagtatgtagagagttccagagggggacttgctcacggccagacacggaatgtaaatttgcacatccttcgaaaagctgccaagttgaaaatggacgagtaatcgcctgctttgattcattgaaaggccgttgctccagggagaactgcaaatatcttcatccacccccacatttaaaaacgcagttggagataaatggacgcaataacttgattcagcagaagaacatggccatgttggcccagcaaatgcaactagccaatgccatgatgcctggtgccccattacaacccgtgccaatgttttcagttgcaccaagcttagccaccaatgcatcagcagccgcctttaatccctatctgggacctgtttctccaagcctggtcccggcagagatcttgccgactgcaccaatgttggttacagggaatccgggtgtccctgtacctgcagctgctgcagctgctgcacagaaattaatgcgaacagacagacttgaggtatgtcgagagtaccaacgtggcaattgcaaccgaggagaaaatgattgtcggtttgctcatcctgctgacagcacaatgattgacaccaatgacaacacagtcactgtgtgtatggattacatcaaagggagatgctctcgggaaaagtgcaaatactttcatccccctgcacatttgcaagccaagatcaaggctgcccaataccaggtcaaccaggctgcagctgcacaggctgcagccaccgcagctgccatgggaattcctcaagctgtacttcccccattaccaaagaggcctgctcttgaaaaaaccaacggtgccaccgcagtctttaacactggtattttccaataccaacaggctctagccaacatgcagttacaacagcatacagcatttctcccaccagttcccatggtgcacggtgctacgccagccactgtgtccgcagcaacaacatctgccacaagtgttcccttcgctgcaacagccacagccaaccagatacccataatatctgccgaacatctgactagccacaagtatgttacccagatgtagaattttcatcactaaacaatcatgctaaagaggaaaggacagtgtgcttggttagagtaaaggacgaggtcattagccatattgtatatatcgtcaagcaacacacacaaaagttcctcagccacaagacatccacatattgcatgttaaccagaagaaaagacaacattttccggaaatccactgcacactgttgcctatacactttgtacatttaattgatatttgtgctgaggtgatattcctgtctaaaagaacaacattgtctttcttttctagcacagagttatgcattcaaagatgcatacctagttagtttcctatatattcatgccatcttgaaaagacagactatggtgtaaccatgattctattatgtattggtacgtctgtagaccaagatataattttttaaaaataagtttatttctttcaaggtttacaaataacaaaggtgcaccttgtatttaaaattgccattatagatgagagcgtgcatgcacagtcatttttgtttaagagtaatatttttaatgtaatagattgtaagacgtggtgagggagggatctgacagagatgaatgtgccaagcaaaaccacaactgtgtatattttaaagcacatcatggctttaagtaccatgttgttaaggattctcatgaagtgccatagactgtacatcaaattagagtattatttcttcagtgttattgttttcagagccacattttgttgcatatttgctagtactaatcagtcaaagggcaccattctttttttttttttttgaaaccaaagctgtctcagaaatggccaatttaactttacagtaacaatagacagcacaacacaaactctctcaatacagataaactcacacatactggagatatatatataatagatatatataaaattattttaatgcattgtagtgtaatatttatgcatactatactgtataacatgttattcaaaagggattgccatttctgagacacagtaacaaaaaaatgaggaaattattttgcttctatttatagcctctgtcaaaagtcaaaagactataaatgctttgcaaaaatggtttcacgtttgcttaaatgcttcatcacagtcacattcaaaatagtgactctaaacaaagaagaaagcagcactgtcatcagatgcatgataaaccaaaatatgaaaatgggaaatgtttaattaacctagtaattgggtgggttaagtacatgggtgaattttatatgtgatttttgttttgttttgttttgttcagattaactgcttatagccttagaaagccttttacaaaattaaaaaaaaaatagatgtgcattcagtttttaagaatggaatcatccaaaggaattcctttttttgaggtttggatgttgcagctagtaaaggatatttttgctctgttcagcagttctaaaaattgctgaagtaggggccaggtcactggtagttatagtatggaatgggagaagtgaaagttcagttatagaactttccatacttccaagtttactgcaagtttttatgcttgagagagatgctttctaatataagactgatgtgttgattttactgattgtactgtacatctattaaagccttagattattacattacgggttggaacccataccaatgtaatttcaatcgtgttaagaaagtaatggtgacttcacatgttattgtagttagttacattatagaatattacttatttttcttgttaaaatgtagtttttcatttcctacatttattagattttcattttctattaacaattgaataccatttcagtttatagacttgttttattagattttaccaatgaatttttcaaaatacaaaaaaaagtagtttttccttcataacatactcagttttgaattacatgtagtgtcacatgaatattcgtattgttaactaaatgatttatattttactgatttaatattacagtgtaagaatgtcagtcattgttagttcttgtctagttttcattaaaagaacaaagatcttttatatggatatcttataaatatataatcattgctaagtaagaagttaagttgttgctatcgcaacaatcctggcagacaattgagtaatattttgatgatttattttgtttgtaattagttattataagaagatctagatcctagatattagaataaaatttattttctactgtatccatttcaaatgttaaaatattgtttaatatttttgaaatccctgagtatcaggccttgttataaataagctgcataatcaataaatagaacaagggactttttgttgataatccaaatactcaaagtttacgtaatgaaaattatagcgtgtgtgcaaactcttgagggttgattatgctgcaatttagcatgttggaacgtctagggagaaggttgactttttgcacttctgtatatagtcaaaagagagaaacctgtataatagtaagatcttattttgaataaaaacgtctataattacaaggagttttgttaaggctaatacaatgacagactgagcaaaattgcttgcaaaagtggcacagagttagcactccataccccttcaaacatgttgctttgctttcttgtggacagcttgtagtttgccaggattttttcagctggaaagatacgccatcctttcaaaccctcatgactgacaaaaactccatggggccaaatctgcctgaagatcattaccaaaaatagcaggtacttctaccattaaggtgaaatcatggatcagatattccttacatttttcaaaactactgcatgtttaaaacttcaacaaaaaaagagagaaagaactatactaagaacatatattattcagatcagtttctgccaatttcagtggtttattgttcacaaaaaaatcttcaaaacaagtattgactttcacaaaatttaaatcataaacaggcaaaccaaacagcacactgtagctatagttgttatgtgattgttttttaattgctgtaggatcctgttctttcagcaggtgaaaaataaaacgcagttcaaatttcatggttttaattttcaactcagaagcactcaaaaatgcaaaatgtgataatgggcacttgtttaaaagaattagtgtatccagccttcactccagctggttaaaaatgttgcacttatcagcaaccctaccactttcatctgctgaaaggacaaatgtgcttggttttactattatgtaatcacaacttactttctgcttgtagttgcttaaaattatgtattttgtcttgggctgcaatttgttttatgcttattttattattactgcagtagttgactttgctgtatggaaaaataaagtgaaattgccctaataaaacttctctttcttaagta

SEQ ID NO: 265079 - DNA, 1113 bp, Artificial Sequence
  derived and/or modified sequence
atggccgtgagcgtgacccccatccgggacaccaagtggctgacccttgaagtttgtagagagttccagcgtgggacttgtagccgccccgatactgagtgtaagttcgcccatccctcaaagagctgtcaggtagaaaatggacgcgtaattgcctgctttgactctctcaaaggaagatgttctcgagagaattgcaaatatcttcaccctcccccccacttgaagacgcaacttgagatcaacggtcgaaacaacctgatacagcagaagaacatggctatgcttgcacagcagatgcagctcgctaacgcaatgatgcccggagctcccttgcaaccagtgccaatgttttccgtggccccctcccttgccacaaatgcttccgcagccgcatttaacccttacctcggccctgtgagcccctccctcgtgcccgcagagatcctgcccaccgcaccgatgttggtcaccggcaaccccggcgtgccagtcccagctgccgcagctgcagccgcgcagaagctcatgcggaccgataggctagaggtttgtcgagaatatcaacgcggaaactgtaacaggggggagaatgactgtcgcttcgcacatccagccgactccactatgatcgacactaacgataacaccgttactgtctgcatggactacattaagggacggtgctctcgtgaaaaatgtaagtacttccatcctccagctcatcttcaggctaaaatcaaggcagctcagtaccaggtgaaccaagcggccgccgcccaggccgccgccacggctgctgcgatgggcatccctcaggccgtgctgcccccccttccaaaaaggcccgcactggagaagactaacggcgcaacagctgtgttcaacaccggtatcttccaatatcagcaggctttggccaacatgcagctgcagcagcacaccgcattcctgcccccagtaccaatggttcacggcgctacacccgccactgtgagcgctgctactacatccgccacatccgtgccctttgccgccacggccactgccaatcagattccgatcatctctgccgaacacctgacgagtcacaagtacgttacccagatgtag

SEQ ID NO: 265080 - DNA, 1113 bp, Artificial Sequence
  derived and/or modified sequence
atggccgtgagcgtcactccaatcagggacactaagtggctcactctggaagtgtgcagggagtttcagaggggaacttgttcacggccagacacggaatgcaagtttgcgcaccccagtaagagctgtcaggtggagaacggccgagttatcgcatgtttcgactctctcaagggtaggtgctctcgggagaattgcaagtatcttcatccgccaccccacttaaagactcagttagaaattaacggacgtaacaatctgatccaacagaagaatatggcgatgctggcccaacagatgcagcttgcaaacgcaatgatgccaggtgcgccattacagcccgttccaatgtttagcgtcgccccaagtctagctaccaacgccagcgcagcagccttcaatccgtacttaggccctgtatctccaagtctggtgcccgcagagatcctgccaacggctcccatgttagtcaccggaaaccccggtgttcccgtacctgcagcagcagccgctgccgcacagaaactcatgagaacggatcgcctggaggtttgtagggaatatcaacggggaaattgtaacaggggagaaaatgactgtcgcttcgcccatcctgctgatagcacgatgattgacactaatgacaatacggtgacggtatgtatggactacatcaaaggtaggtgttcgcgcgagaaatgtaagtacttccatccccctgcacacttgcaggccaagatcaaagcggcacaatatcaggtcaaccaggctgcagctgctcaggccgctgccactgcagctgctatgggcatcccacaagctgtgcttcctcctttacccaaacgtccggcactggagaagacaaatggggctaccgcagtcttcaacaccgggatttttcaataccagcaagcactcgccaacatgcaattgcaacagcacacagcctttctccctcctgtgccaatggtccacggtgcaacccccgcaacggtgtctgccgctaccaccagtgccacttctgtgcccttcgcagccactgccactgcaaatcagatccccatcatctccgcagaacacctcacctcccacaagtacgtgacacagatgtag

SEQ ID NO: 265081 - DNA, 1113 bp, Artificial Sequence
  derived and/or modified sequence
atggccgtgagcgtgacccccatcagagacaccaagtggctgaccctggaggtgtgcagagagttccagagaggcacctgcagcagacccgacaccgagtgcaagttcgcccaccccagcaagagctgccaggtggagaacggcagagtgatcgcctgcttcgacagcctgaagggcagatgcagcagagagaactgcaagtacctgcacccccccccccacctgaagacccagctggagatcaacggcagaaacaacctgatccagcagaagaacatggccatgctggcccagcagatgcagctggccaacgccatgatgcccggcgcccccctgcagcccgtgcccatgttcagcgtggcccccagcctggccaccaacgccagcgccgccgccttcaacccctacctgggccccgtgagccccagcctggtgcccgccgagatcctgcccaccgcccccatgctggtgaccggcaaccccggcgtgcccgtgcccgccgccgccgccgccgccgcccagaagctgatgagaaccgacagactggaggtgtgcagagagtaccagagaggcaactgcaacagaggcgagaacgactgcagattcgcccaccccgccgacagcaccatgatcgacaccaacgacaacaccgtgaccgtgtgcatggactacatcaagggcagatgcagcagagagaagtgcaagtacttccacccccccgcccacctgcaggccaagatcaaggccgcccagtaccaggtgaaccaggccgccgccgcccaggccgccgccaccgccgccgccatgggcatcccccaggccgtgctgccccccctgcccaagagacccgccctggagaagaccaacggcgccaccgccgtgttcaacaccggcatcttccagtaccagcaggccctggccaacatgcagctgcagcagcacaccgccttcctgccccccgtgcccatggtgcacggcgccacccccgccaccgtgagcgccgccaccaccagcgccaccagcgtgcccttcgccgccaccgccaccgccaaccagatccccatcatcagcgccgagcacctgaccagccacaagtacgtgacccagatgtag

SEQ ID NO: 265082 - protein, 388 aa, Artificial Sequence
  derived and/or modified sequence
MAVSVTPIRDTKWLTLEVCREFQRGTCSRPDTECKFAHPSKSCQVENGRVIACFDSLKGRCSRENCKYLHPPPHLKTQLEINGRNNLIQQKNMAMLAQQMQLANAMMPGAPLQPVPMFSVAPSLATNASAAAFNPYLGPVSPSLVPAEILPTAPMLVTGNPGVPVPAAAAAAAQKLMRTDRLEVCREYQRGNCNRGENDCRFAHPADSTMIDTNDNTVTVCMDYIKGRCSREKCKYFHPPAHLQAKIKAAQYQVNQAAAAQAAATAAAMTQSAVKSLKRPLEATFDLGIPQAVLPPLPKRPALEKTNGATAVFNTGIFQYQQALANMQLQQHTAFLPPVPMVHGATPATVSAATTSATSVPFAATATANQIPIISAEHLTSHKYVTQM

SEQ ID NO: 265083 - DNA, 1167 bp, Artificial Sequence
  derived and/or modified sequence
atggcagtgtcggttacacccatcagagacacaaaatggctgacattggaagtctgtcgggagtttcagcgcgggacatgttcccgacctgacactgaatgcaagttcgcgcacccatctaagtcctgtcaggtcgagaacgggcgtgtgattgcctgctttgattcacttaaaggtaggtgcagcagagagaactgcaaatacttacaccccccaccccatcttaagacacagctggaaataaacggccggaacaatctgatccagcaaaagaacatggccatgttagcccagcagatgcagctcgccaacgcgatgatgcccggagccccactgcagccagtgcccatgttctctgtagctccgagcctcgccactaacgcttctgcagccgcttttaacccatatctggggcctgtttctccgtctttagtgcctgccgagattctcccaacagcccctatgctggttaccggtaacccgggtgtgcctgtccccgccgcagcagctgctgcagctcagaagctaatgagaaccgatagactggaggtttgcagggagtaccagagaggcaactgtaaccgcggcgagaatgattgccgattcgctcaccccgctgacagtaccatgatagataccaatgacaacactgtcactgtctgcatggactacatcaaagggcgatgtagcagagaaaaatgcaagtactttcaccctccggcgcatttgcaagcgaaaatcaaggctgcacaatatcaagtaaatcaggcagccgctgcacaggccgccgccaccgctgcagctatgactcagtccgccgttaagtccctgaaacgccctttggaggccacttttgacctaggtattccccaagcagttctgcccccactgcccaagaggcccgcactggagaaaaccaatggtgctacagctgtgttcaacacggggatcttccaataccaacaagcgctcgcaaatatgcagcttcagcagcacactgccttcctgccgcctgttccaatggtgcacggagccaccccagcaacggttagtgcagcaaccacttctgccacttccgtgccattcgccgcgacagccacagctaaccagatcccaatcataagtgcggagcatctgacttcccacaagtacgtcacgcagatgtag

SEQ ID NO: 265084 - DNA, 1167 bp, Artificial Sequence
  derived and/or modified sequence
atggcagtgtcagtgaccccaatccgagataccaagtggctaactctagaagtctgccgcgagtttcagcgggggacctgctcgagaccagacaccgaatgcaagtttgcacatccttctaagtcctgtcaggtagagaacggcagggtgattgcctgctttgacagcttgaaagggcgctgctcccgcgagaactgtaaatatctgcacccaccgccacacctgaagacacagctagagattaacggcaggaacaacctaatacagcaaaaaaacatggctatgctggctcagcagatgcagctggctaacgcaatgatgcccggcgctccattgcaacccgtaccaatgttctccgtggctccctccctggctactaacgcatctgcagcggcctttaacccgtacctgggcccagtcagccctagcctggttcccgcagagatcctgcctacggcccccatgctggtcaccggcaatccaggagttccagtccctgctgctgcagccgccgccgctcagaagttgatgcgcacagatcgtttagaggtgtgtcgggaataccagcgtggaaattgcaaccggggcgaaaacgactgtcgatttgctcacccggcagactccacgatgatagatactaacgacaacaccgttacagtgtgcatggattatatcaaaggcagatgcagtagggaaaagtgcaagtacttccatccgcccgctcacttacaggccaaaatcaaggccgcccagtatcaagtaaatcaggcagctgcagcccaggccgctgccaccgccgccgccatgacccagagcgccgtgaaatctctgaagagaccactagaggcaacttttgacctggggataccacaggcagtgctacctcccctgcctaagcggccggctctcgagaaaacaaacggggcgaccgctgtttttaatacgggaatttttcagtaccagcaggctttggcgaatatgcagctacaacaacatacagctttcttacccccggttcctatggtgcatggcgccacgcctgctaccgtgtccgccgcgaccacttctgccacctcggtccccttcgccgcgacagcaaccgccaaccagatacccattatcagtgcagagcacctcacatctcataagtacgtcacccaaatgtag

SEQ ID NO: 265085 - DNA, 1167 bp, Artificial Sequence
  derived and/or modified sequence
atggctgtgtctgtgacccccatccgggacaccaagtggctgaccctggaggtgtgccgggagttccagaggggcacctgcagcaggccagacacagagtgcaagtttgcccaccccagcaagagctgccaggtggagaatggccgggtgattgcctgctttgacagcctgaagggccgctgcagccgggagaactgcaagtacctgcaccccccaccccacctgaagacccagctggagatcaatggaagaaacaacctgatccagcagaagaacatggccatgctggcccagcagatgcagctggccaatgccatgatgcctggggcccccctgcagcctgtgcccatgttttctgtggcccccagcctggccaccaatgccagcgctgctgccttcaacccctacctgggccctgtgagccccagcctggtgcctgctgagatcctgcccacagcccccatgctggtgacaggcaaccctggggtgcctgtgcctgctgctgctgctgctgctgcccagaagctgatgaggacagaccggctggaggtgtgccgggagtaccagaggggcaactgcaacagaggagaaaatgactgccgctttgcccaccctgctgacagcaccatgattgacaccaatgacaacacagtgacagtgtgcatggactacatcaagggccgctgcagccgggagaagtgcaagtacttccaccccccagcccacctgcaggccaagatcaaggccgcccagtaccaggtgaaccaggccgctgctgcccaggccgccgccacagctgctgccatgacccagagcgctgtgaagagcctgaagaggcccctggaggccacctttgacctgggcatcccccaggccgtgctgccccccctgcccaagaggcctgccctggagaagaccaatggagccacagctgtgttcaacacaggcatcttccagtaccagcaggccctggccaacatgcagctgcagcagcacacagccttcctgccccctgtgcccatggtgcatggagccaccccagccaccgtgtctgctgccaccaccagcgccacctctgtgccctttgctgccacagccacagccaaccagatccccatcatctctgctgagcacctgaccagccacaagtatgtgacccagatgtag

SEQ ID NO: 265086 - DNA, 6422 bp, Artificial Sequence
  derived and/or modified sequence
ttacatcttatagcacccagtgaattatgatatggggctgcggtttatttgctctggcgacaatatggcttacttgccgtggaatatcccggtatttcagaagtaacatattatttttaaagagggagctttgctttctctaaatcacatggtgcaaagttgggaatacagtggcctgtaaattacaaatattatttacaaactagaaggaaagctgacatgtgtttgtgcctgtgtgacagtttcactaaggaattccaaaactgtggatagcctgttacttgagaaaaatacacggtggcagtcttgcagatgtttttcccgcctgttagccctccaggttcaaaaactgtttggtgcattttaaggcggcagtctcaccagatcgcaggattctagtctaattggcttctaaccttcaatctaaccttgccggcttccttgcaaagcccggtgcaagggcctctttcaaaatgaacccactggtgtgcctagcagtcggtagaagaagcgggagggcgtccggtctgcacgcccgccgcgaggttacaatgctgaacgcatgagatggaagataccaacgggaggccgaggggatccacggcgcccgcgcgggctccggcttcctcctgctctcggcgccgctgggcgaccgcccatgacccgctcttgcgggctctgtccggttgacaggcgaccctgtggcccggggaagcgcgggagggcgccggcggaaagttgaagagcgtttttctcgccgccgcgtgcattaggagctcgacgagtccgccctgggcttcctggtggggctgggcgggcgggggaggggccgcgcagcagcagcggaagccagacctcggcgataagaggctgcacagcgacatgcaacagtcttttcactgcagctgaatgagttgtggcgcccacaatgctcccatgacaaggagctgacaagttccattttccgtcgcgggcatcttggaatcatgactcccacaatgccttgggcacttggtcgacagtggggccgcctctgaaaaaaaaatgtgagaggttggtactaagaagtgcctttcctgacgtctctgctgcttggaaccgcttctagagcagtctctgcttttgccttgcttgctgccagctagactgtgacgacagcacatccaccctccacctctagcccagacacccccatttctacttataatcaagagaaaagctctaagtatctggcattgccctaggctgctttagtgttaaaagaaaagtttgctgaaaaagtaagatatcttctgccaggaaatcaaggaggaaaaaaaaaatcattttctcgattttgctctaaactgctgcatctgtctatgccaaactaatcaataccgattgcaccaccaaactccattgcaaattcagctgtgaggagattccctttcagacaactttgctgaaagcagcttggaaattcggtgtcgaagggtctgccacgttttcatgcttgcattttgggctccaaattggcactgggaaggggttactgagagcacaaggctgataccaggccctacttttaaacgttcatctacttacaatcctagtatttctctaaaaaccaaaacctctttgaattaacagtttcatgctgtgaatttctagtgggagatcttttccttgatattgacgacacaattttccatgtacttttaaagcagggagtggggaaaagtattttgaggggacattttcatcatcagttcagctttttttttttggttgttgctcttttttgggggggttgggtttgttggtttcactgaaacatttaactacctgtaaaatctaaacatggctgttagtgtcacaccaattcgggacacaaaatggctaacactggaagtatgtagagagttccagagggggacttgctcacggccagacacggaatgtaaatttgcacatccttcgaaaagctgccaagttgaaaatggacgagtaatcgcctgctttgattcattgaaaggccgttgctccagggagaactgcaaatatcttcatccacccccacatttaaaaacgcagttggagataaatggacgcaataacttgattcagcagaagaacatggccatgttggcccagcaaatgcaactagccaatgccatgatgcctggtgccccattacaacccgtgccaatgttttcagttgcaccaagcttagccaccaatgcatcagcagccgcctttaatccctatctgggacctgtttctccaagcctggtcccggcagagatcttgccgactgcaccaatgttggttacagggaatccgggtgtccctgtacctgcagctgctgcagctgctgcacagaaattaatgcgaacagacagacttgaggtatgtcgagagtaccaacgtggcaattgcaaccgaggagaaaatgattgtcggtttgctcatcctgctgacagcacaatgattgacaccaatgacaacacagtcactgtgtgtatggattacatcaaagggagatgctctcgggaaaagtgcaaatactttcatccccctgcacatttgcaagccaagatcaaggctgcccaataccaggtcaaccaggctgcagctgcacaggctgcagccaccgcagctgccatgactcagtcggctgtcaaatcactgaagcgacccctcgaggcaacctttgacctgggaattcctcaagctgtacttcccccattaccaaagaggcctgctcttgaaaaaaccaacggtgccaccgcagtctttaacactggtattttccaataccaacaggctctagccaacatgcagttacaacagcatacagcatttctcccaccagttcccatggtgcacggtgctacgccagccactgtgtccgcagcaacaacatctgccacaagtgttcccttcgctgcaacagccacagccaaccagatacccataatatctgccgaacatctgactagccacaagtatgttacccagatgtagaattttcatcactaaacaatcatgctaaagaggaaaggacagtgtgcttggttagagtaaaggacgaggtcattagccatattgtatatatcgtcaagcaacacacacaaaagttcctcagccacaagacatccacatattgcatgttaaccagaagaaaagacaacattttccggaaatccactgcacactgttgcctatacactttgtacatttaattgatatttgtgctgaggtgatattcctgtctaaaagaacaacattgtctttcttttctagcacagagttatgcattcaaagatgcatacctagttagtttcctatatattcatgccatcttgaaaagacagactatggtgtaaccatgattctattatgtattggtacgtctgtagaccaagatataattttttaaaaataagtttatttctttcaaggtttacaaataacaaaggtgcaccttgtatttaaaattgccattatagatgagagcgtgcatgcacagtcatttttgtttaagagtaatatttttaatgtaatagattgtaagacgtggtgagggagggatctgacagagatgaatgtgccaagcaaaaccacaactgtgtatattttaaagcacatcatggctttaagtaccatgttgttaaggattctcatgaagtgccatagactgtacatcaaattagagtattatttcttcagtgttattgttttcagagccacattttgttgcatatttgctagtactaatcagtcaaagggcaccattctttttttttttttttgaaaccaaagctgtctcagaaatggccaatttaactttacagtaacaatagacagcacaacacaaactctctcaatacagataaactcacacatactggagatatatatataatagatatatataaaattattttaatgcattgtagtgtaatatttatgcatactatactgtataacatgttattcaaaagggattgccatttctgagacacagtaacaaaaaaatgaggaaattattttgcttctatttatagcctctgtcaaaagtcaaaagactataaatgctttgcaaaaatggtttcacgtttgcttaaatgcttcatcacagtcacattcaaaatagtgactctaaacaaagaagaaagcagcactgtcatcagatgcatgataaaccaaaatatgaaaatgggaaatgtttaattaacctagtaattgggtgggttaagtacatgggtgaattttatatgtgatttttgttttgttttgttttgttcagattaactgcttatagccttagaaagccttttacaaaattaaaaaaaaaatagatgtgcattcagtttttaagaatggaatcatccaaaggaattcctttttttgaggtttggatgttgcagctagtaaaggatatttttgctctgttcagcagttctaaaaattgctgaagtaggggccaggtcactggtagttatagtatggaatgggagaagtgaaagttcagttatagaactttccatacttccaagtttactgcaagtttttatgcttgagagagatgctttctaatataagactgatgtgttgattttactgattgtactgtacatctattaaagccttagattattacattacgggttggaacccataccaatgtaatttcaatcgtgttaagaaagtaatggtgacttcacatgttattgtagttagttacattatagaatattacttatttttcttgttaaaatgtagtttttcatttcctacatttattagattttcattttctattaacaattgaataccatttcagtttatagacttgttttattagattttaccaatgaatttttcaaaatacaaaaaaaagtagtttttccttcataacatactcagttttgaattacatgtagtgtcacatgaatattcgtattgttaactaaatgatttatattttactgatttaatattacagtgtaagaatgtcagtcattgttagttcttgtctagttttcattaaaagaacaaagatcttttatatggatatcttataaatatataatcattgctaagtaagaagttaagttgttgctatcgcaacaatcctggcagacaattgagtaatattttgatgatttattttgtttgtaattagttattataagaagatctagatcctagatattagaataaaatttattttctactgtatccatttcaaatgttaaaatattgtttaatatttttgaaatccctgagtatcaggccttgttataaataagctgcataatcaataaatagaacaagggactttttgttgataatccaaatactcaaagtttacgtaatgaaaattatagcgtgtgtgcaaactcttgagggttgattatgctgcaatttagcatgttggaacgtctagggagaaggttgactttttgcacttctgtatatagtcaaaagagagaaacctgtataatagtaagatcttattttgaataaaaacgtctataattacaaggagttttgttaaggctaatacaatgacagactgagcaaaattgcttgcaaaagtggcacagagttagcactccataccccttcaaacatgttgctttgctttcttgtggacagcttgtagtttgccaggattttttcagctggaaagatacgccatcctttcaaaccctcatgactgacaaaaactccatggggccaaatctgcctgaagatcattaccaaaaatagcaggtacttctaccattaaggtgaaatcatggatcagatattccttacatttttcaaaactactgcatgtttaaaacttcaacaaaaaaagagagaaagaactatactaagaacatatattattcagatcagtttctgccaatttcagtggtttattgttcacaaaaaaatcttcaaaacaagtattgactttcacaaaatttaaatcataaacaggcaaaccaaacagcacactgtagctatagttgttatgtgattgttttttaattgctgtaggatcctgttctttcagcaggtgaaaaataaaacgcagttcaaatttcatggttttaattttcaactcagaagcactcaaaaatgcaaaatgtgataatgggcacttgtttaaaagaattagtgtatccagccttcactccagctggttaaaaatgttgcacttatcagcaaccctaccactttcatctgctgaaaggacaaatgtgcttggttttactattatgtaatcacaacttactttctgcttgtagttgcttaaaattatgtattttgtcttgggctgcaatttgttttatgcttattttattattactgcagtagttgactttgctgtatggaaaaataaagtgaaattgccctaataaaacttctctttcttaagt

SEQ ID NO: 265087 - DNA, 5092 bp, Artificial Sequence
  derived and/or modified sequence
cgattttgctctaaactgctgcatctgtctatgccaaactaatcaataccgattgcaccaccaaactccattgcaaattcagctgtgaggagattccctttcagacaactttgctgaaagcagcttggaaattcggtgtcgaagggtctgccacgttttcatgcttgcattttgggctccaaattggcactgggaaggggttactgagagcacaaggctgataccaggccctacttttaaacgttcatctacttacaatcctagtatttctctaaaaaccaaaacctctttgaattaacagtttcatgctgtgaatttctagtgggagatcttttccttgatattgacgacacaattttccatgtacttttaaagcagggagtggggaaaagtattttgaggggacattttcatcatcagttcagctttttttttttggttgttgctcttttttgggggggttgggtttgttggtttcactgaaacatttaactacctgtaaaatctaaacatggctgttagtgtcacaccaattcgggacacaaaatggctaacactggaagtatgtagagagttccagagggggacttgctcacggccagacacggaatgtaaatttgcacatccttcgaaaagctgccaagttgaaaatggacgagtaatcgcctgctttgattcattgaaaggccgttgctccagggagaactgcaaatatcttcatccacccccacatttaaaaacgcagttggagataaatggacgcaataacttgattcagcagaagaacatggccatgttggcccagcaaatgcaactagccaatgccatgatgcctggtgccccattacaacccgtgccaatgttttcagttgcaccaagcttagccaccaatgcatcagcagccgcctttaatccctatctgggacctgtttctccaagcctggtcccggcagagatcttgccgactgcaccaatgttggttacagggaatccgggtgtccctgtacctgcagctgctgcagctgctgcacagaaattaatgcgaacagacagacttgaggtatgtcgagagtaccaacgtggcaattgcaaccgaggagaaaatgattgtcggtttgctcatcctgctgacagcacaatgattgacaccaatgacaacacagtcactgtgtgtatggattacatcaaagggagatgctctcgggaaaagtgcaaatactttcatccccctgcacatttgcaagccaagatcaaggctgcccaataccaggtcaaccaggctgcagctgcacaggctgcagccaccgcagctgccatgactcagtcggctgtcaaatcactgaagcgacccctcgaggcaacctttgacctgggaattcctcaagctgtacttcccccattaccaaagaggcctgctcttgaaaaaaccaacggtgccaccgcagtctttaacactggtattttccaataccaacaggctctagccaacatgcagttacaacagcatacagcatttctcccaccagttcccatggtgcacggtgctacgccagccactgtgtccgcagcaacaacatctgccacaagtgttcccttcgctgcaacagccacagccaaccagatacccataatatctgccgaacatctgactagccacaagtatgttacccagatgtagaattttcatcactaaacaatcatgctaaagaggaaaggacagtgtgcttggttagagtaaaggacgaggtcattagccatattgtatatatcgtcaagcaacacacacaaaagttcctcagccacaagacatccacatattgcatgttaaccagaagaaaagacaacattttccggaaatccactgcacactgttgcctatacactttgtacatttaattgatatttgtgctgaggtgatattcctgtctaaaagaacaacattgtctttcttttctagcacagagttatgcattcaaagatgcatacctagttagtttcctatatattcatgccatcttgaaaagacagactatggtgtaaccatgattctattatgtattggtacgtctgtagaccaagatataattttttaaaaataagtttatttctttcaaggtttacaaataacaaaggtgcaccttgtatttaaaattgccattatagatgagagcgtgcatgcacagtcatttttgtttaagagtaatatttttaatgtaatagattgtaagacgtggtgagggagggatctgacagagatgaatgtgccaagcaaaaccacaactgtgtatattttaaagcacatcatggctttaagtaccatgttgttaaggattctcatgaagtgccatagactgtacatcaaattagagtattatttcttcagtgttattgttttcagagccacattttgttgcatatttgctagtactaatcagtcaaagggcaccattctttttttttttttttgaaaccaaagctgtctcagaaatggccaatttaactttacagtaacaatagacagcacaacacaaactctctcaatacagataaactcacacatactggagatatatatataatagatatatataaaattattttaatgcattgtagtgtaatatttatgcatactatactgtataacatgttattcaaaagggattgccatttctgagacacagtaacaaaaaaatgaggaaattattttgcttctatttatagcctctgtcaaaagtcaaaagactataaatgctttgcaaaaatggtttcacgtttgcttaaatgcttcatcacagtcacattcaaaatagtgactctaaacaaagaagaaagcagcactgtcatcagatgcatgataaaccaaaatatgaaaatgggaaatgtttaattaacctagtaattgggtgggttaagtacatgggtgaattttatatgtgatttttgttttgttttgttttgttcagattaactgcttatagccttagaaagccttttacaaaattaaaaaaaaaatagatgtgcattcagtttttaagaatggaatcatccaaaggaattcctttttttgaggtttggatgttgcagctagtaaaggatatttttgctctgttcagcagttctaaaaattgctgaagtaggggccaggtcactggtagttatagtatggaatgggagaagtgaaagttcagttatagaactttccatacttccaagtttactgcaagtttttatgcttgagagagatgctttctaatataagactgatgtgttgattttactgattgtactgtacatctattaaagccttagattattacattacgggttggaacccataccaatgtaatttcaatcgtgttaagaaagtaatggtgacttcacatgttattgtagttagttacattatagaatattacttatttttcttgttaaaatgtagtttttcatttcctacatttattagattttcattttctattaacaattgaataccatttcagtttatagacttgttttattagattttaccaatgaatttttcaaaatacaaaaaaaagtagtttttccttcataacatactcagttttgaattacatgtagtgtcacatgaatattcgtattgttaactaaatgatttatattttactgatttaatattacagtgtaagaatgtcagtcattgttagttcttgtctagttttcattaaaagaacaaagatcttttatatggatatcttataaatatataatcattgctaagtaagaagttaagttgttgctatcgcaacaatcctggcagacaattgagtaatattttgatgatttattttgtttgtaattagttattataagaagatctagatcctagatattagaataaaatttattttctactgtatccatttcaaatgttaaaatattgtttaatatttttgaaatccctgagtatcaggccttgttataaataagctgcataatcaataaatagaacaagggactttttgttgataatccaaatactcaaagtttacgtaatgaaaattatagcgtgtgtgcaaactcttgagggttgattatgctgcaatttagcatgttggaacgtctagggagaaggttgactttttgcacttctgtatatagtcaaaagagagaaacctgtataatagtaagatcttattttgaataaaaacgtctataattacaaggagttttgttaaggctaatacaatgacagactgagcaaaattgcttgcaaaagtggcacagagttagcactccataccccttcaaacatgttgctttgctttcttgtggacagcttgtagtttgccaggattttttcagctggaaagatacgccatcctttcaaaccctcatgactgacaaaaactccatggggccaaatctgcctgaagatcattaccaaaaatagcaggtacttctaccattaaggtgaaatcatggatcagatattccttacatttttcaaaactactgcatgtttaaaacttcaacaaaaaaagagagaaagaactatactaagaacatatattattcagatcagtttctgccaatttcagtggtttattgttcacaaaaaaatcttcaaaacaagtattgactttcacaaaatttaaatcataaacaggcaaaccaaacagcacactgtagctatagttgttatgtgattgttttttaattgctgtaggatcctgttctttcagcaggtgaaaaataaaacgcagttcaaatttcatggttttaattttcaactcagaagcactcaaaaatgcaaaatgtgataatgggcacttgtttaaaagaattagtgtatccagccttcactccagctggttaaaaatgttgcacttatcagcaaccctaccactttcatctgctgaaaggacaaatgtgcttggttttactattatgtaatcacaacttactttctgcttgtagttgcttaaaattatgtattttgtcttgggctgcaatttgttttatgcttattttattattactgcagtagttgactttgctgtatggaaaaataaagtgaaattgccctaataaaacttctctttcttaagta

SEQ ID NO: 265088 - DNA, 1167 bp, Artificial Sequence
  derived and/or modified sequence
atggccgtgagcgtgacccccatccgggacaccaagtggctgacccttgaagtgtgcagagaatttcaacgcggtacctgttctcggccagataccgaatgcaagtttgcacatccctctaagagctgtcaagttgaaaacgggagagtgatcgcctgttttgattcactgaagggccgatgctcccgagagaactgcaaatacctgcatcctcctcctcatctgaagactcagctggagatcaacggtcgtaataatcttatacaacagaaaaacatggccatgctggcccaacagatgcagctggcaaatgccatgatgccaggagccccccttcagcccgtaccaatgttctccgtggcaccatctcttgcaaccaatgcctccgctgcagctttcaatccatatttggggccagttagtcctagcctcgtccccgccgaaatcctgcctaccgctccaatgcttgtcactggaaatccgggcgttcctgtccccgcagccgctgccgccgcagcccagaaattaatgagaaccgatcggctggaagtgtgccgggaataccagcggggtaattgcaatagaggggaaaacgactgcagatttgcccatcctgccgatagtacaatgattgataccaacgacaataccgtgactgtttgtatggactatattaaagggaggtgttcaagagaaaaatgtaaatacttccatccccccgcccacttacaggctaagataaaggctgcacaatatcaggtcaaccaagccgcagccgctcaggctgccgccacagccgcagctatgactcaatctgccgtgaaaagcctcaagcggcctctcgaggccacattcgacctgggaatccctcaagccgtcctgccgccgctgccaaaaaggcccgccttggaaaagactaacggcgctaccgcagtctttaataccggaatttttcagtaccagcaggcccttgcgaacatgcagctgcaacaacacacagcttttctgcctccggtccccatggtgcacggagcgactcccgccaccgttagtgctgcgacaacgtcagcaaccagcgtaccatttgccgccaccgcgaccgctaaccagattccaatcatttccgctgagcacctaacgtcacacaagtatgtcactcaaatgtag

SEQ ID NO: 265089 - DNA, 1167 bp, Artificial Sequence
  derived and/or modified sequence
atggccgtgagcgtgacccccatccgggacaccaagtggctgaccttggaagtttgccgggagttccagagaggcacatgttcccggcctgatacggaatgtaagtttgctcacccctcaaagtcttgtcaggtagagaatgggagagtgatcgcatgcttcgatagcctcaagggccgatgctcccgggaaaactgtaagtacctgcatcctcctcctcatcttaagactcagctcgagatcaatggccgcaataacctgatacagcaaaagaacatggcaatgctcgcacagcagatgcaactggctaacgctatgatgcctggggctcccctgcagccggtacctatgtttagcgtcgctcccagtctggccacaaatgctagcgccgctgctttcaatccatacctgggaccagtctctcctagtttggttcctgccgagattctgcccaccgccccaatgctggtaacagggaacccgggcgttcccgtaccggccgcagcggcggctgcggcacagaaattgatgaggacagataggctggaggtgtgcagggagtaccagcgagggaactgtaatcgtggagagaatgactgtaggtttgcccacccggcagacagcacaatgatcgacacgaatgacaataccgtcaccgtttgcatggactatataaagggaaggtgctcccgggagaaatgcaagtatttccacccgcccgcccacttgcaggccaagatcaaggccgcgcagtaccaggtcaatcaagctgccgcggctcaggccgccgctacagcagccgcgatgacacagtcagccgtgaagagcctaaagcgcccattggaggctacctttgacctgggcattccccaggccgtgctgcccccattacctaagcggccggctttggagaagactaatggcgccaccgcggtttttaacaccggcattttccagtaccagcaagccctggccaacatgcagctgcagcagcacaccgctttcctgcctcccgtgccaatggttcacggggctacaccagccactgtgtccgcagctacgacgtctgcaacctccgtgcctttcgctgccacagccacggccaatcagattcccattattagcgccgaacacctcactagtcacaagtatgtgacccaaatgtag

SEQ ID NO: 265090 - DNA, 1167 bp, Artificial Sequence
  derived and/or modified sequence
atggccgtcagcgtgaccccgattcgcgacactaaatggttaaccctggaggtgtgccgggagtttcagcggggtacatgctcaaggccagacaccgagtgtaagttcgctcacccctccaagtcatgccaggtcgagaatgggcgagtgatagcgtgctttgattctctgaagggtcgctgtagccgagagaactgtaaatatctccacccacctccacacctgaagacacagcttgagatcaatgggaggaacaacttaatccagcaaaaaaacatggcgatgctggcacagcaaatgcaactcgctaatgctatgatgccgggtgctcctctgcagccagttcccatgttttcagtggcaccgagcttggcaaccaatgcttcagcagcagcctttaacccctatctgggtcctgtctctccttcactggtaccagctgaaatcttgccaacagcgcctatgctcgtgacaggcaacccaggcgtgcccgtaccggctgcggcagcggctgcggctcagaaactgatgcgcaccgatagactagaagtgtgtcgtgagtaccagcgagggaattgtaaccggggtgagaacgactgtcgattcgcccaccccgcagacagcaccatgatcgacacaaacgataatacagtaaccgtctgcatggattacattaagggacgctgttcccgggaaaaatgcaagtattttcacccccctgcccatttgcaggccaaaataaaagcagcccagtatcaggtgaaccaagccgctgctgcacaagcagctgctactgccgctgctatgacgcagtccgctgtgaagtctctcaagagacccttagaagccacctttgatctgggcatcccgcaggcagttctccccccattgccaaagaggcctgctctggaaaaaacaaatggagccacggctgtattcaatacggggatttttcagtaccagcaggcccttgccaatatgcagctgcagcagcataccgctttcctgccccctgtgccaatggtgcacggcgctactccagcgacagtgtccgccgcaaccaccagcgccacctctgtcccctttgctgctactgccaccgcaaatcaaatccctataatcagcgccgaacatcttacgagccacaagtacgtgacccaaatgtag

SEQ ID NO: 265091 - DNA, 1167 bp, Artificial Sequence
  derived and/or modified sequence
atggccgtcagcgtgacacctatccgcgacacgaagtggctgaccctcgaggtgtgtagggagttccagagaggaacctgttctcgacccgacacagagtgcaagttcgcccacccatcaaagtcttgccaggtggaaaatggaagggtcattgcatgcttcgactcacttaaaggtcggtgctcgcgtgaaaattgtaagtacctacacccccctccccatctgaaaacccagttggaaatcaacggaaggaataatttgattcaacagaaaaatatggccatgcttgcccaacagatgcagttggctaacgccatgatgccaggtgctcccctgcagcccgtgcccatgttttctgttgcaccatccctcgctacaaatgcctcagcggctgcattcaacccatacttgggacccgtttctccttctttggtgcccgctgaaatcctcccaacggcaccaatgctggtgacaggaaacccaggcgtacccgtacccgcagcggcagcggcagcggcacaaaaactgatgcgcacagaccgcctggaagtctgcagagaataccaaagagggaattgcaatcgcggagaaaatgactgcagatttgcacaccccgctgatagcactatgattgacaccaacgacaacacggttacagtctgcatggattacataaaaggacgctgctccagggagaagtgcaaatatttccatcctcctgcccatcttcaggctaaaataaaagctgcccagtatcaagtcaaccaggctgcggctgcccaggcggctgccacagccgctgctatgacccagtccgcagtcaagagcctgaaacgtcccttggaagccacattcgacctcgggatccctcaggcggtgcttccacctctcccgaagaggcctgccctggaaaagaccaacggcgcaacagctgtgtttaacacaggtatttttcaataccagcaggccctggccaacatgcagctgcagcagcacaccgccttcctcccacccgtcccaatggttcatggtgccaccccagccactgtgtctgccgcaaccacctcagccacatctgtgccttttgctgccacggccacggctaaccagatacccatcataagtgctgaacacttgacgtctcacaagtatgtgacgcagatgtag

SEQ ID NO: 265092 - DNA, 1167 bp, Artificial Sequence
  derived and/or modified sequence
atggccgtgagcgtgacccccatcagagacaccaagtggctgaccctggaggtgtgcagagagttccagagaggcacctgcagcagacccgacaccgagtgcaagttcgcccaccccagcaagagctgccaggtggagaacggcagagtgatcgcctgcttcgacagcctgaagggcagatgcagcagagagaactgcaagtacctgcacccccccccccacctgaagacccagctggagatcaacggcagaaacaacctgatccagcagaagaacatggccatgctggcccagcagatgcagctggccaacgccatgatgcccggcgcccccctgcagcccgtgcccatgttcagcgtggcccccagcctggccaccaacgccagcgccgccgccttcaacccctacctgggccccgtgagccccagcctggtgcccgccgagatcctgcccaccgcccccatgctggtgaccggcaaccccggcgtgcccgtgcccgccgccgccgccgccgccgcccagaagctgatgagaaccgacagactggaggtgtgcagagagtaccagagaggcaactgcaacagaggcgagaacgactgcagattcgcccaccccgccgacagcaccatgatcgacaccaacgacaacaccgtgaccgtgtgcatggactacatcaagggcagatgcagcagagagaagtgcaagtacttccacccccccgcccacctgcaggccaagatcaaggccgcccagtaccaggtgaaccaggccgccgccgcccaggccgccgccaccgccgccgccatgacccagagcgccgtgaagagcctgaagagacccctggaggccaccttcgacctgggcatcccccaggccgtgctgccccccctgcccaagagacccgccctggagaagaccaacggcgccaccgccgtgttcaacaccggcatcttccagtaccagcaggccctggccaacatgcagctgcagcagcacaccgccttcctgccccccgtgcccatggtgcacggcgccacccccgccaccgtgagcgccgccaccaccagcgccaccagcgtgcccttcgccgccaccgccaccgccaaccagatccccatcatcagcgccgagcacctgaccagccacaagtacgtgacccagatgtag

SEQ ID NO: 265093 - protein, 302 aa, Artificial Sequence
  derived and/or modified sequence
MAVSVTPIRDTKWLTLEVCREFQRGTCSRPDTECKFAHPSKSCQVENGRVIACFDSLKGRCSRENCKYLHPPPHLKTQLEINGRNNLIQQKNMAMLAQQMQLANAMMPGAPLQPVVCREYQRGNCNRGENDCRFAHPADSTMIDTNDNTVTVCMDYIKGRCSREKCKYFHPPAHLQAKIKAAQYQVNQAAAAQAAATAAAMGIPQAVLPPLPKRPALEKTNGATAVFNTGIFQYQQALANMQLQQHTAFLPPVPMVHGATPATVSAATTSATSVPFAATATANQIPIISAEHLTSHKYVTQM

SEQ ID NO: 265094 - DNA, 909 bp, Artificial Sequence
  derived and/or modified sequence
atggctgtgtccgttacaccaattcgtgacactaagtggttgacactcgaggtgtgccgcgaatttcagagggggacctgcagtcggcccgatacggaatgtaaatttgctcatccctctaagagctgccaggtcgagaatggcagagtgatcgcttgtttcgactctctgaagggccggtgctccagagagaactgtaagtacttgcaccctcccccgcatctgaaaacgcagcttgaaatcaatggacgcaacaacctgattcaacaaaaaaacatggcaatgctggcacaacagatgcagttggccaatgccatgatgcccggagccccccttcagcccgttgtttgtagagaataccagcgagggaattgtaaccgtggcgaaaacgactgtaggtttgcacacccggccgacagtacaatgattgataccaatgataacaccgtgaccgtttgcatggattatatcaaaggcaggtgtagccgcgagaagtgtaaatactttcacccgcccgcccatctgcaagctaagattaaagccgcgcagtatcaggtcaaccaagcggctgctgcccaagcagctgccaccgcagctgccatgggcatcccacaggccgtactccctccgctccccaagcgtccggcattagaaaaaactaatggcgctaccgctgttttcaacacaggaatttttcagtaccagcaggctcttgcaaatatgcagctacagcagcatactgccttcctgcctcccgtccctatggtacacggtgccacgcccgccacagtttcggctgctacgaccagcgccacttcagtgccattcgctgccacagccacagcaaatcagatccccattatttctgctgagcaccttacgagccataagtacgttactcagatgtag

SEQ ID NO: 265095 - DNA, 909 bp, Artificial Sequence
  derived and/or modified sequence
atggcggtatctgtgacccccatacgtgacaccaagtggctcacactggaggtctgcagggaattccagcggggcacctgttcccgccctgacaccgaatgcaaatttgctcatccaagtaagtcttgtcaggtggagaacggcagggtgattgcatgtttcgactctctgaagggcaggtgtagtcgtgagaactgtaagtatctgcacccaccaccgcatttaaagacccagttggaaatcaacgggcgaaacaatcttattcaacagaaaaatatggcgatgctggcacaacaaatgcaacttgcgaacgcaatgatgccaggagcccctctccagccggtggtttgcagggaataccaacgaggcaattgtaaccggggtgaaaacgactgcaggttcgctcaccccgccgattccaccatgatcgatacgaacgataatactgtcacagtgtgtatggattacattaagggacgttgctctcgcgagaaatgtaaatattttcaccctcccgcccacctccaggccaagataaaggcagcccagtaccaagttaaccaggcggccgcagcccaagccgcagctaccgctgccgcaatgggcattcctcaggccgtgctccctcctttacctaagagacctgccctggaaaagacaaacggggctaccgccgtgttcaacacgggcatctttcaataccagcaggccctcgcgaatatgcagttgcaacagcacaccgcattcctgccccctgtaccaatggtacacggtgctacaccggcaactgtgtccgctgctacaacaagcgccacttctgtccctttcgcggctaccgccactgccaaccaaatcccaattatcagcgccgagcacctgacatcgcacaagtacgttactcagatgtag

SEQ ID NO: 265096 - DNA, 909 bp, Artificial Sequence
  derived and/or modified sequence
atggctgtgtctgtgacccccatccgggacaccaagtggctgaccctggaggtgtgccgggagttccagaggggcacctgcagcaggccagacacagagtgcaagtttgcccaccccagcaagagctgccaggtggagaatggccgggtgattgcctgctttgacagcctgaagggccgctgcagccgggagaactgcaagtacctgcaccccccaccccacctgaagacccagctggagatcaatggaagaaacaacctgatccagcagaagaacatggccatgctggcccagcagatgcagctggccaatgccatgatgcctggggcccccctgcagcctgtggtgtgccgggagtaccagaggggcaactgcaacagaggagaaaatgactgccgctttgcccaccctgctgacagcaccatgattgacaccaatgacaacacagtgacagtgtgcatggactacatcaagggccgctgcagccgggagaagtgcaagtacttccaccccccagcccacctgcaggccaagatcaaggccgcccagtaccaggtgaaccaggccgctgctgcccaggccgccgccacagctgctgccatgggcatcccccaggccgtgctgccccccctgcccaagaggcctgccctggagaagaccaatggagccacagctgtgttcaacacaggcatcttccagtaccagcaggccctggccaacatgcagctgcagcagcacacagccttcctgccccctgtgcccatggtgcatggagccaccccagccaccgtgtctgctgccaccaccagcgccacctctgtgccctttgctgccacagccacagccaaccagatccccatcatctctgctgagcacctgaccagccacaagtatgtgacccagatgtag

SEQ ID NO: 265097 - DNA, 6164 bp, Artificial Sequence
  derived and/or modified sequence
ttacatcttatagcacccagtgaattatgatatggggctgcggtttatttgctctggcgacaatatggcttacttgccgtggaatatcccggtatttcagaagtaacatattatttttaaagagggagctttgctttctctaaatcacatggtgcaaagttgggaatacagtggcctgtaaattacaaatattatttacaaactagaaggaaagctgacatgtgtttgtgcctgtgtgacagtttcactaaggaattccaaaactgtggatagcctgttacttgagaaaaatacacggtggcagtcttgcagatgtttttcccgcctgttagccctccaggttcaaaaactgtttggtgcattttaaggcggcagtctcaccagatcgcaggattctagtctaattggcttctaaccttcaatctaaccttgccggcttccttgcaaagcccggtgcaagggcctctttcaaaatgaacccactggtgtgcctagcagtcggtagaagaagcgggagggcgtccggtctgcacgcccgccgcgaggttacaatgctgaacgcatgagatggaagataccaacgggaggccgaggggatccacggcgcccgcgcgggctccggcttcctcctgctctcggcgccgctgggcgaccgcccatgacccgctcttgcgggctctgtccggttgacaggcgaccctgtggcccggggaagcgcgggagggcgccggcggaaagttgaagagcgtttttctcgccgccgcgtgcattaggagctcgacgagtccgccctgggcttcctggtggggctgggcgggcgggggaggggccgcgcagcagcagcggaagccagacctcggcgataagaggctgcacagcgacatgcaacagtcttttcactgcagctgaatgagttgtggcgcccacaatgctcccatgacaaggagctgacaagttccattttccgtcgcgggcatcttggaatcatgactcccacaatgccttgggcacttggtcgacagtggggccgcctctgaaaaaaaaatgtgagaggttggtactaagaagtgcctttcctgacgtctctgctgcttggaaccgcttctagagcagtctctgcttttgccttgcttgctgccagctagactgtgacgacagcacatccaccctccacctctagcccagacacccccatttctacttataatcaagagaaaagctctaagtatctggcattgccctaggctgctttagtgttaaaagaaaagtttgctgaaaaagtaagatatcttctgccaggaaatcaaggaggaaaaaaaaaatcattttctcgattttgctctaaactgctgcatctgtctatgccaaactaatcaataccgattgcaccaccaaactccattgcaaattcagctgtgaggagattccctttcagacaactttgctgaaagcagcttggaaattcggtgtcgaagggtctgccacgttttcatgcttgcattttgggctccaaattggcactgggaaggggttactgagagcacaaggctgataccaggccctacttttaaacgttcatctacttacaatcctagtatttctctaaaaaccaaaacctctttgaattaacagtttcatgctgtgaatttctagtgggagatcttttccttgatattgacgacacaattttccatgtacttttaaagcagggagtggggaaaagtattttgaggggacattttcatcatcagttcagctttttttttttggttgttgctcttttttgggggggttgggtttgttggtttcactgaaacatttaactacctgtaaaatctaaacatggctgttagtgtcacaccaattcgggacacaaaatggctaacactggaagtatgtagagagttccagagggggacttgctcacggccagacacggaatgtaaatttgcacatccttcgaaaagctgccaagttgaaaatggacgagtaatcgcctgctttgattcattgaaaggccgttgctccagggagaactgcaaatatcttcatccacccccacatttaaaaacgcagttggagataaatggacgcaataacttgattcagcagaagaacatggccatgttggcccagcaaatgcaactagccaatgccatgatgcctggtgccccattacaacccgtggtatgtcgagagtaccaacgtggcaattgcaaccgaggagaaaatgattgtcggtttgctcatcctgctgacagcacaatgattgacaccaatgacaacacagtcactgtgtgtatggattacatcaaagggagatgctctcgggaaaagtgcaaatactttcatccccctgcacatttgcaagccaagatcaaggctgcccaataccaggtcaaccaggctgcagctgcacaggctgcagccaccgcagctgccatgggaattcctcaagctgtacttcccccattaccaaagaggcctgctcttgaaaaaaccaacggtgccaccgcagtctttaacactggtattttccaataccaacaggctctagccaacatgcagttacaacagcatacagcatttctcccaccagttcccatggtgcacggtgctacgccagccactgtgtccgcagcaacaacatctgccacaagtgttcccttcgctgcaacagccacagccaaccagatacccataatatctgccgaacatctgactagccacaagtatgttacccagatgtagaattttcatcactaaacaatcatgctaaagaggaaaggacagtgtgcttggttagagtaaaggacgaggtcattagccatattgtatatatcgtcaagcaacacacacaaaagttcctcagccacaagacatccacatattgcatgttaaccagaagaaaagacaacattttccggaaatccactgcacactgttgcctatacactttgtacatttaattgatatttgtgctgaggtgatattcctgtctaaaagaacaacattgtctttcttttctagcacagagttatgcattcaaagatgcatacctagttagtttcctatatattcatgccatcttgaaaagacagactatggtgtaaccatgattctattatgtattggtacgtctgtagaccaagatataattttttaaaaataagtttatttctttcaaggtttacaaataacaaaggtgcaccttgtatttaaaattgccattatagatgagagcgtgcatgcacagtcatttttgtttaagagtaatatttttaatgtaatagattgtaagacgtggtgagggagggatctgacagagatgaatgtgccaagcaaaaccacaactgtgtatattttaaagcacatcatggctttaagtaccatgttgttaaggattctcatgaagtgccatagactgtacatcaaattagagtattatttcttcagtgttattgttttcagagccacattttgttgcatatttgctagtactaatcagtcaaagggcaccattctttttttttttttttgaaaccaaagctgtctcagaaatggccaatttaactttacagtaacaatagacagcacaacacaaactctctcaatacagataaactcacacatactggagatatatatataatagatatatataaaattattttaatgcattgtagtgtaatatttatgcatactatactgtataacatgttattcaaaagggattgccatttctgagacacagtaacaaaaaaatgaggaaattattttgcttctatttatagcctctgtcaaaagtcaaaagactataaatgctttgcaaaaatggtttcacgtttgcttaaatgcttcatcacagtcacattcaaaatagtgactctaaacaaagaagaaagcagcactgtcatcagatgcatgataaaccaaaatatgaaaatgggaaatgtttaattaacctagtaattgggtgggttaagtacatgggtgaattttatatgtgatttttgttttgttttgttttgttcagattaactgcttatagccttagaaagccttttacaaaattaaaaaaaaaatagatgtgcattcagtttttaagaatggaatcatccaaaggaattcctttttttgaggtttggatgttgcagctagtaaaggatatttttgctctgttcagcagttctaaaaattgctgaagtaggggccaggtcactggtagttatagtatggaatgggagaagtgaaagttcagttatagaactttccatacttccaagtttactgcaagtttttatgcttgagagagatgctttctaatataagactgatgtgttgattttactgattgtactgtacatctattaaagccttagattattacattacgggttggaacccataccaatgtaatttcaatcgtgttaagaaagtaatggtgacttcacatgttattgtagttagttacattatagaatattacttatttttcttgttaaaatgtagtttttcatttcctacatttattagattttcattttctattaacaattgaataccatttcagtttatagacttgttttattagattttaccaatgaatttttcaaaatacaaaaaaaagtagtttttccttcataacatactcagttttgaattacatgtagtgtcacatgaatattcgtattgttaactaaatgatttatattttactgatttaatattacagtgtaagaatgtcagtcattgttagttcttgtctagttttcattaaaagaacaaagatcttttatatggatatcttataaatatataatcattgctaagtaagaagttaagttgttgctatcgcaacaatcctggcagacaattgagtaatattttgatgatttattttgtttgtaattagttattataagaagatctagatcctagatattagaataaaatttattttctactgtatccatttcaaatgttaaaatattgtttaatatttttgaaatccctgagtatcaggccttgttataaataagctgcataatcaataaatagaacaagggactttttgttgataatccaaatactcaaagtttacgtaatgaaaattatagcgtgtgtgcaaactcttgagggttgattatgctgcaatttagcatgttggaacgtctagggagaaggttgactttttgcacttctgtatatagtcaaaagagagaaacctgtataatagtaagatcttattttgaataaaaacgtctataattacaaggagttttgttaaggctaatacaatgacagactgagcaaaattgcttgcaaaagtggcacagagttagcactccataccccttcaaacatgttgctttgctttcttgtggacagcttgtagtttgccaggattttttcagctggaaagatacgccatcctttcaaaccctcatgactgacaaaaactccatggggccaaatctgcctgaagatcattaccaaaaatagcaggtacttctaccattaaggtgaaatcatggatcagatattccttacatttttcaaaactactgcatgtttaaaacttcaacaaaaaaagagagaaagaactatactaagaacatatattattcagatcagtttctgccaatttcagtggtttattgttcacaaaaaaatcttcaaaacaagtattgactttcacaaaatttaaatcataaacaggcaaaccaaacagcacactgtagctatagttgttatgtgattgttttttaattgctgtaggatcctgttctttcagcaggtgaaaaataaaacgcagttcaaatttcatggttttaattttcaactcagaagcactcaaaaatgcaaaatgtgataatgggcacttgtttaaaagaattagtgtatccagccttcactccagctggttaaaaatgttgcacttatcagcaaccctaccactttcatctgctgaaaggacaaatgtgcttggttttactattatgtaatcacaacttactttctgcttgtagttgcttaaaattatgtattttgtcttgggctgcaatttgttttatgcttattttattattactgcagtagttgactttgctgtatggaaaaataaagtgaaattgccctaataaaacttctctttcttaagt

SEQ ID NO: 265098 - DNA, 4257 bp, Artificial Sequence
  derived and/or modified sequence
cgattttgctctaaactgctgcatctgtctatgccaaactaatcaataccgattgcaccaccaaactccattgcaaattcagctgtgaggagattccctttcagacaactttgctgaaagcagcttggaaattcggtgtcgaagggtctgccacgttttcatgcttgcattttgggctccaaattggcactgggaaggggttactgagagcacaaggctgataccaggccctacttttaaacgttcatctacttacaatcctagtatttctctaaaaaccaaaacctctttgaattaacagtttcatgctgtgaatttctagtgggagatcttttccttgatattgacgacacaattttccatgtacttttaaagcagggagtggggaaaagtattttgaggggacattttcatcatcagttcagctttttttttttggttgttgctcttttttgggggggttgggtttgttggtttcactgaaacatttaactacctgtaaaatctaaacatggctgttagtgtcacaccaattcgggacacaaaatggctaacactggaagtatgtagagagttccagagggggacttgctcacggccagacacggaatgtaaatttgcacatccttcgaaaagctgccaagttgaaaatggacgagtaatcgcctgctttgattcattgaaaggccgttgctccagggagaactgcaaatatcttcatccacccccacatttaaaaacgcagttggagataaatggacgcaataacttgattcagcagaagaacatggccatgttggcccagcaaatgcaactagccaatgccatgatgcctggtgccccattacaacccgtggtatgtcgagagtaccaacgtggcaattgcaaccgaggagaaaatgattgtcggtttgctcatcctgctgacagcacaatgattgacaccaatgacaacacagtcactgtgtgtatggattacatcaaagggagatgctctcgggaaaagtgcaaatactttcatccccctgcacatttgcaagccaagatcaaggctgcccaataccaggtcaaccaggctgcagctgcacaggctgcagccaccgcagctgccatgggaattcctcaagctgtacttcccccattaccaaagaggcctgctcttgaaaaaaccaacggtgccaccgcagtctttaacactggtattttccaataccaacaggctctagccaacatgcagttacaacagcatacagcatttctcccaccagttcccatggtgcacggtgctacgccagccactgtgtccgcagcaacaacatctgccacaagtgttcccttcgctgcaacagccacagccaaccagatacccataatatctgccgaacatctgactagccacaagtatgttacccagatgtagaattttcatcactaaacaatcatgctaaagaggaaaggacagtgtgcttggttagagtaaaggacgaggtcattagccatattgtatatatcgtcaagcaacacacacaaaagttcctcagccacaagacatccacatattgcatgttaaccagaagaaaagacaacattttccggaaatccactgcacactgttgcctatacactttgtacatttaattgatatttgtgctgaggtgatattcctgtctaaaagaacaacattgtctttcttttctagcacagagttatgcattcaaagatgcatacctagttagtttcctatatattcatgccatcttgaaaagacagactatggtgtaaccatgattctattatgtattggtacgtctgtagaccaagatataattttttaaaaataagtttatttctttcaaggtttacaaataacaaaggtgcaccttgtatttaaaattgccattatagatgagagcgtgcatgcacagtcatttttgtttaagagtaatatttttaatgtaatagattgtaagacgtggtgagggagggatctgacagagatgaatgtgccaagcaaaaccacaactgtgtatattttaaagcacatcatggctttaagtaccatgttgttaaggattctcatgaagtgccatagactgtacatcaaattagagtattatttcttcagtgttattgttttcagagccacattttgttgcatatttgctagtactaatcagtcaaagggcaccattctttttttttttttttgaaaccaaagctgtctcagaaatggccaatttaactttacagtaacaatagacagcacaacacaaactctctcaatacagataaactcacacatactggagatatatatataatagatatatataaaattattttaatgcattgtagtgtaatatttatgcatactatactgtataacatgttattcaaaagggattgccatttctgagacacagtaacaaaaaaatgaggaaattattttgcttctatttatagcctctgtcaaaagtcaaaagactataaatgctttgcaaaaatggtttcacgtttgcttaaatgcttcatcacagtcacattcaaaatagtgactctaaacaaagaagaaagcagcactgtcatcagatgcatgataaaccaaaatatgaaaatgggaaatgtttaattaacctagtaattgggtgggttaagtacatgggtgaattttatatgtgatttttgttttgttttgttttgttcagattaactgcttatagccttagaaagccttttacaaaattaaaaaaaaaatagatgtgcattcagtttttaagaatggaatcatccaaaggaattcctttttttgaggtttggatgttgcagctagtaaaggatatttttgctctgttcagcagttctaaaaattgctgaagtaggggccaggtcactggtagttatagtatggaatgggagaagtgaaagttcagttatagaactttccatacttccaagtttactgcaagtttttatgcttgagagagatgctttctaatataagactgatgtgttgattttactgattgtactgtacatctattaaagccttagattattacattacgggttggaacccataccaatgtaatttcaatcgtgttaagaaagtaatggtgacttcacatgttattgtagttagttacattatagaatattacttatttttcttgttaaaatgtagtttttcatttcctacatttattagattttcattttctattaacaattgaataccatttcagtttatagacttgttttattagattttaccaatgaatttttcaaaatacaaaaaaaagtagtttttccttcataacatactcagttttgaattacatgtagtgtcacatgaatattcgtattgttaactaaatgatttatattttactgatttaatattacagtgtaagaatgtcagtcattgttagttcttgtctagttttcattaaaagaacaaagatcttttatatggatatcttataaatatataatcattgctaagtaagaagttaagttgttgctatcgcaacaatcctggcagacaattgagtaatattttgatgatttattttgtttgtaattagttattataagaagatctagatcctagatattagaataaaatttattttctactgtatccatttcaaatgttaaaatattgtttaatatttttgaaatccctgagtatcaggccttgttataaataagctgcataatcaataaatagaacaagggactttttgttgataatccaaatactcaaagtttacgtaatgaaaattatagcgtgtgtgcaaactcttgagggttgattatgctgcaatttagcatgttggaacgtctagggagaaggttgactttttgcacttctgtatatagtcaaaagagagaaacctgtataatagtaagatcttattttgaataaaaacgtctataattacaaggagttttgttaaggctaatacaatgacagactgagcaaaattgcttgcaaaagtggcacagagttagcactccataccccttcaaacatgttgctttgctttcttgtggacagcttgtagtttgccaggattttttcagctggaaagatacgccatcctttcaaaccctcatgactgacaaaaactccatggggccaaatctgcctgaagatcattaccaaaaatagcaggtacttctaccattaaggtgaaatcatggatcagatattccttacatttttcaaaactactgcatgtttaaaacttcaac

SEQ ID NO: 265099 - DNA, 909 bp, Artificial Sequence
  derived and/or modified sequence
atggccgtgagcgtgacccccatccgggacaccaagtggctgaccctggaggtctgtagggaattccagaggggtacatgcagccgccctgacacggagtgtaagtttgctcatcccagcaagtcatgtcaggtggagaacggacgtgtcatagcctgttttgactcactcaagggacgttgctcccgggaaaattgtaagtaccttcatccaccaccccatcttaaaacacagctcgagataaacggtcgaaataaccttatccaacagaagaatatggcaatgctcgcccagcagatgcaactcgcgaatgcaatgatgcctggcgcccctttacagccagtggtatgtagagagtatcaaagaggaaattgcaaccgcggggaaaacgactgcaggtttgctcacccggctgatagcactatgattgatactaatgacaacacagttaccgtctgtatggattacatcaagggaaggtgttcgagggaaaaatgcaagtactttcaccctccggctcacctgcaggcgaagatcaaggccgcccagtatcaagtaaaccaagccgctgccgcccaagctgctgcaaccgcagcagctatggggattcctcaggctgtcctcccccctctgcccaagagacctgctctagagaaaacaaatggcgccacagccgttttcaataccggaattttccagtaccagcaagctctcgccaacatgcagctccagcagcatactgcattcctgcctcctgtgccgatggtccatggggccacgccagccactgtctctgcagcaaccacctcagctacaagcgtcccattcgcagctacagccaccgccaaccaaatacccatcatctcagccgaacatctcacctctcacaagtacgtgactcagatgtag

SEQ ID NO: 265100 - DNA, 909 bp, Artificial Sequence
  derived and/or modified sequence
atggccgtgagcgtgacccccatccgggacaccaagtggctgaccttagaagtatgtagggaattccagagggggacctgctccaggcccgacacagaatgcaaatttgcccatccgagcaagtcctgtcaggttgagaatggtcgcgtgatcgcatgcttcgattccctgaaaggcagatgcagccgtgaaaactgcaagtatctgcacccaccccctcatctgaagactcagctggaaatcaatggaaggaataacctcattcagcagaagaatatggcaatgctcgcccagcagatgcagctagcgaatgccatgatgcccggtgctcctcttcagccagtggtctgtagagagtatcagcggggaaattgcaataggggagagaatgactgccgctttgcacaccccgccgattctacaatgatcgacactaacgacaacacagttaccgtgtgcatggattacattaaaggtcgctgtagcagagagaaatgcaaatacttccacccgcctgcccatttgcaggcgaaaatcaaggcagctcagtatcaagttaatcaagcggccgcagcgcaggcagcagccaccgcggccgcgatgggaattccacaggccgtgctgccgccccttcctaaacgccccgccctcgagaagacgaatggcgctaccgcagttttcaataccggaatttttcagtaccagcaggccttagcaaacatgcaactccaacaacataccgcttttctgccgcccgtgcctatggtgcacggcgccactcccgcgaccgtgtctgccgctacgacgtctgcaacgtcagtgcctttcgctgctaccgctaccgccaatcaaatacccattatttcagcagagcacttaacaagccataagtacgtcacccagatgtag

SEQ ID NO: 265101 - DNA, 909 bp, Artificial Sequence
  derived and/or modified sequence
atggccgtcagtgtcacccctatacgcgacaccaaatggctgacattagaagtgtgccgggaattccagcggggaacctgctcccgacctgataccgagtgtaagtttgcccatccttcgaaatcttgccaggtggagaatggacgcgttatagcctgcttcgacagtcttaaaggacgctgctctcgggagaactgcaaatatctccatccacccccacatctgaaaacccagctcgaaattaacggtcggaataatctgatccagcagaaaaacatggcaatgttggcccaacagatgcagctggccaatgctatgatgcccggtgcccctctccagccagtggtgtgtagggaatatcagcgtggtaattgtaatcggggagagaacgactgtaggtttgcacacccagccgactccactatgatagacactaacgacaatacagtcactgtctgcatggattatattaaagggagatgttcacgtgaaaagtgcaaatacttccatccacctgcccacctccaggccaaaattaaagccgctcagtaccaagtgaatcaggccgctgctgctcaggccgcagcaaccgcggcagccatgggcattccacaggccgtactgccgccactccccaaaaggccagccctggagaagacaaacggggcaacagccgtgttcaacaccggcatctttcagtaccagcaggcgctggcaaacatgcagttgcagcagcatacagcttttctgcccccagttcccatggtccacggggcaactccagcaaccgtgagcgccgctaccacctccgcaacctccgttcccttcgccgcaactgccaccgcaaatcagataccgatcatcagcgccgaacacctcaccagccacaaatacgtaacacagatgtag

SEQ ID NO: 265102 - DNA, 909 bp, Artificial Sequence
  derived and/or modified sequence
atggccgtgtccgtcacgcctatccgtgataccaaatggcttactctggaggtatgtcgagagtttcaacgcggaacctgcagtcggccagacaccgagtgtaaattcgcgcatccatcaaaatcttgtcaggtggaaaatggaagagtgattgcctgcttcgactcacttaaggggagatgtagcagagaaaattgcaaatacctgcatccgccaccacacttgaaaacgcagctggagattaatggcaggaacaatctaatccagcagaagaatatggccatgttggcccagcagatgcaactcgccaacgctatgatgcctggagcccctctccagcccgttgtttgccgggagtaccaaaggggaaattgcaacaggggggagaatgactgccggttcgcgcaccctgctgatagtacaatgattgacacaaatgacaatactgtaacggtgtgcatggattatatcaagggccgatgtagccgtgaaaagtgcaaatacttccacccaccagctcatctgcaggccaagattaaggcagctcagtaccaggtcaatcaggccgctgccgcacaggccgctgcaaccgctgctgccatggggattccacaggccgtattaccccctctccctaaaaggccagcgctcgagaaaaccaatggcgctaccgccgtttttaacaccgggatttttcagtatcagcaggctctggctaatatgcagctacagcagcacacagccttcctgccccctgtgcctatggttcatggcgcaacaccagcaactgtaagtgcagcgacgacttcagccacttccgtgccctttgccgctactgctaccgccaaccagatccccatcatttctgcggaacacctgaccagtcacaagtacgttacccaaatgtag

SEQ ID NO: 265103 - DNA, 909 bp, Artificial Sequence
  derived and/or modified sequence
atggccgtgagcgtgacccccatcagagacaccaagtggctgaccctggaggtgtgcagagagttccagagaggcacctgcagcagacccgacaccgagtgcaagttcgcccaccccagcaagagctgccaggtggagaacggcagagtgatcgcctgcttcgacagcctgaagggcagatgcagcagagagaactgcaagtacctgcacccccccccccacctgaagacccagctggagatcaacggcagaaacaacctgatccagcagaagaacatggccatgctggcccagcagatgcagctggccaacgccatgatgcccggcgcccccctgcagcccgtggtgtgcagagagtaccagagaggcaactgcaacagaggcgagaacgactgcagattcgcccaccccgccgacagcaccatgatcgacaccaacgacaacaccgtgaccgtgtgcatggactacatcaagggcagatgcagcagagagaagtgcaagtacttccacccccccgcccacctgcaggccaagatcaaggccgcccagtaccaggtgaaccaggccgccgccgcccaggccgccgccaccgccgccgccatgggcatcccccaggccgtgctgccccccctgcccaagagacccgccctggagaagaccaacggcgccaccgccgtgttcaacaccggcatcttccagtaccagcaggccctggccaacatgcagctgcagcagcacaccgccttcctgccccccgtgcccatggtgcacggcgccacccccgccaccgtgagcgccgccaccaccagcgccaccagcgtgcccttcgccgccaccgccaccgccaaccagatccccatcatcagcgccgagcacctgaccagccacaagtacgtgacccagatgtag

SEQ ID NO: 265104 - protein, 314 aa, Artificial Sequence
  derived and/or modified sequence
MAVSVTPIRDTKWLTLEVCREFQRGTCSRPDTECKFAHPSKSCQVENGRVIACFDSLKGRCSRENCKYLHPPPHLKTQLEINGRNNLIQQKNMAMLAQQMQLANAMMPGAPLQPVVCREYQRGNCNRGENDCRFAHPADSTMIDTNDNTVTVCMDYIKGRCSREKCKYFHPPAHLQAKIKAAQYQVNQAAAAQAAATAAAMGIPQAVLPPLPKRPALEKTNGATAVFNTGIFQYQQALANMQLQQHTAFLPPGSILCMTPATSVVPMVHGATPATVSAATTSATSVPFAATATANQIPIISAEHLTSHKYVTQM

SEQ ID NO: 265105 - DNA, 945 bp, Artificial Sequence
  derived and/or modified sequence
atggccgtttctgtgacaccgatccgcgacacgaagtggttgacgcttgaagtctgtcgagagttccagcgcggtacatgctcccggcctgacacagagtgcaaattcgctcatcccagcaaatcttgccaggtggagaatgggcgggtgatcgcctgctttgacagtctaaagggccgttgttctagggaaaactgcaagtaccttcacccgccaccgcacctgaaaacacaactagaaatcaacggtaggaataaccttatacagcagaagaatatggccatgctcgcccagcagatgcagctcgccaacgccatgatgcccggagctcccctccagcctgtggtgtgtcgcgagtatcagaggggaaactgcaatagaggggagaatgattgtcgctttgcacacccagccgactcaaccatgattgacacgaacgataatactgttacagtgtgtatggactacatcaagggtagatgctctagagaaaagtgcaagtattttcaccctccagctcacctgcaggccaagatcaaggccgcccagtaccaggtaaaccaagccgccgccgcgcaagcagccgcaacagcggccgctatgggtattccccaggccgtcctcccacccctccctaagcggccagccctggagaagaccaatggagcgactgccgtgtttaataccggtatcttccagtatcaacaggcacttgcaaatatgcagctgcagcaacatactgcttttctgccgcctgggtctattctgtgcatgactcccgccaccagtgtggttcctatggtgcacggagcaactcctgctactgttagcgcggcaactacttctgccacgagcgtgcccttcgcagcaacagcaacggctaatcagatccctatcatctcagctgaacatctgactagccataagtacgtaactcagatgtag

SEQ ID NO: 265106 - DNA, 945 bp, Artificial Sequence
  derived and/or modified sequence
atggctgtgtctgtgacccccatccgggacaccaagtggctgaccctggaggtgtgccgggagttccagaggggcacctgcagcaggccagacacagagtgcaagtttgcccaccccagcaagagctgccaggtggagaatggccgggtgattgcctgctttgacagcctgaagggccgctgcagccgggagaactgcaagtacctgcaccccccaccccacctgaagacccagctggagatcaatggaagaaacaacctgatccagcagaagaacatggccatgctggcccagcagatgcagctggccaatgccatgatgcctggggcccccctgcagcctgtggtgtgccgggagtaccagaggggcaactgcaacagaggagaaaatgactgccgctttgcccaccctgctgacagcaccatgattgacaccaatgacaacacagtgacagtgtgcatggactacatcaagggccgctgcagccgggagaagtgcaagtacttccaccccccagcccacctgcaggccaagatcaaggccgcccagtaccaggtgaaccaggccgctgctgcccaggccgccgccacagctgctgccatgggcatcccccaggccgtgctgccccccctgcccaagaggcctgccctggagaagaccaatggagccacagctgtgttcaacacaggcatcttccagtaccagcaggccctggccaacatgcagctgcagcagcacacagccttcctgcccccaggcagcatcctgtgcatgaccccagccacctctgtggtgcccatggtgcatggagccaccccagccaccgtgtctgctgccaccaccagcgccacctctgtgccctttgctgccacagccacagccaaccagatccccatcatctctgctgagcacctgaccagccacaagtatgtgacccagatgtag

SEQ ID NO: 265107 - DNA, 5147 bp, Artificial Sequence
  derived and/or modified sequence
gttggtactaagaagtgcctttcctgacgtctctgctgcttggaaccgcttctagagcagtctctgcttttgccttgcttgctgccagctagactgtgacgacagcacatccaccctccacctctagcccagacacccccatttctacttataatcaagagaaaagctctaagtatctggcattgccctaggctgctttagtgttaaaagaaaagtttgctgaaaaagtaagatatcttctgccaggaaatcaaggaggaaaaaaaaaatcattttctcgattttgctctaaactgctgcatctgtctatgccaaactaatcaataccgattgcaccaccaaactccattgcaaattcagctgtgaggagattccctttcagacaactttgctgaaagcagcttggaaattcggtgtcgaagggtctgccacgttttcatgcttgcattttgggctccaaattggcactgggaaggggttactgagagcacaaggctgataccaggccctacttttaaacgttcatctacttacaatcctagtatttctctaaaaaccaaaacctctttgaattaacagtttcatgctgtgaatttctagtgggagatcttttccttgatattgacgacacaattttccatgtacttttaaagcagggagtggggaaaagtattttgaggggacattttcatcatcagttcagctttttttttttggttgttgctcttttttgggggggttgggtttgttggtttcactgaaacatttaactacctgtaaaatctaaacatggctgttagtgtcacaccaattcgggacacaaaatggctaacactggaagtatgtagagagttccagagggggacttgctcacggccagacacggaatgtaaatttgcacatccttcgaaaagctgccaagttgaaaatggacgagtaatcgcctgctttgattcattgaaaggccgttgctccagggagaactgcaaatatcttcatccacccccacatttaaaaacgcagttggagataaatggacgcaataacttgattcagcagaagaacatggccatgttggcccagcaaatgcaactagccaatgccatgatgcctggtgccccattacaacccgtggtatgtcgagagtaccaacgtggcaattgcaaccgaggagaaaatgattgtcggtttgctcatcctgctgacagcacaatgattgacaccaatgacaacacagtcactgtgtgtatggattacatcaaagggagatgctctcgggaaaagtgcaaatactttcatccccctgcacatttgcaagccaagatcaaggctgcccaataccaggtcaaccaggctgcagctgcacaggctgcagccaccgcagctgccatgggaattcctcaagctgtacttcccccattaccaaagaggcctgctcttgaaaaaaccaacggtgccaccgcagtctttaacactggtattttccaataccaacaggctctagccaacatgcagttacaacagcatacagcatttctcccaccaggctcaatattgtgcatgacacccgctacaagtgttgttcccatggtgcacggtgctacgccagccactgtgtccgcagcaacaacatctgccacaagtgttcccttcgctgcaacagccacagccaaccagatacccataatatctgccgaacatctgactagccacaagtatgttacccagatgtagaattttcatcactaaacaatcatgctaaagaggaaaggacagtgtgcttggttagagtaaaggacgaggtcattagccatattgtatatatcgtcaagcaacacacacaaaagttcctcagccacaagacatccacatattgcatgttaaccagaagaaaagacaacattttccggaaatccactgcacactgttgcctatacactttgtacatttaattgatatttgtgctgaggtgatattcctgtctaaaagaacaacattgtctttcttttctagcacagagttatgcattcaaagatgcatacctagttagtttcctatatattcatgccatcttgaaaagacagactatggtgtaaccatgattctattatgtattggtacgtctgtagaccaagatataattttttaaaaataagtttatttctttcaaggtttacaaataacaaaggtgcaccttgtatttaaaattgccattatagatgagagcgtgcatgcacagtcatttttgtttaagagtaatatttttaatgtaatagattgtaagacgtggtgagggagggatctgacagagatgaatgtgccaagcaaaaccacaactgtgtatattttaaagcacatcatggctttaagtaccatgttgttaaggattctcatgaagtgccatagactgtacatcaaattagagtattatttcttcagtgttattgttttcagagccacattttgttgcatatttgctagtactaatcagtcaaagggcaccattctttttttttttttttgaaaccaaagctgtctcagaaatggccaatttaactttacagtaacaatagacagcacaacacaaactctctcaatacagataaactcacacatactggagatatatatataatagatatatataaaattattttaatgcattgtagtgtaatatttatgcatactatactgtataacatgttattcaaaagggattgccatttctgagacacagtaacaaaaaaatgaggaaattattttgcttctatttatagcctctgtcaaaagtcaaaagactataaatgctttgcaaaaatggtttcacgtttgcttaaatgcttcatcacagtcacattcaaaatagtgactctaaacaaagaagaaagcagcactgtcatcagatgcatgataaaccaaaatatgaaaatgggaaatgtttaattaacctagtaattgggtgggttaagtacatgggtgaattttatatgtgatttttgttttgttttgttttgttcagattaactgcttatagccttagaaagccttttacaaaattaaaaaaaaaatagatgtgcattcagtttttaagaatggaatcatccaaaggaattcctttttttgaggtttggatgttgcagctagtaaaggatatttttgctctgttcagcagttctaaaaattgctgaagtaggggccaggtcactggtagttatagtatggaatgggagaagtgaaagttcagttatagaactttccatacttccaagtttactgcaagtttttatgcttgagagagatgctttctaatataagactgatgtgttgattttactgattgtactgtacatctattaaagccttagattattacattacgggttggaacccataccaatgtaatttcaatcgtgttaagaaagtaatggtgacttcacatgttattgtagttagttacattatagaatattacttatttttcttgttaaaatgtagtttttcatttcctacatttattagattttcattttctattaacaattgaataccatttcagtttatagacttgttttattagattttaccaatgaatttttcaaaatacaaaaaaaagtagtttttccttcataacatactcagttttgaattacatgtagtgtcacatgaatattcgtattgttaactaaatgatttatattttactgatttaatattacagtgtaagaatgtcagtcattgttagttcttgtctagttttcattaaaagaacaaagatcttttatatggatatcttataaatatataatcattgctaagtaagaagttaagttgttgctatcgcaacaatcctggcagacaattgagtaatattttgatgatttattttgtttgtaattagttattataagaagatctagatcctagatattagaataaaatttattttctactgtatccatttcaaatgttaaaatattgtttaatatttttgaaatccctgagtatcaggccttgttataaataagctgcataatcaataaatagaacaagggactttttgttgataatccaaatactcaaagtttacgtaatgaaaattatagcgtgtgtgcaaactcttgagggttgattatgctgcaatttagcatgttggaacgtctagggagaaggttgactttttgcacttctgtatatagtcaaaagagagaaacctgtataatagtaagatcttattttgaataaaaacgtctataattacaaggagttttgttaaggctaatacaatgacagactgagcaaaattgcttgcaaaagtggcacagagttagcactccataccccttcaaacatgttgctttgctttcttgtggacagcttgtagtttgccaggattttttcagctggaaagatacgccatcctttcaaaccctcatgactgacaaaaactccatggggccaaatctgcctgaagatcattaccaaaaatagcaggtacttctaccattaaggtgaaatcatggatcagatattccttacatttttcaaaactactgcatgtttaaaacttcaacaaaaaaagagagaaagaactatactaagaacatatattattcagatcagtttctgccaatttcagtggtttattgttcacaaaaaaatcttcaaaacaagtattgactttcacaaaatttaaatcataaacaggcaaaccaaacagcacactgtagctatagttgttatgtgattgttttttaattgctgtaggatcctgttctttcagcaggtgaaaaataaaacgcagttcaaatttcatggttttaattttcaactcagaagcactcaaaaatgcaaaatgtgataatgggcacttgtttaaaagaattagtgtatccagccttcactccagctggttaaaaatgttgcacttatcagcaaccctaccactttcatctgctgaaaggacaaatgtgcttggttttactattatgtaatcacaacttactttctgcttgtagttgcttaaaattatgtattttgtcttgggctgcaatttgttttatgcttattttattattactgcagtagttgactttgctgtatggaaaaataaagtgaaattgccctaataaaacttctctttcttaagt

SEQ ID NO: 265108 - DNA, 945 bp, Artificial Sequence
  derived and/or modified sequence
atggccgtgagcgtgacccccatccgggacaccaagtggctgaccttagaagtgtgccgagaatttcagcgcggcacatgcagtagacctgatacagagtgtaagtttgcccacccgagcaagtcttgtcaggtagagaacgggagagtcatagcttgttttgattctctgaaaggccgctgctcgagggaaaactgcaagtaccttcatcctccccctcacttgaaaacccaactggagatcaacgggcgtaataacttgatccagcagaagaatatggccatgctagcacaacagatgcaattggctaacgccatgatgcccggggcccctttgcagcccgttgtgtgccgggagtatcagaggggaaactgcaaccggggggaaaacgactgtagatttgctcatccggcagatagtacgatgattgatacaaacgacaacacagtgacagtgtgtatggactatataaaagggcggtgcagtcgagaaaagtgtaaatattttcaccctccggctcatctgcaggccaagatcaaagctgctcagtaccaggtgaaccaagctgccgccgcacaggctgctgccacagcagctgccatgggcattccgcaagccgtcctacccccactgccaaaacgtcccgctctggaaaagacaaacggcgccaccgccgtgttcaacacaggcattttccagtaccaacaggccctggcaaacatgcagttgcagcagcacaccgcgtttctgccacctggttctattttatgcatgacccctgctacttccgtggtccccatggtccatggcgctacccccgccaccgtgagcgcagccacgacaagtgccacctcagtccctttcgccgcgacagctactgctaaccaaatccctatcatatcagccgaacatctgacatcccacaaatatgtaacacaaatgtag

SEQ ID NO: 265109 - DNA, 945 bp, Artificial Sequence
  derived and/or modified sequence
atggctgtgagtgtcacgcctattcgagataccaaatggcttaccctggaggtgtgcagggagtttcagcggggaacatgctcgagacccgacaccgagtgcaagtttgcccatcctagtaaaagttgccaagtggaaaatggcagggtgatcgcctgtttcgactcactgaaaggcagatgctccagggaaaattgtaaatatctgcacccgccaccacaccttaagactcagctggaaattaacggcagaaacaatctgatacagcaaaagaacatggcgatgctggcacaacaaatgcaactcgccaatgctatgatgcctggtgctcctctgcagcccgtagtgtgtagagaataccagcgcggaaactgtaacaggggcgaaaatgactgccgatttgctcatcccgctgatagtactatgatagatactaatgacaacacagtgacagtttgcatggactatattaagggcagatgctcacgcgagaagtgcaagtatttccaccctccagcacatctgcaggccaagatcaaagccgctcagtaccaggtgaaccaggctgctgccgctcaggccgctgccacagccgctgccatggggattcctcaagctgtcctcccgcctctaccaaagaggccagccctagaaaaaaccaacggagccacagcagtgtttaacacagggatcttccaatatcagcaggcacttgccaacatgcagctgcagcaacataccgctttcctgcccccaggttctatactgtgtatgactcctgctacctccgtggttccaatggtgcatggtgcaacacctgctacagtgtccgccgctaccacatccgcgacatctgtgcctttcgccgctaccgccaccgctaaccagattcctattattagtgcagaacatcttacctcccacaagtatgtgacacaaatgtag

SEQ ID NO: 265110 - DNA, 945 bp, Artificial Sequence
  derived and/or modified sequence
atggccgtgagcgtgacccccatcagagacaccaagtggctgaccctggaggtgtgcagagagttccagagaggcacctgcagcagacccgacaccgagtgcaagttcgcccaccccagcaagagctgccaggtggagaacggcagagtgatcgcctgcttcgacagcctgaagggcagatgcagcagagagaactgcaagtacctgcacccccccccccacctgaagacccagctggagatcaacggcagaaacaacctgatccagcagaagaacatggccatgctggcccagcagatgcagctggccaacgccatgatgcccggcgcccccctgcagcccgtggtgtgcagagagtaccagagaggcaactgcaacagaggcgagaacgactgcagattcgcccaccccgccgacagcaccatgatcgacaccaacgacaacaccgtgaccgtgtgcatggactacatcaagggcagatgcagcagagagaagtgcaagtacttccacccccccgcccacctgcaggccaagatcaaggccgcccagtaccaggtgaaccaggccgccgccgcccaggccgccgccaccgccgccgccatgggcatcccccaggccgtgctgccccccctgcccaagagacccgccctggagaagaccaacggcgccaccgccgtgttcaacaccggcatcttccagtaccagcaggccctggccaacatgcagctgcagcagcacaccgccttcctgccccccggcagcatcctgtgcatgacccccgccaccagcgtggtgcccatggtgcacggcgccacccccgccaccgtgagcgccgccaccaccagcgccaccagcgtgcccttcgccgccaccgccaccgccaaccagatccccatcatcagcgccgagcacctgaccagccacaagtacgtgacccagatgtag

SEQ ID NO: 265111 - protein, 340 aa, Artificial Sequence
  derived and/or modified sequence
MAVSVTPIRDTKWLTLEVCREFQRGTCSRPDTECKFAHPSKSCQVENGRVIACFDSLKGRCSRENCKYLHPPPHLKTQLEINGRNNLIQQKNMAMLAQQMQLANAMMPGAPLQPVPMFSVAPSLATNASAAAFNPYLGPVSPSLVPAEILPTAPMLVTGNPGVPVPAAAAAAAQKLMRTDRLEVCREYQRGNCNRGENDCRFAHPADSTMIDTNDNTVTVCMDYIKGRCSREKCKYFHPPAHLQAKIKAAQYQVNQAAAAQAAATAAAMFPWCTVLRQPLCPQQQHLPQVFPSLQQPQPTSPILDASTLLGATSCPAAAGKMIPIISAEHLTSHKYVTQM

SEQ ID NO: 265112 - DNA, 1023 bp, Artificial Sequence
  derived and/or modified sequence
atggccgtgtcagtgacccccattcgagatactaagtggttgaccttggaagtgtgccgcgagtttcagagaggtacttgtagccgccctgacaccgagtgcaagtttgcacaccccagtaagagttgtcaggtcgagaacgggcgggtgatagcttgtttcgattccctcaagggccgctgcagccgagaaaactgtaaatacttacaccctccccctcatcttaagacccagctggagatcaatggacgcaacaacctgatccaacaaaagaatatggcgatgctggcccagcagatgcagctggcaaatgccatgatgccaggcgctcccctgcagcctgtgcccatgttttctgttgccccctccctggcaaccaacgcatcagcggcagcattcaatccatacctcggaccggtgtcgccatcgctggtgcctgcagaaattcttcccaccgccccaatgcttgtcaccggaaatcctggagttcccgtcccagccgctgcggcggccgccgcgcagaagctcatgcgtaccgacaggctggaagtatgccgggaatatcaaagaggaaactgtaatcgcggtgaaaacgactgccggttcgctcacccagccgactcgacaatgatcgacactaacgacaacactgtgaccgtgtgcatggactacattaaaggcaggtgcagcagagaaaaatgcaaatatttccacccaccagcccaccttcaggccaagatcaaggcagcgcaatatcaggtgaaccaggctgccgctgcccaggcagccgccactgctgcagccatgttcccttggtgcaccgttctgcgacagccactttgcccgcagcagcagcatttgcctcaggtcttcccatctttgcagcagccgcagcccacctccccgatactggatgcttccacactgctcggagcaacatcctgccctgctgcggccgggaaaatgatcccgattataagcgctgaacacctcactagccataagtacgtaacccagatgtag

SEQ ID NO: 265113 - DNA, 1023 bp, Artificial Sequence
  derived and/or modified sequence
atggccgtgtcagttactccaatacgagatacaaaatggctgacactggaggtgtgcagggagttccagagaggcacatgctctaggcctgacacagagtgcaaattcgcccacccctccaagtcctgccaggtggaaaacggaagagtgattgcttgtttcgattccctgaagggtaggtgttcacgtgaaaactgcaagtatctacaccctcctccgcacctgaagactcagctggagatcaacggccggaacaacctaattcagcaaaagaacatggccatgctcgcacagcagatgcaactcgcaaatgccatgatgccaggcgcaccactccagcctgtgcctatgttctctgtggcaccttccctggcaactaacgcaagcgcggccgctttcaatccatatttggggccagtttcaccaagtctcgtgccagcagagatactgcctaccgccccgatgctggtcaccggaaatccgggtgtgccggtgccagctgccgccgcggctgctgcccagaaactcatgaggactgatcgactggaggtatgcagagagtatcagcgggggaactgcaaccgaggggagaacgactgcagattcgcccatcccgcagattccactatgattgataccaacgacaatactgtgaccgtgtgtatggattatattaaggggcgatgttccagagagaagtgcaaatattttcaccctccggcccaccttcaggccaaaatcaaggcagcccagtaccaggtgaaccaagctgctgctgcccaggcagccgctactgctgccgcgatgttcccttggtgcaccgttctgagacagccactgtgtcctcagcaacaacacctgcctcaggtattcccatccctgcagcagccacaacctacttcccccattctcgatgcctcaactctcctcggggccacttcttgtcccgcagcggcaggtaaaatgatacctatcatatcagctgaacatcttacttcccacaaatatgtaacccagatgtag

SEQ ID NO: 265114 - DNA, 1023 bp, Artificial Sequence
  derived and/or modified sequence
atggctgtgtctgtgacccccatccgggacaccaagtggctgaccctggaggtgtgccgggagttccagaggggcacctgcagcaggccagacacagagtgcaagtttgcccaccccagcaagagctgccaggtggagaatggccgggtgattgcctgctttgacagcctgaagggccgctgcagccgggagaactgcaagtacctgcaccccccaccccacctgaagacccagctggagatcaatggaagaaacaacctgatccagcagaagaacatggccatgctggcccagcagatgcagctggccaatgccatgatgcctggggcccccctgcagcctgtgcccatgttttctgtggcccccagcctggccaccaatgccagcgctgctgccttcaacccctacctgggccctgtgagccccagcctggtgcctgctgagatcctgcccacagcccccatgctggtgacaggcaaccctggggtgcctgtgcctgctgctgctgctgctgctgcccagaagctgatgaggacagaccggctggaggtgtgccgggagtaccagaggggcaactgcaacagaggagaaaatgactgccgctttgcccaccctgctgacagcaccatgattgacaccaatgacaacacagtgacagtgtgcatggactacatcaagggccgctgcagccgggagaagtgcaagtacttccaccccccagcccacctgcaggccaagatcaaggccgcccagtaccaggtgaaccaggccgctgctgcccaggccgccgccacagctgctgccatgttcccctggtgcaccgtgctgcggcagcccctgtgcccccagcagcagcacctgccccaggtgttccccagcctgcagcagccccagcccaccagccccatcctggatgccagcaccctgctgggcgccaccagctgcccagctgctgctgggaagatgatccccatcatctctgctgagcacctgaccagccacaagtatgtgacccagatgtag

SEQ ID NO: 265115 - DNA, 5225 bp, Artificial Sequence
  derived and/or modified sequence
gttggtactaagaagtgcctttcctgacgtctctgctgcttggaaccgcttctagagcagtctctgcttttgccttgcttgctgccagctagactgtgacgacagcacatccaccctccacctctagcccagacacccccatttctacttataatcaagagaaaagctctaagtatctggcattgccctaggctgctttagtgttaaaagaaaagtttgctgaaaaagtaagatatcttctgccaggaaatcaaggaggaaaaaaaaaatcattttctcgattttgctctaaactgctgcatctgtctatgccaaactaatcaataccgattgcaccaccaaactccattgcaaattcagctgtgaggagattccctttcagacaactttgctgaaagcagcttggaaattcggtgtcgaagggtctgccacgttttcatgcttgcattttgggctccaaattggcactgggaaggggttactgagagcacaaggctgataccaggccctacttttaaacgttcatctacttacaatcctagtatttctctaaaaaccaaaacctctttgaattaacagtttcatgctgtgaatttctagtgggagatcttttccttgatattgacgacacaattttccatgtacttttaaagcagggagtggggaaaagtattttgaggggacattttcatcatcagttcagctttttttttttggttgttgctcttttttgggggggttgggtttgttggtttcactgaaacatttaactacctgtaaaatctaaacatggctgttagtgtcacaccaattcgggacacaaaatggctaacactggaagtatgtagagagttccagagggggacttgctcacggccagacacggaatgtaaatttgcacatccttcgaaaagctgccaagttgaaaatggacgagtaatcgcctgctttgattcattgaaaggccgttgctccagggagaactgcaaatatcttcatccacccccacatttaaaaacgcagttggagataaatggacgcaataacttgattcagcagaagaacatggccatgttggcccagcaaatgcaactagccaatgccatgatgcctggtgccccattacaacccgtgccaatgttttcagttgcaccaagcttagccaccaatgcatcagcagccgcctttaatccctatctgggacctgtttctccaagcctggtcccggcagagatcttgccgactgcaccaatgttggttacagggaatccgggtgtccctgtacctgcagctgctgcagctgctgcacagaaattaatgcgaacagacagacttgaggtatgtcgagagtaccaacgtggcaattgcaaccgaggagaaaatgattgtcggtttgctcatcctgctgacagcacaatgattgacaccaatgacaacacagtcactgtgtgtatggattacatcaaagggagatgctctcgggaaaagtgcaaatactttcatccccctgcacatttgcaagccaagatcaaggctgcccaataccaggtcaaccaggctgcagctgcacaggctgcagccaccgcagctgccatgttcccatggtgcacggtgctacgccagccactgtgtccgcagcaacaacatctgccacaagtgttcccttcgctgcaacagccacagccaaccagccccatccttgatgcttctacactgttgggtgcaacatcctgtcctgcagcagcaggaaaaatgatacccataatatctgccgaacatctgactagccacaagtatgttacccagatgtagaattttcatcactaaacaatcatgctaaagaggaaaggacagtgtgcttggttagagtaaaggacgaggtcattagccatattgtatatatcgtcaagcaacacacacaaaagttcctcagccacaagacatccacatattgcatgttaaccagaagaaaagacaacattttccggaaatccactgcacactgttgcctatacactttgtacatttaattgatatttgtgctgaggtgatattcctgtctaaaagaacaacattgtctttcttttctagcacagagttatgcattcaaagatgcatacctagttagtttcctatatattcatgccatcttgaaaagacagactatggtgtaaccatgattctattatgtattggtacgtctgtagaccaagatataattttttaaaaataagtttatttctttcaaggtttacaaataacaaaggtgcaccttgtatttaaaattgccattatagatgagagcgtgcatgcacagtcatttttgtttaagagtaatatttttaatgtaatagattgtaagacgtggtgagggagggatctgacagagatgaatgtgccaagcaaaaccacaactgtgtatattttaaagcacatcatggctttaagtaccatgttgttaaggattctcatgaagtgccatagactgtacatcaaattagagtattatttcttcagtgttattgttttcagagccacattttgttgcatatttgctagtactaatcagtcaaagggcaccattctttttttttttttttgaaaccaaagctgtctcagaaatggccaatttaactttacagtaacaatagacagcacaacacaaactctctcaatacagataaactcacacatactggagatatatatataatagatatatataaaattattttaatgcattgtagtgtaatatttatgcatactatactgtataacatgttattcaaaagggattgccatttctgagacacagtaacaaaaaaatgaggaaattattttgcttctatttatagcctctgtcaaaagtcaaaagactataaatgctttgcaaaaatggtttcacgtttgcttaaatgcttcatcacagtcacattcaaaatagtgactctaaacaaagaagaaagcagcactgtcatcagatgcatgataaaccaaaatatgaaaatgggaaatgtttaattaacctagtaattgggtgggttaagtacatgggtgaattttatatgtgatttttgttttgttttgttttgttcagattaactgcttatagccttagaaagccttttacaaaattaaaaaaaaaatagatgtgcattcagtttttaagaatggaatcatccaaaggaattcctttttttgaggtttggatgttgcagctagtaaaggatatttttgctctgttcagcagttctaaaaattgctgaagtaggggccaggtcactggtagttatagtatggaatgggagaagtgaaagttcagttatagaactttccatacttccaagtttactgcaagtttttatgcttgagagagatgctttctaatataagactgatgtgttgattttactgattgtactgtacatctattaaagccttagattattacattacgggttggaacccataccaatgtaatttcaatcgtgttaagaaagtaatggtgacttcacatgttattgtagttagttacattatagaatattacttatttttcttgttaaaatgtagtttttcatttcctacatttattagattttcattttctattaacaattgaataccatttcagtttatagacttgttttattagattttaccaatgaatttttcaaaatacaaaaaaaagtagtttttccttcataacatactcagttttgaattacatgtagtgtcacatgaatattcgtattgttaactaaatgatttatattttactgatttaatattacagtgtaagaatgtcagtcattgttagttcttgtctagttttcattaaaagaacaaagatcttttatatggatatcttataaatatataatcattgctaagtaagaagttaagttgttgctatcgcaacaatcctggcagacaattgagtaatattttgatgatttattttgtttgtaattagttattataagaagatctagatcctagatattagaataaaatttattttctactgtatccatttcaaatgttaaaatattgtttaatatttttgaaatccctgagtatcaggccttgttataaataagctgcataatcaataaatagaacaagggactttttgttgataatccaaatactcaaagtttacgtaatgaaaattatagcgtgtgtgcaaactcttgagggttgattatgctgcaatttagcatgttggaacgtctagggagaaggttgactttttgcacttctgtatatagtcaaaagagagaaacctgtataatagtaagatcttattttgaataaaaacgtctataattacaaggagttttgttaaggctaatacaatgacagactgagcaaaattgcttgcaaaagtggcacagagttagcactccataccccttcaaacatgttgctttgctttcttgtggacagcttgtagtttgccaggattttttcagctggaaagatacgccatcctttcaaaccctcatgactgacaaaaactccatggggccaaatctgcctgaagatcattaccaaaaatagcaggtacttctaccattaaggtgaaatcatggatcagatattccttacatttttcaaaactactgcatgtttaaaacttcaacaaaaaaagagagaaagaactatactaagaacatatattattcagatcagtttctgccaatttcagtggtttattgttcacaaaaaaatcttcaaaacaagtattgactttcacaaaatttaaatcataaacaggcaaaccaaacagcacactgtagctatagttgttatgtgattgttttttaattgctgtaggatcctgttctttcagcaggtgaaaaataaaacgcagttcaaatttcatggttttaattttcaactcagaagcactcaaaaatgcaaaatgtgataatgggcacttgtttaaaagaattagtgtatccagccttcactccagctggttaaaaatgttgcacttatcagcaaccctaccactttcatctgctgaaaggacaaatgtgcttggttttactattatgtaatcacaacttactttctgcttgtagttgcttaaaattatgtattttgtcttgggctgcaatttgttttatgcttattttattattactgcagtagttgactttgctgtatggaaaaataaagtgaaattgccctaataaaacttctctttcttaagt

SEQ ID NO: 265116 - DNA, 1023 bp, Artificial Sequence
  derived and/or modified sequence
atggctgttagtgtcacaccaattcgggacacaaaatggctaacactggaagtatgtagagagttccagagggggacttgctcacggccagacacggaatgtaaatttgcacatccttcgaaaagctgccaagttgaaaatggacgagtaatcgcctgctttgattcattgaaaggccgttgctccagggagaactgcaaatatcttcatccacccccacatttaaaaacgcagttggagataaatggacgcaataacttgattcagcagaagaacatggccatgttggcccagcaaatgcaactagccaatgccatgatgcctggtgccccattacaacccgtgccaatgttttcagttgcaccaagcttagccaccaatgcatcagcagccgcctttaatccctatctgggacctgtttctccaagcctggtcccggcagagatcttgccgactgcaccaatgttggttacagggaatccgggtgtccctgtacctgcagctgctgcagctgctgcacagaaattaatgcgaacagacagacttgaggtatgtcgagagtaccaacgtggcaattgcaaccgaggagaaaatgattgtcggtttgctcatcctgctgacagcacaatgattgacaccaatgacaacacagtcactgtgtgtatggattacatcaaagggagatgctctcgggaaaagtgcaaatactttcatccccctgcacatttgcaagccaagatcaaggctgcccaataccaggtcaaccaggctgcagctgcacaggctgcagccaccgcagctgccatgttcccatggtgcacggtgctacgccagccactgtgtccgcagcaacaacatctgccacaagtgttcccttcgctgcaacagccacagccaaccagccccatccttgatgcttctacactgttgggtgcaacatcctgtcctgcagcagcaggaaaaatgatacccataatatctgccgaacatctgactagccacaagtatgttacccagatgtag

SEQ ID NO: 265117 - DNA, 1023 bp, Artificial Sequence
  derived and/or modified sequence
atggccgtgagcgtgacccccatccgggacaccaagtggctgaccctggaggtgtgccgagagttccaacggggaacgtgtagcaggcccgatacagaatgcaagttcgcccacccctccaagagctgccaggtcgagaacggccgagtcatagcatgctttgattccctgaaagggaggtgcagcagggagaactgtaagtatcttcatccccccccgcatttgaagactcagctcgagatcaatggcaggaataacctgattcagcagaagaatatggcaatgctcgcccaacagatgcaactagccaatgccatgatgcccggagccccccttcagcccgtgcccatgttcagcgttgctcccagtctggccacaaatgcctcggctgccgcattcaatccttacttaggaccggtgtccccatctctcgtaccagcggagattctaccaaccgcgcccatgcttgtaacgggaaatcctggtgtacccgtgccggccgcagccgctgccgcagctcagaaacttatgaggacagaccgcctggaggtgtgtcgggagtaccagagaggtaattgcaacaggggcgagaatgattgtcgcttcgcgcatcccgccgattctactatgatcgacacaaatgataatactgtaaccgtctgcatggattatatcaagggcagatgctcacgggagaaatgtaagtatttccatcctccagcacatttgcaggccaagatcaaagccgcacaatatcaagttaaccaagcagctgccgcccaggccgcagcaactgctgctgccatgttcccatggtgcacagtcttaagacagcctttatgtccgcagcaacagcatctgccccaggtgttcccatcattacagcagccccagcccactagccctatccttgacgcttccactctgctcggagcaactagctgcccagcagctgcaggtaaaatgattcccatcatttcagcagagcacctgaccagccacaaatacgtgacccagatgtag

SEQ ID NO: 265118 - DNA, 1023 bp, Artificial Sequence
  derived and/or modified sequence
atggccgtgagcgtgacccccatccgggacaccaagtggctgaccctggaggtgtgcagagagtttcagcgaggaacttgtagtcgtccagataccgaatgcaaattcgctcatccgtctaaaagttgccaggtcgagaatggcagggtaatcgcatgtttcgactccctaaagggaaggtgttcacgagaaaactgcaagtatctacaccccccgccccaccttaagactcagctggagattaacgggaggaacaatctcatccagcaaaaaaatatggccatgctggcacagcagatgcagctagcgaatgctatgatgccaggcgccccactgcagcccgtcccaatgttctccgtggccccatcattggcaaccaacgccagcgctgcggctttcaatccctacctaggtcctgtgagcccatctctcgtccccgcagagatcctgccaacagccccaatgctggtaaccggaaatcctggtgtgccagttccagcggctgctgctgcagcggcccagaaactgatgaggactgaccggctcgaagtgtgcagggagtaccaacgagggaattgcaacaggggagagaatgactgtcgcttcgcccaccccgccgattcaacaatgatcgacaccaacgacaacacagtgacagtctgtatggattatattaaaggccggtgcagcagagaaaagtgtaagtacttccaccctccagctcatctccaggctaaaattaaggctgcccaatatcaggtgaaccaagcggctgcagcacaggcagccgccactgccgccgctatgttcccatggtgcacagtgctgaggcagccgctttgtccacagcaacagcatctgcctcaagtcttccctagtctccagcagccacaacctacttcccctatactggacgcgtccacactactaggtgccaccagttgtccagccgcggccggcaaaatgattccgatcatctcggccgagcatctgaccagtcataagtatgtgacacaaatgtag

SEQ ID NO: 265119 - DNA, 1023 bp, Artificial Sequence
  derived and/or modified sequence
atggcggtttcagttactccaatacgggataccaagtggttaacattagaagtgtgcagagagttccagagagggacctgctcgcggccagacacggagtgcaagttcgcacacccctccaagagctgtcaggtggaaaatggcagagtcatcgcctgttttgactccctgaaggggaggtgctctagagagaactgcaaatacttgcatccccctccacacctcaagacccagctcgagatcaatggaaggaacaacctgattcaacagaagaacatggctatgctcgctcagcagatgcagcttgctaatgcaatgatgccgggtgcgccactgcaacccgtgcccatgttttctgtcgctccatccctagcaacaaacgcatctgccgctgcgttcaacccctatcttgggccagtaagcccctcactggttcctgctgaaatattgccaaccgcccctatgttggtgaccggcaacccgggagtgccagtcccggcagctgctgctgccgcagcccagaagctaatgcgaaccgaccgtttagaggtatgccgcgagtatcagcgtggaaactgcaaccggggtgagaatgattgcaggttcgctcaccctgctgattctaccatgattgacactaacgacaatacagtcactgtctgcatggactacattaaggggaggtgctccagagaaaagtgtaagtattttcatccgcctgcccacctacaggcaaaaattaaggccgctcagtatcaggtgaaccaggcagccgctgcccaagccgcagccaccgctgccgcaatgttcccatggtgcactgtgctgcgccaacccctgtgccctcagcagcagcatctccctcaggtgttcccctcactccagcagccccagccaacatccccaatcctggatgcatcaaccctgcttggggcaacaagttgcccagcagctgcaggcaagatgattcccatcattagtgctgaacacttaacgtctcataaatatgtgacccagatgtag

SEQ ID NO: 265120 - DNA, 1023 bp, Artificial Sequence
  derived and/or modified sequence
atggctgtgtctgttaccccgattcgcgatacaaaatggcttacactcgaggtgtgccgggagtttcagagaggcacgtgctcaagaccagacaccgaatgcaagttcgcacacccatccaaatcttgccaggttgagaatggaagagtgatagcctgtttcgattccctcaagggaaggtgctcacgtgagaactgcaagtacctccacccacctccacatctgaaaactcagttagagatcaatggacgaaataatcttatccagcagaaaaatatggctatgctggcccagcagatgcaactcgctaatgcaatgatgccaggcgctccactccagcctgttccaatgttttcagtggctccatccctggccaccaatgccagtgccgcagcatttaacccttacttaggcccagtgtctccttcactggtaccggctgagatcctccccaccgctccgatgctggtcacggggaatcctggagtaccggttcctgccgcagccgctgcagccgctcagaagcttatgagaactgaccgcttggaggtctgcagggaataccagcgagggaactgtaaccgtggggagaacgattgtagattcgctcatcccgctgattcaacaatgatcgatacgaacgacaatacagtgacagtatgcatggattacattaaaggcaggtgctcacgggagaaatgtaaatattttcatcccccagcacacctgcaggctaaaattaaagctgcccagtaccaggtaaaccaggccgcagctgcccaagctgccgctacagccgctgctatgttcccctggtgcacagtactacgacagcctctgtgtccacagcaacagcacctcccgcaagtgtttcccagtttacagcagccacaacccactagccccatactcgatgccagcacacttcttggggctacttcatgccctgcagctgcgggaaagatgatccctattatcagtgctgaacatctcacttctcacaaatacgtaacgcagatgtag

SEQ ID NO: 265121 - DNA, 1023 bp, Artificial Sequence
  derived and/or modified sequence
atggccgtgagcgtgacccccatcagagacaccaagtggctgaccctggaggtgtgcagagagttccagagaggcacctgcagcagacccgacaccgagtgcaagttcgcccaccccagcaagagctgccaggtggagaacggcagagtgatcgcctgcttcgacagcctgaagggcagatgcagcagagagaactgcaagtacctgcacccccccccccacctgaagacccagctggagatcaacggcagaaacaacctgatccagcagaagaacatggccatgctggcccagcagatgcagctggccaacgccatgatgcccggcgcccccctgcagcccgtgcccatgttcagcgtggcccccagcctggccaccaacgccagcgccgccgccttcaacccctacctgggccccgtgagccccagcctggtgcccgccgagatcctgcccaccgcccccatgctggtgaccggcaaccccggcgtgcccgtgcccgccgccgccgccgccgccgcccagaagctgatgagaaccgacagactggaggtgtgcagagagtaccagagaggcaactgcaacagaggcgagaacgactgcagattcgcccaccccgccgacagcaccatgatcgacaccaacgacaacaccgtgaccgtgtgcatggactacatcaagggcagatgcagcagagagaagtgcaagtacttccacccccccgcccacctgcaggccaagatcaaggccgcccagtaccaggtgaaccaggccgccgccgcccaggccgccgccaccgccgccgccatgttcccctggtgcaccgtgctgagacagcccctgtgcccccagcagcagcacctgccccaggtgttccccagcctgcagcagccccagcccaccagccccatcctggacgccagcaccctgctgggcgccaccagctgccccgccgccgccggcaagatgatccccatcatcagcgccgagcacctgaccagccacaagtacgtgacccagatgtag

SEQ ID NO: 265122 - protein, 342 aa, Artificial Sequence
  derived and/or modified sequence
MAVSVTPIRDTKWLTLEVCREFQRGTCSRPDTECKFAHPSKSCQVENGRVIACFDSLKGRCSRENCKYLHPPPHLKTQLEINGRNNLIQQKNMAMLAQQMQLANAMMPGAPLQPVPMFSVAPSLATNASAAAFNPYLGPVSPSLVPAEILPTAPMLVTGNPGVPVPAAAAAAAQKLMRTDRLEVCREYQRGNCNRGENDCRFAHPADSTMIDTNDNTVTVCMDYIKGRCSREKCKYFHPPAHLQAKIKAAQYQVNQAAAAQAAATAAAMGIPQAVLPPLPKRPALEKTNGATAVFNTGIFQYQQALANMQLQQHTAFLPPGSILCMTPATSVDTHNICRTSD

SEQ ID NO: 265123 - DNA, 1029 bp, Artificial Sequence
  derived and/or modified sequence
atggctgtctctgtgaccccaattagagacaccaagtggctaaccctcgaggtctgccgagagtttcagagagggacatgctcacgtcctgacactgagtgtaagttcgctcacccctcaaagtcctgccaagtcgaaaacgggagagtcattgcatgctttgacagcctcaagggaagatgcagccgagagaattgcaagtatctgcacccgcctcctcatctgaaaactcagttggaaataaacggcagaaacaatctcattcagcagaagaatatggcaatgttagcccagcagatgcagctagctaacgctatgatgcccggggccccactccaacctgtgccgatgttcagcgtggcaccttcactggctaccaacgcaagcgcagcggctttcaacccgtatctgggcccggtcagccccagtctagtgcctgcagaaattctgccaaccgcgcccatgctcgtgacaggcaacccaggtgttcctgtgcccgccgctgcagctgccgccgctcaaaagctgatgagaaccgatcggcttgaggtgtgtagggagtatcagagaggaaattgtaatcgtggggaaaatgactgccgcttcgcacacccagccgatagcaccatgatagacactaatgataatactgtaacagtgtgcatggattatatcaagggccgctgctccagggagaagtgtaagtacttccacccacccgcgcacctgcaggccaagatcaaggccgcccagtaccaagtgaaccaagccgccgcggcccaggcggcagctacagccgccgccatgggcataccgcaggccgtgttgccccccctccctaagcggcccgccctggaaaaaacaaatggcgccactgccgtgtttaacaccgggatctttcagtatcaacaggctctggccaatatgcaactgcagcagcacacagctttcctgccgccaggctctattctttgcatgacaccagcaacgagcgtcgacactcataatatctgcaggactagcgattag

SEQ ID NO: 265124 - DNA, 1029 bp, Artificial Sequence
  derived and/or modified sequence
atggccgtctccgtcactcccattagagacaccaagtggcttaccttggaagtgtgccgagagttccaacgtggcacttgcagccgtcctgacactgagtgtaagtttgcacatccatcaaagtcatgtcaggtcgaaaacggcagagtaatcgcgtgctttgatagcttgaaagggcggtgcagtcgggagaattgtaagtacttacatccccccccgcacctgaaaacacagcttgaaattaatggacggaataacctcattcagcaaaagaacatggccatgctcgcgcagcagatgcaactggctaatgcaatgatgcccggcgcacctctccagccggtgcccatgttttcagtagcccccagtttagccaccaacgcttcggcagcggctttcaacccgtatcttggacctgtgagccctagtctagtccccgctgagatactgcctaccgctcccatgctggtcacaggcaatccaggcgtgcctgttcccgcggccgctgccgctgccgctcagaaactgatgcggactgaccgtctagaagtgtgtagggagtatcagaggggtaattgtaaccgtggggaaaacgactgccggtttgctcaccccgccgattccactatgattgatacgaatgataatacagtgaccgtttgtatggattatattaagggccgttgttcccgggagaagtgcaagtacttccacccaccagctcacctgcaggccaagataaaagctgcccaatatcaggtgaatcaggccgctgctgctcaggcggccgccactgccgcagctatgggtattcctcaggctgttcttcctccgcttcccaaacgcccggctctggaaaagacgaacggcgccacagcagtttttaatacagggatcttccagtatcaacaggcactggccaacatgcaattgcagcagcacactgcttttctgcctcctggatcaatattatgtatgaccccagcgacttctgtggacacacacaacatttgtcgtacctccgattag

SEQ ID NO: 265125 - DNA, 1029 bp, Artificial Sequence
  derived and/or modified sequence
atggctgtgtctgtgacccccatccgggacaccaagtggctgaccctggaggtgtgccgggagttccagaggggcacctgcagcaggccagacacagagtgcaagtttgcccaccccagcaagagctgccaggtggagaatggccgggtgattgcctgctttgacagcctgaagggccgctgcagccgggagaactgcaagtacctgcaccccccaccccacctgaagacccagctggagatcaatggaagaaacaacctgatccagcagaagaacatggccatgctggcccagcagatgcagctggccaatgccatgatgcctggggcccccctgcagcctgtgcccatgttttctgtggcccccagcctggccaccaatgccagcgctgctgccttcaacccctacctgggccctgtgagccccagcctggtgcctgctgagatcctgcccacagcccccatgctggtgacaggcaaccctggggtgcctgtgcctgctgctgctgctgctgctgcccagaagctgatgaggacagaccggctggaggtgtgccgggagtaccagaggggcaactgcaacagaggagaaaatgactgccgctttgcccaccctgctgacagcaccatgattgacaccaatgacaacacagtgacagtgtgcatggactacatcaagggccgctgcagccgggagaagtgcaagtacttccaccccccagcccacctgcaggccaagatcaaggccgcccagtaccaggtgaaccaggccgctgctgcccaggccgccgccacagctgctgccatgggcatcccccaggccgtgctgccccccctgcccaagaggcctgccctggagaagaccaatggagccacagctgtgttcaacacaggcatcttccagtaccagcaggccctggccaacatgcagctgcagcagcacacagccttcctgcccccaggcagcatcctgtgcatgaccccagccacctctgtggacacccacaacatctgcaggaccagtgactag

SEQ ID NO: 265126 - DNA, 5256 bp, Artificial Sequence
  derived and/or modified sequence
gttggtactaagaagtgcctttcctgacgtctctgctgcttggaaccgcttctagagcagtctctgcttttgccttgcttgctgccagctagactgtgacgacagcacatccaccctccacctctagcccagacacccccatttctacttataatcaagagaaaagctctaagtatctggcattgccctaggctgctttagtgttaaaagaaaagtttgctgaaaaagtaagatatcttctgccaggaaatcaaggaggaaaaaaaaaatcattttctcgattttgctctaaactgctgcatctgtctatgccaaactaatcaataccgattgcaccaccaaactccattgcaaattcagctgtgaggagattccctttcagacaactttgctgaaagcagcttggaaattcggtgtcgaagggtctgccacgttttcatgcttgcattttgggctccaaattggcactgggaaggggttactgagagcacaaggctgataccaggccctacttttaaacgttcatctacttacaatcctagtatttctctaaaaaccaaaacctctttgaattaacagtttcatgctgtgaatttctagtgggagatcttttccttgatattgacgacacaattttccatgtacttttaaagcagggagtggggaaaagtattttgaggggacattttcatcatcagttcagctttttttttttggttgttgctcttttttgggggggttgggtttgttggtttcactgaaacatttaactacctgtaaaatctaaacatggctgttagtgtcacaccaattcgggacacaaaatggctaacactggaagtatgtagagagttccagagggggacttgctcacggccagacacggaatgtaaatttgcacatccttcgaaaagctgccaagttgaaaatggacgagtaatcgcctgctttgattcattgaaaggccgttgctccagggagaactgcaaatatcttcatccacccccacatttaaaaacgcagttggagataaatggacgcaataacttgattcagcagaagaacatggccatgttggcccagcaaatgcaactagccaatgccatgatgcctggtgccccattacaacccgtgccaatgttttcagttgcaccaagcttagccaccaatgcatcagcagccgcctttaatccctatctgggacctgtttctccaagcctggtcccggcagagatcttgccgactgcaccaatgttggttacagggaatccgggtgtccctgtacctgcagctgctgcagctgctgcacagaaattaatgcgaacagacagacttgaggtatgtcgagagtaccaacgtggcaattgcaaccgaggagaaaatgattgtcggtttgctcatcctgctgacagcacaatgattgacaccaatgacaacacagtcactgtgtgtatggattacatcaaagggagatgctctcgggaaaagtgcaaatactttcatccccctgcacatttgcaagccaagatcaaggctgcccaataccaggtcaaccaggctgcagctgcacaggctgcagccaccgcagctgccatgggaattcctcaagctgtacttcccccattaccaaagaggcctgctcttgaaaaaaccaacggtgccaccgcagtctttaacactggtattttccaataccaacaggctctagccaacatgcagttacaacagcatacagcatttctcccaccaggctcaatattgtgcatgacacccgctacaagtgttgatacccataatatctgccgaacatctgactagccacaagtatgttacccagatgtagaattttcatcactaaacaatcatgctaaagaggaaaggacagtgtgcttggttagagtaaaggacgaggtcattagccatattgtatatatcgtcaagcaacacacacaaaagttcctcagccacaagacatccacatattgcatgttaaccagaagaaaagacaacattttccggaaatccactgcacactgttgcctatacactttgtacatttaattgatatttgtgctgaggtgatattcctgtctaaaagaacaacattgtctttcttttctagcacagagttatgcattcaaagatgcatacctagttagtttcctatatattcatgccatcttgaaaagacagactatggtgtaaccatgattctattatgtattggtacgtctgtagaccaagatataattttttaaaaataagtttatttctttcaaggtttacaaataacaaaggtgcaccttgtatttaaaattgccattatagatgagagcgtgcatgcacagtcatttttgtttaagagtaatatttttaatgtaatagattgtaagacgtggtgagggagggatctgacagagatgaatgtgccaagcaaaaccacaactgtgtatattttaaagcacatcatggctttaagtaccatgttgttaaggattctcatgaagtgccatagactgtacatcaaattagagtattatttcttcagtgttattgttttcagagccacattttgttgcatatttgctagtactaatcagtcaaagggcaccattctttttttttttttttgaaaccaaagctgtctcagaaatggccaatttaactttacagtaacaatagacagcacaacacaaactctctcaatacagataaactcacacatactggagatatatatataatagatatatataaaattattttaatgcattgtagtgtaatatttatgcatactatactgtataacatgttattcaaaagggattgccatttctgagacacagtaacaaaaaaatgaggaaattattttgcttctatttatagcctctgtcaaaagtcaaaagactataaatgctttgcaaaaatggtttcacgtttgcttaaatgcttcatcacagtcacattcaaaatagtgactctaaacaaagaagaaagcagcactgtcatcagatgcatgataaaccaaaatatgaaaatgggaaatgtttaattaacctagtaattgggtgggttaagtacatgggtgaattttatatgtgatttttgttttgttttgttttgttcagattaactgcttatagccttagaaagccttttacaaaattaaaaaaaaaatagatgtgcattcagtttttaagaatggaatcatccaaaggaattcctttttttgaggtttggatgttgcagctagtaaaggatatttttgctctgttcagcagttctaaaaattgctgaagtaggggccaggtcactggtagttatagtatggaatgggagaagtgaaagttcagttatagaactttccatacttccaagtttactgcaagtttttatgcttgagagagatgctttctaatataagactgatgtgttgattttactgattgtactgtacatctattaaagccttagattattacattacgggttggaacccataccaatgtaatttcaatcgtgttaagaaagtaatggtgacttcacatgttattgtagttagttacattatagaatattacttatttttcttgttaaaatgtagtttttcatttcctacatttattagattttcattttctattaacaattgaataccatttcagtttatagacttgttttattagattttaccaatgaatttttcaaaatacaaaaaaaagtagtttttccttcataacatactcagttttgaattacatgtagtgtcacatgaatattcgtattgttaactaaatgatttatattttactgatttaatattacagtgtaagaatgtcagtcattgttagttcttgtctagttttcattaaaagaacaaagatcttttatatggatatcttataaatatataatcattgctaagtaagaagttaagttgttgctatcgcaacaatcctggcagacaattgagtaatattttgatgatttattttgtttgtaattagttattataagaagatctagatcctagatattagaataaaatttattttctactgtatccatttcaaatgttaaaatattgtttaatatttttgaaatccctgagtatcaggccttgttataaataagctgcataatcaataaatagaacaagggactttttgttgataatccaaatactcaaagtttacgtaatgaaaattatagcgtgtgtgcaaactcttgagggttgattatgctgcaatttagcatgttggaacgtctagggagaaggttgactttttgcacttctgtatatagtcaaaagagagaaacctgtataatagtaagatcttattttgaataaaaacgtctataattacaaggagttttgttaaggctaatacaatgacagactgagcaaaattgcttgcaaaagtggcacagagttagcactccataccccttcaaacatgttgctttgctttcttgtggacagcttgtagtttgccaggattttttcagctggaaagatacgccatcctttcaaaccctcatgactgacaaaaactccatggggccaaatctgcctgaagatcattaccaaaaatagcaggtacttctaccattaaggtgaaatcatggatcagatattccttacatttttcaaaactactgcatgtttaaaacttcaacaaaaaaagagagaaagaactatactaagaacatatattattcagatcagtttctgccaatttcagtggtttattgttcacaaaaaaatcttcaaaacaagtattgactttcacaaaatttaaatcataaacaggcaaaccaaacagcacactgtagctatagttgttatgtgattgttttttaattgctgtaggatcctgttctttcagcaggtgaaaaataaaacgcagttcaaatttcatggttttaattttcaactcagaagcactcaaaaatgcaaaatgtgataatgggcacttgtttaaaagaattagtgtatccagccttcactccagctggttaaaaatgttgcacttatcagcaaccctaccactttcatctgctgaaaggacaaatgtgcttggttttactattatgtaatcacaacttactttctgcttgtagttgcttaaaattatgtattttgtcttgggctgcaatttgttttatgcttattttattattactgcagtagttgactttgctgtatggaaaaataaagtgaaattgccctaataaaacttctctttcttaagt

SEQ ID NO: 265127 - DNA, 1054 bp, Artificial Sequence
  derived and/or modified sequence
atggctgttagtgtcacaccaattcgggacacaaaatggctaacactggaagtatgtagagagttccagagggggacttgctcacggccagacacggaatgtaaatttgcacatccttcgaaaagctgccaagttgaaaatggacgagtaatcgcctgctttgattcattgaaaggccgttgctccagggagaactgcaaatatcttcatccacccccacatttaaaaacgcagttggagataaatggacgcaataacttgattcagcagaagaacatggccatgttggcccagcaaatgcaactagccaatgccatgatgcctggtgccccattacaacccgtgccaatgttttcagttgcaccaagcttagccaccaatgcatcagcagccgcctttaatccctatctgggacctgtttctccaagcctggtcccggcagagatcttgccgactgcaccaatgttggttacagggaatccgggtgtccctgtacctgcagctgctgcagctgctgcacagaaattaatgcgaacagacagacttgaggtatgtcgagagtaccaacgtggcaattgcaaccgaggagaaaatgattgtcggtttgctcatcctgctgacagcacaatgattgacaccaatgacaacacagtcactgtgtgtatggattacatcaaagggagatgctctcgggaaaagtgcaaatactttcatccccctgcacatttgcaagccaagatcaaggctgcccaataccaggtcaaccaggctgcagctgcacaggctgcagccaccgcagctgccatgggaattcctcaagctgtacttcccccattaccaaagaggcctgctcttgaaaaaaccaacggtgccaccgcagtctttaacactggtattttccaataccaacaggctctagccaacatgcagttacaacagcatacagcatttctcccaccaggctcaatattgtgcatgacacccgctacaagtgttgatacccataatatctgccgaacatctgactagccacaagtatgttacccagatgtag

SEQ ID NO: 265128 - DNA, 1029 bp, Artificial Sequence
  derived and/or modified sequence
atggccgtgagcgtgacccccatccgggacaccaagtggctgaccttggaggtgtgcagagaattccagcgcggcacctgttcccgaccagacactgaatgtaaatttgctcatcctagtaaaagttgtcaggtcgagaatgggcgcgtaattgcgtgcttcgactcactgaagggaaggtgttcaagagagaattgcaagtacctgcaccctccaccacacctgaagacccagctagaaattaatggtaggaacaacctcattcagcagaaaaatatggccatgcttgctcagcagatgcaactggctaatgcgatgatgcctggcgccccccttcaacctgtacccatgttcagcgttgcgccaagccttgcaactaatgcaagcgcagccgcatttaatccttacctcggtcccgtgagcccgagcctagtaccagcagagattctgcctaccgccccgatgctggtgaccggcaacccaggcgtgccagtgccggccgctgcagcagcagcagctcagaagctgatgaggaccgatcgcctagaagtctgcagagaatatcagagagggaactgcaatcgcggcgagaacgattgtcggtttgcccatccggcagattcaaccatgattgataccaacgacaacacggtaactgtctgcatggattatataaagggcaggtgttctcgggagaaatgtaaatacttccatccacctgcccacctgcaggcaaagatcaaagccgcccagtaccaggtgaatcaggcagctgcggcccaggccgctgccacagcagcggccatgggtatcccgcaggccgtgcttccacccctgcccaaaaggcccgcattggaaaagaccaatggggctaccgccgtctttaacactggcatattccagtaccagcaggcgctcgccaacatgcaattgcaacaacacactgccttcctgccgccaggaagtatactgtgcatgacaccagcaactagcgtcgacacacataatatctgccgtactagtgattag

SEQ ID NO: 265129 - DNA, 1029 bp, Artificial Sequence
  derived and/or modified sequence
atggccgtgagcgtgacccccatccgggacaccaagtggctgaccctggaagtgtgccgggagtttcagcgcggcacctgctctcgcccagacacagagtgcaagtttgctcacccaagtaaaagttgtcaggtcgagaacgggcgagttatcgcgtgctttgactcactcaaaggccggtgcagcagggagaactgcaagtacctgcatcccccccctcacctcaaaactcagctggaaatcaacggccgtaacaacctgatccagcagaagaatatggctatgctggctcagcaaatgcaactggccaacgcgatgatgcctggagcccctctgcagccggtgcctatgttttcagtcgcaccatctttagcaacaaacgcaagcgcggccgcctttaatccataccttggccctgtatctccaagtttggtgccagcagagattctgcccaccgccccaatgctggtgacagggaatcctggagtccctgtcccggctgcagccgccgccgcagcacagaaacttatgcggaccgaccgcttggaggtgtgcagagagtatcagcgaggaaactgtaatcggggagaaaacgattgtaggtttgcccaccccgcggattccacgatgattgatacgaacgataatactgtgactgtttgcatggactacatcaaagggaggtgctcaagggagaaatgcaaatattttcaccctccggcccatctgcaggcgaagattaaggcagcccaataccaggttaatcaagccgccgccgcccaggccgcagctaccgcagctgccatgggaataccacaagccgtcctgccccccctccctaagcgccctgcccttgagaaaacgaatggcgcgaccgccgtgttcaacactgggatctttcaataccaacaggctttagccaacatgcagttacagcaacacactgcctttctgccccctgggtctattctgtgtatgacccctgcgactagtgtcgatacacacaacatttgccgaacctctgattag

SEQ ID NO: 265130 - DNA, 1029 bp, Artificial Sequence
  derived and/or modified sequence
atggccgtgagtgtgacacccatcagagataccaagtggcttacgttggaggtgtgtagagagttccagcgagggacatgttctcggccagatacagagtgcaaatttgcacatccatccaagagttgtcaggtcgaaaatggcagggtgatcgcctgtttcgacagcctaaaaggacgatgttcccgtgagaactgtaagtatctccaccctcctccccacctgaaaactcagctggaaatcaatgggagaaataacctaatacagcaaaagaacatggccatgctggcccagcagatgcagctcgctaacgccatgatgcctggggcaccgcttcagcccgtccctatgtttagcgttgctccctcgcttgccacaaacgcgtctgctgccgctttcaacccgtacttaggcccagtctccccttcactggttccagcagaaatcctgcctacagccccaatgctggtcaccggcaaccccggagtgccggtgccagccgctgctgctgccgcagcccagaaactcatgcgcacagacaggctggaggtttgtcgcgagtatcaacggggaaattgcaacaggggcgaaaacgattgcaggtttgcgcaccccgcagactcgaccatgatagacaccaacgacaataccgtgactgtttgcatggactacatcaagggtcgttgttcacgggagaagtgcaagtacttccaccctcctgcccacctacaggccaaaattaaggctgctcaataccaggtcaaccaggctgccgcagcacaggcggctgctaccgccgctgccatgggtatcccacaggccgttctgccgccacttcctaagagacctgccttggagaaaactaatggcgcaacggcagtgtttaacaccggtatcttccagtaccagcaggccttagccaacatgcagctgcagcagcacacagcctttctccccccaggctcaatactatgtatgactcccgcaaccagtgtggatacccacaatatctgtaggacaagcgattag

SEQ ID NO: 265131 - DNA, 1029 bp, Artificial Sequence
  derived and/or modified sequence
atggctgtgagcgtgacccctatccgggataccaagtggctaaccctcgaagtgtgtcgcgagttccagcgagggacatgttctcggcctgatacagagtgcaaatttgcacatccgtcaaagagttgccaggtagagaatggcagagtcatcgcgtgtttcgatagcttgaagggcaggtgcagtagagaaaactgtaagtatctgcatcccccaccacacttaaagacccagctggagattaatgggagaaataacctcatacaacagaagaatatggcaatgctggcacagcagatgcaactagccaatgcaatgatgcccggagcaccactgcaacctgtccccatgttttcggtcgcccctagtctcgccacaaacgccagcgctgccgctttcaacccgtatctggggccagtcagcccgtcacttgtaccagccgaaatcctgccaaccgcccctatgcttgtgaccggaaaccccggtgtgccggttcccgcagccgctgccgcagccgcacagaaactgatgaggaccgaccgacttgaagtttgtcgggaataccagagaggcaattgcaacagaggggaaaatgattgccgtttcgcacaccctgccgactccaccatgatcgacacaaacgataacactgtgactgtgtgtatggactatatcaaggggaggtgtagccgcgagaaatgtaagtacttccaccctcctgcgcacctccaggctaaaatcaaggcagcccagtaccaggtaaatcaggcagctgcagcacaggcagccgctacagcggctgcaatgggcatcccacaagcggtgctcccccctctcccaaagagacctgccctggaaaaaactaatggcgctaccgccgtgttcaatactgggatttttcagtaccaacaggcattggccaatatgcagctccagcagcacactgcattccttccacccggatcaatcctgtgtatgacacctgcaaccagcgtcgatacccataatatttgtaggaccagcgactag

SEQ ID NO: 265132 - DNA, 1029 bp, Artificial Sequence
  derived and/or modified sequence
atggccgtgagcgtgacccccatcagagacaccaagtggctgaccctggaggtgtgcagagagttccagagaggcacctgcagcagacccgacaccgagtgcaagttcgcccaccccagcaagagctgccaggtggagaacggcagagtgatcgcctgcttcgacagcctgaagggcagatgcagcagagagaactgcaagtacctgcacccccccccccacctgaagacccagctggagatcaacggcagaaacaacctgatccagcagaagaacatggccatgctggcccagcagatgcagctggccaacgccatgatgcccggcgcccccctgcagcccgtgcccatgttcagcgtggcccccagcctggccaccaacgccagcgccgccgccttcaacccctacctgggccccgtgagccccagcctggtgcccgccgagatcctgcccaccgcccccatgctggtgaccggcaaccccggcgtgcccgtgcccgccgccgccgccgccgccgcccagaagctgatgagaaccgacagactggaggtgtgcagagagtaccagagaggcaactgcaacagaggcgagaacgactgcagattcgcccaccccgccgacagcaccatgatcgacaccaacgacaacaccgtgaccgtgtgcatggactacatcaagggcagatgcagcagagagaagtgcaagtacttccacccccccgcccacctgcaggccaagatcaaggccgcccagtaccaggtgaaccaggccgccgccgcccaggccgccgccaccgccgccgccatgggcatcccccaggccgtgctgccccccctgcccaagagacccgccctggagaagaccaacggcgccaccgccgtgttcaacaccggcatcttccagtaccagcaggccctggccaacatgcagctgcagcagcacaccgccttcctgccccccggcagcatcctgtgcatgacccccgccaccagcgtggacacccacaacatctgcagaaccagcgactag

SEQ ID NO: 265133 - protein, 172 aa, Artificial Sequence
  derived and/or modified sequence
MLVIHLEEHVIIAFSQHNTIMDLVQFFVTFFSCFLSLLLVAAVVWKIKQTCWASRRREQLLRERQQMASRPFASVDVALEVGAEQTEFLRGPLEGAPKPIAIEPCAGNRAAVLTVFLCLPRGSSGAPPPGQSGLAIASALIDISQQKASDSKDKTSGVRNRKHLSTRQGTCV

SEQ ID NO: 265134 - protein, 1379 aa, Artificial Sequence
  derived and/or modified sequence
METGGRARTGTPQPAAPGVWRARPAGGGGGGASSWLLDGNSWLLCYGFLYLALYAQVSQSKPCERTGSCFSGRCVNSTCLCDPGWVGDQCQHCQGRFKLTEPSGYLTDGPINYKYKTKCTWLIEGYPNAVLRLRFNHFATECSWDHMYVYDGDSIYAPLIAVLSGLIVPEIRGNETVPEVVTTSGYALLHFFSDAAYNLTGFNIFYSINSCPNNCSGHGKCTTSVSVPSQVYCECDKYWKGEACDIPYCKANCGSPDHGYCDLTGEKLCVCNDSWQGPDCSLNVPSTESYWILPNVKPFSPSVGRASHKAVLHGKFMWVIGGYTFNYSSFQMVLNYNLESSIWNVGTPSRGPLQRYGHSLALYQENIFMYGGRIETNDGNVTDELWVFNIHSQSWSTKTPTVLGHGQQYAVEGHSAHIMELDSRDVVMIIIFGYSAIYGYTSSIQEYHISSNTWLVPETKGAIVQGGYGHTSVYDEITKSIYVHGGYKALPGNKYGLVDDLYKYEVNTKTWTILKESGFARYLHSAVLINGAMLIFGGNTHNDTSLSNGAKCFSADFLAYDIACDEWKILPKPNLHRDVNRFGHSAVVINGSMYIFGGFSSVLLNDILVYKPPNCKAFRDEELCKNAGPGIKCVWNKNHCESWESGNTNNILRAKCPPKTAASDDRCYRYADCASCTANTNGCQWCDDKKCISANSNCSMSVKNYTKCHVRNEQICNKLTSCKSCSLNLNCQWDQRQQECQALPAHLCGEGWSHIGDACLRVNSSRENYDNAKLYCYNLSGNLASLTTSKEVEFVLDEIQKYTQQKVSPWVGLRKINISYWGWEDMSPFTNTTLQWLPGEPNDSGFCAYLERAAVAGLKANPCTSMANGLVCEKPVVSPNQNARPCKKPCSLRTSCSNCTSNGMECMWCSSTKRCVDSNAYIISFPYGQCLEWQTATCSPQNCSGLRTCGQCLEQPGCGWCNDPSNTGRGHCIEGSSRGPMKLIGMHHSEMVLDTNLCPKEKNYEWSFIQCPACQCNGHSTCINNNVCEQCKNLTTGKQCQDCMPGYYGDPTNGGQCTACTCSGHANICHLHTGKCFCTTKGIKGDQCQLCDSENRYVGNPLRGTCYYSLLIDYQFTFSLLQEDDRHHTAINFIANPEQSNKNLDISINASNNFNLNITWSVGSTAGTISGEETSIVSKNNIKEYRDSFSYEKFNFRSNPNITFYVYVSNFSWPIKIQIAFSQHNTIMDLVQFFVTFFSCFLSLLLVAAVVWKIKQTCWASRRREQLLRERQQMASRPFASVDVALEVGAEQTEFLRGPLEGAPKPIAIEPCAGNRAAVLTVFLCLPRGSSGAPPPGQSGLAIASALIDISQQKASDSKDKTSGVRNRKHLSTRQGTCV

SEQ ID NO: 265135 - DNA, 4140 bp, Artificial Sequence
  derived and/or modified sequence
atggagaccggaggccgggccaggactggcaccccacagcctgcggcccccggtgtctggcgggctagacctgctggcggcggcgggggtggcgcctctagttggctgctcgacggtaactcctggctattgtgctacggattcctttaccttgccctgtatgctcaggtttcccagtctaagccgtgtgagcggacggggagttgtttctccgggcgatgtgtgaacagcacctgcctgtgtgacccaggttgggtcggagaccagtgccagcattgccaaggtaggttcaagctgaccgaaccatccggttatctgacagatggtcctattaactacaaatacaagactaaatgcacatggctgattgaaggctatccgaatgctgtgttacgcctgcgatttaaccactttgcgacagagtgctcttgggaccatatgtatgtgtatgacggtgacagcatctacgcgccacttatcgccgtgctctcaggactgattgtgccagaaatccggggcaacgaaacagtgcctgaggtggtgacaacgtcaggttatgcccttcttcactttttttcggacgccgcctacaatctgacaggttttaacattttttactccatcaactcctgtccaaacaattgcagcggtcacggcaagtgcaccacatcagtgagtgttccaagtcaagtatattgtgaatgcgacaaatattggaagggagaggcatgtgacataccctactgtaaggcgaactgcggttcacctgaccatggctattgcgacctcaccggagagaaactgtgcgtgtgcaacgacagttggcagggacccgactgtagtttaaacgtgccttctactgaaagctactggatcctgccaaatgtcaagccttttagcccctcagttggacgggcatcccataaggctgtgttgcacgggaaattcatgtgggtcatcgggggttacacgtttaactatagtagcttccagatggtgcttaattataacctcgagagcagcatctggaacgttggaacaccgtccaggggccctctccagaggtatgggcactccctggccctgtaccaagaaaacattttcatgtacgggggcagaatcgagacaaacgatggcaacgtaacagatgaactgtgggttttcaacattcacagtcagtcttggagtacaaaaacgcctaccgttctcgggcatggccaacagtacgctgtcgaggggcatagtgcccatattatggagctggactcgagggatgttgtcatgattatcatttttggatacagtgctatttacggttatacaagctctatccaggaatatcatatatctagcaatacctggctcgtccctgagaccaaaggggcgatcgtacaggggggatacggtcatacctccgtgtatgacgaaatcaccaaatcaatttatgtgcacggcggctacaaggcgctacccgggaacaagtacggtttagttgacgacctgtacaagtacgaagtcaacacgaagacttggacaatcctgaaggaatctggattcgcccgctatctgcacagcgcagtgctcattaatggtgcaatgttaatttttggcgggaacacccacaatgacactagtctgtccaatggagccaagtgcttcagcgctgactttttggcatacgatatcgcctgcgacgaatggaagatcttgccaaagcctaatttgcacagggacgtgaaccgattcgggcattcagcagtcgtaattaacggatctatgtacatctttggtggattcagctcggtcctactgaacgatatcctcgtgtataaaccacccaattgcaaggccttccgcgatgaggaactttgcaagaatgcgggtcccggtatcaagtgcgtttggaataaaaaccactgtgagagctgggaatcgggaaacacaaataatatcctgagggccaagtgcccccccaaaaccgctgcctccgatgacaggtgctaccgctacgccgactgcgccagttgtaccgctaataccaatgggtgtcagtggtgcgacgataaaaaatgtattagcgctaattccaattgcagcatgtctgttaaaaattacactaagtgtcatgtaagaaatgaacagatctgtaacaagttgactagctgcaagagctgttcgttgaatctcaactgccagtgggatcagaggcagcaagaatgtcaggcactaccagcccatctgtgcggggagggttggtctcatatcggggacgcctgcctccgggtcaattcctctcgggagaactatgataacgccaaattgtactgttataatctctcaggtaacttggcctcactaaccacatcgaaagaagtcgagtttgtccttgatgaaattcagaaatacacgcagcagaaagtcagtccatgggtcggcctgcgcaagattaatataagctactggggctgggaagacatgtctcccttcacaaacaccaccctgcaatggctccccggtgagcccaacgactcagggttctgcgcttacctggaaagagccgccgtcgccggacttaaagccaacccgtgcaccagtatggcaaatggtttagtctgcgagaaaccggtggtgtcaccgaaccagaatgcacgcccttgtaaaaaaccctgtagcttgagaactagctgttcaaattgtacatccaatggaatggagtgcatgtggtgctcatctacgaaaaggtgcgttgattccaacgcgtacatcatcagcttcccttacggacagtgcctcgagtggcagaccgctacctgctctccccagaattgctccggcctgcgcacatgcggacagtgcctggaacagcccggttgtgggtggtgcaatgatccctcaaataccgggcgcggacactgcattgaagggagtagccggggcccaatgaaactgattgggatgcaccactctgaaatggtgttagacactaacttgtgtcctaaagaaaagaattacgagtggtcattcatccaatgcccagcctgccaatgtaatggccactctacgtgtataaataacaacgtttgtgaacagtgcaagaaccttacaacaggcaagcagtgtcaggattgcatgcctggttactatggagacccaaccaatggtgggcaatgtactgcatgtacttgcagtggacacgccaacatttgtcacttacatacgggtaagtgcttttgtaccaccaagggaattaagggcgaccagtgccagttgtgcgactcagagaaccggtacgtggggaatcctttacgcggaacctgttattattcattgcttattgattaccagtttactttctctctgcttcaggaggatgataggcaccacacagccattaattttatcgcaaatccagaacaaagcaataaaaatcttgacataagcatcaacgcgagtaataactttaatttgaatatcacttggtccgtcggaagcactgccgggacaatttctggagaagaaaccagtatcgtgtccaagaacaacatcaaagagtaccgagatagtttttcctatgaaaagtttaactttagatcgaatccaaatattacgttttatgtatacgtctctaacttctcatggccaatcaagattcagatcgcttttagtcagcacaacactataatggatctggtccaattctttgtgacgtttttctcatgcttcctcagcctcctgttggtggctgccgtggtgtggaagatcaaacagacatgctgggcttcacgccgccgagagcagctgctgagggaaaggcagcagatggccagtcgaccttttgcctcggtggatgtggccctggaggtcggggcagagcagacagaattcttgcgcggccccctagagggtgcaccaaagcctatcgccatcgaaccttgcgcaggcaatagagccgcggtgctgacggtgtttctgtgcctaccaagaggctcatctggtgcccctcccccggggcagagcggcctggcaattgctagcgcgctcattgacatcagtcaacaaaaagcctcagactccaaagataagacatctggagtccgaaatcgaaaacacctaagtacgaggcagggtacctgcgtgtag

SEQ ID NO: 265136 - DNA, 4140 bp, Artificial Sequence
  derived and/or modified sequence
atggagactggaggccgggccaggacaggcaccccccagcctgctgcccctggggtgtggagggcccggcctgctgggggcggcggcggcggggccagctcctggctgctggatggcaacagctggctgctgtgctacggcttcctgtacctggccctgtatgcccaggtgtcccagagcaagccctgtgagaggacaggcagctgcttcagcggccgctgtgtgaacagcacctgcctgtgtgaccccggctgggtgggggaccagtgccagcactgccagggccgcttcaagctgacagagcccagcggctacctgacagatggccccatcaactacaagtacaagaccaagtgcacctggctgattgagggctacccaaatgctgtgctgcggctgcgcttcaaccactttgccacagaatgttcctgggaccacatgtatgtgtatgatggagacagcatctatgcccccctgattgctgtgctgagcggcctgattgtgcctgagatcagaggaaatgagaccgtgcctgaggtggtgaccaccagcggctacgccctgctgcacttcttcagtgatgctgcctacaacctgaccggcttcaacatcttctacagcatcaacagctgccccaacaactgcagcggccacggcaagtgcaccacctctgtgtctgtgcccagccaggtgtactgtgaatgtgacaagtactggaagggggaggcctgtgacatcccctactgcaaggccaactgtggcagcccagaccacggctactgtgacctgaccggggagaagctgtgtgtgtgcaatgacagctggcagggccctgactgcagcctgaatgtgcccagcacagagagctactggatcctgcccaacgtgaagcccttcagccccagcgtgggccgggccagccacaaggctgtgctgcacggcaagttcatgtgggtgattggaggctacaccttcaactacagcagcttccagatggtgctgaactacaacctggagagcagcatctggaatgtgggcacccccagccggggccccctgcagagatatggccacagcctggccctgtaccaggagaacatcttcatgtatggaggccgcatcgagaccaatgatggaaatgtgacagatgagctgtgggtgttcaacatccacagccagagctggagcaccaagacccccaccgtgctgggccacggccagcagtatgctgtggagggccacagcgcccacatcatggagctggacagcagagatgtggtgatgatcatcatcttcggctacagcgccatctacggctacaccagcagcatccaggagtaccacatcagcagcaacacctggctggtgcctgagaccaagggggccatcgtgcagggcggctacggccacacctctgtgtatgatgagatcaccaagagcatctacgtgcacggcggctacaaggccctgcccggcaacaagtatggcctggtggatgacctgtacaagtatgaggtgaacaccaagacctggaccatcctgaaggagagcggctttgcccgctacctgcacagcgctgtgctgatcaacggggccatgctgatctttggaggcaacacccacaatgacaccagcctgagcaatggagccaagtgcttctctgctgacttcctggcctatgacatcgcctgtgatgagtggaagatcctgcccaagcccaacctgcacagagatgtgaaccgcttcggccacagcgctgtggtgatcaatggctccatgtacatctttggaggcttcagctctgtgctgctgaatgacatcctggtgtacaagccacccaactgcaaggccttcagagatgaggagctgtgcaagaatgccggccctggcatcaagtgtgtgtggaacaagaaccactgtgagagctgggagagcggcaacaccaacaacatcctgcgggccaagtgcccccccaagacagctgccagtgatgaccgctgctaccgctatgctgactgtgccagctgcacagccaacaccaacggctgccagtggtgtgatgacaagaagtgcatcagcgccaacagcaactgcagcatgtctgtgaagaactacaccaagtgccacgtgagaaatgagcagatctgcaacaagctgaccagctgcaagagctgcagcctgaacctgaactgccagtgggaccagaggcagcaggagtgccaggccctgcctgcccacctgtgtggggagggctggagccacatcggagatgcctgcctgcgggtgaacagcagcagagaaaattatgacaatgccaagctgtactgctacaacctgagcggcaacctggccagcctgaccaccagcaaggaggtggagtttgtgctggatgagatccagaagtacacccagcagaaggtgagcccctgggtgggcctgaggaagatcaacatctcctactggggctgggaggacatgagccccttcaccaacaccaccctgcagtggctgcccggggagcccaatgacagcggcttctgtgcctacctggagagagctgctgtggccggcctgaaggccaacccctgcacctccatggccaacggcctggtgtgtgagaagcctgtggtgagccccaaccagaatgcccggccctgcaagaagccctgcagcctgcggaccagctgcagcaactgcaccagcaatggcatggagtgcatgtggtgcagcagcaccaagagatgtgtggacagcaatgcctacatcatctccttcccctacggccagtgcctggagtggcagacagccacctgcagcccccagaactgcagcggcctgcggacctgtggccagtgcctggagcagcccggctgcggctggtgcaatgaccccagcaacacaggccggggccactgcatcgagggcagcagccggggccccatgaagctgattggcatgcaccacagcgagatggtgctggacaccaacctgtgccccaaggagaagaactatgagtggagcttcatccagtgcccagcctgccagtgcaatggccacagcacctgcatcaacaacaacgtgtgtgagcagtgcaagaacctgaccaccgggaagcagtgccaggactgcatgcctggctactacggggaccccaccaatggaggccagtgcacagcctgcacctgcagcggccacgccaacatctgccacctgcacacaggcaagtgcttctgcaccaccaagggcatcaagggggaccagtgccagctgtgtgacagcgagaacagatatgtgggcaaccccctgcggggcacctgctactacagcctgctgattgactaccagttcaccttcagcctgctgcaggaggatgacagacaccacacagccatcaacttcatcgccaaccctgagcagagcaacaagaacctggacatcagcatcaatgccagcaacaacttcaacctgaacatcacctggagcgtgggcagcacagctggcaccatcagcggggaggagaccagcatcgtgtccaagaacaacatcaaggagtacagagacagcttctcctatgagaagttcaacttccgcagcaaccccaacatcaccttctacgtgtatgtgagcaacttctcctggcccatcaagatccagatcgccttcagccagcacaacaccatcatggacctggtgcagttctttgtgaccttcttcagctgcttcctgagcctgctgctggtggccgctgtggtgtggaagatcaagcagacctgctgggccagcagaagaagagagcagctgctgcgggagcggcagcagatggccagccggccctttgcctctgtggatgtggccctggaggtgggcgctgagcagacagagttcctgcggggccccctggagggcgcccccaagcccatcgccatcgagccctgtgccggcaacagagctgctgtgctgactgtgttcctgtgcctgccccggggcagcagcggggcccctcctcctggccagagcggcctggccatcgccagcgccctgattgacatcagccagcagaaggccagtgacagcaaggacaagaccagcggcgtgaggaacaggaagcacctgagcacccggcagggcacctgtgtgtag

SEQ ID NO: 265137 - DNA, 4140 bp, Artificial Sequence
  derived and/or modified sequence
atggagaccggcggccgggcccggaccggcaccccccagcccgccgctcccggtgtttggcgcgcgcggccagcgggcggtggagggggcggggcttcgtcttggctgctagatggtaacagctggctcttatgctatggattcctgtacctcgcgctgtacgcacaagtgagtcagagtaagccttgtgagcgtacaggatcttgctttagcggacgctgcgttaacagtacttgcctgtgtgaccctggatgggtgggcgaccagtgtcagcactgccagggacggtttaagctgactgaaccatccggatatctgacagatggccccatcaactacaaatacaagactaagtgcacttggctaatcgaaggatacccaaatgcggtgctccggctccgattcaatcacttcgcaacagagtgttcatgggaccacatgtatgtctacgatggtgatagcatctatgcgccactaattgcagtgctctctgggctgattgtacctgagatccgtgggaatgaaacagttccagaggtggttactacaagcggttacgctcttctgcacttcttctcagatgctgcctacaatcttaccggttttaacatcttttattccatcaacagctgtccaaacaactgttctgggcacggaaagtgcacaacatccgtatcagttccgtcccaggtatattgtgaatgcgacaagtattggaagggggaggcttgtgacattccatattgcaaggccaactgtggctcccccgaccatggctactgtgatctgactggagaaaagctctgtgtatgcaacgacagctggcaagggcccgattgttctctaaacgtgcccagtacagagtcatactggatattgccaaacgtaaaacctttcagcccgtcagtcggccgagcctctcacaaggctgtactgcacgggaagtttatgtgggtgatcggcggatacacattcaactacagtagcttccaaatggtcttgaactataacttggagtcatctatctggaatgtcggtaccccttcccgggggcccttacaacgttatggacactctctcgctctctaccaggaaaatatcttcatgtatggtgggagaattgaaacaaacgacggaaacgtgaccgacgagctatgggtatttaacatacactcccaatcttggtctactaagaccccaactgtgctcggccatggtcaacaatacgccgtggaaggacactcagctcacataatggagctggatagccgagacgtggtcatgatcatcattttcggctattcagctatttatggctacacttccagcattcaggaatatcacatttcaagcaatacatggctcgttccagagactaagggggcaatcgtccagggtggctatggccatacatctgtgtacgacgagatcacaaagtcaatctacgtccatggcggttacaaagcactgcccggcaacaaatacggactggtcgatgacctctacaaatatgaagtgaacactaagacttggacaattttaaaagaaagtggttttgcccgctaccttcactctgccgtcctaataaatggagccatgctgatctttgggggaaacacgcacaacgataccagcctaagcaatggggcgaagtgcttttccgccgactttctggcctacgacattgcctgcgatgagtggaaaattcttccaaaaccaaatttacacagggatgtaaatcgtttcggacacagtgccgttgtgatcaacggatccatgtatatttttgggggtttctcaagtgtgttgcttaatgatattctggtgtataagccccctaattgcaaagcatttagggatgaagaactttgcaagaatgcagggcctggcatcaaatgtgtctggaacaagaaccattgcgaaagctgggaaagtggcaacacaaataacatcctgcgcgcaaagtgtccccccaagacagctgctagtgacgatcgatgctaccggtacgctgattgcgcaagttgcaccgctaatactaacggatgtcaatggtgtgatgacaaaaaatgtataagtgcaaattcaaattgtagtatgtccgttaagaattacacaaagtgccacgttcgcaacgagcagatctgcaacaagctgacgagttgtaaatcttgttcgctgaatctgaactgtcagtgggaccagagacagcaagaatgccaagctctgccggcccacttatgcggcgaggggtggtctcatattggagacgcctgtttgcgtgtaaactctagccgggagaactatgataacgcgaaattgtactgttacaatttgtcaggaaacctcgcaagcttgaccaccagcaaggaggtcgagttcgtgctggatgagatacaaaagtacacgcaacagaaggtgtctccctgggtggggttaagaaagatcaacatctcctattggggatgggaagatatgtccccctttacaaacacaacgctccagtggttgcctggtgagcctaacgatagtgggttctgcgcatacctagagcgcgcagcggtcgcagggctgaaagccaatccctgcacttctatggccaacgggctggtgtgcgagaagccagtggtgtctcctaatcaaaatgcgcgcccatgcaagaagccctgcagcttacgtacctcctgtagcaactgtacaagtaatgggatggaatgcatgtggtgttccagcactaaaagatgcgtggattccaacgcttacataattagcttcccctacggtcagtgtttggagtggcagaccgccacctgtagtccacaaaactgttcaggacttcggacatgcggccagtgtctggagcagcctggatgtggctggtgtaatgatccgtctaatacaggccgtggccactgcatcgaaggctcgtcaaggggaccgatgaaattgatcggtatgcaccatagcgagatggtgcttgacaccaacctgtgccccaaagaaaaaaattatgagtggagtttcattcagtgtccagcatgccagtgcaatggtcattccacttgtatcaacaataatgtttgcgagcagtgtaaaaacctgactacaggcaagcagtgccaggattgcatgcctggatactatggcgacccaactaacggggggcagtgcaccgcatgtacatgtagtgggcacgctaatatatgccaccttcacaccggcaagtgtttttgtacgacaaagggcataaagggggaccaatgccaactgtgtgattcagagaaccggtacgtggggaaccctcttcgcggcacttgttactattccctcctcatagattatcaattcaccttcagcctgctgcaagaggatgacaggcaccataccgctatcaattttattgccaaccccgaacagtctaataagaatctggacataagcatcaacgcgagcaacaattttaatcttaacatcacatggtctgtgggctcgactgccggaactatttctggcgaagagacatccatcgtgagcaagaataacattaaagagtaccgggactcattcagctacgagaagttcaacttccgctctaaccccaacatcacattttacgtgtacgtgtccaacttctcctggcctattaaaatacagattgcatttagtcagcataacacaatcatggatttagtgcagttctttgtgacatttttctcctgtttccttagtctcttattagtggccgcggtggtgtggaaaattaaacagacatgttgggcaagccgccgcagggaacagttgctgcgagagcgccagcaaatggccagtcgtccatttgcttccgttgacgtagccctcgaggtgggcgccgagcagactgagttcctgcgggggcccttggagggagcccccaagcccatcgccattgaaccctgtgcaggcaatagggccgcagttcttactgtgttcttgtgtctgcctcgagggtcaagcggcgcccctcctcctggccagagcggccttgctattgcctctgccctgattgatatcagccagcaaaaggcttccgactctaaggacaagacgtcgggggtcagaaaccgcaagcacctgagtactcgccagggtacctgtgtgtag

SEQ ID NO: 265138 - DNA, 4140 bp, Artificial Sequence
  derived and/or modified sequence
atggagacgggaggccgagcccgtaccggcaccccgcaacctgctgccccaggggtctggcgggcaagaccagctggaggaggcggtgggggagctagcagctggttgctcgatggcaatagttggctcctatgttacgggtttctttacctcgctctgtacgcacaggtcagccagagtaagccttgcgagagaactggcagttgcttttctggccgatgtgtcaacagcacgtgtctgtgtgatccgggttgggtgggcgaccaatgccagcactgtcagggcagattcaaactgacggagccttcaggctacttgacagatgggccaattaactacaagtataaaacgaagtgtacctggctgattgagggttacccaaacgctgttctcagactccggtttaaccatttcgctaccgaatgttcctgggaccatatgtacgtgtatgacggcgatagcatttatgcccctctcattgcagtcctatccggtcttatagtgcccgagattaggggcaatgaaacagtgcccgaagtggtcacaacatctggatatgccttgcttcatttcttctccgacgcagcatataatttgacgggattcaatatattttattctatcaattcatgtcctaacaactgttccgggcacggtaaatgcacaaccagtgtttccgtgccctcccaggtttactgcgagtgtgataaatattggaaaggtgaagcgtgtgatatcccctattgcaaggctaattgcgggagccccgaccacggttactgcgatttgacaggggaaaagctgtgcgtgtgcaatgacagctggcagggcccagattgcagtctaaacgtcccgtctaccgagagctactggatcctgcccaatgtgaagccattctctccatcggtgggtagagcctcacataaggcagtcttacacgggaaatttatgtgggtcataggcggatacacttttaactactcttctttccagatggtcttgaattacaatctggagagttccatctggaacgtaggcacacccagcagaggtcctctccagaggtacgggcattcccttgccctgtatcaggagaatattttcatgtatggaggacggattgagacaaatgatggaaacgtgacagatgagctgtgggtcttcaatatccattcccagtcatggtcgacaaagacacccacagttctaggacacggtcagcagtatgcagttgagggacactcggcacatatcatggagctcgactctagggatgtcgtcatgataattatcttcgggtattccgccatttacgggtatacatcatcaattcaggagtaccacatctcaagcaacacttggctcgtgccggaaacgaaaggagcaattgtgcaaggtgggtacggtcatacatctgtgtatgatgaaatcaccaaatccatttacgtgcatggtggctataaggcactgcccggaaacaaatacggcctggtggatgatctatataaatacgaagtaaacaccaaaacttggacaatcttgaaggaaagtgggttcgctaggtatttgcatagtgcagtccttatcaatggagctatgctgatcttcgggggaaacactcataacgatacaagtctcagcaatggagccaaatgtttcagtgcggattttctcgcctacgacattgcatgtgatgagtggaagatcctgcccaagccaaatttacaccgagacgtaaataggttcggtcacagcgccgtggtcatcaacggatctatgtatattttcggcggattctcctcggtgcttttaaatgatattctggtgtataagcctccaaactgcaaggcctttcgggacgaagagttgtgtaaaaacgcaggccctggcattaaatgcgtgtggaataagaaccattgcgaatcttgggagtcaggcaacaccaacaatattctgagggctaagtgtccgcctaaaaccgcggcttccgacgataggtgttaccgctatgcagactgtgccagttgcactgccaacaccaacggctgccaatggtgcgatgacaaaaaatgtatatcagctaactccaattgtagcatgtccgttaagaattatactaagtgtcacgtgcgtaatgagcagatctgcaataaactgacatcttgcaaaagttgcagcctgaacttaaattgtcaatgggatcagaggcagcaggagtgccaagccttgcccgcacatctgtgcggtgaggggtggagccatattggagacgcctgccttagagtcaatagcagcagggagaactacgataatgcaaagctgtattgctacaacctgtccgggaatctcgcatcgctgaccacttctaaagaagtggaattcgtgctggacgagatacagaaatacacgcagcaaaaggtgtcaccctgggtgggcctgcggaagattaacattagctactggggttgggaggacatgtccccctttaccaataccactttgcagtggttacccggagaacctaacgatagcggattttgcgcctatctcgaacgggctgctgtcgccggactaaaggccaacccctgtacgtcgatggccaacggcctggtttgcgagaagccagtcgtgtcgcctaaccagaatgctcgaccgtgtaagaaaccatgctctttacgcactagctgttctaactgcacctctaacggcatggaatgcatgtggtgttcttcaactaagagatgtgtggacagtaacgcttacattatatctttcccctatggacaatgcctggagtggcaaactgctacatgcagcccacaaaactgcagcgggttgcgcacttgcgggcaatgtctagaacagcccggttgcggctggtgtaacgatccttcaaacacagggaggggccactgcattgagggatcctccaggggccctatgaaactgatcggaatgcatcatagcgagatggtgctcgacaccaacctctgtcctaaagagaagaactatgagtggagcttcattcagtgccctgcctgccagtgtaatggacactctacttgtattaataacaacgtttgcgaacagtgtaaaaacttgacaaccggcaagcagtgtcaggactgtatgccaggctactacggtgacccgaccaacggaggtcagtgtacggcttgtacctgctctggtcacgccaacatctgccatcttcacaccggcaagtgtttttgcaccaccaagggcattaagggagaccagtgtcagttgtgtgatagtgagaatcggtacgtgggcaacccactgaggggcacttgctattactctcttctgattgactatcagtttacgttttccctcttgcaggaggatgacagacatcataccgcgatcaattttatagccaatcccgagcaatcgaataaaaatctggacatttcaatcaatgcctccaacaacttcaacttgaatatcacttggagcgtggggagtaccgccggtacaatttcgggggaggagacatcgatcgtgtcaaaaaacaacatcaaggagtatcgcgacagtttttcctatgaaaagttcaacttccggtctaatcccaacatcactttctacgtttacgtgagcaatttttcttggcccatcaaaatacagatagcatttagccagcacaataccatcatggacctggtgcagtttttcgtgacttttttctcctgtttcttgagtctgctactagtggcggcagtcgtgtggaaaatcaagcaaacttgttgggcatccagaaggagggagcagctcctcagggagagacagcaaatggcttctagaccttttgcctcagtcgatgtggcactggaggtgggcgctgagcaaaccgagtttttgagggggcctctggagggggctcctaagcccattgccattgagccctgcgccggtaatcgggcagccgttctcactgtgtttctatgcctccccaggggctcttctggtgcccctcccccaggacagagcggtcttgcgatagcctcagctctgatcgacattagccagcaaaaagccagtgattccaaagataaaacttctggggtgcggaatagaaagcatctaagtacacgacagggcacgtgcgtgtag

SEQ ID NO: 265139 - DNA, 8479 bp, Artificial Sequence
  derived and/or modified sequence
ggacgggcgccggtgaggaggaggagaagcggcggcggagaggttttctgcggccggaattcccttcaacagcatccctgtcggcgcccgcgagcgcagtctcgccgggcaggggcgccggggaagatggagactgggggccgggcccgcactggtaccccgcagccagcggccccgggggtgtggagggctcggccggcgggcggcggcggcgggggcgcctcctcctggctgctggacgggaacagctggctgctgtgctatggcttcctctacctggcgctctacgcgcaggtgtcccagtccaagccgtgcgagaggaccggctcctgcttctcgggccgctgtgtcaactccacctgcctctgcgacccgggctgggtgggggaccagtgccagcactgccagggcaggttcaagttaacagaaccttctggatatttaacagatggcccaattaactataaatataaaactaaatgtacttggctcattgaaggctatccaaatgcagtgttaagattaagattcaatcattttgctacagaatgtagctgggatcatatgtatgtttatgatggagattcaatatatgcacctttaatagctgtacttagtggtttgatagtccctgaaataaggggcaatgaaactgtgcctgaagttgttactacatctggctatgcactgttacatttttttagtgatgctgcgtataatctaactggtttcaacattttctattcaatcaattcttgtcctaacaattgctctggtcatgggaagtgtacaactagtgtctctgttccaagtcaagtatattgtgaatgtgataaatactggaagggtgaagcttgtgatattccttactgtaaagccaattgcggcagtccagatcacggttactgtgacctgactggagaaaaattatgtgtctgcaatgatagttggcaaggtcctgattgttctttgaatgttccctctactgagtcttactggattctgccaaacgttaaacccttcagtccttctgtaggtcgggcttcacataaagcagttttacacgggaaatttatgtgggtgattggtggatatacttttaactacagttcttttcaaatggtcctaaattacaatttagaaagcagtatatggaatgtaggaactccatcaaggggacctctccagagatatggacactctcttgctttatatcaggaaaacatctttatgtatggaggcagaattgaaacaaatgatggcaatgtcacagatgaattatgggtttttaacatacatagtcagtcatggagtacaaaaactcctactgttcttggacatggtcagcagtatgctgtggagggacattcagcacatattatggagttggatagtagagatgttgtcatgatcataatatttggatattctgcaatatatggttatacaagcagcatacaggaataccatatctcatcaaacacttggcttgttccagaaactaaaggagctattgtacaaggtggatatggccatactagtgtgtatgatgaaataacaaagtccatttatgttcatggagggtataaagcattgccagggaacaaatatggattggttgatgatctttataaatatgaagttaacactaagacttggactattttgaaagaaagtgggtttgccagataccttcattcagctgttcttatcaatggagctatgcttatttttggaggaaatacccataatgacacttccttgagtaacggtgcaaaatgtttttctgccgatttcctggcatatgacatagcttgtgatgaatggaaaatactaccaaaaccaaatcttcatagagatgtcaacagatttggacactctgcagtagtcattaacgggtccatgtatatatttgggggattttctagtgtactccttaatgatatccttgtatacaagcctccaaattgcaaggctttcagagatgaagaactttgtaaaaatgctggtccagggataaaatgtgtttggaataaaaatcactgtgaatcttgggaatctgggaatactaataatattcttagagcaaagtgccctcctaaaacagctgcttctgatgacagatgttacagatatgcagattgtgccagctgtactgccaatacaaatgggtgccaatggtgtgatgacaagaaatgcatttcggcaaatagtaactgcagtatgtctgtcaagaactacaccaaatgtcatgtgagaaatgagcagatttgtaacaaacttaccagctgtaaaagctgttcactaaacttgaattgccagtgggatcagagacagcaagaatgccaggctttaccagctcatctttgtggagaaggatggagtcatattggggatgcttgtcttagagtcaattccagtagagaaaactatgacaatgcaaaactttattgctataatcttagtggaaatcttgcttcattaacaacctcaaaagaagtagaatttgttctggatgaaatacagaagtatacacaacagaaagtatcaccttgggtaggcttgcgcaagatcaatatatcctattggggatgggaagacatgtctccttttacaaacacaacactacagtggcttcctggcgaacccaatgattctgggttttgtgcatatctggaaagggctgcagtggcaggcttaaaagctaatccttgtacatctatggcaaatggccttgtctgtgaaaaacctgttgttagtccaaatcaaaatgcgaggccgtgcaaaaagccatgctctctgaggacatcatgttccaactgtacaagcaatggcatggagtgtatgtggtgcagcagtacgaaacgatgtgttgactctaatgcctatatcatctcttttccatatggacaatgtctagagtggcaaactgccacctgctcccctcaaaattgttctggattgagaacctgtggacagtgtttggaacagcctggatgtggctggtgcaatgatcctagtaatacaggaagaggacattgcattgaaggttcttcacggggaccaatgaagcttattggaatgcaccacagtgagatggttcttgacaccaatctttgccccaaagaaaagaactatgagtggtcctttatccagtgtccagcttgccagtgtaatggacatagcacttgcatcaataataatgtgtgcgaacagtgtaaaaatctcaccacaggaaagcagtgtcaagattgtatgccaggttattatggagatccaaccaatggtggacagtgcacagcttgtacatgcagtggccatgcaaatatctgtcatctgcacacaggaaaatgtttctgcacaactaaaggaataaaaggtgaccaatgccaattatgtgactctgaaaatcgctatgttggtaatccacttagaggaacatgttattacagccttttgattgattatcaatttaccttcagcttattacaggaagatgatcgccaccatactgccataaactttatagcaaacccagaacagtcgaacaaaaatctggatatatcaattaatgcatcaaacaactttaatctcaacattacgtggtctgtcggttcaacagctggaacaatatctggggaagagacttctatagtttccaagaataatataaaggaatacagagatagtttttcctatgaaaaatttaactttagaagcaatcctaacattacattctatgtgtacgtcagcaacttttcctggcctattaaaatacagattgcattctcacaacacaatacaatcatggaccttgtgcagttttttgtcaccttcttcagttgtttcctatccttattgctggtggctgctgtggtatggaagatcaaacaaacttgttgggcttctcgacggagagagcaactgcttcgagaacgacagcagatggccagccgtccctttgcttctgttgatgtagctctggaagtgggagctgaacaaacagagtttctgcgagggccattagagggggcacccaagccaattgccattgaaccatgtgctgggaacagagctgctgttctgactgtgtttctttgtctaccacgaggatcatcaggtgcccctccccctgggcagtcaggccttgcaattgccagtgccctaatagatatttcacaacagaaagcttcagatagtaaagataagacttctggagtccggaatcgaaaacacctttcaacacgtcaaggaacttgtgtctgagaaatggaaaccgctcctgtatattctgtactgttttacttcgggcttctgttaaagctgttctatggccttggattttatggaggcagatctctgtatcatccagagcctgagtacagtttccttccaaatggacaatgacccaggtggccaaagaatgttcatgagttttataaaagtattgatggtcacaggtgataaagtcagtttttaccactatcttaggcttattatagctaacattaaattactctggaaaaagatgtatattgtttcttaatgaagatgaaaaatatgtaattcatataaatcaactgtttatatcccaagacttgaaagaaagacattttttaatgcctgaatgatgagaattgtacagtttttgcctcataagcaaacttgaatcacctgtgtatgaacagggaatgaacacattgcaatggctttaaatgctcttttatctcgttgtaaaggtaaggcaagattttgatgtagtaggatgtaggtaatgtatttaaatatttcatatgaccatatcgtgtccaaactcagtctgagaatgtgacagctttccgcctaactagaatgcagaccagaatgagttcaactcattctgtgcaacttcacagggggtttattagaatgctcagtgtagaggacattcctgtcatccatgccaactacctaactcgttatcagagctgatagagcatggaaaagtctgtccagcgatcagttgttcccctccttccaaaaacagcctccaataccacaacctgaaaagagccgaaatggttattttacagcatacaagcttctgctccagtatgataatttttaattgcctaagaatcattggatcagacctaaatgatccatctgcatttttataagaatggatctttctttgcccttcctctcctagctgctagattttaactaccttttacaaatgttacaaaatgtattttagaggcgacatctctcaagatgacctgagttccttcctgccaactgttccacctagaatacaagtagagaagagcactggctggcaagcatcaacaggagtcttcttcccaacacgagcgcatccatgtcctgagaaaaagtctgtggtttagaaaatatgtccatggttgcccacagtcagcacactcttagtgactcaaaattctgaattatggcagaaaggaaaaataaaacatacttcacattagaacacagaatcatttacatcctaatactgaccacagttcactaaagctcagtagcattaacagatatagtttggaattgcagtttcctcacttcagggtgacaagatatgtataacagtgacagaaatctccaaagctgctgtatatgatatagctttgttaaatatgaaggtcctttaaatacaattgatgtttagtactatatatgtacttttcacattctttggatttctggaaggttatgacactttactgtttacagctaatgcatagttacttgcatgccatggttgtacagtagcagactatgaccctattgtgatattaagtgtttatttcataatgccatttatacatagctgaatttgatgaggattgaatgtcatatataagaggaatgatcatacaatatgtagttgcatcttatataagatttctaggttgcatctaaccatgactatgtcattattttgataattaggcatttatgaattatagtatatattcctcatgttggcatgataattttgctattttccatgcattaaaaataagacaaattcttagagtaattttagtaattttatctataatctgtggggtttttttggagggggaggccactggttgtttctacttccctgtgatattttctctctcattaaaggaatgagctaagtttgtaaatatctcctaaaaacaatcaagtaattttattagcttcttttggaccctctaaatattgacttctctcatgaaaaaataaattgatgaaactaatgattacaaagatataatcattttttaaaaagtgattgcccaatgtatttctctaacaattgtcacaagagaaagcataacaataaaaatacaaaaacatacagatttagatgtaaaatctatataagctatatttttagggaggctaagcagatagtattactgtggaagaattatcaagttttattcacctcaaatcccactgggttcttaaaacttgaaaattcaaattgtagagaattatgagacacaatgtgatgtttagttaaagtcatgctatacctttctgggccacatattgctaactctgtggctaattatgcaattaattctcaacgtatcaaagcttttcactggcagtaaattctttgccctcaggtgaagtggattgaaaagacatcaaggatcaaggataatcactttgaatctgttggtttttccccctacattccagacactttaaatttggatgctttcattttttttaaatcaaaccacacaaatatgcagatactttcccagaatttcgcagttaaatggctgatcctcttgaaaactaaccttaatggaattctaaacatttcagtttagaatgactttgaaaaattccttagatttttaggatgttttattctgccaagtatgaaaaaaaaatggttaaatacaatggagttttaaaaattaacctggggattctatttgaactagaaaattcctattggaaaagaatttgcacatacttacagattcagctaataaattttaagaggattaggattctcataattctttaaatgaaaatttgttttagtgatacacagagatgccgtatactatagtgttatgttcagtaggaaaacttcaaatagttcgtatttaaaaaggtaattgatccttgctgtacttcccaacatctcatcttcttttagctgcagtaagatagaggtgactgtatggctacagttcatggtataaggtcatttagggtgcacactggcacacaggctggaaaacgggcactggacccagctttcaggtgtgtggtgctgggtaagtttcacctttgaagcctcagccttccatctgtaaagggcggtaatggtgcccacctttcgaggcattgcgaggctagatggtaacacacagaaagctcccacagtgggaccttgatgcagcgtagctggtattaacaaccgtggggacaccaggccactctttttctaccagttgttttatgaatccacctattaattttcatccatcttttggtcgtaggtaaaggtcaatcaggtttttcaaaaagactccctgaataacttaagttcctgtatttctaagatatagggatttctacaaaacgactttgacatttagtcaataaagacttaaactcttcttaaatctatagttttaggagagtttttcttaaaattactgactgatgacattgagacaagagcatcaatgatcacctttcacgtacaaactaggcaagacagggtcagtgcttacattttgtggttatacatgatacatcttttctcagtgaacataaaactatgatttgaaaggtgtcttatatttaaaaaagattgtaaaatgaaaactgaccaaatgaactaattctacccacctatggtctttttaaatgtcgagtttcaaaacccatttgccgtatactagagtgagcttggaaacttacctgattacaggaattgcttgggttcaggcagattcccactttcacctctagagatttagattcagaaacactggggtaggccctggagagcagtactcttaacaagctcctcagtgcttcttaccattaggcaaattagggaaacactgcattgggtcaaagtgctgcctttaatcgaccattagagggagttctctaaataacaaagttattactctaattcaaaatgctttaaagaattttccaaggaatacaagccatctggttggtgttagttatagcagtgatttcattagagtgtacatttaacattttagttttatcaaaattttttgaaattaagaattagaaccagagctcctatcagtatatatgtacacaggtgtgcatgccagtgttcaaaagattgtgtaaaagttcaagcccgttttagaaagccaacattttatgttataatatgctgttaatcaggactttattaaataaaaacattggctcttccaacccccac

SEQ ID NO: 265140 - DNA, 4140 bp, Artificial Sequence
  derived and/or modified sequence
atggagaccggcggcagagccagaaccggcaccccccagcccgccgcccccggcgtgtggagagccagacccgccggcggcggcggcggcggcgccagcagctggctgctggacggcaacagctggctgctgtgctacggcttcctgtacctggccctgtacgcccaggtgagccagagcaagccctgcgagagaaccggcagctgcttcagcggcagatgcgtgaacagcacctgcctgtgcgaccccggctgggtgggcgaccagtgccagcactgccagggcagattcaagctgaccgagcccagcggctacctgaccgacggccccatcaactacaagtacaagaccaagtgcacctggctgatcgagggctaccccaacgccgtgctgagactgagattcaaccacttcgccaccgagtgcagctgggaccacatgtacgtgtacgacggcgacagcatctacgcccccctgatcgccgtgctgagcggcctgatcgtgcccgagatcagaggcaacgagaccgtgcccgaggtggtgaccaccagcggctacgccctgctgcacttcttcagcgacgccgcctacaacctgaccggcttcaacatcttctacagcatcaacagctgccccaacaactgcagcggccacggcaagtgcaccaccagcgtgagcgtgcccagccaggtgtactgcgagtgcgacaagtactggaagggcgaggcctgcgacatcccctactgcaaggccaactgcggcagccccgaccacggctactgcgacctgaccggcgagaagctgtgcgtgtgcaacgacagctggcagggccccgactgcagcctgaacgtgcccagcaccgagagctactggatcctgcccaacgtgaagcccttcagccccagcgtgggcagagccagccacaaggccgtgctgcacggcaagttcatgtgggtgatcggcggctacaccttcaactacagcagcttccagatggtgctgaactacaacctggagagcagcatctggaacgtgggcacccccagcagaggccccctgcagagatacggccacagcctggccctgtaccaggagaacatcttcatgtacggcggcagaatcgagaccaacgacggcaacgtgaccgacgagctgtgggtgttcaacatccacagccagagctggagcaccaagacccccaccgtgctgggccacggccagcagtacgccgtggagggccacagcgcccacatcatggagctggacagcagagacgtggtgatgatcatcatcttcggctacagcgccatctacggctacaccagcagcatccaggagtaccacatcagcagcaacacctggctggtgcccgagaccaagggcgccatcgtgcagggcggctacggccacaccagcgtgtacgacgagatcaccaagagcatctacgtgcacggcggctacaaggccctgcccggcaacaagtacggcctggtggacgacctgtacaagtacgaggtgaacaccaagacctggaccatcctgaaggagagcggcttcgccagatacctgcacagcgccgtgctgatcaacggcgccatgctgatcttcggcggcaacacccacaacgacaccagcctgagcaacggcgccaagtgcttcagcgccgacttcctggcctacgacatcgcctgcgacgagtggaagatcctgcccaagcccaacctgcacagagacgtgaacagattcggccacagcgccgtggtgatcaacggcagcatgtacatcttcggcggcttcagcagcgtgctgctgaacgacatcctggtgtacaagccccccaactgcaaggccttcagagacgaggagctgtgcaagaacgccggccccggcatcaagtgcgtgtggaacaagaaccactgcgagagctgggagagcggcaacaccaacaacatcctgagagccaagtgcccccccaagaccgccgccagcgacgacagatgctacagatacgccgactgcgccagctgcaccgccaacaccaacggctgccagtggtgcgacgacaagaagtgcatcagcgccaacagcaactgcagcatgagcgtgaagaactacaccaagtgccacgtgagaaacgagcagatctgcaacaagctgaccagctgcaagagctgcagcctgaacctgaactgccagtgggaccagagacagcaggagtgccaggccctgcccgcccacctgtgcggcgagggctggagccacatcggcgacgcctgcctgagagtgaacagcagcagagagaactacgacaacgccaagctgtactgctacaacctgagcggcaacctggccagcctgaccaccagcaaggaggtggagttcgtgctggacgagatccagaagtacacccagcagaaggtgagcccctgggtgggcctgagaaagatcaacatcagctactggggctgggaggacatgagccccttcaccaacaccaccctgcagtggctgcccggcgagcccaacgacagcggcttctgcgcctacctggagagagccgccgtggccggcctgaaggccaacccctgcaccagcatggccaacggcctggtgtgcgagaagcccgtggtgagccccaaccagaacgccagaccctgcaagaagccctgcagcctgagaaccagctgcagcaactgcaccagcaacggcatggagtgcatgtggtgcagcagcaccaagagatgcgtggacagcaacgcctacatcatcagcttcccctacggccagtgcctggagtggcagaccgccacctgcagcccccagaactgcagcggcctgagaacctgcggccagtgcctggagcagcccggctgcggctggtgcaacgaccccagcaacaccggcagaggccactgcatcgagggcagcagcagaggccccatgaagctgatcggcatgcaccacagcgagatggtgctggacaccaacctgtgccccaaggagaagaactacgagtggagcttcatccagtgccccgcctgccagtgcaacggccacagcacctgcatcaacaacaacgtgtgcgagcagtgcaagaacctgaccaccggcaagcagtgccaggactgcatgcccggctactacggcgaccccaccaacggcggccagtgcaccgcctgcacctgcagcggccacgccaacatctgccacctgcacaccggcaagtgcttctgcaccaccaagggcatcaagggcgaccagtgccagctgtgcgacagcgagaacagatacgtgggcaaccccctgagaggcacctgctactacagcctgctgatcgactaccagttcaccttcagcctgctgcaggaggacgacagacaccacaccgccatcaacttcatcgccaaccccgagcagagcaacaagaacctggacatcagcatcaacgccagcaacaacttcaacctgaacatcacctggagcgtgggcagcaccgccggcaccatcagcggcgaggagaccagcatcgtgagcaagaacaacatcaaggagtacagagacagcttcagctacgagaagttcaacttcagaagcaaccccaacatcaccttctacgtgtacgtgagcaacttcagctggcccatcaagatccagatcgccttcagccagcacaacaccatcatggacctggtgcagttcttcgtgaccttcttcagctgcttcctgagcctgctgctggtggccgccgtggtgtggaagatcaagcagacctgctgggccagcagaagaagagagcagctgctgagagagagacagcagatggccagcagacccttcgccagcgtggacgtggccctggaggtgggcgccgagcagaccgagttcctgagaggccccctggagggcgcccccaagcccatcgccatcgagccctgcgccggcaacagagccgccgtgctgaccgtgttcctgtgcctgcccagaggcagcagcggcgcccccccccccggccagagcggcctggccatcgccagcgccctgatcgacatcagccagcagaaggccagcgacagcaaggacaagaccagcggcgtgagaaacagaaagcacctgagcaccagacagggcacctgcgtgtag

SEQ ID NO: 265141 - protein, 361 aa, Artificial Sequence
  derived and/or modified sequence
MALNVAPVRDTKWLTLEVCRQFQRGTCSRSDEECKFAHPPKSCQVENGRVIACFDSLKGRCSRENCKYLHPPTHLKTQLEINGRNNLIQQKTAAAMLAQQMQFMFPGTPLHPVPTFPVGPAIGTNTAISFAPYLAPVTPGVGLVPTEILPTTPVIVPGSPPVTVPGSTATQKLLRTDKLEVCREFQRGNCARGETDCRFAHPADSTMIDTSDNTVTVCMDYIKGRCMREKCKYFHPPAHLQAKIKAAQHQANQAAVAAQAAAAAATVMAFPPGALHPLPKRQALEKSNGTSAVFNPSVLHYQQALTSAQLQQHAAFIPTDNSEIISRNGMECQESALRITKHCYCTYYPVSSSIELPQTAC

SEQ ID NO: 265142 - DNA, 1086 bp, Artificial Sequence
  derived and/or modified sequence
atggccctgaacgtggcccccgtgagagacaccaagtggctgaccctggaggtgtgcagacagttccagagaggcacctgcagcagaagcgacgaggagtgcaagttcgcccacccccccaagagctgccaggtggagaacggcagagtgatcgcctgcttcgacagcctgaagggcagatgcagcagagagaactgcaagtacctgcacccccccacccacctgaagacccagctggagatcaacggcagaaacaacctgatccagcagaagaccgccgccgccatgctggcccagcagatgcagttcatgttccccggcacccccctgcaccccgtgcccaccttccccgtgggccccgccatcggcaccaacaccgccatcagcttcgccccctacctggcccccgtgacccccggcgtgggcctggtgcccaccgagatcctgcccaccacccccgtgatcgtgcccggcagcccccccgtgaccgtgcccggcagcaccgccacccagaagctgctgagaaccgacaagctggaggtgtgcagagagttccagagaggcaactgcgccagaggcgagaccgactgcagattcgcccaccccgccgacagcaccatgatcgacaccagcgacaacaccgtgaccgtgtgcatggactacatcaagggcagatgcatgagagagaagtgcaagtacttccacccccccgcccacctgcaggccaagatcaaggccgcccagcaccaggccaaccaggccgccgtggccgcccaggccgccgccgccgccgccaccgtgatggccttcccccccggcgccctgcaccccctgcccaagagacaggccctggagaagagcaacggcaccagcgccgtgttcaaccccagcgtgctgcactaccagcaggccctgaccagcgcccagctgcagcagcacgccgccttcatccccaccgacaacagcgagatcatcagcagaaacggcatggagtgccaggagagcgccctgagaatcaccaagcactgctactgcacctactaccccgtgagcagcagcatcgagctgccccagaccgcctgctag

SEQ ID NO: 265143 - DNA, 4572 bp, Artificial Sequence
  derived and/or modified sequence
agcaacagagtttagactgtctttgcttcatcatctgaaggtaaaattttccagatacggcagacggctttcagagtacaataaacagggaatgagaactatttacatggaagtttctttctcatgatgcggtggagaagcctcggccacttggttctgccagatgttcctggggttactgtaaatgggaaggacaggcagagctaaacaaggtttatcatttaaaagtgcctgtgtgaagtcacttttgctggaaaactgcagcttgggagctttctttgtattcacatcccactcttctgtcaagtacactttaccctgaccttatgagtggatgaagatacctcagttgtctgactttgccaattgcttaatttcagaatttaaaaaggggaaagaaaaacatcctgctaaaatatgaacatctgagtgtcttattttccaacatcgtcaatagctgtgagcgtcagcattaaatattctcccaaggagtgccatgatattgaagtcactttattaataacagctgtatctgcaaaacagtcaagagactcggacgttgaaagccagagatgacactgagcatgcttttattgcggcctaccatctttaagtgggacatattgattgatgagtgattgcctgtccatacactctctcatcatcctgttccttggattggacttcactaagcaatttatcactcaccttcagacttacatgtgggagttttcacaacagtagttttggaatcattagaacttggattgatttcatcatttaacagaaacaaacagcccaaattactttatcaccatggctttgaacgttgccccagtcagagatacaaaatggctgacattagaagtctgcagacagtttcaaagaggaacatgctcacgctctgatgaagaatgcaaatttgctcatccccccaaaagttgtcaggttgaaaatggaagagtaattgcctgctttgattccctaaagggccgttgttcgagagagaactgcaagtatcttcaccctccgacacacttaaaaactcaactagaaattaatggaaggaacaatttgattcagcaaaaaactgcagcagcaatgcttgcccagcagatgcaatttatgtttccaggaacaccacttcatccagtgcccactttccctgtaggtcccgcgatagggacaaatacggctattagctttgctccttacctagcacctgtaacccctggagttgggttggtcccaacggaaattctgcccaccacgcctgttattgttcccggaagtccaccggtcactgtcccgggctcaactgcaactcagaaacttctcaggactgacaaactggaggtatgcagggagttccagcgaggaaactgtgcccggggagagaccgactgccgctttgcacaccccgcagacagcaccatgatcgacacaagtgacaacaccgtaaccgtttgtatggattacataaaggggcgttgcatgagggagaaatgcaaatattttcaccctcctgcacacttgcaggccaaaatcaaagctgcgcagcaccaagccaaccaagctgcggtggccgcccaggcagccgcggccgcggccacagtcatggcctttccccctggtgctcttcatcctttaccaaagagacaagcacttgaaaaaagcaatggtaccagcgcggtctttaaccccagcgtcttgcactaccagcaggctctcaccagcgcacagttgcagcaacacgccgcgttcattccaacagataattctgaaataatcagcagaaacggaatggaatgccaagaatctgcattgagaataactaaacattgttactgtacatactatcctgtttcctcctcaatagaattgccacaaactgcatgctaaataaagatgtagttcttctggacagaccacaactctaagaagctagtgctgctatctcatatatgagtattaaatatggtatgcttagtatattccaacctaagatagttaactacctgagaccagctgtgatgtttaaagacataaaggataaagtttacttttaaagggtttctaaacatagtttctgtcctaggaatattgtcttatctccataactatagctgatgcagaaagtccagccagtttactcatttcgattcagaatatttcaaatttagcaataaacaattagcattagttaaaaaagaaacatattccaagggcaggttcgattctagctctaattactgtcatgtcatttacccactggatcaaagggtatgtttcacttcttgacaatataaatgctgcagcaaagatgagaggtgaagtaaaaccgatacctgtcctgcaggtctaaaatttgaatggaaattcaagcacaagtactggggacacatcaaagtgtggtgtttggtttgcctggagatgccacgttgaatcatgtgattctagattaacattaaatagattgaaaaagaaactttgcacggtatgagcttcataccccaccaaacaaagtcttgaaggtattattttacaagtatatttttaaagttgttttataagagagactttgtagaagtgcctagattttgccagacttcatccagcttgacaagattgagaggcccatgccaacagtctaatctaagagattagtctttcaaactcaccatccagttgcctgttacagaataactcttcttaactaaaaacctagtcaaacaaggaagctgtaggtgaggagatctgtataatattctaatttaagtaagtttgagtttagtcactgcaaatttgactgtgactttaatctaaattactatgtaaacaaaaagtagatagtttcactttttaaaaaatccattactgttttgcatttcaaaagttggattaaagggttgtaactgactacagcatggaaaaaaatagttcttttaattctttcaccttaaagcatattttatgtctcaaaagtataaaaaactttaatacaagtacatacatattatatatacacatacatatatatactatatatggatgaaacatattttaatgttgtttacttttttaaatacttggttgatcttcaaggtaatagcgatacaattaaattttgttcagaaagtttgttttaaagtttattttaagcactatcgtaccaaatatttcatatttcacattttatatgttgcacatagcctatacagtacctacatagtttttaaattattgtttaaaaaacaaaacagctgttataaatgaatattatgtgtaattgtttcaaacatccattttctttgtgaacatattagtgattgaagtattttgacttttgagattgaatgtaaaatattttaaatttgggatcatcgcctgttctgaaaactagatgcaccaaccgtatcattatttgtttgaggaaaaaaagaaatctgcattttaattcatgttggtcaaagtcgaattactatctatttatcttatatcgtagatctgataaccctatctaaaagaaagtcacacgctaaatgtattcttacatagtgcttgtatcgttgcatttgttttaatttgtggaaaagtattgtatctaacttgtattactttggtagtttcatctttatgtattattgatatttgtaattttctcaactataacaatgtagttacgctacaacttgcctaaaacattcaaacttgttttcttttttctgtttttttctttgttaattcatttaaactcattgaaaacatagtatacattactaaaaggtaaattatgggaatcactgaaatatttttgtagattaattgttgtaacattgtctttcttttttttcttttgtttcatgattttgatttttaaaattattagcacacaactattttcagccctttaataatggagcatcaaaaacatcacctgtaaccccaagcaaatatagaagactgtattttttactatgatatccattttccagaattgtgattacaatatgcaaagagtcataaatatgccatttacaataaggaggaggcaaggcaaatgcatagatgtacaaatatatgtacaacagattttgctttttatttatttataatgtaattttatagaataattctgggatttgagaggatctaaaactatttttctgtataaatattatttgccaaaagtttgtttatattcagaagtctgactatgatgaataaatcttaaatgctttgtttaattaaaaaacaaaaatcaccaatatccaagacatgaagatatcagttcaacaaatactgtagttaagagactaactctccacttgtatgggaactacatttcactcttggttttcaggatataacagcacttcaccgaaatattctttcagccataccactggtaacatttctactaaatctttctgtaacacttaaagaattccctcattcattaccttacagtgtaaacaggagtctaatttgtatcaatactatgttttggttgtaatattcagttcactcacccaatgtacaaccaatgaaataaaagaagcatttaaaagg

SEQ ID NO: 265144 - DNA, 621 bp, Artificial Sequence
  derived and/or modified sequence
atggccctgaacgtggcccccgtgagagacaccaagtggctgaccctggaggtgtgcagacagttccagagaggcacctgcagcagaagcgacgaggagtgcaagttcgcccacccccccaagagctgccaggtggagaacggcagagtgatcgcctgcttcgacagcctgaagggcagatgcagcagagagaactgcaagtacctgcacccccccacccacctgaagacccagctggagatcaacggcagaaacaacctgatccagcagaagaccgccgccgccatgctggcccagcagatgcagttcatgttccccggcacccccctgcaccccgtggccttcccccccggcgccctgcaccccctgcccaagagacaggccctggagaagagcaacggcaccagcgccgtgttcaaccccagcgtgctgcactaccagcaggccctgaccagcgcccagctgcagcagcacgccgccttcatccccaccgacaacagcgagatcatcagcagaaacggcatggagtgccaggagagcgccctgagaatcaccaagcactgctactgcacctactaccccgtgagcagcagcatcgagctgccccagaccgcctgctag

SEQ ID NO: 265145 - DNA, 1086 bp, Artificial Sequence
  derived and/or modified sequence
atggcattgaacgtcgcgccagtacgcgacactaagtggctgacactggaggtctgtagacagttccagagagggacatgctctaggtcagacgaagaatgtaagttcgcacaccccccaaaaagctgtcaagtagagaatgggagggtaattgcgtgtttcgactccctgaagggccgttgttcaagggagaactgtaaatatttacaccctcccacacacttaaaaactcagttggagatcaacggccggaataacctgattcaacaaaagacggccgctgccatgttggcccagcaaatgcaattcatgtttcccggcactcccctccatccagtacccacctttcccgtgggccccgcaattggaaccaatacagcaatcagttttgcaccttatctggcacccgtaacaccgggcgtgggcctcgtccctaccgagatcctgcccacaactcctgtgatagtgccaggtagccctcccgtcaccgtgccaggaagtaccgccacccagaagctcctgaggaccgacaaattagaagtgtgtagggagttccagcggggtaattgtgctcggggcgagaccgactgcagatttgcccatcctgctgatagcactatgattgacactagtgataacactgtgaccgtgtgcatggactacatcaaaggaaggtgtatgagggaaaagtgcaagtacttccatcccccagcccatctgcaggcaaagattaaggcagcacagcatcaggcaaaccaggccgctgtggccgctcaggccgctgccgccgcagccacggtcatggcctttccacccggcgcccttcaccccctgccaaaacggcaggctctcgagaagagcaacggaactagtgccgtgtttaatcccagcgtgctgcattaccagcaggcgctgacctctgctcaactgcagcagcacgcagccttcattccaacggataattctgagatcatatcccgcaacggcatggagtgccaagaatctgcgctccgcatcacaaaacattgttactgcacatactatcctgtttcctcctctatcgaactcccccaaactgcatgttag

SEQ ID NO: 265146 - DNA, 1086 bp, Artificial Sequence
  derived and/or modified sequence
atggcacttaatgtcgcaccagtcagagataccaagtggctgacattggaggtttgtaggcagttccagagagggacctgttcgcggtccgatgaggaatgcaagttcgcccatccgcctaaatcctgtcaggtggagaatggaagggtcatcgcctgctttgactcccttaaaggacgatgttcacgggaaaactgcaagtatctccacccccccactcatctgaagacacagctggagattaatggacgaaataatttgatccagcagaagaccgcagccgccatgctggcacagcagatgcagtttatgttcccagggacaccactccatcctgtacccacgttccctgttgggccggcaatcgggacaaacactgccatctctttcgctccttacttggcccctgtgacccccggggtcgggctcgttcccaccgaaatcctacctactacaccagtaatcgtcccgggaagccctcccgtcaccgtgcccggatcaacggctacccagaaactgctccggacagacaaactagaggtctgtcgcgagttccagcgcggtaactgtgcccggggcgagactgactgcagatttgcacatcccgctgactcgaccatgatagacacctcagataataccgtgacagtctgtatggactacattaagggccgatgtatgcgcgagaaatgtaagtacttccaccccccagctcacctgcaggcaaaaattaaagccgcccaacaccaggccaaccaggccgcagtggccgcccaagccgctgccgcggcagctactgtcatggcttttcccccgggcgcgcttcatcccctaccaaagcgccaggccctggagaaatcaaacggcacctctgctgtcttcaacccttctgtcctgcactatcagcaagctctgaccagtgcgcagctacagcagcatgctgcattcattcccactgataatagcgaaattatcagcagaaacggtatggagtgccaagagtctgccctgcggatcaccaagcattgctattgcacatactatccagtgtcatcttcaatcgagctccctcaaactgcctgctag

SEQ ID NO: 265147 - DNA, 621 bp, Artificial Sequence
  derived and/or modified sequence
atggccttaaatgtggcccccgtccgcgatactaaatggctaaccttagaagtttgtagacagttccagcggggtacatgctcaagatcagatgaagagtgtaagttcgctcaccctcccaagtcctgtcaggttgaaaatgggagggtgatcgcgtgttttgattcgctgaaggggaggtgctcccgggagaattgtaagtacctgcatcctccaactcacctgaagacccagctagagataaacggacgaaacaatttgatccagcagaaaacagctgccgctatgctcgctcagcagatgcaattcatgtttccaggaacccctctacatccggtggctttccctcccggcgctctccaccccttacctaagcggcaagcactggagaagtccaacgggacttcagctgtgttcaaccctagcgttcttcactaccagcaggccctcacctctgcacagttgcagcagcacgccgctttcattccaactgataacagcgagatcatctctcgcaatggcatggagtgccaggaaagtgctttgcgaattaccaagcattgctactgcacttattacccagtctcaagttctattgaactgcctcagaccgcctgttag

SEQ ID NO: 265148 - DNA, 1086 bp, Artificial Sequence
  derived and/or modified sequence
atggccctgaatgtggcccctgtgcgggacaccaagtggctgaccctggaggtgtgccggcagttccagaggggcacctgcagcagaagtgatgaggagtgcaagtttgcccacccccccaagagctgccaggtggagaatggccgggtgattgcctgctttgacagcctgaagggccgctgcagccgggagaactgcaagtacctgcacccccccacccacctgaagacccagctggagatcaatggaagaaacaacctgatccagcagaagacagctgctgccatgctggcccagcagatgcagttcatgtttcctggcacccccctgcaccctgtgcccaccttccctgtgggccctgccatcggcaccaacacagccatcagctttgccccctacctggcccctgtgaccccaggagtgggcctggtgcccacagagatcctgcccaccacccctgtgattgtgcccggcagcccccctgtgacagtgcccggcagcacagccacccagaagctgctgaggacagacaagctggaggtgtgccgggagttccagaggggcaactgtgcccggggggagacagactgccgctttgcccaccctgctgacagcaccatgattgacaccagtgacaacacagtgacagtgtgcatggactacatcaagggccgctgcatgagggagaagtgcaagtacttccaccccccagcccacctgcaggccaagatcaaggccgcccagcaccaggccaaccaggccgctgtggccgcccaggccgctgctgctgctgccaccgtgatggccttccccccaggggccctgcaccccctgcccaagaggcaggccctggagaagagcaatggcaccagcgctgtgttcaaccccagcgtgctgcactaccagcaggccctgaccagcgcccagctgcagcagcacgccgccttcatccccacagacaacagcgagatcatcagcagaaatggcatggagtgccaggagagcgccctgcgcatcaccaagcactgctactgcacctactaccctgtgagcagcagcattgagctgccccagacagcctgctag

SEQ ID NO: 265149 - DNA, 621 bp, Artificial Sequence
  derived and/or modified sequence
atggccctgaatgtggcccctgtgcgggacaccaagtggctgaccctggaggtgtgccggcagttccagaggggcacctgcagcagaagtgatgaggagtgcaagtttgcccacccccccaagagctgccaggtggagaatggccgggtgattgcctgctttgacagcctgaagggccgctgcagccgggagaactgcaagtacctgcacccccccacccacctgaagacccagctggagatcaatggaagaaacaacctgatccagcagaagacagctgctgccatgctggcccagcagatgcagttcatgtttcctggcacccccctgcaccctgtggccttccccccaggggccctgcaccccctgcccaagaggcaggccctggagaagagcaatggcaccagcgctgtgttcaaccccagcgtgctgcactaccagcaggccctgaccagcgcccagctgcagcagcacgccgccttcatccccacagacaacagcgagatcatcagcagaaatggcatggagtgccaggagagcgccctgcgcatcaccaagcactgctactgcacctactaccctgtgagcagcagcattgagctgccccagacagcctgctag

SEQ ID NO: 265150 - DNA, 1086 bp, Artificial Sequence
  derived and/or modified sequence
atggccctgaacgtggcccccgtgcgggacaccaagtggctgaccctggaggtttgccggcaatttcaacgcggcacgtgttccagaagtgacgaagaatgtaaattcgcccatccacccaaaagctgtcaggtggagaatggtcgcgtcatcgcttgttttgacagcttgaaaggcaggtgctcgcgagaaaattgtaagtaccttcatccaccaacacatcttaagacccagctggaaatcaatgggcgcaacaacctgatccagcagaaaacagcggcggccatgttggcgcagcagatgcaatttatgttcccaggcacccctcttcacccggtccccaccttcccagtgggtccggctatcgggactaataccgcaatcagctttgcaccatacctcgctcccgtgaccccgggagtgggcctagtacccactgaaatcctgcctacaactccagtgattgtgcctggaagtcctccggtgacagtccctggaagtaccgccactcagaagctcctgaggacagataagctggaggtatgtcgcgaatttcagcgcggaaactgcgcaagaggagaaactgactgtcgctttgcacaccccgctgactccaccatgatcgacaccagtgataatactgtgaccgtttgtatggattatatcaaaggccgctgcatgcgagaaaaatgcaaatatttccaccctcctgcccacctacaggctaagatcaaggcggcccagcaccaggctaaccaggcagctgtcgcggcccaggcagctgccgcggctgccaccgtgatggcgttccctcctggggcattacatcccctgcctaagagacaagccctcgaaaagagtaacggaactagcgcagtgttcaatccatcagtgctgcactatcagcaggctttaacctctgcacagctgcagcaacacgcggccttcatcccaaccgacaactcagaaataatttctcgtaatggtatggaatgccaggagtcggcactccgtattactaagcactgttattgcacatattaccccgtttcatcaagtatcgaactgccacagaccgcctgctag

SEQ ID NO: 265151 - DNA, 4487 bp, Artificial Sequence
  derived and/or modified sequence
caggaaactccagcacctcctagaacatcttttgtggaatggcacctcatgggggcccttggatcatgtaccccttgtattcaacagtaaacatcttcctataatcattgcttcattaacgataatgtttatcatttaaaagtgcctgtgtgaagtcacttttgctggaaaactgcagcttgggagctttctttgtattcacatcccactcttctgtcaagtacactttaccctgaccttatgagtggatgaagatacctcagttgtctgactttgccaattgcttaatttcagaatttaaaaaggggaaagaaaaacatcctgctaaaatatgaacatctgagtgtcttattttccaacatcgtcaatagctgtgagcgtcagcattaaatattctcccaaggagtgccatgatattgaagtcactttattaataacagctgtatctgcaaaacagtcaagagactcggacgttgaaagccagagatgacactgagcatgcttttattgcggcctaccatctttaagtgggacatattgattgatgagtgattgcctgtccatacactctctcatcatcctgttccttggattggacttcactaagcaatttatcactcaccttcagacttacatgtgggagttttcacaacagtagttttggaatcattagaacttggattgatttcatcatttaacagaaacaaacagcccaaattactttatcaccatggctttgaacgttgccccagtcagagatacaaaatggctgacattagaagtctgcagacagtttcaaagaggaacatgctcacgctctgatgaagaatgcaaatttgctcatccccccaaaagttgtcaggttgaaaatggaagagtaattgcctgctttgattccctaaagggccgttgttcgagagagaactgcaagtatcttcaccctccgacacacttaaaaactcaactagaaattaatggaaggaacaatttgattcagcaaaaaactgcagcagcaatgcttgcccagcagatgcaatttatgtttccaggaacaccacttcatccagtgcccactttccctgtaggtcccgcgatagggacaaatacggctattagctttgctccttacctagcacctgtaacccctggagttgggttggtcccaacggaaattctgcccaccacgcctgttattgttcccggaagtccaccggtcactgtcccgggctcaactgcaactcagaaacttctcaggactgacaaactggaggtatgcagggagttccagcgaggaaactgtgcccggggagagaccgactgccgctttgcacaccccgcagacagcaccatgatcgacacaagtgacaacaccgtaaccgtttgtatggattacataaaggggcgttgcatgagggagaaatgcaaatattttcaccctcctgcacacttgcaggccaaaatcaaagctgcgcagcaccaagccaaccaagctgcggtggccgcccaggcagccgcggccgcggccacagtcatggcctttccccctggtgctcttcatcctttaccaaagagacaagcacttgaaaaaagcaatggtaccagcgcggtctttaaccccagcgtcttgcactaccagcaggctctcaccagcgcacagttgcagcaacacgccgcgttcattccaacagataattctgaaataatcagcagaaacggaatggaatgccaagaatctgcattgagaataactaaacattgttactgtacatactatcctgtttcctcctcaatagaattgccacaaactgcatgctaaataaagatgtagttcttctggacagaccacaactctaagaagctagtgctgctatctcatatatgagtattaaatatggtatgcttagtatattccaacctaagatagttaactacctgagaccagctgtgatgtttaaagacataaaggataaagtttacttttaaagggtttctaaacatagtttctgtcctaggaatattgtcttatctccataactatagctgatgcagaaagtccagccagtttactcatttcgattcagaatatttcaaatttagcaataaacaattagcattagttaaaaaagaaacatattccaagggcaggttcgattctagctctaattactgtcatgtcatttacccactggatcaaagggtatgtttcacttcttgacaatataaatgctgcagcaaagatgagaggtgaagtaaaaccgatacctgtcctgcaggtctaaaatttgaatggaaattcaagcacaagtactggggacacatcaaagtgtggtgtttggtttgcctggagatgccacgttgaatcatgtgattctagattaacattaaatagattgaaaaagaaactttgcacggtatgagcttcataccccaccaaacaaagtcttgaaggtattattttacaagtatatttttaaagttgttttataagagagactttgtagaagtgcctagattttgccagacttcatccagcttgacaagattgagaggcccatgccaacagtctaatctaagagattagtctttcaaactcaccatccagttgcctgttacagaataactcttcttaactaaaaacctagtcaaacaaggaagctgtaggtgaggagatctgtataatattctaatttaagtaagtttgagtttagtcactgcaaatttgactgtgactttaatctaaattactatgtaaacaaaaagtagatagtttcactttttaaaaaatccattactgttttgcatttcaaaagttggattaaagggttgtaactgactacagcatggaaaaaaatagttcttttaattctttcaccttaaagcatattttatgtctcaaaagtataaaaaactttaatacaagtacatacatattatatatacacatacatatatatactatatatggatgaaacatattttaatgttgtttacttttttaaatacttggttgatcttcaaggtaatagcgatacaattaaattttgttcagaaagtttgttttaaagtttattttaagcactatcgtaccaaatatttcatatttcacattttatatgttgcacatagcctatacagtacctacatagtttttaaattattgtttaaaaaacaaaacagctgttataaatgaatattatgtgtaattgtttcaaacatccattttctttgtgaacatattagtgattgaagtattttgacttttgagattgaatgtaaaatattttaaatttgggatcatcgcctgttctgaaaactagatgcaccaaccgtatcattatttgtttgaggaaaaaaagaaatctgcattttaattcatgttggtcaaagtcgaattactatctatttatcttatatcgtagatctgataaccctatctaaaagaaagtcacacgctaaatgtattcttacatagtgcttgtatcgttgcatttgttttaatttgtggaaaagtattgtatctaacttgtattactttggtagtttcatctttatgtattattgatatttgtaattttctcaactataacaatgtagttacgctacaacttgcctaaaacattcaaacttgttttcttttttctgtttttttctttgttaattcatttaaactcattgaaaacatagtatacattactaaaaggtaaattatgggaatcactgaaatatttttgtagattaattgttgtaacattgtctttcttttttttcttttgtttcatgattttgatttttaaaattattagcacacaactattttcagccctttaataatggagcatcaaaaacatcacctgtaaccccaagcaaatatagaagactgtattttttactatgatatccattttccagaattgtgattacaatatgcaaagagtcataaatatgccatttacaataaggaggaggcaaggcaaatgcatagatgtacaaatatatgtacaacagattttgctttttatttatttataatgtaattttatagaataattctgggatttgagaggatctaaaactatttttctgtataaatattatttgccaaaagtttgtttatattcagaagtctgactatgatgaataaatcttaaatgctttgtttaattaaaaaacaaaaatcaccaatatccaagacatgaagatatcagttcaacaaatactgtagttaagagactaactctccacttgtatgggaactacatttcactcttggttttcaggatataacagcacttcaccgaaatattctttcagccataccactggtaacatttctactaaatctttctgtaacacttaaagaattccctcattcattaccttacagtgtaaacaggagtctaatttgtatcaatactatgttttggttgtaatattcagttcactcacccaatgtacaaccaatgaaataaaagaagcatttaaaagga

SEQ ID NO: 265152 - DNA, 1086 bp, Artificial Sequence
  derived and/or modified sequence
atggccctgaacgtggcccccgtgcgggacaccaagtggctgaccctcgaggtgtgtcgccaatttcagcgaggcacgtgttccaggtccgacgaagagtgtaaattcgctcatcctcccaaaagctgtcaggtagagaacgggcgagtgattgcttgtttcgactcactgaaggggcgctgctcacgggaaaattgcaaatatctccacccgcccacccacctgaaaacccaactggagattaatgggaggaacaatctgatccaacagaagacagccgctgctatgctcgcccagcagatgcagtttatgttcccaggaacccctcttcacccagtccctacctttcctgtgggccccgcgataggcaccaacaccgcaatctcgttcgcaccgtacctcgcccccgttacccctggagtcggtttggtgcctactgagattctgccgactactcccgttattgtccctggttcaccccccgtgacagtcccgggatccacagctacacaaaagctactgcgcacggacaagttagaggtctgtagggaattccagcggggcaactgtgcacggggagaaactgactgccggttcgcacaccccgcagacagcactatgatagatacctcagataatacagtgaccgtgtgcatggattacatcaagggaaggtgtatgagggagaaatgcaaatatttccacccgccagctcacctgcaagcaaagattaaggctgcacagcaccaggccaaccaggccgcagtcgctgcccaagccgccgccgctgcggccacagttatggcattccccccgggggccctgcaccccctgccgaagagacaggccctcgagaagtctaatgggacaagcgccgtgtttaatccgtctgtgctgcattaccaacaggcattgacctcagcgcagctccagcagcacgccgccttcataccaacagacaattccgagattattagcagaaatgggatggaatgccaggaaagcgctcttcgtatcactaaacattgttactgcacttactatcccgtgtcctcatccatcgaactcccacaaacagcatgctag

SEQ ID NO: 265153 - DNA, 621 bp, Artificial Sequence
  derived and/or modified sequence
atggccctgaacgtggcccccgtgcgggacaccaagtggctgaccctggaagtgtgccgccagttccaacgaggcacatgctctcgatctgacgaggagtgcaagtttgcccatccccccaagtcatgtcaagtcgagaatggtcgtgtgatagcttgttttgactctctgaagggtcggtgttcacgagagaattgcaaatacctgcatcccccgacccacctgaaaacccagctggagatcaacggcagaaataatctgatacagcagaagaccgcagccgcaatgctcgcacagcaaatgcagttcatgttccccgggacccccctccaccctgtcgctttcccgcctggagcccttcacccactgcctaagcgacaggccctagagaagtccaatggaacatctgctgtgttcaatccaagtgtgttgcattatcagcaggcgttgacaagcgcacaactccagcagcacgccgcttttatccctacagataactcggaaatcattagcaggaatggaatggaatgccaggaatcagccctccgcattaccaaacactgttactgcacatattatccggtgtcctccagcattgagctcccgcagaccgcctgctag

SEQ ID NO: 265154 - DNA, 1086 bp, Artificial Sequence
  derived and/or modified sequence
atggccctgaatgtggccccagtgcgcgacaccaagtggttgactctcgaggtttgccgccaattccaaagaggaacatgctctaggagcgatgaggagtgtaagttcgcgcaccctcccaagtcgtgtcaggtggaaaacgggcgagttatcgcctgcttcgattctctgaaggggagatgcagccgagaaaactgtaagtacctgcatcctccaacacaccttaagactcaactagagatcaacggaagaaacaacctaatccaacaaaaaacagccgcagctatgttggcccagcagatgcagttcatgttcccgggtacaccgctgcatcctgtacccacttttccggttgggccagcaatcggcaccaatactgctatcagctttgccccataccttgcacccgtcactcccggtgttggtcttgtccccacggagattcttcctaccacgcctgtcattgtgcctggctcccctcctgttacagttccaggcagtacggctactcagaaactcctcagaaccgataaactggaagtgtgcagggagttccagcgaggaaactgtgcacggggtgagactgactgtcgattcgcccatcctgccgactcaactatgattgacaccagcgataatacagtgacggtctgcatggactacatcaaaggtagatgtatgagagagaaatgcaagtacttccacccccctgcacacttgcaggctaagattaaggcggctcagcaccaggctaaccaggctgccgtcgccgcacaagcagccgctgcagctgctacggtaatggctttcccacccggtgccctccaccccctgcccaaacggcaggcgttggagaaaagtaatggaacaagcgccgtgtttaaccctagcgtgctccactaccagcaggctcttaccagcgcccaactgcagcagcacgccgcatttatcccgaccgacaacagcgagataatctcgaggaatgggatggaatgtcaggagagtgcgcttcggatcaccaaacattgttattgtacatactacccagtaagttcctctatagagcttccccaaacggcatgctag

SEQ ID NO: 265155 - DNA, 1086 bp, Artificial Sequence
  derived and/or modified sequence
atggccttgaacgttgcccctgtcagagacacaaagtggttgactctggaggtttgccggcagttccagcgcggtacttgtagtcggtccgatgaagagtgtaagttcgcacatccacctaaaagctgtcaggtagagaacggaagagtaattgcctgctttgacagtctaaagggcagatgcagtagagaaaattgtaagtacctgcatccgcctacccatctcaagacacaattagagatcaatggccgaaacaatctgatccagcagaaaacagccgctgccatgctggcacaacagatgcagtttatgtttcctgggactcccctccatcccgtgccgactttccctgttggaccagctatcggtaccaacaccgcaatctctttcgctccctacctagcacccgtgaccccaggagtcggactggttcctacggagattcttccgacaacacctgttatcgttccaggtagtcccccagttacagtgcccggaagtactgcgacccagaagcttttgcgtactgacaaactggaagtgtgtagagaatttcagcgcggaaactgtgccaggggggagaccgattgtaggttcgcccatccagccgatagtacaatgattgacacctcagataacaccgtcaccgtgtgcatggattatatcaaaggaagatgcatgcgtgagaagtgcaaatactttcatccgcctgcccaccttcaggctaagatcaaggccgcacagcaccaggccaatcaggctgcagtggccgcacaggcggcagcggctgcggctacagtgatggcattccccccaggagcccttcatccattgccaaaaagacaggccttagaaaagagtaacggcacctccgccgtgtttaatccctctgtcctccactaccaacaggctttgacttcagctcaactgcagcaacacgccgcatttattcctaccgataactctgagatcatctctcgcaacggaatggaatgtcaggagagtgctctgcggattacaaagcattgttactgtacttattatccagtgagtagtagcattgaactgcctcagacggcatgttag

SEQ ID NO: 265156 - DNA, 621 bp, Artificial Sequence
  derived and/or modified sequence
atggctctgaacgttgccccagttcgtgacaccaaatggctcacactggaggtgtgtcgtcaatttcaaagagggacttgcagcagatccgacgaggagtgtaaattcgcccacccccctaaaagttgccaggtggagaacggaagggtcattgcatgctttgactctcttaagggcaggtgtagtcgcgagaactgtaaatacttgcaccccccaacccatttaaaaacccaactggagataaatggccgaaataacctgattcaacagaagactgccgcagctatgttagcccaacagatgcagttcatgttccctgggacacctttgcaccctgtagctttcccccctggggctctgcatcctttgcctaaacggcaggccttagaaaaaagcaatgggacaagcgctgtcttcaatccctccgtgctgcattaccagcaagcactgacatctgcccagctacaacaacatgcggcattcattccaaccgataattctgagatcatcagccggaatggtatggaatgccaggagtcagccctgaggattacaaagcactgttactgtacctactaccccgtttcatccagcattgagcttccccagacagcctgttag

SEQ ID NO: 265157 - DNA, 817 bp, Artificial Sequence
  derived and/or modified sequence
cagaaacaaacagcccaaattactttatcaccatggctttgaacgttgccccagtcagagatacaaaatggctgacattagaagtctgcagacagtttcaaagaggaacatgctcacgctctgatgaagaatgcaaatttgctcatccccccaaaagttgtcaggttgaaaatggaagagtaattgcctgctttgattccctaaagggccgttgttcgagagagaactgcaagtatcttcaccctccgacacacttaaaaactcaactagaaattaatggaaggaacaatttgattcagcaaaaaactgcagcagcaatgcttgcccagcagatgcaatttatgtttccaggaacaccacttcatccagtggcctttccccctggtgctcttcatcctttaccaaagagacaagcacttgaaaaaagcaatggtaccagcgcggtctttaaccccagcgtcttgcactaccagcaggctctcaccagcgcacagttgcagcaacacgccgcgttcattccaacagataattctgaaataatcagcagaaacggaatggaatgccaagaatctgcattgagaataactaaacattgttactgtacatactatcctgtttcctcctcaatagaattgccacaaactgcatgctaaataaagatgtagttcttctggacagaccacaactctaagaagctagtgctgctatctcatatatgagtattaaatatggtatgcttagtatattccaacctaagatagttaactacctgagaccagctgtgatgtttaaagacataaaggataaagtttacttt

SEQ ID NO: 265158 - protein, 409 aa, Artificial Sequence
  derived and/or modified sequence
MAFARRLLRGPLSGPLLGRRGVCAGAMAPPRRFVLELPDCTLAHFALGADAPGDADAPDPRLAALLGPPERSYSLCVPVTPDAGCGARVRAARLHQRLLHQLRRGPFQRCQLLRLLCYCPGGQAGGAQQGFLLRDPLDDPDTRQALLELLGACQEAPRPHLGEFEADPRGQLWQRLWEVQDGRRLQVGCAQVVPVPEPPLHPVVPDLPSSVVFPDREAARAVLEECTSFIPEARAVLDLVDQCPKQIQKGKFQVVAIEGLDATGKTTVTQSVADSLKAVLLKSPPSCIGQWRKIFDDEPTIIRRAFYSLGNYIVASEIAKESAKSPVIVDRYWHSTATYAIATEVSGGLQHLPPAHHPVYQWPEDLLKPDLILLLTVSPEERLQRLQGRGMEKTREEAELEANSVFRQK

SEQ ID NO: 265159 - protein, 449 aa, Artificial Sequence
  derived and/or modified sequence
MAFARRLLRGPLSGPLLGRRGVCAGAMAPPRRFVLELPDCTLAHFALGADAPGDADAPDPRLAALLGPPERSYSLCVPVTPDAGCGARVRAARLHQRLLHQLRRGPFQRCQLLRLLCYCPGGQAGGAQQGFLLRDPLDDPDTRQALLELLGACQEAPRPHLGEFEADPRGQLWQRLWEVQDGRRLQVGCAQVVPVPEPPLHPVVPDLPSSVVFPDREAARAVLEECTSFIPEARAVLDLVDQCPKQIQKGKFQVVAIEGLDATGKTTVTQSVADSLKAVLLKSPPSCIGQWRKIFDDEPTIIRRAFYSLGNYIVASEIAKESAKSPVIVDRYWHSTATYAIATEVSGGLQHLPPAHHPVYQWPEDLLKPDLILLLTVSPEERLQRLQGRGMEKTREEAELEANSVFRQKVEMSYQRMENPGCHVVDASPSREKVLQTVLSLIQNSFSEP

SEQ ID NO: 265160 - DNA, 1350 bp, Artificial Sequence
  derived and/or modified sequence
atggcttttgccagaaggctgctaagaggtcccctgtccggccctctgctaggacgaaggggtgtctgcgcgggagctatggccccacccaggcgctttgtcctcgaacttccggattgcacactggcccactttgccttaggggctgatgcccccggagatgccgatgctccagaccctcggctcgctgccttgcttggaccacctgaaaggtcttactccctgtgtgtacctgtgactccagatgcgggttgtggggctagagtgcgcgctgcgaggctccatcagcgcttactgcatcaattacgtcgaggaccttttcagcgatgtcagctgctgcgcctgctgtgttactgtccagggggacaggccggaggtgcacagcaaggcttcctcctccgcgaccccctcgacgaccctgatactcggcaggcgctcctggagctgctgggtgcttgccaggaagccccccgcccccacctcggggaatttgaagccgatccccgggggcagctctggcaacgcctctgggaagtacaagatggccggcggctgcaggttgggtgtgcgcaagttgttcccgtacccgagccccctctgcaccccgtggtgcccgatctgcctagttctgtggtcttccccgatagagaagccgcccgggccgtgctggaggaatgtacttcttttattcccgaggcgcgcgccgtgctcgatctggtcgatcagtgcccaaagcaaattcagaagggtaaattccaggtggtggcaatagaggggctggatgccacgggtaaaaccaccgtgactcaatcagttgctgatagtttgaaggccgtcttgctcaagagcccaccatcgtgtataggacaatggcgaaagatttttgacgacgaacctacaatcatccgtcgggcattctattcgctgggaaactatatcgtcgcctccgagattgcaaaggagtctgccaaatcccctgtgatcgttgatcgctactggcattcgacggctacttacgctatagcaacagaagtctccggcgggttacagcatcttccccccgcacaccatccggtgtatcagtggcccgaggatctactaaaaccggatttaatccttctcctgacggtgtcgcctgaggaacgcctgcagagattgcaaggcagagggatggagaaaactcgcgaagaggctgaattagaggccaatagtgtgtttcgccagaaagtcgagatgtcgtaccaacgtatggagaaccctgggtgtcatgtagtggacgccagcccgtcccgggaaaaggtgttgcagacggtcctctcgttaattcaaaactctttctctgaaccatag

SEQ ID NO: 265161 - DNA, 1350 bp, Artificial Sequence
  derived and/or modified sequence
atggcctttgcccggcggctgctgcggggccccctgagcggccccctgctgggcagaagaggagtgtgtgccggggccatggcccccccaagaagatttgtgctggagctgcctgactgcaccctggcccactttgccctgggcgcagatgcccctggagatgctgatgccccagacccccggctggccgccctgctgggccccccagagaggagctacagcctgtgtgtgcctgtgaccccagatgctggctgtggggcccgggtgcgggccgcccggctgcaccagaggctgctgcaccagctgcggcggggccccttccagcgctgccagctgctgcggctgctgtgctactgccctgggggccaggccggcggggcccagcagggcttcctgctgcgggaccccctggatgatcctgacacccggcaggccctgctggagctgctgggcgcctgccaggaggccccccggccccacctgggggagtttgaggccgacccccggggccagctgtggcagaggctgtgggaggtgcaggatggaagaaggctgcaggtgggctgtgcccaggtggtgcctgtgcctgagccccccctgcaccctgtggtgcctgacctgcccagctctgtggtgtttcctgaccgggaggccgcccgggctgtgctggaggagtgcaccagcttcatccctgaggcccgggctgtgctggacctggtggaccagtgccccaagcagatccagaagggcaagttccaggtggtggccatcgagggcctggatgccaccgggaagaccaccgtgacccagagcgtggccgacagcctgaaggctgtgctgctgaagagcccccccagctgcatcggccagtggaggaagatctttgatgatgagcccaccatcatcagaagagccttctacagcctgggcaactacatcgtggccagcgagatcgccaaggagagcgccaagagccctgtgattgtggaccgctactggcacagcacagccacctacgccatcgccacagaggtgtctgggggcctgcagcacctgcccccagcccaccaccctgtgtaccagtggccagaggacctgctgaagccagacctgatcctgctgctgactgtgtccccagaggagcggctgcagaggctgcagggccggggcatggagaagacccgggaggaggccgagctggaggccaacagcgtcttccggcagaaggtggagatgagctaccagaggatggagaaccctggctgccacgtggtggatgccagccccagccgggagaaggtgctgcagacagtgctgagcctcatccagaacagcttcagcgagccctag

SEQ ID NO: 265162 - DNA, 1350 bp, Artificial Sequence
  derived and/or modified sequence
atggccttcgcccggcggctgctgcggggccccctgagcggccccctcctgggaagacgcggggtgtgcgctggagctatggcaccaccaagacgcttcgtgttggagttaccggattgtacactggcacacttcgcactgggcgctgacgctcccggcgacgccgacgctcctgacccacgactcgctgcacttttgggtccacctgagcggtcgtactcgctctgcgtgccagtcaccccagatgctgggtgtggcgcccgtgtgagagccgcccgtctccaccagcgactgttgcatcagctcagaagaggccctttccagagatgccagctgctcagactcctttgctactgtccaggcgggcaggccggcggtgcacagcagggttttctgctccgagacccgcttgacgatccggatacgcgtcaggctttgctggagctgctaggcgcttgtcaggaggcgccaaggccacacctcggggagtttgaagccgatccaagaggacaactttggcaacggctgtgggaagtccaagatgggcggcggctccaggtcgggtgtgcgcaggtggtccctgtgcctgaaccccctctccatcccgtggtgcctgacctgccctcctctgtggtcttccctgaccgggaagctgcgcgggcagttctcgaagagtgtacctccttcattcctgaagcccgcgcggtactggacctcgtcgaccagtgtcccaaacaaatccagaaagggaagttccaagtggtcgcaattgaaggcctcgatgctaccgggaaaaccactgtgacacagagcgtcgccgacagcctcaaagccgtactcctgaagagccctccaagttgtatcgggcaatggcgcaaaattttcgacgatgaacctactataatcaggcgtgctttctatagcctagggaattacattgtcgcctccgagattgctaaggagagtgccaagtctcccgtgatagttgatcggtattggcactctactgccacatacgcaatagccacagaggtctctggaggtctgcaacaccttccgcccgcccaccacccagtttaccagtggccagaggatcttttgaagccagatctgatcctgctgcttaccgtatcacccgaggagcggcttcagcgtctgcagggcagaggtatggaaaagactcgggaagaggccgaactggaagccaactcggttttcaggcaaaaggtagagatgagctatcaaagaatggaaaatcccggatgccacgtcgtggacgccagtccttctcgcgaaaaagtgctgcagaccgttttgtccctgattcagaactcttttagtgagccctag

SEQ ID NO: 265163 - DNA, 1350 bp, Artificial Sequence
  derived and/or modified sequence
atggcctttgctcgaaggctgctgcgaggccctctgagtgggcctctgctgggtcggaggggcgtctgtgccggagccatggccccacccagacgctttgtcttggagttaccagactgtacgctggctcatttcgccctgggtgccgacgcacccggtgatgcagacgctcccgaccctcggctagccgctttgctaggaccgcctgagcggtcgtactccctgtgtgtgccggtcacacccgacgccggatgcggcgctagagtgcgagcagcacgcctgcatcagcggctcctgcatcagcttcggaggggccctttccagagatgccagttactgaggctgttgtgttattgtcctggcggacaggccggtggagctcagcaaggcttcctcctgagagacccactggacgatcccgacactcgacaagcccttcttgagcttctgggtgcttgtcaggaagcgcctaggcctcacttgggcgagttcgaagccgatcctcgcggtcagctctggcagcgtctctgggaagtgcaggacggccgaagattacaggtcgggtgcgcccaggtggtgcctgtgcccgagcctcccctccaccccgtggtccccgacttgccgtcctctgttgtgtttcccgatcgagaggccgctagggcagtcctcgaggaatgcacaagcttcatccctgaggccagagccgttctcgatcttgtggatcagtgcccaaaacaaattcagaaggggaaatttcaggtagtggccattgaaggcttagacgccacaggcaagacaacggtgacccagagtgtagcggattccttgaaagccgttcttttaaagagcccccctagttgtatcggccagtggaggaaaatttttgacgacgagcccactatcatcaggagagctttttactcactgggcaattatattgttgccagcgaaatagcaaaggagtctgcaaagtctccagtgattgttgacaggtactggcacagtacagcaacatatgcgatcgcaaccgaggtctccggaggattacagcacttgcccccagctcaccacccggtgtatcaatggcctgaggatctgctgaagcccgacctgattctgttactgaccgtaagtcctgaggagcgcctgcagaggctgcagggtcgcggtatggaaaagacaagggaggaggctgaactggaggccaactcagtatttcggcaaaaggtcgagatgtcctatcagcgaatggagaatcctggctgccacgttgtggacgcttcgccatccagagaaaaggttttgcagaccgtcctgagtctgatccagaactctttctctgagccctag

SEQ ID NO: 265164 - DNA, 2884 bp, Artificial Sequence
  derived and/or modified sequence
atggccttcgcccgccggctcctgcgcgggccactgtcggggccgctgctcgggcggcgcggggtctgcgctggggccatggctccgccgcgccgcttcgtcctggagcttcccgactgcaccctggctcacttcgccctaggcgccgacgcccccggcgacgcagacgcccccgacccccgcctggcggcgctgctggggcccccggagcgcagctactcgctgtgcgtgcccgtgaccccggacgccggctgcggggcccgggtccgggcggcgcggctgcaccagcgcctgctgcaccagctgcgccgcggccccttccagcggtgccagctgctcaggctgctctgctactgcccgggcggccaggccggcggcgcacagcaaggcttcctgctgcgcgaccccctggatgaccctgacacccggcaagcgctgctcgagctgctgggcgcctgtcaggaggcaccacgcccgcacttgggcgagttcgaggccgacccgcgcggccagctgtggcagcgcctctgggaggtgcaagacggcaggcggctgcaggtgggctgcgcacaggtcgtgcccgtcccggagcccccgctgcacccggtggtgccagacttgcccagttccgtggtcttcccggaccgggaagccgcccgggccgttttggaggagtgtacctcctttattcctgaagcccgggcagtgcttgacctggtcgaccagtgcccaaaacagatccagaaaggaaagttccaggttgttgccatcgaaggactggatgccacgggtaaaaccacggtgacccagtcagtggcagattcacttaaggctgtcctcttaaagtcaccaccctcttgcattggccagtggaggaagatctttgatgatgaaccaactatcattagaagagctttttactctttgggcaattatattgtggcctccgaaatagctaaagaatctgccaaatctcctgtgattgtagacaggtactggcacagcacggccacctatgccatagccactgaggtgagtgggggtctccagcacctgcccccagcccatcaccctgtgtaccagtggccagaggacctgctcaaacctgaccttatcctgctgctcactgtgagtcctgaggagaggttgcagaggctgcagggccggggcatggagaagaccagggaagaagcagaacttgaggccaacagtgtgtttcgtcaaaaggtagaaatgtcctaccagcggatggagaatcctggctgccatgtggttgatgccagcccctccagagaaaaggtcctgcagacggtattaagcctaatccagaatagttttagtgaaccgtagttactctggccaggtgccacgtctaactagattagatgttgtttgaaacatctacatccaccatttgttatgcagtgttcccaaatttctgttctacaagcatgttgtgtggcagaaaactggagaccaggcatcttaattttacttcagccatcgtaccctcttctgactgatggacccgtcatcacaaaggtccctctcatcatgttccagtgagaggccagcgattgctttcttcctggcatagtaaacattttcttggaacatatgtttcacttaatcactaccaaatatctggaagacctgtcttactcagacagcaccaggtgtacagaagcagcagacaagatcttccagatcagcagggagaccccggagcctctgcttctcctacactggcatgctgatgagatcgtgacatgcccacattggcttcttccacatctggttgcactcgtcatgatgggctcgctgcatctccctcagtcccaaattctagagccaagtgttcctgcagaggctgtctatgtgtcctggctgcccaaggacactcctgcagagccatttttgggtaaggaacacttacaaagaaggcattgatcttgtgtctgaggctcagagcccttttgataggcttctgagtcatatataaagacattcaagccaagatgctccaactgcaaatataccaaccttctctgaattatattttgcttatttatatttcttttctttttttctaaagtatggctctgaatagaatgcacattttccattgaactggatgcatttcatttagccaatccagtaatttatttatattaatctatacataatatgtttcctcagcataggagctatgattcattaattaaaagtggagtcaaaacgctaaatgcaatgtttgttgtgtattttcattacacaaacttaatttgtcttgttaaataagtacagtggatcttggagtgggatttcttggtaaattatcttgcacttgaatgtctcatgattacatatgaaatcgctttgacatatctttagacagaaaaaagtagctgagtgagggggaaattatagagctgtgtgactttagggagtaggttgaaccaggtgattacctaaaattccttccagttcaaaggcagataaatctgtaaattattttatcctatctaccatttcttaagaagacattactccaaaataattaaatttaaggctttatcaggtctgcatatagaatcttaaattctaataaagtttcatgttaatgtcataggatttttaaaagagctataggtaatttctatataatatgtgtatattaaaatgtaattgatttcagttgaaagtattttaaagctgataaatagcattagggttctttgcaatgtggtatctagctgtattattggttttatttactttaaacattttgaaaagcttatactggcagcctagaaaaacaaacaattaatgtatctttatgtccctggcacatgaataaactttgctgtggtttactaatcta

SEQ ID NO: 265165 - DNA, 1350 bp, Artificial Sequence
  derived and/or modified sequence
atggccttcgccagaagactgctgagaggccccctgagcggccccctgctgggcagaagaggcgtgtgcgccggcgccatggccccccccagaagattcgtgctggagctgcccgactgcaccctggcccacttcgccctgggcgccgacgcccccggcgacgccgacgcccccgaccccagactggccgccctgctgggcccccccgagagaagctacagcctgtgcgtgcccgtgacccccgacgccggctgcggcgccagagtgagagccgccagactgcaccagagactgctgcaccagctgagaagaggccccttccagagatgccagctgctgagactgctgtgctactgccccggcggccaggccggcggcgcccagcagggcttcctgctgagagaccccctggacgaccccgacaccagacaggccctgctggagctgctgggcgcctgccaggaggcccccagaccccacctgggcgagttcgaggccgaccccagaggccagctgtggcagagactgtgggaggtgcaggacggcagaagactgcaggtgggctgcgcccaggtggtgcccgtgcccgagccccccctgcaccccgtggtgcccgacctgcccagcagcgtggtgttccccgacagagaggccgccagagccgtgctggaggagtgcaccagcttcatccccgaggccagagccgtgctggacctggtggaccagtgccccaagcagatccagaagggcaagttccaggtggtggccatcgagggcctggacgccaccggcaagaccaccgtgacccagagcgtggccgacagcctgaaggccgtgctgctgaagagcccccccagctgcatcggccagtggagaaagatcttcgacgacgagcccaccatcatcagaagagccttctacagcctgggcaactacatcgtggccagcgagatcgccaaggagagcgccaagagccccgtgatcgtggacagatactggcacagcaccgccacctacgccatcgccaccgaggtgagcggcggcctgcagcacctgccccccgcccaccaccccgtgtaccagtggcccgaggacctgctgaagcccgacctgatcctgctgctgaccgtgagccccgaggagagactgcagagactgcagggcagaggcatggagaagaccagagaggaggccgagctggaggccaacagcgtgttcagacagaaggtggagatgagctaccagagaatggagaaccccggctgccacgtggtggacgccagccccagcagagagaaggtgctgcagaccgtgctgagcctgatccagaacagcttcagcgagccctag

SEQ ID NO: 265166 - protein, 146 aa, Artificial Sequence
  derived and/or modified sequence
MSRSRLFSVTSAISTIGILCLPLFQLVLSDLPCEEDEMCVNYNDQHPNGWYIWILLLLVLVAALLCGAVVLCLQCWLRRPRIDSHRRTMAVFAVGDLDSIYGTEAAVSPTVGIHLQTQTPDLYPVPAPCFGPLGSPPPYEEIVKTT

SEQ ID NO: 265167 - DNA, 441 bp, Artificial Sequence
  derived and/or modified sequence
atgagcagaagcagactgttcagcgtgaccagcgccatcagcaccatcggcatcctgtgcctgcccctgttccagctggtgctgagcgacctgccctgcgaggaggacgagatgtgcgtgaactacaacgaccagcaccccaacggctggtacatctggatcctgctgctgctggtgctggtggccgccctgctgtgcggcgccgtggtgctgtgcctgcagtgctggctgagaagacccagaatcgacagccacagaagaaccatggccgtgttcgccgtgggcgacctggacagcatctacggcaccgaggccgccgtgagccccaccgtgggcatccacctgcagacccagacccccgacctgtaccccgtgcccgccccctgcttcggccccctgggcagcccccccccctacgaggagatcgtgaagaccacctag

SEQ ID NO: 265168 - DNA, 441 bp, Artificial Sequence
  derived and/or modified sequence
atgtcaaggtctaggctctttagtgttacatcagcgatctcgacaattggcatcctgtgtctgcccctgtttcagcttgtcctgtccgacttgccttgcgaggaggatgaaatgtgtgtcaattataacgatcaacatccaaacggatggtacatctggatacttttgctattggtgctggtcgctgcactgctgtgtggagcggtcgtgctctgtctccagtgctggctaagaaggccacgcatagactctcatagaagaaccatggctgttttcgccgtcggcgacctggattcaatttacggcactgaagctgcggtttctcccaccgttgggatacacctccaaactcagactcccgatctttacccagtccccgccccttgcttcggtcccctggggtccccccccccgtatgaggaaattgttaagaccacttag

SEQ ID NO: 265169 - DNA, 441 bp, Artificial Sequence
  derived and/or modified sequence
atgagccgcagccgcctcttctctgtgaccagcgccatcagcaccatcggcatcctgtgcctgcccctcttccagctggtgctgagtgacctgccctgtgaagaagatgagatgtgtgtgaactacaatgaccagcaccccaacggctggtacatctggatcctgctgctgctggtgctggtggccgccctgctgtgtggggctgtggtgctgtgcctgcagtgctggctgcggcggcccagaattgacagccacaggaggaccatggctgtgtttgctgtgggggacctggacagcatctatggaacagaagctgctgtgagccccaccgtgggcatccacctgcagacccagaccccagacctgtaccctgtgcctgccccctgcttcggccccctgggcagccccccaccctatgaggagatcgtgaagaccacctag

SEQ ID NO: 265170 - DNA, 441 bp, Artificial Sequence
  derived and/or modified sequence
atgagccggagccggctgttcagcgtgaccagcgccatcagcaccatcggaattctgtgtctacccctgttccagctggtgttaagtgacctaccctgcgaggaggacgaaatgtgtgttaactacaacgaccagcatccaaatggctggtatatctggatcctcctgcttctcgtcctggtcgcagcactcctgtgtggggccgtcgttctgtgcctgcagtgctggttgcgacgacctagaatcgactcacacagacggactatggcggtattcgcagtgggagacctcgattcgatctacggaacggaggccgctgtgagccccacggtgggtattcatctgcagacccagactcctgacctctaccccgtacctgccccttgctttggtcccctcgggagtccaccaccgtacgaggagatcgtcaaaactacatag

SEQ ID NO: 265171 - DNA, 441 bp, Artificial Sequence
  derived and/or modified sequence
atgagtcgtagcaggcttttctctgtgacctcagctatatcgacaatagggatactgtgcctgccactcttccagctcgtcctatccgacttaccctgcgaagaggatgagatgtgtgtgaactataatgatcaacatcctaacggttggtatatatggatcctgttattgctggtcctagttgcagccctgctttgtggcgcagtcgtgctctgcctgcagtgttggctccggagaccacgaattgatagtcatcggcgtacaatggcagtattcgcggtcggggatttggattccatttatggtacagaagcagcagtgagcccaacagtgggcatacatctgcaaacccaaacacccgacttataccctgttccagctccctgttttggcccattaggaagccctcccccttatgaagaaatcgtaaagaccacctag

SEQ ID NO: 265172 - DNA, 1448 bp, Artificial Sequence
  derived and/or modified sequence
agttctgagaaagaaggaaataaacacaggcaccaaaccactatcctaagttgactgtcctttaaatatgtcaagatccagacttttcagtgtcacctcagcgatctcaacgatagggatcttgtgtttgccgctattccagttggtgctctcggacctaccatgcgaagaagatgaaatgtgtgtaaattataatgaccaacaccctaatggctggtatatctggatcctcctgctgctggttttggtggcagctcttctctgtggagctgtggtcctctgcctccagtgctggctgaggagaccccgaattgattctcacaggcgcaccatggcagtttttgctgttggagacttggactctatttatgggacagaagcagctgtgagtccaactgttggaattcaccttcaaactcaaacccctgacctatatcctgttcctgctccatgttttggccctttaggctccccacctccatatgaagaaattgtaaaaacaacctgattttaggtgtggattatcaatttaaagtattaacgacatctgtaattccaaaacatcaaatttaggaatagttatttcagttgttggaaatgtccagagatctattcatatagtctgaggaaggacaattcgacaaaagaatggatgttggaaaaaattttggtcatggagatgtttaaatagtaaagtagcaggcttttgatgtgtcactgctgtatcatacttttatgctacacaaccaaattaatgcttctccactagtatccaaacaggcaacaattaggtgctggaagtagtttccatcacatttaggactccactgcagtatacagcacaccattttctgctttaaactctttcctagcatggggtccataaaaattattataatttaacaatagcccaagccgagaatccaacatgtccagaaccagaaccagaaagatagtatttgaatgaaggtgaggggagagagtaggaaaaagaaaagtttggagttgaagggtaaaggataaatgaagaggaaaaggaaaagattacaagtctcagcaaaaacaagaggttttatgccccaacctgaagaggaagaaattgtagatagaaggtgaaggagattgctgaagatatagagcacatataatgccaacacggggagaaaagaaaagttccccttttacagtaatgaatgtggcctccatagtccatagtgtttctctggagcctcagggcttggcatttattgcagcatcatgctaagaaccttcggcataggtatctgttcccatgaggactgcagaagtagcaatgagacatcttcaagtggcattttggcagtggccatcagcagggggacagacaaaaacatccatcacagatgacatatgatcttcagctgacaaatttgttgaacaaaacaataaacatcaatagatatctaaaa

SEQ ID NO: 265173 - protein, 369 aa, Artificial Sequence
  derived and/or modified sequence
MWCLERLRLGPECLRRSGDWLLPGRARGAKSRTTAACANVLTPDRIPEFCIPPRLMPRLALAALRNSWVEEAGMDEGAGRTDWDPRSQAALSLPHLPRVRTAYGFCALLESPHTRRKESLLLGGPPAPRPRAHTYGGGGGPDALLGTLRVPRAPGPATPAAPGCPRPPQDALARRPRGCRLLRVPDGLLSRALRAGRSRRLTRVRSVSSGNEDKERRAGSQSPARAPSTSPPSSRVPFPERLEAEGTVALGRAGDALRLAAEYCPGTGRLRLRLLRAESPAGGAPGPRAVSCRLSLVLRPPGTALRQCSTVVGRSRKASFDQDFCFDGLSEDEVRRLAVRVKARDEGRGRERGRLLGQGELSLGALLLL

SEQ ID NO: 265174 - DNA, 1110 bp, Artificial Sequence
  derived and/or modified sequence
atgtggtgtctggagagactgaggttagggcctgaatgcctgagacgatccggagattggctcctccccggccgggcccgcggcgcgaaaagcaggaccaccgccgcctgtgctaatgtcctgacccccgatcgaataccagaattctgcattccgccgcggctgatgccaaggttggcactggcagcacttcgcaatagctgggtagaggaagctgggatggacgagggagctggcagaaccgactgggacccaaggtctcaggccgctctttccctaccacacttgcctagggtccggaccgcttatgggttctgcgctctgctggagtctcctcatacaaggagaaaggagtccctcctgctcggcggaccacccgccccacgacctcgcgctcacacatacggcgggggaggcggccctgacgcattgctcggcaccctcagggttccccgagccccaggccccgctactccggctgcccccgggtgtccgcgtccgccgcaggacgcccttgcacggagacctaggggctgtcggctcctgcgtgtgcccgatggtctcttgtcaagagcactgcgcgccgggaggagcagacgtctaacccgggtgcgttcagtttccagcggcaacgaggataaagagcgccgtgcgggatctcagtcgcctgctagggcccctagcaccagtcctccaagctctcgagtgccatttccagaaaggctggaggcggagggaacagtcgcacttggcagggcaggcgatgccctaaggctcgctgcagagtactgtcctgggaccggaagacttagactgaggctcttgcgggccgagtctcccgcagggggcgctcctggcccaagagccgtgtcctgtagactatctctagtcctgaggcccccagggaccgctctcagacagtgttcaaccgttgtgggtaggtccagaaaagcctcattcgatcaggacttttgttttgatgggctcagcgaggacgaggtgcgaaggctcgcggttagagtgaaagctagggatgaggggcgagggcgggagcgcggtcgactgctgggtcagggtgagcttagtctcggggcgttgttgttactgtag

SEQ ID NO: 265175 - DNA, 1110 bp, Artificial Sequence
  derived and/or modified sequence
atgtggtgcctggagcggctgcggctgggccctgagtgcctgcggcgcagcggggactggctgctgcccggccgggcccggggggccaagagcaggaccacagctgcctgtgccaacgtgctgaccccagaccgcatccctgagttctgcatccccccccggctgatgccccggctggccctggccgccctgagaaattcctgggtggaggaggccggcatggatgaaggagctggccgcacagactgggaccccaggagccaggccgccctgagcctgccccacctgccccgggtgaggacagcctacggcttctgtgccctgctggagagcccccacaccaggaggaaggagagcctgctgctgggcggccccccagccccccggccccgggcccacacctatggaggcggcggcggcccagatgccctgctgggcaccctgcgggtgccccgggcccctggccctgccaccccagctgcccctggctgccccaggcctccccaggatgccctggcccggcggccccggggctgccgcctgctgcgggtgcctgatggcctgctgagccgggccctgcgggccggccgcagccggcggctgaccagggtgcgctctgtgtcctctggaaatgaagacaaggagcggcgggccggcagccagagccctgcccgggcccccagcaccagcccccccagcagccgggtgcccttccctgagcggctggaggccgagggcaccgtggccctgggccgggctggagatgccctgcggctggccgctgagtactgccccggcaccggccgcctgcggctgcggctgctgcgggcagagagccctgctggaggagcccctggccccagggctgtgtcctgccgcctgagcctggtgctgcggcccccaggcacagccctgcggcagtgcagcacagtggtgggccgcagcaggaaggccagctttgaccaggacttctgctttgatggcctgtctgaagatgaggtgcggcggctggccgtgcgggtgaaggccagagatgagggccggggccgggagcggggccgcctgctgggccagggcgagctgagcctgggcgccctgctgctgctgtag

SEQ ID NO: 265176 - DNA, 1110 bp, Artificial Sequence
  derived and/or modified sequence
atgtggtgcctggagcggctgcggctgggccccgagtgcctgcggcgaagtggggactggctgctcccgggccgagcccgaggcgccaagtcaagaaccactgccgcatgcgctaacgtcctaaccccggacagaatccctgaattttgtatacccccaagactcatgccaaggctggccctggcggcactgaggaactcatgggtggaggaagcgggtatggacgaaggcgcaggccggaccgattgggatccacggtcacaggccgccctgtccctgccccatctccctagagtgcggacggcttacggtttctgtgctctgctcgagagcccacacactaggcgcaaagaaagcctgctgctgggtggccccccggcgcctaggcctagggctcatacttatggaggaggcggaggcccggacgcactactgggtacactgcgagtgccacgcgctccggggccggccacaccagccgcacccggatgccctaggccgccgcaggacgcactggctcgccgacccagagggtgcaggttactgagagtgcccgatgggctgctgtcacgggccctgcgtgccggaagaagcagacggttgactcgtgtaagatccgtgtcatccggaaacgaggacaaggaacgacgagctggctcccagtccccagcacgcgccccctccacttcacctccttcttcccgcgtcccgtttcctgaacggctcgaagctgaggggaccgtggccctgggcagagccggagacgccctccgcctggctgcagagtactgtccagggactggccgcctgcgcttgcgactactgagggcagagagtccagcaggtggagcccctggcccccgggctgtgtcctgtaggctgtcacttgtgcttcgtccacccggcacagcgcttcgccagtgcagcaccgtggtcggcagatctcgaaaggctagcttcgatcaagatttttgttttgacggtctgagcgaggacgaggtacgacgcctggccgtccgcgtgaaagcacgcgatgaaggtagaggccgcgagcggggaagactgctgggacagggcgagctgagcctcggcgctctgctgctcttgtag

SEQ ID NO: 265177 - DNA, 1110 bp, Artificial Sequence
  derived and/or modified sequence
atgtggtgtctggaacggttaagactgggccctgaatgtctgagacgctctggtgattggttattacccggacgagccaggggcgctaaatcccgcacaacagccgcttgcgccaacgtgctgacacccgatcgcatcccagagttttgcatcccgccaagacttatgccccgactggccctggctgccctacgaaacagctgggtagaggaggctggaatggacgaaggggcaggcagaacggattgggaccctagatcccaggcagccctttctctgccacacctgccacgcgtgagaaccgcctatggattctgtgcccttctggagagcccccatacacgccgaaaagaaagcctgctgctcgggggtcctccagctcctcgaccacgggcacacacttatgggggtggcggtggacctgatgcacttctaggtacactgcgcgtgcccagggctcctggtcctgccacacccgctgccccaggctgccctcggccaccccaagatgccctggctaggcgccctcggggttgtaggctgctccgtgtgccagatggtctgctaagtcgcgctctgagggcaggtcgctcccgcaggctgacacgggtgaggtcggtatcttcaggcaacgaggacaaggaacggagggctggaagtcagagtcctgccagagcaccctctaccagccccccttcctcccgagtgccatttcctgagcgtctggaggctgagggcaccgtggccctgggacgagccggtgatgcactacggctagccgctgaatattgccccggtaccggacgtctgcgtttaagactgcttcgggctgagtccccagccggaggcgcaccaggtcctagggccgtgtcctgcaggttgtccctggtgttgcgacccccaggtacggctcttagacagtgctcaaccgtcgtcggaagatctcggaaggcctccttcgatcaagatttttgttttgatggactctccgaggatgaagtccgccgactggcggtgagagttaaggcacgggatgagggcaggggaagggaaaggggtcgcctgctcggccagggggagttatcactaggagcccttcttttactgtag

SEQ ID NO: 265178 - DNA, 1432 bp, Artificial Sequence
  derived and/or modified sequence
actggtgctgaaccccgccgcgcgcgctttgaatttcccagccgctaagcgcctctcctggtcggtgtcccaggcagaaaggtgcagagacccatctgacgcaggactccaggtagacaagctccagcagagagtggccagatgtggtgcctggagcgactccgcttgggtcctgagtgccttcggcggagcggagactggcttctcccgggtcgggcccgcggagccaagtctcgcaccaccgccgcgtgcgcaaatgtgctcactccggaccgcatccctgagttctgcatcccgccacggctcatgccccgcctggccttggctgcgctccggaattcttgggtcgaagaagcagggatggacgagggcgccggccgcacagactgggacccgcgctcgcaggccgcgctgtcactgccgcacctgccccgtgtgcgcaccgcctacggcttctgcgcgctgctcgagagcccgcacacgcgccgcaaggagtcgctcctgctcgggggcccgcccgcgccccggccccgggcccacacctacggcggcggcggcggcccggacgccctcctggggaccctgcgcgtcccgcgagctccgggcccggcgacccccgcggcccccggctgtccccgcccgccccaggacgcgctcgcccggcggccccgcggctgccgcctcctgcgcgtccccgacgggctgctgagtcgcgcgctgcgggctgggaggagtcgccgcctgacccgcgtccgctccgtctccagcgggaacgaggacaaggagcgccgcgcgggctcccagtccccggcccgggccccctccacgagcccgccgtcgtcccgggtcccgtttcccgagcgcctggaggccgagggcaccgtggctctgggccgcgccggcgacgccctgcgcctggccgccgagtactgtccgggaaccgggcggctccgcctccggctgctccgcgccgagagcccggccggaggcgcccccgggccccgagccgtcagctgtcgcctcagcctcgtcctgcggccgccgggcaccgcgcttcggcaatgcagcactgtggtggggcgcagccgcaaggcctcctttgaccaggacttctgcttcgacggcctctcggaggacgaagtgcgccgcctggccgttcgagtcaaggcccgggacgagggccgcggccgggagcggggccgcctgctgggccagggtgagctgtccctgggcgccctcctgctgctctgagggcccagccctccccggggcgctctgcccgggggactccggacactgacagccgcgtggtacaaaataaacgtgtatttgttgttcttatcagtcccgtttcagtacaacactggcagagatgattctagattaactatcccagtaaaagatatgatattttccatagatacctccagaa

SEQ ID NO: 265179 - DNA, 1110 bp, Artificial Sequence
  derived and/or modified sequence
atgtggtgcctggagagactgagactgggccccgagtgcctgagaagaagcggcgactggctgctgcccggcagagccagaggcgccaagagcagaaccaccgccgcctgcgccaacgtgctgacccccgacagaatccccgagttctgcatcccccccagactgatgcccagactggccctggccgccctgagaaacagctgggtggaggaggccggcatggacgagggcgccggcagaaccgactgggaccccagaagccaggccgccctgagcctgccccacctgcccagagtgagaaccgcctacggcttctgcgccctgctggagagcccccacaccagaagaaaggagagcctgctgctgggcggcccccccgcccccagacccagagcccacacctacggcggcggcggcggccccgacgccctgctgggcaccctgagagtgcccagagcccccggccccgccacccccgccgcccccggctgccccagacccccccaggacgccctggccagaagacccagaggctgcagactgctgagagtgcccgacggcctgctgagcagagccctgagagccggcagaagcagaagactgaccagagtgagaagcgtgagcagcggcaacgaggacaaggagagaagagccggcagccagagccccgccagagcccccagcaccagcccccccagcagcagagtgcccttccccgagagactggaggccgagggcaccgtggccctgggcagagccggcgacgccctgagactggccgccgagtactgccccggcaccggcagactgagactgagactgctgagagccgagagccccgccggcggcgcccccggccccagagccgtgagctgcagactgagcctggtgctgagaccccccggcaccgccctgagacagtgcagcaccgtggtgggcagaagcagaaaggccagcttcgaccaggacttctgcttcgacggcctgagcgaggacgaggtgagaagactggccgtgagagtgaaggccagagacgagggcagaggcagagagagaggcagactgctgggccagggcgagctgagcctgggcgccctgctgctgctgtag

SEQ ID NO: 265180 - protein, 795 aa, Artificial Sequence
  derived and/or modified sequence
MATMLEGRCQTQPRSSPSGREASLWSSGFGMKLEAVTPFLGKYRPFVGRCCQTCTPKSWESLFHRSITDLGFCNVILVKEENTRFRGWLVRRLCYFLWSLEQHIPPCQDVPQKIMESTGVQNLLSGRVPGGTGEGQVPDLVKKEVQRILGHIQAPPRPFLVRLFSWALLRFLNCLFLNVQLHKGQMKMVQKAAQAGLPLVLLSTHKTLLDGILLPFMLLSQGLGVLRVAWDSRACSPALRALLRKLGGLFLPPEASLSLDSSEGLLARAVVQAVIEQLLVSGQPLLIFLEEPPGALGPRLSALGQAWVGFVVQAVQVGIVPDALLVPVAVTYDLVPDAPCDIDHASAPLGLWTGALAVLRSLWSRWGCSHRICSRVHLAQPFSLQEYIVSARSCWGGRQTLEQLLQPIVLGQCTAVPDTEKEQEWTPITGPLLALKEEDQLLVRRLSCHVLSASVGSSAVMSTAIMATLLLFKHQKLLGEFSWLTEEILLRGFDVGFSGQLRSLLQHSLSLLRAHVALLRIRQGDLLVVPQPGPGLTHLAQLSAELLPVFLSEAVGACAVRGLLAGRVPPQGPWELQGILLLSQNELYRQILLLMHLLPQDLLLLKPCQSSYCYCQEVLDRLIQCGLLVAEETPGSRPACDTGRQRLSRKLLWKPSGDFTDSDSDDFGEADGRYFRLSQQSHCPDFFLFLCRLLSPLLKAFAQAAAFLRQGQLPDTELGYTEQLFQFLQATAQEEGIFECADPKLAISAVWTFRDLGVLQQTPSPAGPRLHLSPTFASLDNQEKLEQFIRQFICS

SEQ ID NO: 265181 - protein, 160 aa, Artificial Sequence
  derived and/or modified sequence
MATMLEGRCQTQPRSSPSGREASLWSSGFGMKLEAVTPFLGKYRPFVGRCCQTCTPKSWESLFHRSITDLGFCNVILVKEENTRFRGWLVRRLCYFLWSLEQHIPPCQDVPQKIMESTGVQNLLSGRVPGGTGEGQVPDLVKKEVQRILGHIQAPPRPFL

SEQ ID NO: 265182 - DNA, 2388 bp, Artificial Sequence
  derived and/or modified sequence
atggccaccatgctggagggcagatgccagacccagcccagaagcagccccagcggcagagaggccagcctgtggagcagcggcttcggcatgaagctggaggccgtgacccccttcctgggcaagtacagacccttcgtgggcagatgctgccagacctgcacccccaagagctgggagagcctgttccacagaagcatcaccgacctgggcttctgcaacgtgatcctggtgaaggaggagaacaccagattcagaggctggctggtgagaagactgtgctacttcctgtggagcctggagcagcacatccccccctgccaggacgtgccccagaagatcatggagagcaccggcgtgcagaacctgctgagcggcagagtgcccggcggcaccggcgagggccaggtgcccgacctggtgaagaaggaggtgcagagaatcctgggccacatccaggccccccccagacccttcctggtgagactgttcagctgggccctgctgagattcctgaactgcctgttcctgaacgtgcagctgcacaagggccagatgaagatggtgcagaaggccgcccaggccggcctgcccctggtgctgctgagcacccacaagaccctgctggacggcatcctgctgcccttcatgctgctgagccagggcctgggcgtgctgagagtggcctgggacagcagagcctgcagccccgccctgagagccctgctgagaaagctgggcggcctgttcctgccccccgaggccagcctgagcctggacagcagcgagggcctgctggccagagccgtggtgcaggccgtgatcgagcagctgctggtgagcggccagcccctgctgatcttcctggaggagccccccggcgccctgggccccagactgagcgccctgggccaggcctgggtgggcttcgtggtgcaggccgtgcaggtgggcatcgtgcccgacgccctgctggtgcccgtggccgtgacctacgacctggtgcccgacgccccctgcgacatcgaccacgccagcgcccccctgggcctgtggaccggcgccctggccgtgctgagaagcctgtggagcagatggggctgcagccacagaatctgcagcagagtgcacctggcccagcccttcagcctgcaggagtacatcgtgagcgccagaagctgctggggcggcagacagaccctggagcagctgctgcagcccatcgtgctgggccagtgcaccgccgtgcccgacaccgagaaggagcaggagtggacccccatcaccggccccctgctggccctgaaggaggaggaccagctgctggtgagaagactgagctgccacgtgctgagcgccagcgtgggcagcagcgccgtgatgagcaccgccatcatggccaccctgctgctgttcaagcaccagaagctgctgggcgagttcagctggctgaccgaggagatcctgctgagaggcttcgacgtgggcttcagcggccagctgagaagcctgctgcagcacagcctgagcctgctgagagcccacgtggccctgctgagaatcagacagggcgacctgctggtggtgccccagcccggccccggcctgacccacctggcccagctgagcgccgagctgctgcccgtgttcctgagcgaggccgtgggcgcctgcgccgtgagaggcctgctggccggcagagtgcccccccagggcccctgggagctgcagggcatcctgctgctgagccagaacgagctgtacagacagatcctgctgctgatgcacctgctgccccaggacctgctgctgctgaagccctgccagagcagctactgctactgccaggaggtgctggacagactgatccagtgcggcctgctggtggccgaggagacccccggcagcagacccgcctgcgacaccggcagacagagactgagcagaaagctgctgtggaagcccagcggcgacttcaccgacagcgacagcgacgacttcggcgaggccgacggcagatacttcagactgagccagcagagccactgccccgacttcttcctgttcctgtgcagactgctgagccccctgctgaaggccttcgcccaggccgccgccttcctgagacagggccagctgcccgacaccgagctgggctacaccgagcagctgttccagttcctgcaggccaccgcccaggaggagggcatcttcgagtgcgccgaccccaagctggccatcagcgccgtgtggaccttcagagacctgggcgtgctgcagcagacccccagccccgccggccccagactgcacctgagccccaccttcgccagcctggacaaccaggagaagctggagcagttcatcagacagttcatctgcagctag

SEQ ID NO: 265183 - DNA, 2761 bp, Artificial Sequence
  derived and/or modified sequence
agtccacgccttgtggcggctttgcggagctgctgctttggcgggagttggaagctggtgtgaggtgagaggcgcggtggtcgctccccggcgaggccaggtttctgtggggagaaggagagtgccagaggtgactggttcatggttcttctaggctctcatggccaccatgttggaaggcagatgccaaactcagccaaggagcagccccagtggccgagaggctagcctgtggtcgtcaggctttgggatgaagctggaggctgtcactccattcctggggaagtatcgcccctttgtgggtcgctgttgccagacctgcacccccaagagctgggagtccctcttccacagaagcataacggacctaggcttctgcaatgtgatcctggtgaaggaggagaacacaaggtttcggggctggctggttcggaggctctgctatttcctgtggtccctggagcagcacatccccccctgccaggatgtcccacagaagatcatggaaagcaccggggtgcagaacctcctctcagggagggtcccaggaggcactggggaaggccaggtgcctgaccttgtgaagaaggaggtacagcgcatcctgggtcacatccaggccccaccccgtcccttcctggtcaggctgttcagctgggcgctgctgaggttcctgaactgcctgttcctgaatgtgcagctccacaagggtcagatgaagatggtccagaaggccgcccaggcaggcttgccgcttgtcctcctctctactcacaaaaccctcctggatgggatcctgctgccctttatgctgctctcccagggcctgggtgtgcttcgtgtggcctgggactcccgcgcctgctcccctgccctcagagctctgctgaggaagcttggggggcttttcctgcccccagaggccagcctctccctggacagctctgaggggctccttgccagggctgtggtccaggcggtcatagagcagctgctggttagtgggcagcccctgctcatcttcctggaggaacctcctggggctctggggccacggctgtcagccctgggccaggcttgggtggggtttgtggtgcaggcagtccaggtgggcatcgtcccagatgctctgctggtaccagtggccgtcacctatgacctggttccggatgcaccgtgtgacatagaccatgcctcggcccccctggggctgtggacaggagctctggctgtcctacgtagcttgtggagccgctggggctgcagccaccggatctgctcccgggtgcacctagctcagcccttttccctgcaggaatacatcgtcagtgccagaagctgctggggcggcagacagaccctggagcagctactgcagcccatcgtgctgggccaatgtactgctgtcccagacactgagaaggagcaggagtggacccccataactgggcctctcctggccctcaaggaagaggaccagctcctggtcaggagactgagctgtcatgtcctgagtgccagtgtagggagctctgcggtgatgagcacggccattatggcaacgctgctgctcttcaagcatcagaagctcctgggggagttctcctggctgacggaggagatactgttgcgtggctttgatgtaggcttctctgggcagctgcggagcctgctgcagcactcactgagcctgctgcgggcgcacgtggccctgctgcgcatccgtcagggtgacttgctggtggtgccgcagcctggcccaggcctcacacacctggcacaactgagtgctgagctgctgcccgtcttcctgagcgaggctgtgggcgcctgtgcagtgcgggggctgctggcaggcagagtgccgccccaggggccctgggagctgcagggcatattgctgctgagccagaatgagctgtaccgccagatcctgctgctgatgcacctgctgccgcaagacctgctgctgctaaagccctgccagtcttcctactgctactgtcaggaggtgctggaccggctcatccaatgcgggctcctggttgctgaggagaccccaggctcccggccagcctgtgacacagggcgacagcgattgagcagaaagctgctgtggaaaccgagtggggactttactgatagtgacagtgatgacttcggagaggctgacggccggtacttcaggctcagccagcagtcacactgcccagatttctttcttttcctctgccgcctgctcagcccgctgctcaaggcctttgcacaggctgccgccttcctccgccagggccagctgcccgatactgagttgggctacacagagcagctgttccagttcctgcaggccaccgcccaggaagaagggatcttcgagtgtgcggacccaaagctcgccatcagtgctgtctggaccttcagagacctaggggttctgcagcagacgccgagccctgcaggccccaggctccacctgtcccctacttttgccagcctggacaatcaggaaaaactagaacagttcatccggcagttcatttgtagctagaactgtgaggaggagcctgtgctgagacttctcagccccagaacacagctgtgtcctagagccagaagatggagaggaggctgcaaacccttagctgctctataaatataatcattgaggcttgattgtcccttgccatctcttgctttttcccttctttgatgtgataaacaaggggacgagacgagttgtcttttccccagcccagcagca

SEQ ID NO: 265184 - DNA, 3061 bp, Artificial Sequence
  derived and/or modified sequence
gtttttcagcgtcagagtctcaggatctcgatgtggacaggcaccctgatacaaaagaacgctcagaattttgctagagccgaaccccagcttggaggagcgtaagccctgggataacttctttaatcagaatctggcctgagtccctgctcgaagctcaagcacccggggcctcgcggccgcctgcagtactcccctcccaccgcgggccagggccgactggaaaacggagcaggccatccccagagcacgggtcccgtggccacgttgagtgtcgcagagtacgggacgcagggcggggcttctggaccagcgcgcatcccaattggctctcggggctgccttttagccggacgcgcggaggtgggcaatccgctccttcccttgagcagtccacgccttgtggcggctttgcggagctgctgctttggcgggagttggaagctggtgtgaggctctcatggccaccatgttggaaggcagatgccaaactcagccaaggagcagccccagtggccgagaggctagcctgtggtcgtcaggctttgggatgaagctggaggctgtcactccattcctggggaagtatcgcccctttgtgggtcgctgttgccagacctgcacccccaagagctgggagtccctcttccacagaagcataacggacctaggcttctgcaatgtgatcctggtgaaggaggagaacacaaggtttcggggctggctggttcggaggctctgctatttcctgtggtccctggagcagcacatccccccctgccaggatgtcccacagaagatcatggaaagcaccggggtgcagaacctcctctcagggagggtcccaggaggcactggggaaggccaggtgcctgaccttgtgaagaaggaggtacagcgcatcctgggtcacatccaggccccaccccgtcccttcctggtcaggctgttcagctgggcgctgctgaggttcctgaactgcctgttcctgaatgtgcagctccacaagggtcagatgaagatggtccagaaggccgcccaggcaggcttgccgcttgtcctcctctctactcacaaaaccctcctggatgggatcctgctgccctttatgctgctctcccagggcctgggtgtgcttcgtgtggcctgggactcccgcgcctgctcccctgccctcagagctctgctgaggaagcttggggggcttttcctgcccccagaggccagcctctccctggacagctctgaggggctccttgccagggctgtggtccaggcggtcatagagcagctgctggttagtgggcagcccctgctcatcttcctggaggaacctcctggggctctggggccacggctgtcagccctgggccaggcttgggtggggtttgtggtgcaggcagtccaggtgggcatcgtcccagatgctctgctggtaccagtggccgtcacctatgacctggttccggatgcaccgtgtgacatagaccatgcctcggcccccctggggctgtggacaggagctctggctgtcctacgtagcttgtggagccgctggggctgcagccaccggatctgctcccgggtgcacctagctcagcccttttccctgcaggaatacatcgtcagtgccagaagctgctggggcggcagacagaccctggagcagctactgcagcccatcgtgctgggccaatgtactgctgtcccagacactgagaaggagcaggagtggacccccataactgggcctctcctggccctcaaggaagaggaccagctcctggtcaggagactgagctgtcatgtcctgagtgccagtgtagggagctctgcggtgatgagcacggccattatggcaacgctgctgctcttcaagcatcagaagctcctgggggagttctcctggctgacggaggagatactgttgcgtggctttgatgtaggcttctctgggcagctgcggagcctgctgcagcactcactgagcctgctgcgggcgcacgtggccctgctgcgcatccgtcagggtgacttgctggtggtgccgcagcctggcccaggcctcacacacctggcacaactgagtgctgagctgctgcccgtcttcctgagcgaggctgtgggcgcctgtgcagtgcgggggctgctggcaggcagagtgccgccccaggggccctgggagctgcagggcatattgctgctgagccagaatgagctgtaccgccagatcctgctgctgatgcacctgctgccgcaagacctgctgctgctaaagccctgccagtcttcctactgctactgtcaggaggtgctggaccggctcatccaatgcgggctcctggttgctgaggagaccccaggctcccggccagcctgtgacacagggcgacagcgattgagcagaaagctgctgtggaaaccgagtggggactttactgatagtgacagtgatgacttcggagaggctgacggccggtacttcaggctcagccagcagtcacactgcccagatttctttcttttcctctgccgcctgctcagcccgctgctcaaggcctttgcacaggctgccgccttcctccgccagggccagctgcccgatactgagttgggctacacagagcagctgttccagttcctgcaggccaccgcccaggaagaagggatcttcgagtgtgcggacccaaagctcgccatcagtgctgtctggaccttcagagacctaggggttctgcagcagacgccgagccctgcaggccccaggctccacctgtcccctacttttgccagcctggacaatcaggaaaaactagaacagttcatccggcagttcatttgtagctagaactgtgaggaggagcctgtgctgagacttctcagccccagaacacagctgtgtcctagagccagaagatggagaggaggctgcaaacccttagctgctctataaatataatcattgaggcttgattgtcccttgccatctcttgctttttcccttctttgatgtgataaacaaggggacgagacgagttgtcttttccccagcccagcagca

SEQ ID NO: 265185 - DNA, 2388 bp, Artificial Sequence
  derived and/or modified sequence
atggcaactatgttggaaggtcgttgtcaaactcagcctagatcctccccgagcggtagagaggctagcctgtggagttccggcttcggtatgaagcttgaagctgtgacccctttcctgggaaagtaccgaccattcgtgggaaggtgctgtcagacctgtactccaaaatcctgggaatccctctttcatcgctcaataacagaccttggattttgcaacgttatcctggtgaaggaagaaaacactaggtttcgggggtggctggtgagacgactttgctatttcctttggagcctcgagcagcacatccccccatgccaggacgtgcctcaaaaaattatggaaagtactggcgtccaaaatctgctcagtggcagagtgcctggtggaacaggtgaaggccaggtccctgatctcgtgaaaaaagaggtgcaaaggattctgggacacatccaggcaccaccaagacctttcctcgtccggctgttctcgtgggcacttcttcgattcttaaactgtctctttctgaatgtgcagctgcataaaggacagatgaaaatggtgcagaaagcagctcaagccggcctgcctctggtcctcttgtctacacacaagaccctcttggatgggattctcctgccattcatgctgctctcccaaggactgggtgtgttacgcgtcgcatgggattcacgcgcatgttcccctgcgctaagggccttgctgagaaagctgggcggcctctttctgccacccgaggcgtcattgtcactcgatagctcggaaggcctgctcgcccgagcggtggtacaggcagtgattgaacagctactggtgagcgggcagccactcctgatcttcctagaggagcccccaggggcactcggcccccgattatccgctctggggcaagcttgggtgggatttgtagtccaggctgtgcaggtgggcattgtgcctgatgctttgctggtacctgtggcagtcacctatgacctggtccccgatgccccgtgcgacatagatcatgcaagtgctcctctgggcctctggactggggccctagcagtattacgctcgttgtggagtcgatggggctgtagtcaccgaatatgctctcgcgtacacttggcccagcctttttcactgcaggagtacatcgtgagcgctcgttcctgctggggtggtaggcagactcttgaacagctgctgcagcctatcgtcctcggacagtgcacagccgtccccgatacagagaaggaacaggaatggacccctatcactgggcccctgctggctctgaaggaggaagatcagctattagtgcggcgactctcatgtcacgttctgagcgcttcggtggggtcttccgcggtaatgtccacggccattatggcaacactgctgcttttcaagcaccagaaactgttgggagaattttcttggctgaccgaggagatactgctgagaggttttgacgtgggtttctcaggccagctcagatccctgctccagcacagcctctccttgctccgggctcacgtagcgttactcagaatacgtcagggcgacctgctcgtagtcccgcagcccggtcctggcttaacgcacctagcccagctcagcgccgagctgctaccagtttttctgtccgaggcagtgggtgcttgtgccgttcgcggcctccttgctggacgcgtccccccccaaggcccatgggaactccagggaatcttactcttgtctcagaacgaactctacagacagatactcctgctgatgcacctgttgccccaggacttactgctcttaaagccctgccagtcctcttattgctactgtcaggaagtgttggatcgtcttatccaatgtgggctgctcgtggccgaggaaactcctggtagcaggccagcgtgtgacacgggccggcagaggctgagccggaagctcttatggaagcccagtggggattttacagatagcgactctgacgacttcggggaagctgatggcaggtatttccggctttctcagcagtctcattgcccagactttttcctgttcttatgccggctcctcagccccttgttgaaagccttcgcccaggcagccgctttcttacggcagggccagttacctgatactgaactcggttatacagaacagctatttcagtttctccaggctaccgctcaggaggaggggatcttcgagtgcgctgaccctaaactggcaatctcagccgtgtggacgtttagggatttgggtgtactgcagcagaccccgagcccggcgggtcctagactccacctttctccaaccttcgctagtcttgacaatcaggagaagttggaacagttcattcgtcagttcatctgctcctag

SEQ ID NO: 265186 - DNA, 2388 bp, Artificial Sequence
  derived and/or modified sequence
atggccacaatgctcgagggccgctgtcagactcagccgcgctcttccccaagcggcagagaagcctcactgtggtcttcggggttcggcatgaagctggaagccgttacaccatttttgggtaaatatagaccttttgttggccgttgctgccagacgtgtaccccaaaatcatgggagtccctgtttcacaggagcattactgacctgggtttttgcaatgtcatcctggtgaaggaggaaaacaccaggtttcggggctggctcgttcggcgactctgctacttcttgtggagcctggagcagcacatccccccgtgccaagacgtacctcaaaagatcatggaatctacaggagtgcaaaatctcctctctgggcgtgtcccagggggcaccggagaaggacaggtaccagacttggtgaaaaaggaggtgcagcgcatcctagggcacatccaggccccccccagaccctttctggtgagactatttagctgggcactgttgcggttcttgaattgcctcttcctaaacgtgcagcttcacaaagggcagatgaagatggtgcagaaggctgcccaagccgggctccccctcgttctcttgagcacgcataagacactgctcgacgggatactactcccgttcatgctgctttcccaaggtctaggcgttctcagggtcgcatgggacagcagggcatgttccccagcgctccgagctctccttcgcaaactcggaggcttgttcctaccccccgaagctagcttgtctttggattctagcgagggactgctggctagggccgtggtgcaagccgtaatcgagcagctgttagtttctgggcagccactacttatttttctggaagaacctccgggcgcgctggggcccagacttagtgccctgggacaggcttgggtgggttttgtggtgcaggctgttcaggtgggaatcgtgccagatgctctgttggtacccgtcgcggtgacctatgatctggtgccagatgctccctgcgatattgatcacgcatccgcacccttggggctgtggaccggagctttagctgtcctgaggtccctgtggtctcgctggggttgctcccatagaatttgcagtcgggtccatctcgcacagcccttctctcttcaggaatacatagtttcagctagaagttgctggggggggaggcagacattggaacaactgcttcagcccattgtcttgggacagtgcaccgccgtgccagatacggagaaggagcaagagtggacaccaatcactggcccgctcctggccctcaaagaagaggatcagctgctggtgcggcggctgtcctgccatgtgctgtccgcgtcagttgggagctcagccgtgatgtccacagctattatggccactttgctactgttcaagcatcaaaagctcctgggcgaattttcgtggctgactgaagagattttgctgaggggtttcgacgtgggattttctggccagctccgttccctgctgcagcattccttatctctgttgcgagcccatgtggctctcctgcggattagacagggggatcttcttgtggtcccccagccagggccggggttgacccatctggcccagctgagcgccgagctattgccagtgttcctgtccgaggcggtgggggcatgtgcggtgcgaggactcctggcggggcgtgttcctccacaggggccctgggaattgcagggcatcttactactctcccagaatgagctctatagacagatcctgcttctcatgcacctgctaccccaagacttactcctattgaaaccctgccagtcgtcctactgctattgtcaagaagtgctggatcgcctcattcagtgcggactcctagtcgctgaggagacacccggttcccgccccgcctgcgatactggaagacagaggctgagccgaaaactgctgtggaagcccagcggagatttcactgattctgacagcgatgatttcggagaagccgatgggagatatttcaggctgagtcagcagagtcactgtcccgattttttccttttcctgtgtcggctcctctccccactgctcaaggcgttcgcacaggcagcagcctttctaaggcagggacagctgccagatacagaactcggatatactgagcagcttttccaattcctacaagcaacagctcaggaagaaggcattttcgagtgcgccgatcctaaactggccatcagtgctgtgtggaccttcagggatctcggcgtcttgcagcagaccccgagccccgccggacctaggctgcacctttcaccaacctttgcgtccctcgacaatcaggagaaactggagcagtttatccgccagttcatctgtagctag

SEQ ID NO: 265187 - DNA, 2388 bp, Artificial Sequence
  derived and/or modified sequence
atggccaccatgctggagggccgctgccagacccagcccaggagcagccccagcggccgggaggccagcctgtggagcagcggcttcggcatgaagctggaggccgtgacccccttcctgggcaagtaccggccctttgtgggccgctgctgccagacctgcacccccaagtcctgggagagcctcttccacaggagcatcacagacctgggcttctgcaacgtcatcctggtgaaggaggagaacacccgcttccggggctggctggtgcggcggctgtgctacttcctgtggagcctggagcagcacatccccccctgccaggatgtgccccagaagatcatggagagcactggagtgcagaacctgctgagcggccgggtgcctgggggcaccggggagggccaggtgcctgacctggtgaagaaggaggtgcagaggatcctgggccacatccaggccccaccccggcccttcctggtgcggctcttctcctgggccctgctgcgcttcctgaactgcctcttcctgaatgtgcagctgcacaagggccagatgaagatggtgcagaaggccgcccaggccggcctgcccctggtgctgctgagcacccacaagaccctgctggatggcatcctgctgcccttcatgctgctgagccagggcctgggcgtgctgcgggtggcctgggacagccgggcctgcagccctgccctgcgggccctgctgaggaagctgggcggcctcttcctgcccccagaggccagcctgagcctggacagcagcgagggcctgctggcccgggctgtggtgcaggccgtgattgagcagctgctggtgtctggccagcccctgctgatcttcctggaggagcccccaggggccctgggcccccggctgagcgccctgggccaggcctgggtgggctttgtggtgcaggccgtgcaggtgggcatcgtgcctgatgccctgctggtgcctgtggccgtgacctatgacctggtgcctgatgccccctgtgacatcgaccacgccagcgcccccctgggcctgtggacaggagccctggccgtgctgcggagcctgtggagccgctggggctgcagccaccgcatctgcagccgggtgcacctggcccagcccttcagcctgcaggagtacatcgtgtctgcccggagctgctggggcggccggcagaccctggagcagctgctgcagcccatcgtgctgggccagtgcacagctgtgcctgacacagagaaggagcaggagtggacccccatcaccggccccctgctggccctgaaggaggaggaccagctgctggtgcggcggctgagctgccacgtgctgagcgcctctgtgggcagcagcgctgtgatgagcacagccatcatggccaccctgctgctcttcaagcaccagaagctgctgggggagttctcctggctgacagaggagatcctgctgcggggctttgatgtgggcttcagcggccagctgcggagcctgctgcagcacagcctgagcctgctgcgggcccacgtggccctgctgcgcatccggcagggcgacctgctggtggtgccccagcccggccctggcctgacccacctggcccagctgtctgctgagctgctgcccgtcttcctgtctgaggccgtgggcgcctgtgctgtgcggggcctgctggccggccgggtgcccccccagggcccctgggagctgcagggcatcctgctgctgagccagaatgagctgtaccggcagatcctgctgctgatgcacctgctgccccaggacctgctgctgctgaagccctgccagagcagctactgctactgccaggaggtgctggacaggctcatccagtgtggcctgctggtggccgaggagaccccaggcagcaggcctgcctgtgacaccggccggcagaggctgagcaggaagctgctgtggaagcccagcggggacttcacagacagcgacagtgatgactttggagaggctgatggccgctacttccggctgagccagcagagccactgcccagacttcttcctgttcctgtgccgcctgctgagccccctgctgaaggcctttgcccaggccgccgccttcctgcggcagggccagctgcctgacacagagctgggctacacagagcagctgttccagttcctgcaggccacagcccaggaggagggcatctttgaatgtgccgaccccaagctggccatctctgctgtgtggaccttccgggacctgggcgtgctgcagcagacccccagccctgctggcccccggctgcacctgagccccacctttgccagcctggacaaccaggagaagctggagcagttcatccggcagttcatctgcagctag

SEQ ID NO: 265188 - DNA, 2388 bp, Artificial Sequence
  derived and/or modified sequence
atggccaccatgctggagggccggtgccagacccagccccggagctcccccagcggtcgagaagcttccctgtggagctccggcttcggcatgaaacttgaagccgtgactcctttcctggggaagtatagaccgttcgttgggaggtgttgccagacttgcacacccaagagttgggaaagcctcttccatcgaagcattaccgacctgggcttttgcaacgtgatactggtcaaagaagagaacacccggtttcgtggctggctggtcaggcggctctgttacttcctttggtcgctcgagcagcacatcccaccctgtcaagacgtgccacagaaaattatggaatctaccggggttcagaatctcctgagtgggcgggtccccggaggcaccggagagggccaggtaccagaccttgtcaaaaaggaagtgcagcgaattctcgggcacattcaggctcccccacgacccttcttggtgaggcttttcagttgggcgcttcttcgcttcctcaactgcctctttctaaacgtgcagttacacaagggtcagatgaagatggtccagaaggccgcgcaggccggacttcctctcgtcttattgagcacacacaaaacactcctagacgggattctgctgccttttatgctgctgtctcagggtcttggtgttttgcgcgtggcttgggacagtcgtgcttgttctcccgccctgcgcgctctactaaggaagctaggcggactctttttgccacccgaggccagtttatctttagattctagtgagggactgctggcgagggctgtggttcaggcggtgatcgagcaactgttagtgtccggtcaacccctgttaatctttctggaagagccccctggtgccctggggcctcggctgtccgccctggggcaggcctgggttgggtttgtagttcaagcagtccaggtgggaatcgtccccgacgccctactggtacccgtcgctgtcacttatgatttggtgccagacgctccctgcgacattgaccatgcatccgccccactcggtctatggaccggagctctggccgtgctgcgctctctgtggtccaggtgggggtgcagtcatcgaatctgctcaagggtgcacctggcccagccgttcagcctgcaagaatacatagtatccgcgagatcttgctggggcggacgtcagacgttggagcagcttctgcagccaatagtgctcggacagtgtacggctgtccccgacacagagaaagagcaggagtggactcccatcaccggtccgcttttggccctgaaggaggaagatcagcttctggtgcggagactctcttgccacgtcctgagcgcctccgtgggttcatctgcagttatgagcaccgcgattatggcaacattgttattatttaaacaccaaaagctcctaggcgaattcagctggctgacagaggagatcctgctccgcggctttgatgtagggtttagtggtcaattgagaagtttgctgcagcacagtctgagtctacttagagcacatgttgctctgctgagaattcgccagggggacctgctggtggtacctcagccgggcccaggcctcacccatctggctcaactctcagctgaattattacccgttttcctgagtgaagcggtgggcgcctgtgcggtgaggggtttactggcaggccgagtgcctccccaaggaccctgggagctgcaggggattttgctgctttcgcaaaatgaactgtacagacagattttgctcctgatgcatctgttgccccaggacttgcttttgctcaagccttgccagagcagttactgctactgccaggaagttcttgataggctcatccagtgcgggctgctagtggctgaggagaccccaggctccagacccgcctgtgacactggaagacagcggctctctcgcaagctgctgtggaaaccttcgggtgactttaccgactccgacagcgacgacttcggcgaagccgatggacgctatttccgcctatcacagcaatcccattgcccggacttctttctgtttttgtgtcgcctactttccccgttgctgaaagccttcgctcaggctgcagcattcctcaggcaggggcaactgcccgacacagaacttggctacaccgagcagctgttccagtttttgcaggccacagcccaggaggaggggatttttgaatgcgcggacccaaagctagccatatctgcggtgtggactttccgggacctcggggtcctgcagcagacaccatcacctgcagggccgcgcttacacctgtcacctacctttgcatccctggataaccaagaaaaacttgagcagttcattagacaatttatctgttcatag

SEQ ID NO: 265189 - DNA, 2388 bp, Artificial Sequence
  derived and/or modified sequence
atggccaccatgctggagggccggtgccagacccagccccggagcagtccttctggcagggaggcctcgctgtggagctcaggttttgggatgaagctcgaggcagtgacaccattcttgggcaagtaccggcctttcgtggggcgatgttgtcagacatgcactcccaagtcatgggaatccctatttcatcgaagtatcaccgatctgggcttttgcaacgtgatactcgtgaaagaggaaaacacaagatttcgcgggtggcttgttaggagactatgctactttctgtggtcgctggaacagcatattccgccctgtcaggacgttcctcagaagattatggagagcaccggggtccaaaacttgctgtcaggaagagtgcctggtggaacgggggaaggtcaggtgccggatctggtcaagaaggaggttcaaagaattctgggccatatccaggctccacctcggcctttcctggtgcggcttttctcctgggcactgttgcgcttcctgaattgtttgtttctgaatgtccagctgcacaaaggacagatgaagatggtgcaaaaagctgctcaagcaggtcttccactggtcctgttaagcacgcataagacactcctcgatggaatattgctgccttttatgctcctgtctcaaggcctgggcgttctaagggtggcctgggactcccgggcctgctcccccgctctgagagcactgctacgcaagctcggtgggctatttttacctccagaggcatctttgtcactggattcaagtgaagggttgttagcccgggctgtggtccaagcagtgatcgaacagctgctagtttcaggtcagcctttgctgatctttttggaggagccccccggagctttggggccccgcctgtcagctttaggacaggcctgggtgggatttgtggttcaagccgtgcaggtgggaattgtgccagatgccctgcttgtgcccgtcgctgtaacatacgatctggtcccggatgccccgtgcgatattgaccacgccagtgcgccccttggcctttggactggtgcgctcgcagtgcttcgaagcctctggagccgctggggatgttctcacagaatctgcagcagagtccatctggcccagcccttcagtctccaagagtacatcgtctcagctcgctcctgctggggaggaaggcagacactggagcaactgctgcagcctatagtgctcggtcagtgtacagcggtgcctgatactgagaaggagcaagagtggacccccatcacgggacccttactggctttaaaagaagaagaccagctccttgtgaggaggctctcttgccacgtgctttcagcctccgtcggctccagtgcagttatgtcaaccgccatcatggcgacccttctcttgttcaaacaccagaagcttctcggggaatttagttggctcaccgaggaaattctgctgcggggattcgacgtcggattttctggacagttgagaagcttattacagcactcgttgtccttgcttagggcccacgttgcactgctcaggatccggcagggggatctgctggtcgttccacaaccggggcccggccttacccaccttgcccagctgtctgcagagctcctgcccgtgtttctatcggaggcagtcggagcatgtgcagtgcgagggctgttggctggccgggttccccctcagggcccttgggaactccaaggtattttacttctgtctcagaacgagttgtatagacaaattttgttgctgatgcacctgttgccacaggatctgctcttgttgaaaccttgccagtctagttactgctactgccaagaagtcttagacagacttattcagtgcgggctgctcgtggctgaggagacacccggctcacggcccgcatgtgatactggccggcagcgcctgagtagaaaactgctttggaagccctctggagactttacggacagtgatagcgatgatttcggagaagcagatggccgctacttccgacttagtcagcaatctcactgccccgattttttcctattcttgtgtcgactcctgtctcctctcctgaaggctttcgcgcaggccgccgcgtttctgcgacagggacagctgcctgataccgagctgggatataccgaacagctgtttcagtttctgcaggctactgcccaggaggagggcatcttcgaatgtgccgacccaaagctggcgatttctgctgtgtggaccttcagggatctgggcgtgctgcagcagacaccaagtccagccgggccccgcctgcacctctcccccaccttcgcctctctcgataatcaggaaaagctggagcaattcatacgacaattcatctgctcttag

SEQ ID NO: 265190 - DNA, 2388 bp, Artificial Sequence
  derived and/or modified sequence
atggccaccatgttagagggacgctgtcaaacgcaaccacgaagctcaccgagtggcagagaagcttccctttggtctagcggtttcggaatgaagttggaagccgtgacgccctttctggggaaataccggccatttgtcggaagatgttgccagacatgcacaccaaagtcctgggagagtctcttccaccgatctatcaccgatctgggtttttgcaacgtgattcttgtgaaggaggagaatacccgcttccggggttggctggtacggagactgtgttatttcctatggagcctggaacagcacatccccccatgccaggacgtccctcagaagatcatggagtccacgggtgtgcagaacctgttatctggacgggtaccagggggtacgggtgaagggcaagttccagacctcgtcaagaaggaggtgcagagaattctgggacatatccaagccccacccaggcccttcctcgtgcgactgttcagctgggccctcctgagattcctcaattgcctatttttgaatgttcagctccacaaagggcaaatgaaaatggtgcagaaagcagctcaagccggactgcctttggttctcctgtcaactcataagactctgctggacggtattctgttgccatttatgctgctgtcccagggcctgggtgttttgagggtcgcatgggactccagagcatgctcccctgcccttagagcactcctccggaagcttggaggactcttccttccccctgaagcgtcattgtccttggactcttcagagggactccttgccagagcagtcgtgcaagctgttatcgagcagttgctagtctctggccaacccctgttgatttttctggaggaaccccctggtgccttgggcccaagactgtctgcactgggccaggcatgggtggggtttgtcgtgcaggcagttcaggtcggaatcgtaccggatgcactgctagtaccagtggcagtgacatacgacctggtcccggatgctccctgtgacatagaccatgctagcgctcctctaggactctggacaggcgctctggcagtgctgcgctccctatggtctaggtgggggtgttcacacagaatctgttcaagagtccacctagctcaacctttctcacttcaggaatacatcgtctctgccagatcctgttggggcggacggcagacactggagcaattattgcaacccatcgttctgggtcaatgcaccgccgtacccgacaccgaaaaagaacaagaatggactccaatcacgggcccactcttggcactgaaagaggaggaccaactgctggtgcggcgactttcctgtcatgttctaagcgcatctgtggggtccagcgctgtaatgtcaacagcaatcatggctacactactgcttttcaagcaccagaagctgctcggggaattttcatggctcactgaagagattctgttgaggggcttcgacgtggggttcagcggtcagttacgcagccttcttcagcacagcttgtctctgttgcgggcacacgtggccctgcttagaataaggcagggagacctactcgtggtcccgcagcctggaccgggtctgactcatttggcacagttgtctgccgagctgctccctgtgttcctttctgaagctgtgggcgcatgtgccgtgagaggcctactcgccggaagagtcccgcctcaaggaccttgggaactgcaggggattctcttgttgagtcaaaatgagctgtatagacagattctgttactgatgcacctcctgccccaggaccttctcctgcttaagccctgccagtcgagttattgttactgccaggaagtcctggataggcttatccagtgcggactcctggtagcagaagaaacacccggtagcaggcccgcttgtgacacagggaggcagaggttatcacggaaattgctctggaaacccagcggtgacttcaccgactctgacagcgacgacttcggagaggccgatggaagatacttcaggctctctcagcagtcccattgcccagacttttttctgtttctgtgtcgccttctttcccccctcctcaaagcattcgcacaggccgctgcatttttgcgtcaagggcaactgcctgacacagagctgggctataccgagcagctcttccagttcctgcaggctactgcacaggaggaagggattttcgagtgtgcggacccgaagctggccatctctgccgtctggacgtttagagatttaggcgttctgcaacagaccccttccccggctggacctagactccatctttcgccgacctttgcgagcctagacaatcaggaaaaactcgagcagttcattaggcaattcatatgttcttag

SEQ ID NO: 265191 - DNA, 2388 bp, Artificial Sequence
  derived and/or modified sequence
atggccaccatgctcgagggacgatgccagactcaaccacggtcttcccctagcggccgagaggccagtctctggagctctggctttggcatgaagttagaggcggtgaccccattcttgggcaaatataggccgttcgttggacgctgttgtcagacgtgtacccccaagagctgggaatcgctgtttcatcggtccataaccgatttgggcttttgcaatgttatcctggtgaaagaggaaaacactaggttcaggggatggcttgtgcggcgtctctgttacttcttgtggtcattagagcaacatatccccccatgtcaagacgtgccccagaaaattatggagagtaccggagtacagaaccttctgagtggcagagtaccgggagggacaggagaagggcaggtgcccgacctagtaaaaaaagaagtgcaacgcatcttagggcacattcaggcacccccacgccctttcctggtaaggctattcagttgggcgctgctgcgattccttaattgcctgttcctgaacgtgcagctccacaaagggcaaatgaagatggtacagaaagccgctcaagcaggacttccactcgtactgctatctacacacaagacactcctggatgggatcctcctgccatttatgctcctgtcacagggcctgggtgtgctgagggtggcatgggatagtcgtgcatgttctcctgcgctccgagccctgctgagaaaattggggggattgttcttacccccagaggcctcgctgagcctcgactcatcggaggggttgctggcaagggccgtcgtgcaagctgtgattgagcagttgctggtgtctggtcagcctctgctgatttttcttgaagagcctcccggtgctctgggaccacggctgtcagcactgggccaagcatgggtaggctttgtcgtacaggcagtgcaggtagggatagtgccagacgccctgctggtgcctgttgccgtgacatatgatctcgtacccgacgctccatgcgacatcgatcatgcctccgctccactcgggctgtggacaggcgctctggccgtactgcgctccctttggagccgatgggggtgcagtcatagaatttgcagtagagtgcatctggctcagccctttagtctgcaggaatacatcgtgtctgcccgttcatgctggggcggaagacagactctggagcagcttttacagccaattgtgctaggccagtgcacagctgtgcctgacaccgagaaggagcaagaatggacgcctatcacgggacccttactggctctcaaagaggaagaccagctgctcgtgaggcggctgtcgtgccacgtgctatccgccagcgtcggctcctcagctgtgatgtctacagcgatcatggcaacactgcttctattcaagcaccaaaagttgctcggggaatttagctggctgaccgaggagattctactgaggggcttcgatgttggcttcagcgggcagctgcggagcctcctgcagcattctctgagcttgctgagggcgcacgtggctctgctcagaatacgccagggggatctcctggtcgtgccgcagccgggacctggtctaactcatttggcacagctttccgctgagctcctacctgtcttccttagcgaagctgtgggagcttgcgccgtccgagggctgcttgctggcagggtacctcctcagggcccttgggagcttcaaggcatcttgctcctatcgcagaatgagctgtatagacagattctacttttaatgcatctcctcccccaggacctgctgctcttaaagccatgtcaatctagttactgctattgtcaggaagttttagatcgactgattcaatgtggtctgctcgtagcggaagagacccctggcagtcgtcctgcatgtgacactggcaggcagcgtttaagtagaaaactgctgtggaaaccctctggggatttcacagacagcgattctgatgattttggcgaggctgatggtcgctactttagactgagccagcagagccactgcccggactttttcttattcctctgtaggctcctgagccctttgcttaaagcttttgcccaggctgctgctttcctgcgccagggtcaacttcccgataccgagcttgggtatactgagcagcttttccaatttcttcaggccacggcgcaggaggagggtatctttgagtgcgcggatcctaagcttgcaatcagcgcggtttggacttttcgagacctcggcgttttgcagcagacaccgtcccccgctgggccacgactccatcttagtccgaccttcgcttccctcgataaccaggagaagctagagcagttcattcggcagtttatttgctcctag

SEQ ID NO: 265192 - protein, 509 aa, Artificial Sequence
  derived and/or modified sequence
MALSQGLLTFRDVAIEFSQEEWKCLDPAQRTLYRDVMLENYRNLVSLDISSKCMMNTLSSTGQGNTEVIHTGTLQRQASYHIGAFCSQEIEKDIHDFVFQWQEDETNDHEAPMTEIKKLTSSTDRYDQRHAGNKPIKGQLESRFHLHLRRHRRIHTGEKPYKCEECEKVFSCKSHLEIHRIIHTGEKPYKCKVCDKAFKHDSHLAKHTRIHRGDKHYTCNECGKVFDQKATLACHHRSHTGEKPYKCNECGKTFSQTSHLVYHHRLHTGEKPYKCNECGKTFARNSVLVIHKAVHTAEKPYKCNECGKVFKQRATLAGHRRVHTGEKPYRCEECDKVFSRKSHLERHRRIHTGEKPYKCKVCDKAFRSDSRLAEHQRVHTGERPYTCNECGKVFSTKAYLACHQKLHTGEKLYECEECDKVYIRKSHLERHRRIHTGEKPHKCGDCGKAFNSPSHLIRHQRIHTGQKSYKCHQCGKVFSLRSLLAEHQKIPFGDNCFKCNEYSKPSSIN

SEQ ID NO: 265193 - DNA, 1530 bp, Artificial Sequence
  derived and/or modified sequence
atggccctgagccagggcctgctgaccttcagagacgtggccatcgagttcagccaggaggagtggaagtgcctggaccccgcccagagaaccctgtacagagacgtgatgctggagaactacagaaacctggtgagcctggacatcagcagcaagtgcatgatgaacaccctgagcagcaccggccagggcaacaccgaggtgatccacaccggcaccctgcagagacaggccagctaccacatcggcgccttctgcagccaggagatcgagaaggacatccacgacttcgtgttccagtggcaggaggacgagaccaacgaccacgaggcccccatgaccgagatcaagaagctgaccagcagcaccgacagatacgaccagagacacgccggcaacaagcccatcaagggccagctggagagcagattccacctgcacctgagaagacacagaagaatccacaccggcgagaagccctacaagtgcgaggagtgcgagaaggtgttcagctgcaagagccacctggagatccacagaatcatccacaccggcgagaagccctacaagtgcaaggtgtgcgacaaggccttcaagcacgacagccacctggccaagcacaccagaatccacagaggcgacaagcactacacctgcaacgagtgcggcaaggtgttcgaccagaaggccaccctggcctgccaccacagaagccacaccggcgagaagccctacaagtgcaacgagtgcggcaagaccttcagccagaccagccacctggtgtaccaccacagactgcacaccggcgagaagccctacaagtgcaacgagtgcggcaagaccttcgccagaaacagcgtgctggtgatccacaaggccgtgcacaccgccgagaagccctacaagtgcaacgagtgcggcaaggtgttcaagcagagagccaccctggccggccacagaagagtgcacaccggcgagaagccctacagatgcgaggagtgcgacaaggtgttcagcagaaagagccacctggagagacacagaagaatccacaccggcgagaagccctacaagtgcaaggtgtgcgacaaggccttcagaagcgacagcagactggccgagcaccagagagtgcacaccggcgagagaccctacacctgcaacgagtgcggcaaggtgttcagcaccaaggcctacctggcctgccaccagaagctgcacaccggcgagaagctgtacgagtgcgaggagtgcgacaaggtgtacatcagaaagagccacctggagagacacagaagaatccacaccggcgagaagccccacaagtgcggcgactgcggcaaggccttcaacagccccagccacctgatcagacaccagagaatccacaccggccagaagagctacaagtgccaccagtgcggcaaggtgttcagcctgagaagcctgctggccgagcaccagaagatccccttcggcgacaactgcttcaagtgcaacgagtacagcaagcccagcagcatcaactag

SEQ ID NO: 265194 - DNA, 1530 bp, Artificial Sequence
  derived and/or modified sequence
atggcgctatcgcagggactcctgacctttcgggatgtagcaatcgaattttcccaggaggagtggaagtgcttggacccagcccagagaaccctgtacagggacgtaatgttagaaaattatcggaacctagtaagtctcgatatctcgtctaaatgcatgatgaatactctgtcctctaccggccagggtaacactgaagttatccacacaggcaccctccaacgtcaggcgtcttatcatatcggagccttttgtagccaggaaattgagaaagacatccatgacttcgtgttccagtggcaggaagatgaaacaaatgaccatgaggcacccatgaccgagatcaaaaaactgacttctagtaccgatagatacgatcagagacacgccggaaacaaacctataaaaggccaacttgagagcaggtttcatctccatctgagacgtcacaggcgcatccacacaggcgagaagccatacaaatgtgaggaatgcgaaaaggtgttcagttgtaaatcccacctggagatccacagaattattcataccggggagaaaccgtataaatgtaaggtttgtgacaaggcatttaaacacgacagccacctggcaaagcatacccgaatccaccgcggcgataaacattatacctgtaatgagtgtggaaaggtcttcgaccagaaggctaccctagcctgccatcacagatcacacacaggggagaagccatataaatgtaatgagtgcggtaaaacgttttcccaaaccagtcatctggtgtaccaccataggctccacaccggcgaaaagccatataaatgcaatgagtgtggaaagacattcgctagaaactctgtgctggtcattcataaggcggtgcacactgcggaaaagccttacaagtgtaacgagtgcggcaaggtgtttaaacagcgagcgacgctagcgggacatagacgggtccatacaggtgagaagccatatcgctgtgaggagtgtgataaagtcttcagccgcaagtcccacttagagaggcacagacgaattcacaccggggagaagccctacaaatgcaaagtctgtgataaagccttccgtagcgatagtcgtctggcagaacatcagcgcgtacatactggcgaacgcccatatacctgcaacgaatgcggcaaggtcttcagcactaaagcctacctggcctgtcaccagaagctacacactggcgaaaaactatatgaatgtgaggaatgcgacaaggtgtacattagaaaatcgcacttagaacggcacaggcgtatacacactggagagaagccacacaagtgtggagattgcggcaaggccttcaatagtccgtcccacctgatcagacatcagcgcatccacaccggtcaaaagagctacaaatgccatcagtgcggaaaggtcttttcgctgaggtcactgctagctgaacaccagaagattcctttcggggacaactgtttcaagtgcaacgaatacagtaagccatccagcatcaattag

SEQ ID NO: 265195 - DNA, 1530 bp, Artificial Sequence
  derived and/or modified sequence
atggccctgagccagggccttctgacattccgcgacgtcgctattgaattcagccaggaagagtggaaatgtttagaccctgcgcagcgaacactgtacagagatgtcatgttagagaattaccgaaacctcgtgtccctggatatcagctctaaatgtatgatgaatactctgtctagtactgggcagggcaatacagaggtgatccacaccggaaccctgcaacgccaagcttcttatcatatcggcgccttctgctcacaagaaatcgaaaaagacatccatgactttgttttccaatggcaagaggacgagactaacgatcatgaagctcctatgaccgaaataaaaaaattgaccagcagtacagaccggtatgaccagcggcacgcggggaacaagcctatcaagggacagctggagtctcggttccatttgcaccttcgcagacacagaagaatccatactggagagaagccttacaaatgtgaagagtgtgaaaaagttttttcatgcaaaagccatttagaaatccacagaattatccataccggggaaaagccctataaatgtaaagtgtgcgacaaggccttcaaacatgacagccatctcgctaagcataccagaattcaccggggcgacaaacattatacttgcaacgagtgcggcaaggtattcgaccagaaggctacactggcatgtcatcaccgcagccacactggagagaagccctataagtgtaatgaatgcggaaagacctttagccagacttcccacctggtatatcatcatagactgcacacaggagagaagccatacaaatgtaacgagtgtggaaagacattcgctagaaacagcgtgctcgtgatccacaaggctgtgcatacagctgagaagccatacaaatgtaacgagtgcggcaaggtatttaagcagcgggctactcttgcgggccatcgtcgcgtgcataccggagagaaaccctatcgctgtgaggaatgtgataaggtgttctcccgcaagtcgcatctagagaggcatcgacgcattcacactggagaaaaaccttacaagtgcaaagtgtgcgataaggcctttaggagcgatagccggctcgccgagcaccagagggtccacactggggaacgaccttatacgtgcaacgaatgcggaaaagtcttttccaccaaagcctatttggcctgccatcaaaagttgcatacaggggagaagctttatgagtgtgaggagtgtgataaggtgtacataaggaagtctcacttagaacggcacaggagaattcacactggcgaaaagccgcataagtgcggggattgtggcaaggcttttaattcacctagccacctcattaggcaccagagaatacataccggacagaagagctacaaatgccaccagtgcggaaaggtgttctctctcagatctctattagcggagcatcaaaagattccttttggagataactgctttaagtgcaacgaatacagtaaaccatcgtcaatcaactag

SEQ ID NO: 265196 - DNA, 1530 bp, Artificial Sequence
  derived and/or modified sequence
atggccctgagccagggcctgctgaccttcagagatgtggccatcgagttcagccaggaggagtggaagtgcctggaccctgcccagaggaccctgtacagagatgtgatgctggagaactacagaaacctggtgtccctggacatcagcagcaagtgcatgatgaacaccctgagcagcacaggccagggcaacacagaggtgatccacacaggcaccctgcagaggcaggccagctaccacatcggggccttctgcagccaggagattgagaaggacatccatgactttgtgttccagtggcaggaggatgagaccaatgaccacgaggcccccatgacagagatcaagaagctgaccagcagcacagacagatatgaccagagacatgctggcaacaagcccatcaagggccagctggagagccgcttccacctgcacctgcggcggcaccggcgcatccacactggagagaagccctacaagtgtgaagaatgtgagaaggtgttcagctgcaagagccacctggagatccaccgcatcatccacactggagagaagccctacaagtgcaaggtgtgtgacaaggccttcaagcatgacagccacctggccaagcacacccgcatccacagaggagacaagcactacacctgcaatgaatgtgggaaggtgtttgaccagaaggccaccctggcctgccaccacaggagccacactggagagaagccctacaagtgcaatgaatgtgggaagaccttcagccagaccagccacctggtgtaccaccaccggctgcacactggagagaagccctacaagtgcaatgaatgtgggaagacctttgccaggaacagcgtgctggtgatccacaaggctgtgcacacagctgagaagccctacaagtgcaatgaatgtgggaaggtgttcaagcagagggccaccctggccggccaccggcgggtgcacactggagagaagccctaccgctgtgaagaatgtgacaaggtgttcagcaggaagagccacctggagcggcaccggcgcatccacactggagagaagccctacaagtgcaaggtgtgtgacaaggccttcagaagtgacagccggctggccgagcaccagagggtgcacactggagagcggccctacacctgcaatgaatgtgggaaggtgttcagcaccaaggcctacctggcctgccaccagaagctgcacactggagagaagctgtatgaatgtgaagaatgtgacaaggtgtacatcaggaagagccacctggagcggcaccggcgcatccacactggagagaagccccacaagtgtggggactgtgggaaggccttcaacagccccagccacctgatccgccaccagaggatccacacaggccagaagagctacaagtgccaccagtgtgggaaggtgttcagcctgcggagcctgctggccgagcaccagaagatcccctttggagacaactgcttcaagtgcaatgagtacagcaagcccagcagcatcaactag

SEQ ID NO: 265197 - DNA, 1530 bp, Artificial Sequence
  derived and/or modified sequence
atggccctgagccagggcctgctgaccttccgggacgtggccatcgaattctcacaggaagagtggaaatgtctggacccagcccagagaacgctatatagagacgtgatgcttgagaattatcggaacctggtgagtctcgatatctcaagtaaatgtatgatgaataccctttcttccacaggccagggcaacaccgaggtcattcacactggtaccctgcagaggcaggcgtcttaccacatcggcgcattctgctcacaggagattgaaaaggacattcacgactttgttttccaatggcaggaggacgaaacaaacgaccacgaagcccccatgacagaaataaagaagctcactagctcaacggatcgctacgaccagcgacacgcaggcaacaaaccaatcaaaggccagttggagagtcggttccatctgcacctcagaaggcatcgtaggatacacacgggcgagaaaccttacaagtgcgaggaatgtgagaaggtgttttcctgtaaaagtcatctcgagatccatcggatcattcacacgggcgagaagccctacaaatgtaaagtttgcgataaggcctttaaacatgatagccatctggctaaacacacgcggattcaccgaggggataaacactacacttgtaacgaatgtggtaaggtcttcgatcagaaagccactctggcctgccatcatagatcccacacaggggaaaaaccttacaagtgcaacgagtgtggaaaaaccttcagccagacctcacaccttgtgtaccaccaccgattacacacaggggagaagccttacaagtgtaacgagtgtggtaaaactttcgcaaggaatagcgtgctggttatccataaggcagtgcacaccgcagagaagccttataagtgtaacgagtgcggtaaggtcttcaaacaaagagcaacgctcgctggccatcgccgcgtgcacaccggcgaaaagccttaccggtgtgaggagtgcgataaggtcttcagcaggaagtcacatctggagcgccatcgccgaattcacacaggggaaaaaccctacaagtgtaaagtgtgcgacaaggcttttcgaagcgatagtcgcctggccgagcaccaacgagtgcacaccggagagaggccttacacgtgcaatgagtgcgggaaagttttctcaacgaaagcctatttggcatgtcaccagaaactgcacaccggagagaaactgtacgagtgcgaagagtgtgataaagtatacattcgaaagtctcatctagagcgccaccggagaatccataccggagagaagccccacaagtgcggggactgtggaaaggcatttaatagtccatcccacctcattagacaccagaggatacacactggccagaaatcgtataagtgtcaccaatgcggcaaggtattctctctgaggtctctgctggcggagcatcagaagattcccttcggggataactgcttcaagtgtaatgaatactcaaagccttcctctatcaactag

SEQ ID NO: 265198 - DNA, 1530 bp, Artificial Sequence
  derived and/or modified sequence
atggccctgagccagggcctgctgaccttccgggacgtggccatcgagttcagccaggaagagtggaagtgcctagatccagctcagcgcaccctgtaccgggacgtgatgttggagaattaccgtaatctggtttctttggatattagcagcaagtgcatgatgaatacacttagtagtacagggcagggaaatactgaggtgattcatactggtaccctgcagagacaggcgtcataccacattggagctttctgttctcaggaaatagagaaggacatccacgattttgtgtttcagtggcaagaggacgaaaccaacgatcatgaggcccctatgacagaaattaaaaagctcacaagctctaccgatagatacgaccaaaggcatgcaggcaataagcctataaagggccagctagaatcaagatttcacctgcacttaaggcgtcaccgcagaatccacactggggaaaaaccctataagtgtgaggagtgtgagaaagttttttcatgcaagtcccacctagagattcatcgtatcatacacactggggagaaaccttacaagtgcaaggtctgtgataaagcctttaaacatgacagccacttggccaaacacactaggatccatagaggagacaaacactatacatgcaacgagtgcgggaaggtcttcgatcaaaaggccaccctggcgtgccaccacagaagccacaccggggaaaagccctacaagtgtaacgaatgcgggaagacattctcccaaacgtcccatctcgtgtatcaccaccgcttacataccggtgagaaaccctacaagtgcaatgagtgcggcaagacctttgcacgaaatagtgtattggtgattcataaggctgtgcatacagccgaaaaaccctacaaatgtaatgaatgtggcaaagtgtttaaacaacgggccaccctagccggtcatcggcgtgtgcacacaggagaaaaaccctacaggtgtgaagagtgtgacaaggttttctctcgaaaatcccatttagaaaggcacaggcgcatccacactggcgagaagccatataagtgtaaggtttgcgataaggccttccggtccgatagcagattggccgagcatcaaagagtgcacactggggagcggccttatacatgcaatgaatgtgggaaagtttttagcaccaaggcgtacctggcatgtcaccaaaaactacataccggcgaaaagctctacgaatgcgaggagtgtgacaaggtgtatattaggaaaagtcatcttgaaagacacagacgtatacacaccggggaaaagccacataaatgtggagactgtgggaaagcttttaactcaccttcccacctcatcaggcaccagaggatacacactggccagaaaagttataaatgtcaccaatgtggtaaagtattcagcctgcgctctctgctcgccgaacatcagaagatccctttcggagacaactgcttcaaatgcaacgagtactcgaaacctagcagcattaattag

SEQ ID NO: 265199 - DNA, 1530 bp, Artificial Sequence
  derived and/or modified sequence
atggcgcttagtcaaggattactgacgtttagggatgtcgccatcgaatttagccaggaagagtggaagtgcctggatcccgctcaaagaaccctctatcgagacgtcatgcttgaaaattaccggaaccttgtaagcttggacatttcctcaaagtgcatgatgaacactctgagctcaactggacagggaaacacagaggtcatccacactgggacactgcagcgccaggcgagctaccacatcggggcattctgtagtcaggagattgagaaggacatccacgattttgtgttccagtggcaggaggacgagactaatgatcacgaggcccctatgacggagataaagaaactcaccagctcaacggacaggtatgatcaacgccacgcagggaacaagcctattaaaggacagttagagagcagattccatctgcacctgaggagacatagaaggattcacactggggaaaagccctacaagtgcgaggaatgtgagaaggtgttttcctgcaagtctcatttggaaatacaccggatcattcacacaggtgagaagccgtacaagtgcaaggtctgcgacaaggcgtttaaacacgacagccacctggcaaaacatacacggatccaccggggtgataagcactatacctgtaacgaatgtggcaaggtctttgatcagaaagcaacattggcctgtcatcaccgctcacacacgggagagaagccatacaagtgcaatgaatgtggaaagacattcagccaaacaagccacctggtgtaccatcaccggcttcatacaggtgagaaaccctataagtgcaacgagtgtgggaagacctttgcccgaaacagcgttctagtgattcacaaggcagtgcatacagcagaaaaaccctacaaatgtaacgagtgtgggaaggtgttcaaacagagagcaaccctggccggacatcgccgtgtgcacaccggggagaagccctataggtgcgaagagtgcgataaagtatttagtcgtaagtcgcaccttgagcgccatcggaggattcacaccggagaaaagccttataagtgcaaagtctgcgacaaggccttcaggagtgattctcgactggctgagcatcagagggtccacacaggcgagcgtccctacacctgcaacgaatgcggaaaggtcttcagcacaaaggcgtacctcgcgtgtcaccagaagctccacactggagagaaattgtatgaatgtgaggaatgcgacaaagtttacatccggaagagccatctggaacgtcatagaaggatacatacgggagaaaagccacataaatgtggcgattgcggaaaggccttcaatagcccgtctcatcttatccgtcaccaacgtatacatacaggacagaaatcttacaagtgccatcaatgcggaaaggttttcagtttgaggtccctcttggcagaacatcagaagatcccattcggcgacaactgttttaagtgcaacgaatattcaaagccatccagcattaactag

SEQ ID NO: 265200 - DNA, 1530 bp, Artificial Sequence
  derived and/or modified sequence
atggccctgtcccagggtctgctcacctttcgcgacgtagcgatcgagtttagccaggaggaatggaagtgtttagacccagctcagcgcactctatatcgagacgtgatgctcgagaactacagaaacctcgtctccctcgacatttcatcgaagtgcatgatgaacaccctttctagtacaggtcaaggcaacactgaggtgattcacacagggactctgcagcggcaagcctcctaccatatcggtgcattctgttcccaagagattgaaaaggatattcacgacttcgtgtttcagtggcaagaggatgaaacaaatgatcacgaagccccaatgactgagatcaagaaactcacatctagcaccgaccgctatgaccagcgacacgccggtaacaagccaattaagggtcagctcgagagtaggtttcatttgcacctgaggcgacacaggagaatccacaccggagagaaaccctacaaatgtgaggaatgcgaaaaggtcttttcgtgtaagtcacatctcgaaatccaccgaattatccataccggcgaaaagccatataagtgcaaagtgtgcgataaggcattcaaacacgatagtcaccttgccaagcacacacgcatccatcggggtgacaagcattatacgtgcaacgagtgtggaaaggtgtttgatcagaaggctactctggcttgccatcatagatcacatactggagagaagccctacaaatgtaacgaatgcgggaagaccttttctcaaacatctcacttggtataccatcacagactgcataccggtgaaaaaccatacaagtgtaatgagtgtggaaagaccttcgctaggaatagtgtgctcgtgatccacaaagcagtgcatacagccgaaaaaccctacaagtgcaatgagtgcggcaaggtgttcaagcagcgggctactctagcaggtcacagacgtgtgcatacaggcgagaaaccctatcgctgtgaggagtgtgacaaggtattctctcgcaagtctcatctcgaaaggcataggcgcatccatacgggcgagaaaccatataaatgcaaagtctgtgacaaagcgttccgatctgactcaaggttggccgagcaccagagagtccatacaggagagaggccctacacatgtaacgagtgtgggaaagtgttctccacgaaagcttatctggcatgccaccagaagttacacaccggggagaagttatacgagtgtgaggaatgtgacaaggtgtacattaggaagtcccatcttgaacgccatagaagaatacacactggagaaaaacctcataaatgcggcgattgcggcaaagcctttaactctccctcgcacttgatccggcaccaaagaatccatacaggtcagaaatcgtacaagtgtcaccagtgtggaaaggtcttctcccttcgcagtctgttggctgaacaccaaaaaataccattcggggacaactgtttcaaatgtaacgagtattcaaaaccaagttcgattaactag

SEQ ID NO: 265201 - DNA, 6038 bp, Artificial Sequence
  derived and/or modified sequence
ctaacatttaggattgacttctaaagactcttggtacctgaggaagaaacccagaagaggaagaggaaagcaaaggagtcggggatggctctttctcagggtctactgacattcagggatgtggccatagaattctctcaggaggagtggaaatgcctggaccctgctcagaggactctatacagagacgtgatgctggagaattataggaacctggtctccctggatatctcttccaaatgcatgatgaatacattgtcatcaacagggcaaggcaatacagaagtgatccacacagggacattgcagagacaagcaagttatcacattggagcattttgctcccaggaaattgagaaagacattcatgactttgtgtttcagtggcaagaagatgaaacaaatgaccatgaagcacccatgacagaaataaaaaagttgactagtagtacagaccgatatgatcaaaggcatgctggaaacaagcctattaaaggtcagcttgaatcaagatttcatttgcatttgcgaagacataggagaattcatactggagagaaaccttacaaatgtgaagaatgtgagaaagttttcagttgcaaatcacatcttgaaatacataggataattcatactggagagaaaccatacaaatgtaaggtttgcgacaaggcttttaagcatgattcacacctggcaaaacatactagaattcacaggggagacaaacattacacatgtaatgaatgtggcaaggtttttgatcaaaaagcaacccttgcatgtcatcatagaagtcatactggagagaaaccttataagtgtaatgagtgtggcaagacctttagtcagacatcacaccttgtgtaccatcatagactgcatactggagagaaaccttacaaatgtaatgagtgtggcaagaccttcgctcgaaattcagtcctcgtaattcataaggcagttcatactgcagagaaaccctataagtgtaatgaatgtggcaaggtttttaagcaacgagcaactcttgcaggacatcgtagagttcacactggagagaaaccttacagatgtgaagaatgcgacaaagttttcagtcgcaaatcacatcttgaaagacataggaggattcatactggagagaaaccatacaaatgtaaggtttgtgacaaggctttccggagtgattcacgtcttgcagaacatcagagagttcatactggagagagaccttacacatgtaatgaatgtggcaaggtttttagtacaaaagcgtacctcgcatgtcatcaaaaacttcatactggagagaaactttacgaatgtgaagaatgtgacaaagtttacattcgcaaatcacaccttgaaagacataggaggattcatacaggagagaaacctcacaagtgtggtgattgtggtaaagcctttaattcaccttcacaccttattaggcatcagagaatccatactggacagaaatcttacaaatgtcatcagtgtggcaaggtctttagtctgaggtcactccttgcagaacatcagaaaattccttttggagacaattgtttcaagtgcaatgagtatagcaaaccatcaagcattaattgacatcagagtcaaatcagcattgacctgagtttgagttgacttaacattgatttcaagcattaatcgacattaaactgtttatgttaagaggattgggccaggcgtggtgtctcacacctgtaatcccagcactttgagaggccaagacaggtaggtcacttgaggtcatgaatttgagaccagcctggccaacagacgggagccacttttcccagcctgtatgttcttttatttatttatttatttttaagatggaatcttgctctgtcgcccacgttggagtgcagtgatgtgatctcggttcactgcaacattcacctcccaggttcatgcaattctcctgcctcagtctcctgagtagctgggactacaggtgcgtgccaccatgcccgggtaattttttgtatttttagtagagactgggtttcaccgtgttagctaggatggtctcgatcttctgtccttaaaatccacctgcctccacctgccaaagtgctgagattacaggcgtgagccaccacacctggcctgttttttgtttctttaacaaaaagttatagaaatttctctgggtattgtgttgaatctacatcacattcagttataatcatttagcaatattattccattcaatatggcttgtatctcttatttgcacatgtttttatcactttgatcaatgtttgtagatttgaaggtagaaacttctcaacttttttcatttattcctaagtatttcttactttaagttctttagcaaatgaaagtgtttttttaattttctttttaaattgtttattgttaatgtatggaaattcaactaatttttggtgctgttattctattcttcaaatccactgcatatgttttttagttccagttgcattttggttgactctttgtgattttctacacagaagatcatgtcatctacaaagaaatagttttacttctttctttctgatttggatgagtttgatttcttttgctatttcattgctctagctaggacagccagtattgattgaatagaaggggtgagagcattcttgcatcatgtgagatcctacaggaaaagcattccattttccctgactggttatttctgctgtggtcatttcatggatggtctttgtattgttgaggtaaatttccttctctttctattttgtttaggatttccatgatgactggatgttgaattttgtgaaatgctttttctccatgtattgagatgatgtggttttcatctttcattatgttcaagtggtatatcacattgatttgcttgactatgttgaaccattttgcatcccagaaataagtggcacttgcatatcaacaatcctttttataacctcttgaatacagttcgctagtacaaggggtcttcaggaagttcatggaaaaatacatattatgagaaaattgtgcatgatatcacattttttgcaccaagataaactgatacaaatccgttataacatgtctgaacagggtttggtttgaggcactcagatgggtaagacatgagtttgaaaagagactcaatcaaggcaatgtaaattctgctaaaactgaaacaagaagaaacatcaaatttgcgatgagaccagatgctgtggctcaggcctgtaatcccataattttcagaggctgagacagttgggtcacgtgggccccggtactcaagaccagcctgggcagaatggtgaaaccaccttctctacaaaaaatacataaattagctgggcattgtggcacatgtctgctggttcagcttctgtggagtctgcagtgggaggatggcttgagcctaggagttcgaggctgcagggagccatgatcatgccattgtactccagcatgggtgacagagacagatagtgtatcgaaaaatgaatctggtaaagtttgggtagagggacaatgaaatcattgatgctttatgaaaaggttatggggacgattcccaaaataaatcaccagtttgtaaatggaaaacttattttaagttgggacaagatgatgttgaaagtgatgcacaggacaggtgtggtggctcacacctgtaatcccagcactttgggaggccgaggcaagagcatcacgaggtcaggagatcgagaaaatcctggctaacacggtgaaaccccatctctactaaaaatacaaaaaattagccaggcgtggttgtgggcgcctgtagtcccagctactcaggaggctgaggcaggagaatggcatgaaccgaggaggtggagcttgccatgagcagagatcatgctactgcactccagcctgggtgacagagcgagactccatctcaaaaaaaaaaaaaaaaaaaaaaaaaagaaagtgatgcacagagtggcaggcagaccatccacataagttttataggtacaactgtcaaagacgacactggagaagagccaagctggatctataaggaattgcatatgagatggcacacatattcatgctgtctgaagattcagtcacgttaccatatcaagctgaaaatgtcaccactatctggagagttggacatgttttattgagaatgtattttttttctctggatctgttatgaacacctttgttggcttggttcagtaataaatatgtgagacttttcatttaaaaaaagtcaaatgacttaattctgtattttaaattctgttttgtttgttttgtttttttgagatggagtcttctgaaaattttctcatcttctctaacccggttcatgacagacccttggactttactgttgtggaaaaatctatataaaacagtatcagtgtgtcaaagcattatggctgtcacaagcttgtgaaaggaaaataaaaattactaagccaaagagaaaagtcaatctgggaactgcgtcagacaaacctgccttccattttattcctaaacaagatagttacaaagattttttaaaaagctacatatgcccctcccaaaccgggaacctcaagatctccaccctaaaatagttctgttgaatttcaccctggcgatgtaaactgagagcttatcttcacagatgtgggaaagagcccatccctctgcacacctgagtcaaatgtctatctgattgcttcccttgccctatttatgtaaaaatacagggtccctgagccagcctaaggcataagtgacttatccctcctccctgctcacatataaattgtgtatttagtgaaaggctgatcaaagattcaaagaatgttatttgttatctacctgtgacccagaaggtccccaattccagttattccacctttccagaccggaccaatgtatatatgtactgattgctgtctcgtgtgtctgtaaaatgtgtgaaaccaaactgcagcctcaacaccatggacacacgtcatcaggacctcctgaggttcgtgttaattggccttagactctccctgtccccagacccaggacgcatgtgtttcctttttcttcatttctattaaagatgggtctcattctgttggccaggcatgagagcggtgacaggatcagccctcactgaagcttcaatctcctgggttcaagggatcctcccacctcagcctccaaagttgctaggaccatagccaggtgccaccgcaccgggcaaatttttgtgttcctagtagagatgggctttcaccatgttgcccgagctggtcttgaattccagggctcaagcgatccagccgtattggcctcccaaggtgctgggattacagccatgagccaccatgaccaacgtgtttcttaatttaaaaaaaaaaaaatagaccaggtgctctggctcatgcctgtaatcccagcactttgggaggccaaggtgggcagatcacctgagatcaagtatttgagaacagcctggctaacatggcgaatcctcgttttgaccaaaatatagaaattagcctggtgtggtggcgagtgcctgtaatcccagctattcaggagggtgaggcagaagaatggcttgaattcgggaggcggaggttgcagtgagctgagatcctgcaactgcactctggctgggcaagagcgagactccatctctaaaataaaattaaagtaatataaaaaactgcttctcatgaaagctttggtataatcttacgaggtaacatcattgttttgcaactacggtatgtgttcaaaatgttcttctttgaccccacatttcattagatatatttttaagccattttaaaattgtttttctctgaaatttattgtgtttagtttacattgaggactgcatgctttctagtctgtatcatacattggaaacattttctagtacctgataaatgattttaggttgtttcgatgtgtacttgataaagatatcaaggaactttttctttatgctaacattaaaatttagttgaagtagcctatta

SEQ ID NO: 265202 - DNA, 6448 bp, Artificial Sequence
  derived and/or modified sequence
cggcccctctttctcaacccagagcaaattgagacgtccgggctggagtgcaatggcgcgatcttggctcaccacaacctccgcctcctgggttcaagtgatctcctgcctcagcctccccagtagccgggattacagtagagacaaggtttcaccatattggccagactgttctctgaactcgacctcaagtgatccacccacctcggcctcccagagtcctgggattacaggctggagggcagttgtgcgatcttgattcacttcaacctctgctctccgggctcaagcaattctcccacctcagcctgagtctcactctgtccttcaggctgtgagtgcagtctcctgatcttggctcactgcaacctctgtctcctgggttcaagtgattcttgtgcctcagcctaccaagtagctgagatacaggattgacttctaaagactcttggtacctgaggaagaaacccagaagaggaagaggaaagcaaaggagtcggggatggctctttctcagggtctactgacattcagggatgtggccatagaattctctcaggaggagtggaaatgcctggaccctgctcagaggactctatacagagacgtgatgctggagaattataggaacctggtctccctggatatctcttccaaatgcatgatgaatacattgtcatcaacagggcaaggcaatacagaagtgatccacacagggacattgcagagacaagcaagttatcacattggagcattttgctcccaggaaattgagaaagacattcatgactttgtgtttcagtggcaagaagatgaaacaaatgaccatgaagcacccatgacagaaataaaaaagttgactagtagtacagaccgatatgatcaaaggcatgctggaaacaagcctattaaaggtcagcttgaatcaagatttcatttgcatttgcgaagacataggagaattcatactggagagaaaccttacaaatgtgaagaatgtgagaaagttttcagttgcaaatcacatcttgaaatacataggataattcatactggagagaaaccatacaaatgtaaggtttgcgacaaggcttttaagcatgattcacacctggcaaaacatactagaattcacaggggagacaaacattacacatgtaatgaatgtggcaaggtttttgatcaaaaagcaacccttgcatgtcatcatagaagtcatactggagagaaaccttataagtgtaatgagtgtggcaagacctttagtcagacatcacaccttgtgtaccatcatagactgcatactggagagaaaccttacaaatgtaatgagtgtggcaagaccttcgctcgaaattcagtcctcgtaattcataaggcagttcatactgcagagaaaccctataagtgtaatgaatgtggcaaggtttttaagcaacgagcaactcttgcaggacatcgtagagttcacactggagagaaaccttacagatgtgaagaatgcgacaaagttttcagtcgcaaatcacatcttgaaagacataggaggattcatactggagagaaaccatacaaatgtaaggtttgtgacaaggctttccggagtgattcacgtcttgcagaacatcagagagttcatactggagagagaccttacacatgtaatgaatgtggcaaggtttttagtacaaaagcgtacctcgcatgtcatcaaaaacttcatactggagagaaactttacgaatgtgaagaatgtgacaaagtttacattcgcaaatcacaccttgaaagacataggaggattcatacaggagagaaacctcacaagtgtggtgattgtggtaaagcctttaattcaccttcacaccttattaggcatcagagaatccatactggacagaaatcttacaaatgtcatcagtgtggcaaggtctttagtctgaggtcactccttgcagaacatcagaaaattccttttggagacaattgtttcaagtgcaatgagtatagcaaaccatcaagcattaattgacatcagagtcaaatcagcattgacctgagtttgagttgacttaacattgatttcaagcattaatcgacattaaactgtttatgttaagaggattgggccaggcgtggtgtctcacacctgtaatcccagcactttgagaggccaagacaggtaggtcacttgaggtcatgaatttgagaccagcctggccaacagacgggagccacttttcccagcctgtatgttcttttatttatttatttatttttaagatggaatcttgctctgtcgcccacgttggagtgcagtgatgtgatctcggttcactgcaacattcacctcccaggttcatgcaattctcctgcctcagtctcctgagtagctgggactacaggtgcgtgccaccatgcccgggtaattttttgtatttttagtagagactgggtttcaccgtgttagctaggatggtctcgatcttctgtccttaaaatccacctgcctccacctgccaaagtgctgagattacaggcgtgagccaccacacctggcctgttttttgtttctttaacaaaaagttatagaaatttctctgggtattgtgttgaatctacatcacattcagttataatcatttagcaatattattccattcaatatggcttgtatctcttatttgcacatgtttttatcactttgatcaatgtttgtagatttgaaggtagaaacttctcaacttttttcatttattcctaagtatttcttactttaagttctttagcaaatgaaagtgtttttttaattttctttttaaattgtttattgttaatgtatggaaattcaactaatttttggtgctgttattctattcttcaaatccactgcatatgttttttagttccagttgcattttggttgactctttgtgattttctacacagaagatcatgtcatctacaaagaaatagttttacttctttctttctgatttggatgagtttgatttcttttgctatttcattgctctagctaggacagccagtattgattgaatagaaggggtgagagcattcttgcatcatgtgagatcctacaggaaaagcattccattttccctgactggttatttctgctgtggtcatttcatggatggtctttgtattgttgaggtaaatttccttctctttctattttgtttaggatttccatgatgactggatgttgaattttgtgaaatgctttttctccatgtattgagatgatgtggttttcatctttcattatgttcaagtggtatatcacattgatttgcttgactatgttgaaccattttgcatcccagaaataagtggcacttgcatatcaacaatcctttttataacctcttgaatacagttcgctagtacaaggggtcttcaggaagttcatggaaaaatacatattatgagaaaattgtgcatgatatcacattttttgcaccaagataaactgatacaaatccgttataacatgtctgaacagggtttggtttgaggcactcagatgggtaagacatgagtttgaaaagagactcaatcaaggcaatgtaaattctgctaaaactgaaacaagaagaaacatcaaatttgcgatgagaccagatgctgtggctcaggcctgtaatcccataattttcagaggctgagacagttgggtcacgtgggccccggtactcaagaccagcctgggcagaatggtgaaaccaccttctctacaaaaaatacataaattagctgggcattgtggcacatgtctgctggttcagcttctgtggagtctgcagtgggaggatggcttgagcctaggagttcgaggctgcagggagccatgatcatgccattgtactccagcatgggtgacagagacagatagtgtatcgaaaaatgaatctggtaaagtttgggtagagggacaatgaaatcattgatgctttatgaaaaggttatggggacgattcccaaaataaatcaccagtttgtaaatggaaaacttattttaagttgggacaagatgatgttgaaagtgatgcacaggacaggtgtggtggctcacacctgtaatcccagcactttgggaggccgaggcaagagcatcacgaggtcaggagatcgagaaaatcctggctaacacggtgaaaccccatctctactaaaaatacaaaaaattagccaggcgtggttgtgggcgcctgtagtcccagctactcaggaggctgaggcaggagaatggcatgaaccgaggaggtggagcttgccatgagcagagatcatgctactgcactccagcctgggtgacagagcgagactccatctcaaaaaaaaaaaaaaaaaaaaaaaaaagaaagtgatgcacagagtggcaggcagaccatccacataagttttataggtacaactgtcaaagacgacactggagaagagccaagctggatctataaggaattgcatatgagatggcacacatattcatgctgtctgaagattcagtcacgttaccatatcaagctgaaaatgtcaccactatctggagagttggacatgttttattgagaatgtattttttttctctggatctgttatgaacacctttgttggcttggttcagtaataaatatgtgagacttttcatttaaaaaaagtcaaatgacttaattctgtattttaaattctgttttgtttgttttgtttttttgagatggagtcttctgaaaattttctcatcttctctaacccggttcatgacagacccttggactttactgttgtggaaaaatctatataaaacagtatcagtgtgtcaaagcattatggctgtcacaagcttgtgaaaggaaaataaaaattactaagccaaagagaaaagtcaatctgggaactgcgtcagacaaacctgccttccattttattcctaaacaagatagttacaaagattttttaaaaagctacatatgcccctcccaaaccgggaacctcaagatctccaccctaaaatagttctgttgaatttcaccctggcgatgtaaactgagagcttatcttcacagatgtgggaaagagcccatccctctgcacacctgagtcaaatgtctatctgattgcttcccttgccctatttatgtaaaaatacagggtccctgagccagcctaaggcataagtgacttatccctcctccctgctcacatataaattgtgtatttagtgaaaggctgatcaaagattcaaagaatgttatttgttatctacctgtgacccagaaggtccccaattccagttattccacctttccagaccggaccaatgtatatatgtactgattgctgtctcgtgtgtctgtaaaatgtgtgaaaccaaactgcagcctcaacaccatggacacacgtcatcaggacctcctgaggttcgtgttaattggccttagactctccctgtccccagacccaggacgcatgtgtttcctttttcttcatttctattaaagatgggtctcattctgttggccaggcatgagagcggtgacaggatcagccctcactgaagcttcaatctcctgggttcaagggatcctcccacctcagcctccaaagttgctaggaccatagccaggtgccaccgcaccgggcaaatttttgtgttcctagtagagatgggctttcaccatgttgcccgagctggtcttgaattccagggctcaagcgatccagccgtattggcctcccaaggtgctgggattacagccatgagccaccatgaccaacgtgtttcttaatttaaaaaaaaaaaaatagaccaggtgctctggctcatgcctgtaatcccagcactttgggaggccaaggtgggcagatcacctgagatcaagtatttgagaacagcctggctaacatggcgaatcctcgttttgaccaaaatatagaaattagcctggtgtggtggcgagtgcctgtaatcccagctattcaggagggtgaggcagaagaatggcttgaattcgggaggcggaggttgcagtgagctgagatcctgcaactgcactctggctgggcaagagcgagactccatctctaaaataaaattaaagtaatataaaaaactgcttctcatgaaagctttggtataatcttacgaggtaacatcattgttttgcaactacggtatgtgttcaaaatgttcttctttgaccccacatttcattagatatatttttaagccattttaaaattgtttttctctgaaatttattgtgtttagtttacattgaggactgcatgctttctagtctgtatcatacattggaaacattttctagtacctgataaatgattttaggttgtttcgatgtgtacttgataaagatatcaaggaactttttctttatgctaacattaaaatttagttgaagta

SEQ ID NO: 265203 - protein, 638 aa, Artificial Sequence
  derived and/or modified sequence
MAGGSATTWGYPVALLLLVATLGLGRWLQPDPGLPGLRHSYDCGIKGMQLLVFPRPGQTLRFKVVDEFGNRFDVNNCSICYHWVTSRPQEPAVFSADYRGCHVLEKDGRFHLRVFMEAVLPNGRVDVAQDATLICPKPDPSRTLDSQLAPPAMFSVSTPQTLSFLPTSGHTSQGSGHAFPSPLDPGHSSVHPTPALPSPGPGPTLATLAQPHWGTLEHWDVNKRDYIGTHLSQEQCQVASGHLPCIVRRTSKEACQQAGCCYDNTREVPCYYGNTATVQCFRDGYFVLVVSQEMALTHRITLANIHLAYAPTSCSPTQHTEAFVVFYFPLTHCGTTMQVAGDQLIYENWLVSGIHIQKGPQGSITRDSTFQLHVRCVFNASDFLPIQASIFPPPSPAPMTQPGPLRLELRIAKDETFSSYYGEDDYPIVRLLREPVHVEVRLLQRTDPNLVLLLHQCWGAPSANPFQQPQWPILSDGCPFKGDSYRTQMVALDGATPFQSHYQRFTVATFALLDSGSQRALRGLVYLFCSTSACHTSGLETCSTACSTGTTRQRRSSGHRNDTARPQDIVSSPGPVGFEDSYGQEPTLGPTDSNGNSSLRPLLWAVLLLPAVALVLGFGVFVGLSQTWAQKLWESNRQ

SEQ ID NO: 265204 - DNA, 405 bp, Artificial Sequence
  derived and/or modified sequence
atgcacggagggggtggagtgtcatcttgctccgcgagcagcgtcagttcagtttctcaaaatcctcccgcggctgctgcaccggggcacggggctagagaacaccggggccagctcgcagcagccgagtcagcttcttcaccattgcatccagccaccaaagcttccgtgggacctgcacttcagcgcgaaacacccaccatcctctgcgctattctttgcctcggaccacacgtgtctcttgcctgcgtctctcgagagctcgccactgaacccaggacatcaagcccttgtgcctcgcacggtagctctagtcatcccgtgacgctgaccgaattgttaatttcctccatttccctgcgagacggcgcggcccttttagggctctgcagcagaaccgtgtag

SEQ ID NO: 265205 - DNA, 297 bp, Artificial Sequence
  derived and/or modified sequence
atgcgcgtggttatggccaggctgctgagcgagggggaacagggcatccctactgcttgtgccgcttttgcccagcaacccgcaggcccacggcgtggtctcgctggggtcggggaggggggtccacagtgtagctgggtaaattatcggtgcaccttggaattcctggtcagtctgctgggaaccgaccttgccaggggccgaggaaattcagccagtgggcctactgcccctgctgattcgaaacagctctcctgtaaaaccttcatcgccgttctgagcctgtctaaggaatag

SEQ ID NO: 265206 - DNA, 1917 bp, Artificial Sequence
  derived and/or modified sequence
atggccggcggcagcgccaccacctggggctaccccgtggccctgctgctgctggtggccaccctgggcctgggcagatggctgcagcccgaccccggcctgcccggcctgagacacagctacgactgcggcatcaagggcatgcagctgctggtgttccccagacccggccagaccctgagattcaaggtggtggacgagttcggcaacagattcgacgtgaacaactgcagcatctgctaccactgggtgaccagcagaccccaggagcccgccgtgttcagcgccgactacagaggctgccacgtgctggagaaggacggcagattccacctgagagtgttcatggaggccgtgctgcccaacggcagagtggacgtggcccaggacgccaccctgatctgccccaagcccgaccccagcagaaccctggacagccagctggccccccccgccatgttcagcgtgagcaccccccagaccctgagcttcctgcccaccagcggccacaccagccagggcagcggccacgccttccccagccccctggaccccggccacagcagcgtgcaccccacccccgccctgcccagccccggccccggccccaccctggccaccctggcccagccccactggggcaccctggagcactgggacgtgaacaagagagactacatcggcacccacctgagccaggagcagtgccaggtggccagcggccacctgccctgcatcgtgagaagaaccagcaaggaggcctgccagcaggccggctgctgctacgacaacaccagagaggtgccctgctactacggcaacaccgccaccgtgcagtgcttcagagacggctacttcgtgctggtggtgagccaggagatggccctgacccacagaatcaccctggccaacatccacctggcctacgcccccaccagctgcagccccacccagcacaccgaggccttcgtggtgttctacttccccctgacccactgcggcaccaccatgcaggtggccggcgaccagctgatctacgagaactggctggtgagcggcatccacatccagaagggcccccagggcagcatcaccagagacagcaccttccagctgcacgtgagatgcgtgttcaacgccagcgacttcctgcccatccaggccagcatcttccccccccccagccccgcccccatgacccagcccggccccctgagactggagctgagaatcgccaaggacgagaccttcagcagctactacggcgaggacgactaccccatcgtgagactgctgagagagcccgtgcacgtggaggtgagactgctgcagagaaccgaccccaacctggtgctgctgctgcaccagtgctggggcgcccccagcgccaaccccttccagcagccccagtggcccatcctgagcgacggctgccccttcaagggcgacagctacagaacccagatggtggccctggacggcgccacccccttccagagccactaccagagattcaccgtggccaccttcgccctgctggacagcggcagccagagagccctgagaggcctggtgtacctgttctgcagcaccagcgcctgccacaccagcggcctggagacctgcagcaccgcctgcagcaccggcaccaccagacagagaagaagcagcggccacagaaacgacaccgccagaccccaggacatcgtgagcagccccggccccgtgggcttcgaggacagctacggccaggagcccaccctgggccccaccgacagcaacggcaacagcagcctgagacccctgctgtgggccgtgctgctgctgcccgccgtggccctggtgctgggcttcggcgtgttcgtgggcctgagccagacctgggcccagaagctgtgggagagcaacagacagtag

SEQ ID NO: 265207 - DNA, 1917 bp, Artificial Sequence
  derived and/or modified sequence
atggccggaggttctgctaccacctgggggtatccagtggcgctgctgttgctggtagctaccctgggcctgggcaggtggctgcaacccgatcctgggttacccgggttaaggcactcctacgattgtggcattaagggcatgcagttgcttgtctttcctagaccagggcagaccttgcgtttcaaggtggtcgatgagtttggtaacaggttcgatgtcaataattgtagcatatgttatcattgggttacttctcggccacaggaaccagccgttttttccgctgattacaggggttgtcacgtgcttgaaaaagacgggcgcttccatttaagagtttttatggaggccgtgctgccaaacggtcgggttgacgttgctcaggatgcaaccttgatctgccccaaacccgacccctcaagaacactggattctcagctcgcacctccggctatgtttagtgtttctactccgcagaccttgagctttcttccaacatccggtcataccagccaagggtcaggccacgcttttccttcgcccctcgatcccggacacagctcagtgcatccaacacccgcgctcccatccccaggcccagggccaaccctcgccaccctggcgcaacctcactggggcactctcgagcattgggacgtaaataaacgagattatattggtactcatctctcacaggaacagtgccaggtggcttccggacacttaccatgcatcgtgagacggacatccaaggaggcctgtcaacaggccgggtgctgttacgacaataccagggaggtcccttgctattacggaaacactgccacagtccagtgcttcagggacggctactttgtgctcgttgtgtcccaggagatggctctgacgcaccggatcactctggccaatatccatctggcttacgcccctacatcttgttcgcctacacagcacactgaggcattcgtcgttttctattttccgttgacccactgcggtacaactatgcaggttgctggggaccagctcatttacgagaactggcttgtgtcggggattcacattcaaaagggacctcaagggagcataacaagagactcaacattccagttgcatgttcggtgtgtgtttaacgccagcgatttcttgccaatccaagcctccatctttcctccaccaagccctgcacccatgacccagcctggccctctccggctcgagctgaggatcgctaaggatgagactttctccagttactacggcgaagatgactaccccatcgtgcgcctccttagagagccagttcacgtggaagtgagactgcttcagaggactgaccccaatctggtcttgctcctgcaccagtgctggggcgctccatcggccaacccatttcagcaacctcagtggcccatcctaagtgacggctgcccttttaaaggggatagctaccggacacagatggtcgcactggatggagctactccatttcaaagtcactatcagcgctttaccgtcgccaccttcgccctgctcgattccggtagccagcgagccttacgcggtttggtgtacttgttttgctccacatccgcctgtcatacatccggcctggaaacctgctccactgcatgttcgactggaactaccaggcaacggaggtcttctggccatagaaacgatactgctcggccacaggacattgtttcatccccgggtcctgttggttttgaggatagttatggacaggaacccacacttgggccgaccgatagcaacggaaattccagcctgagaccccttctgtgggccgtgttattactgcccgccgtggccctggtgctcggcttcggcgtgttcgtcggtttaagccagacttgggcacaaaagctctgggagagtaataggcagtag

SEQ ID NO: 265208 - DNA, 1917 bp, Artificial Sequence
  derived and/or modified sequence
atggccggcggcagcgccaccacctggggctaccctgtggccctgctgctgctggtggccaccctgggcctgggccgctggctgcagcctgaccccggcctgcccggcctgcggcacagctatgactgtggcatcaagggcatgcagctgctggtgttcccccggcccggccagaccctgcgcttcaaggtggtggatgaatttggaaacagatttgatgtgaacaactgcagcatctgctaccactgggtgaccagccggccccaggagcctgctgtgttttctgctgactaccggggctgccacgtgctggagaaggatggccgcttccacctgcgggtcttcatggaggccgtgctgcccaacggccgggtggatgtggcccaggatgccaccctcatctgccccaagccagaccccagcaggaccctggacagccagctggcccccccagccatgttttctgtgtccaccccccagaccctgtccttcctgcccaccagcggccacaccagccagggcagcggccacgccttccccagccccctggaccccggccacagctctgtgcaccccaccccagccctgcccagccctggccctggccccaccctggccaccctggcccagccccactggggcaccctggagcactgggatgtgaacaagagggactacatcggcacccacctgagccaggagcagtgccaggtggccagcggccacctgccctgcatcgtgcggaggaccagcaaggaggcctgccagcaggccggctgctgctatgacaacacccgggaggtgccctgctactacggcaacacagccaccgtgcagtgcttcagagatggctactttgtgctggtggtgtcccaggagatggccctgacccaccgcatcaccctggccaacatccacctggcctatgcccccaccagctgcagccccacccagcacacagaggcctttgtggtgttctacttccccctgacccactgcggcaccaccatgcaggtggccggggaccagctgatctatgagaactggctggtgtctggcatccacatccagaagggcccccagggcagcatcacccgggacagcaccttccagctgcacgtgcgctgtgtgttcaatgccagtgacttcctgcccatccaggccagcatcttccccccacccagccctgcccccatgacccagcccggccccctgcggctggagctgagaattgccaaggatgagaccttcagcagctactatggagaagatgactaccccatcgtgcggctgctgcgggagcctgtgcacgtggaggtgcggctgctgcagaggacagaccccaacctggtgctgctgctgcaccagtgctggggcgcccccagcgccaaccccttccagcagccccagtggcccatcctgagtgatggctgccccttcaagggggacagctaccgcacccagatggtggccctggatggagccacccccttccagagccactaccagcgcttcaccgtggccacctttgccctgctggacagcggcagccagagggccctgcggggcctggtgtacctgttctgcagcaccagcgcctgccacaccagcggcctggagacctgcagcacagcctgcagcacaggcaccacccggcagaggaggagcagcggccacagaaatgacacagcccggccccaggacatcgtgagcagccctggccctgtgggctttgaagattcctatggccaggagcccaccctgggccccacagacagcaatggaaacagcagcctgcggcccctgctgtgggccgtgctgctgctgcctgctgtggccctggtgctgggcttcggcgtgtttgtgggcctgagccagacctgggcccagaagctgtgggagagcaaccggcagtag

SEQ ID NO: 265209 - DNA, 1917 bp, Artificial Sequence
  derived and/or modified sequence
atggccggcggcagcgccaccacctggggctaccccgtggccctgctcctgcttgttgctacattaggcctcggacggtggttacagcccgaccctggcttgcccggtcttcgccactcatatgactgtggaatcaaaggtatgcagttactggtgtttccaaggcctggtcagacgctgcgcttcaaggtggtggacgagtttggaaatcggttcgacgtgaacaactgcagtatctgttaccactgggtaacttcgcgccctcaggagccagccgtattttcagcagattacaggggatgtcacgtgcttgagaaggatggccgcttccacttgagggttttcatggaggcagtgctgcccaacggtagagtagatgtggcacaggatgctactcttatctgcccaaagcctgacccttcccgcaccctcgattcacagctcgctcctcccgccatgttcagcgttagcacccctcagaccctatcgttcttaccaacttcggggcacacaagtcagggctctggccatgcctttccatctcccctcgaccctgggcatagctctgtgcaccctacacccgcgctgccttctcctggacctggccccactcttgcgacattggcccagccacattggggaacccttgaacattgggacgtgaacaagagggattacatcggcacccacctgtcccaagaacaatgtcaggtcgcgtctgggcacctgccgtgcatagtgaggaggactagcaaggaggcctgtcagcaggctggatgctgctatgataatactagagaggtaccgtgctactacggaaatacagcaactgtgcagtgtttccgcgacggctatttcgtgctggtggtttcgcaggagatggccctgacccacagaataaccctcgccaacattcatctcgcttacgcacccacgtcatgctctccgacgcaacacacagaggctttcgtcgtcttttactttcccttaacgcactgtgggaccaccatgcaagtggcgggagaccaactgatttacgaaaactggcttgtgtccggcatccacattcagaaaggaccacaagggtcaattacgcgcgacagcacttttcaactgcacgtgcggtgtgtgtttaatgcgagcgactttcttccaatccaggccagcatttttccacctccgtctcctgctcccatgacccagccgggccccctgcgtttggaactacgaatcgctaaggatgagaccttctctagctactacggagaggacgattatcctattgttagactgttgcgagaacccgtgcatgtcgaggtcagactgctgcagaggacagaccctaacctggtgctattgctccaccagtgctggggcgccccatcagccaaccctttccaacagcctcagtggcccatactaagtgatggatgccccttcaaaggtgactcctatagaacacaaatggtggccttggacggcgccaccccatttcaaagtcactatcaaagattcactgtggcaacattcgcactactggactccggcagccagcgcgccctaaggggtctggtttatttattctgctctactagcgcatgccacacatctggcctggaaacatgcagcactgcatgcagcaccggtactaccagacagagaagaagcagcgggcaccggaatgatacagcccgtccacaggacattgtctcgtcgccaggccctgttggcttcgaagactcttacggccaggaacccactttggggcctacggatagcaacggcaactcctccctgaggcctctgctttgggcagttctgctccttcccgctgtggccctggttctgggctttggcgtgtttgtaggcctatctcaaacttgggcccagaagctgtgggaatcaaataggcaatag

SEQ ID NO: 265210 - DNA, 1917 bp, Artificial Sequence
  derived and/or modified sequence
atggctggaggtagcgcaactacttgggggtaccctgtggcactgctgttactggtggctacgctggggctcggtcgctggttacaacccgaccctggactgcctggcctgcggcattcatacgattgcggcatcaagggcatgcagctgctggtattccccaggcccggtcagacgttaagattcaaggtcgtggatgagtttggaaatagatttgatgtgaacaattgctccatttgttaccactgggtgacctcccgcccacaggaaccagccgttttttccgcggattatcgcggatgccacgtgcttgaaaaagacggtcggtttcatctcagagtattcatggaagcggtacttcctaacggcagggtggacgtggcccaggacgcaactttgatttgtcctaaaccggacccttccagaaccctggactcccagctggctccccctgccatgttctctgttagcactcctcagacactgagttttctgcccactagcggacacacctctcaaggctccggtcacgccttcccatcgccacttgaccccggacattctagtgtccaccccacaccggctctgcccagccctggcccaggccctacgctggcgaccctggcccaaccgcactggggaacattagaacactgggatgtgaataagagagactacataggcactcacctgagccaggaacagtgtcaggttgcttccggccacctgccatgcatcgtgcggcgaacatccaaagaagcgtgtcaacaggcgggatgctgctacgacaacacccgggaggttccgtgctattacggcaacacagctacggtgcagtgctttagggacggttactttgtgcttgttgttagccaggaaatggccctcactcaccgaatcactttggccaatatccacctggcttatgcccctacttcatgctcccccactcagcacactgaggctttcgtggtcttctacttccccctgacccactgtggcacaacaatgcaagttgccggagaccagctgatttatgagaattggctggtatccgggatccacatccagaaaggcccacagggtagcatcacgcgagactctacttttcaactacatgttaggtgcgtttttaatgccagcgattttcttcccatacaggctagcatctttcctcccccttctccagcacccatgactcagcccggtcccctccgactggagctgcgcatcgctaaggatgagacattttccagttactacggggaggacgactatcccattgtaaggctgcttcgggagcccgtgcatgtggaagtgcggctgcttcagcgaaccgatccaaatctggtcctgctgcttcatcagtgctggggcgctcccagcgcaaatccttttcagcagccccagtggccaattctttccgacggatgtcctttcaaaggcgacagttatagaacccaaatggttgcgctagatggcgcaacccccttccagtctcactatcaaagattcacagtggctaccttcgccttgttagattcagggagccagagggccctccggggactggtgtacctgttctgttctacttcagcatgccacacaagtggcctcgaaacatgttcaaccgcttgcagtaccggcaccacacgacagcggaggtcctccgggcaccgcaatgatactgctaggccgcaggacatcgtttcttctcctggtcccgtgggattcgaggacagctacgggcaggaacccacactgggaccaacagactcgaatggaaacagttccttacggccattgctgtgggctgtgctcctcctcccagccgtggctctggttcttggtttcggcgttttcgttggcctgtctcagacctgggcccagaagctctgggaatcgaacaggcagtag

SEQ ID NO: 265211 - DNA, 1954 bp, Artificial Sequence
  derived and/or modified sequence
atggcaggaggctcagccacgacctggggttaccctgtggccctgctactgctggttgccaccctggggctgggtaggtggctccagcccgaccctggcctcccaggcctccggcacagctacgactgtgggatcaagggaatgcagctgctggtgttccccaggccaggccagactctccgcttcaaggtggtggatgaatttgggaaccgatttgatgtcaacaactgctccatctgctaccactgggtcacctccaggccgcaggagcctgcagtcttctcggccgattacagaggctgccacgtgctggagaaggatgggcgtttccacctgagggtgttcatggaggctgtgctgcccaatggtcgtgtggatgtggcacaagacgctactctgatctgtcccaaacctgacccctcccggactctggactcccagctggcaccacccgccatgttctctgtctcaaccccacaaaccctttccttcctccccacctctggccatacctcccaaggctctggccatgcctttcccagcccactggacccagggcacagctctgtccacccaacccctgctttaccatcccctggacctggacctaccctcgccaccctggctcaaccccactggggcaccttggaacactgggatgtgaacaaacgagattacataggtacccacctgagccaggagcagtgccaggtggcctcagggcacctcccctgcatcgtgagaagaacttcaaaagaagcctgtcagcaggctggctgctgctatgacaacaccagagaggttccctgttactatggcaacacagctactgtccagtgcttcagagatggctacttcgtcctcgtagtgtcccaagaaatggccttgacacacaggatcacactggccaacatccacctggcctatgcccccaccagctgctccccaacacagcacacggaagctttcgtggtcttctacttccctctcacccactgtggaaccacaatgcaggtggctggcgaccagctcatctatgagaactggctggtgtctggcatccacatccaaaaggggccacagggttccatcacgcgggacagcaccttccagcttcatgtgcgctgtgtcttcaacgccagtgacttcctgcccattcaggcatccattttcccacccccatcgcctgctcctatgacccagcccggccccctgcggcttgagctgcggattgccaaagacgagaccttcagctcgtactatggggaggatgactatcccatcgtgaggctgctccgagaaccagtccatgtggaggtccggcttctgcagaggacagaccccaacctggtcctgctgctgcaccagtgctggggcgctcccagtgccaaccccttccagcagccccagtggcccatcctgtcagacggatgccctttcaagggcgacagctacagaacccaaatggtagccttggacggggccacacctttccagtcgcactaccagcgattcactgttgctaccttcgccctcctggactcaggctcccagagagccctcagaggactggtttacttgttctgcagcacctctgcctgccacacctcagggctggagacttgctccactgcatgtagcactggcactacaagacagcgacgatcctcaggtcaccgtaatgacactgccaggccccaggacatcgtgagctctccggggccagtgggctttgaggattcttatgggcaggagcccacacttgggcccacagactccaatgggaactccagcctgagacctctcctttgggcggtccttttgctgccagctgttgccctggtccttgggtttggtgtctttgtgggcctgagccagacctgggcccagaagctctgggaaagcaacagacagtgaatgggcccaataaacaatcatttcaaacctactgaaa

SEQ ID NO: 265212 - DNA, 1569 bp, Artificial Sequence
  derived and/or modified sequence
ggattctgaagcggaaggagagctgtctcctccagctggtggaaactgcttcctatcctcctcctggagagcccaactcccagagcagatggcagaggagacctttagatggggcggtcacatgtcccagctggccttataacaactgtcccagggaactattaatagatctaccttacacacatctggactttcagatctgaaacgccctggtttggatgacagattatatggtgaacctacttttagagtgtagttcaactcatttgtcacatggatgagaaaatcagtccataaagggtttgctggggccaacaccagcctaagtggagagtaagcgtccattctcctagaccggcacttaaagcctggctgtcacccagccatcccgtctctgtgctggatggacaccaaaccccaaggccctcatctgcctttgtcccagctactgtccagtgcttcagagatggctacttcgtcctcgtagtgtcccaagaaatggccttgacacacaggatcacactggccaacatccacctggcctatgcccccaccagctgctccccaacacagcacacggaagctttcgtggtcttctacttccctctcacccactgtggaaccacaatgcaggtggctggcgaccagctcatctatgagaactggctggtgtctggcatccacatccaaaaggggccacagggttccatcacgcgggacagcaccttccagcttcatgtgcgctgtgtcttcaacgccagtgacttcctgcccattcaggcatccattttcccacccccatcgcctgctcctatgacccagcccggccccctgcggcttgagctgcggattgccaaagacgagaccttcagctcgtactatggggaggatgactatcccatcgtgaggctgctccgagaaccagtccatgtggaggtccggcttctgcagaggacagaccccaacctggtcctgctgctgcaccagtgctggggcgctcccagtgccaaccccttccagcagccccagtggcccatcctgtcagacggatgccctttcaagggcgacagctacagaacccaaatggtagccttggacggggccacacctttccagtcgcactaccagcgattcactgttgctaccttcgccctcctggactcaggctcccagagagccctcagaggactggtttacttgttctgcagcacctctgcctgccacacctcagggctggagacttgctccactgcatgtagcactggcactacaagacagcgacgatcctcaggtcaccgtaatgacactgccaggccccaggacatcgtgagctctccggggccagtgggctttgaggattcttatgggcaggagcccacacttgggcccacagactccaatgggaactccagcctgagacctctcctttgggcggtccttttgctgccagctgttgccctggtccttgggtttggtgtctttgtggcctgagccagacctgggcccagaagctctgggaaagcaacagacagtgaatgggcccaataaacaatcatttcaaacctactg

SEQ ID NO: 265213 - protein, 703 aa, Artificial Sequence
  derived and/or modified sequence
MAASEVAGVVANAPSPPESSSLCASKSDEGLPDGLSTKDSAQKQKNSPLLSVSSQTITKENNRNVHLEHSEQNPGSSAGDTSAAHQVVLGENLIATALCLSGSGSQSDLKDVASTAGEEGDTSLRESLHPVTRSLKAGCHTKQLASRNCSEEKSPQTSILKEGNRDTSLDFRPVVSPANGVEGVRVDQDDDQDSSSLKLSQNIAVQTDFKTADSEVNTDQDIEKNLDKMMTERTLLKERYQEVLDKQRQVENQLQVQLKQLQQRREEEMKNHQEILKAIQDVTIKREETKKKIEKEKKEFLQKEQDLKAEIEKLCEKGRREVWEMELDRLKNQDGEINRNIMEETERAWKAEILSLESRKELLVLKLEEAEKEAELHLTYLKSTPPTLETVRSKQEWETRLNGVRIMKKNVRDQFNSHIQLVRNGAKLSSLPQIPTPTLPPPPSETDFMLQVFQPSPSLAPRMPFSIGQVTMPMVMPSADPRSLSFPILNPALSQPSQPSSPLPGSHGRNSPGLGSLVSPHGPHMPPAASIPPPPGLGGVKASAETPRPQPVDKLEKILEKLLTRFPQCNKAQMTNILQQIKTARTTMAGLTMEELIQLVAARLAEHERVAASTQPLGRIRALFPAPLAQISTPMFLPSAQVSYPGRSSHAPATCKLCLMCQKLVQPSELHPMACTHVLHKECIKFWAQTNTNDTCPFCPTLK

SEQ ID NO: 265214 - protein, 146 aa, Artificial Sequence
  derived and/or modified sequence
MAASEVAGVVANAPSPPESSSLCASKSDEGLPDGLSTKDSAQKQKNSPLLSVSSQTITKENNRNVHLEHSEQNPGSSAGDTSAAHQVVLGENLIATALCLSGSGSQSDLKDVASTAGEEGDTSLRESLHPVTRSLKAGCHTKQLAS

SEQ ID NO: 265215 - DNA, 2112 bp, Artificial Sequence
  derived and/or modified sequence
atggccgccagcgaggtggccggcgtggtggccaacgcccccagcccccccgagagcagcagcctgtgcgccagcaagagcgacgagggcctgcccgacggcctgagcaccaaggacagcgcccagaagcagaagaacagccccctgctgagcgtgagcagccagaccatcaccaaggagaacaacagaaacgtgcacctggagcacagcgagcagaaccccggcagcagcgccggcgacaccagcgccgcccaccaggtggtgctgggcgagaacctgatcgccaccgccctgtgcctgagcggcagcggcagccagagcgacctgaaggacgtggccagcaccgccggcgaggagggcgacaccagcctgagagagagcctgcaccccgtgaccagaagcctgaaggccggctgccacaccaagcagctggccagcagaaactgcagcgaggagaagagcccccagaccagcatcctgaaggagggcaacagagacaccagcctggacttcagacccgtggtgagccccgccaacggcgtggagggcgtgagagtggaccaggacgacgaccaggacagcagcagcctgaagctgagccagaacatcgccgtgcagaccgacttcaagaccgccgacagcgaggtgaacaccgaccaggacatcgagaagaacctggacaagatgatgaccgagagaaccctgctgaaggagagataccaggaggtgctggacaagcagagacaggtggagaaccagctgcaggtgcagctgaagcagctgcagcagagaagagaggaggagatgaagaaccaccaggagatcctgaaggccatccaggacgtgaccatcaagagagaggagaccaagaagaagatcgagaaggagaagaaggagttcctgcagaaggagcaggacctgaaggccgagatcgagaagctgtgcgagaagggcagaagagaggtgtgggagatggagctggacagactgaagaaccaggacggcgagatcaacagaaacatcatggaggagaccgagagagcctggaaggccgagatcctgagcctggagagcagaaaggagctgctggtgctgaagctggaggaggccgagaaggaggccgagctgcacctgacctacctgaagagcaccccccccaccctggagaccgtgagaagcaagcaggagtgggagaccagactgaacggcgtgagaatcatgaagaagaacgtgagagaccagttcaacagccacatccagctggtgagaaacggcgccaagctgagcagcctgccccagatccccacccccaccctgccccccccccccagcgagaccgacttcatgctgcaggtgttccagcccagccccagcctggcccccagaatgcccttcagcatcggccaggtgaccatgcccatggtgatgcccagcgccgaccccagaagcctgagcttccccatcctgaaccccgccctgagccagcccagccagcccagcagccccctgcccggcagccacggcagaaacagccccggcctgggcagcctggtgagcccccacggcccccacatgccccccgccgccagcatcccccccccccccggcctgggcggcgtgaaggccagcgccgagacccccagaccccagcccgtggacaagctggagaagatcctggagaagctgctgaccagattcccccagtgcaacaaggcccagatgaccaacatcctgcagcagatcaagaccgccagaaccaccatggccggcctgaccatggaggagctgatccagctggtggccgccagactggccgagcacgagagagtggccgccagcacccagcccctgggcagaatcagagccctgttccccgcccccctggcccagatcagcacccccatgttcctgcccagcgcccaggtgagctaccccggcagaagcagccacgcccccgccacctgcaagctgtgcctgatgtgccagaagctggtgcagcccagcgagctgcaccccatggcctgcacccacgtgctgcacaaggagtgcatcaagttctgggcccagaccaacaccaacgacacctgccccttctgccccaccctgaagtag

SEQ ID NO: 265216 - DNA, 441 bp, Artificial Sequence
  derived and/or modified sequence
atggccgccagcgaggtggccggcgtggtggccaacgcccccagcccccccgagagcagcagcctgtgcgccagcaagagcgacgagggcctgcccgacggcctgagcaccaaggacagcgcccagaagcagaagaacagccccctgctgagcgtgagcagccagaccatcaccaaggagaacaacagaaacgtgcacctggagcacagcgagcagaaccccggcagcagcgccggcgacaccagcgccgcccaccaggtggtgctgggcgagaacctgatcgccaccgccctgtgcctgagcggcagcggcagccagagcgacctgaaggacgtggccagcaccgccggcgaggagggcgacaccagcctgagagagagcctgcaccccgtgaccagaagcctgaaggccggctgccacaccaagcagctggccagctag

SEQ ID NO: 265217 - DNA, 2112 bp, Artificial Sequence
  derived and/or modified sequence
atggcggccagtgaggtggccggcgtggtggcaaacgctccgagccctccggagtcctcatccttatgcgctagcaagtcagatgagggcctgccagatggcctgagcactaaggactcggcccagaaacagaagaactctcctctcctcagcgtgtcctcccagacaataaccaaggagaataatcgcaacgttcacctggaacatagtgagcagaatcccggatccagcgcaggagatacatcggccgcccaccaggttgtactcggtgaaaatctgatcgccaccgccttgtgcctctcaggcagcgggagtcaatctgatctgaaggatgtggcaagcaccgctggagaagaaggagacacgagtctgcgcgagagcctgcatccagtaacacgtagcttgaaggcaggctgtcacaccaaacagctggcttcccgaaactgctccgaggaaaagagcccccagacttctatcctaaaggagggcaaccgggatacctccctcgacttcaggccagtggtctctcctgctaacggcgtggaaggggtaagggtcgatcaggacgacgaccaggattcctcaagcctcaagcttagtcagaacatcgctgtgcagacggattttaagactgccgatagcgaagtcaataccgatcaggacatcgaaaaaaacctcgacaaaatgatgaccgagagaaccctccttaaggagcgttaccaggaggtgcttgacaaacagcggcaggttgaaaatcaactccaggtgcagctgaaacagctgcaacagcgcagagaggaagagatgaaaaaccatcaggagattctcaaagcaattcaggacgtcaccattaaacgggaagagaccaagaaaaaaattgagaaggaaaaaaaggagtttcttcagaaggagcaggacctcaaagccgagattgaaaagctgtgtgaaaaagggagacgagaagtctgggagatggagctggaccgtcttaagaaccaggacggtgaaattaatagaaacattatggaggaaactgagagagcctggaaggccgagatacttagtctggaaagccgcaaggagctcctcgtgctcaagctggaggaagctgaaaaggaagctgagttacatctgacgtacctgaagtccaccccaccaaccctggaaaccgtgagatctaagcaggagtgggaaacccgcctcaatggcgtgaggatcatgaagaaaaacgtgagagaccagttcaacagccatatacagctggtgcgcaatggtgccaagctcagcagccttcctcagattcccacacccacactaccaccccctccgtctgagacagattttatgttgcaggtcttccagccttcccccagcctcgcccctagaatgccgttctcgattggtcaggttactatgccaatggtgatgcctagcgctgaccctcgaagtctgtcattccctattctgaacccagctttaagccagccttcacagccctccagccctctgccagggagccacggcaggaacagcccgggtttaggctcattggtaagtcctcacggcccgcatatgccgccagcagcgagcatcccaccaccaccaggactgggcggggtcaaagcctccgctgagacccccaggccacagcctgttgataaactggagaagatcttggaaaagttgctcactagattcccgcaatgtaacaaggcccagatgacaaatatactccaacagatcaagaccgctcgaaccaccatggcaggactgaccatggaggagctgatccagctcgtcgccgcaagactcgccgagcacgaacgggtggcggcttcaacacagccactagggagaatccgtgctctgttccccgcccccctggcccaaatctccacgccaatgtttcttcctagcgcccaggtgtcctatcctggcaggtcttcccatgcccccgccacctgcaaactatgcttgatgtgtcagaagttagtccagccaagtgagctgcacccaatggcttgtacacatgtcttgcataaggagtgtattaagttctgggcccaaactaacaccaacgatacttgtccgttctgtcctacccttaaatag

SEQ ID NO: 265218 - DNA, 2112 bp, Artificial Sequence
  derived and/or modified sequence
atggctgcgtcagaggtagccggggtggtggccaacgcgccgagccctcccgagagtagcagcctatgtgcctccaagtctgacgagggtctgcccgatgggctgtccactaaggactccgctcagaaacagaaaaactcacctctcctgagcgtgtctagccaaacgatcaccaaggagaacaacagaaatgtgcatcttgagcatagcgagcaaaatccaggctcttctgccggggacacttccgctgcgcaccaggttgttctgggagagaatctgatcgccacagcgttgtgcctttccggcagcggcagccagtccgacctcaaggacgtggcctctactgcgggagaagaaggagatacatctctgagagagtcattgcacccggtgacccgcagtttgaaggccggttgccacacaaaacagctagctagtcggaattgctcagaggaaaaaagcccccaaacaagcatcttaaaagagggaaaccgggacacgtcgcttgacttccgccctgttgtcagccccgccaatggggtggagggtgtgagggtggatcaagatgatgatcaagactcttcaagtctgaagttgagtcagaacattgccgtgcagactgattttaaaacagccgactctgaggtcaatacagaccaagatatagagaaaaacctcgataagatgatgacagagagaaccttgttgaaagagaggtaccaggaggtgttagacaaacagcgtcaggttgagaatcagctccaagtgcagctgaagcagcttcagcagaggagggaggaagaaatgaagaaccaccaggaaatactcaaggcaattcaagacgtgaccatcaaacgagaggagaccaagaaaaagatagagaaggaaaaaaaggaattcctccagaaggaacaggacttgaaggcagaaatagaaaagctgtgcgagaagggccggcgggaggtatgggagatggagctggaccggctgaaaaatcaggacggcgaaatcaatcgaaatatcatggaggagactgaacgtgcttggaaggcagagattctatcccttgaatccagaaaggaattactggtgctgaagctggaggaggcggaaaaggaggccgagctgcacctgacatacctcaaatcaacgccccctactctggaaaccgttagatcaaagcaggaatgggaaacgcgactgaatggagtgcgaatcatgaagaagaatgtgcgggatcagtttaactctcacatccagcttgtgagaaacggagcgaaactctcttctctgccacagatccctacgccaacgttgcccccccccccctccgaaaccgattttatgctccaagtgttccagccgtcaccgtccctggctccaagaatgcccttttcgattggccaggtgaccatgccaatggtgatgccgtccgccgatcctcggtctctcagcttcccgattttaaatccggccctttctcagcctagccaacccagctcgccactgccaggctctcatggcaggaatagcccaggcctaggatccctggtgtctccgcatgggcctcacatgccaccagcggctagcatccctccacccccaggactcggaggggttaaggccagcgccgagacgcctcggccccagcctgtagataagctggagaagattctcgaaaagctcttaaccagattcccacagtgtaataaggctcagatgaccaacatcctgcagcagatcaagactgcccgcacgaccatggcggggctgacaatggaagagctcatccaactcgtcgccgcccgcctggctgagcatgagagagtagccgcaagcactcagcctctcggacgcatacgcgcattatttcctgcaccattggcccaaatctccacaccaatgtttttaccctctgcccaggtgagctacccgggcaggagtagccatgctcccgcaacatgtaaactctgcttaatgtgtcagaagcttgttcagcccagtgagcttcatcccatggcgtgcacgcacgtcttgcataaagaatgcataaaattctgggcacagaccaatacaaacgatacctgtcctttctgtcccacactcaaatag

SEQ ID NO: 265219 - DNA, 441 bp, Artificial Sequence
  derived and/or modified sequence
atggccgcgtcagaagttgcaggggtggtggctaatgccccaagtccacctgagagctcctccctgtgcgcgtcaaaatctgatgaggggttaccggacgggctgagcacgaaggattctgcccagaagcagaagaatagtccgctgcttagcgttagcagtcagaccattactaaggaaaataatcgcaacgtacatttggaacactcggagcaaaacccaggctcctctgccggtgacacttccgcagcacatcaggtggtgttaggggaaaacctgattgccactgccctgtgcctgtcaggatccgggtcccagtccgacctcaaagacgtggccagcacagctggcgaagagggagataccagcctgcgggaatctctccatcctgttacccgatctctgaaggccggttgtcacaccaaacagctcgcttcatag

SEQ ID NO: 265220 - DNA, 2112 bp, Artificial Sequence
  derived and/or modified sequence
atggccgccagcgaggtggccggcgtggtggccaatgcccccagccccccagagagcagcagcctgtgtgccagcaagagtgatgagggcctgcctgatggcctgagcaccaaggacagcgcccagaagcagaagaacagccccctgctgtctgtgagcagccagaccatcaccaaggagaacaacagaaatgtgcacctggagcacagcgagcagaaccctggcagcagcgctggggacaccagcgctgcccaccaggtggtgctgggagaaaatctcatcgccacagccctgtgcctgagcggcagcggcagccagagcgacctgaaggatgtggccagcacagctggggaggagggggacaccagcctgcgggagagcctgcaccctgtgaccaggagcctgaaggccggctgccacaccaagcagctggccagcaggaactgcagcgaggagaagagcccccagaccagcatcctgaaggagggcaacagagacaccagcctggacttccggcctgtggtgtccccagccaatggagtggagggcgtgcgggtggaccaggatgatgaccaggacagcagcagcctgaagctgagccagaacattgctgtgcagacagacttcaagacagctgacagcgaggtgaacacagaccaggacatcgagaagaacctggacaagatgatgacagagaggaccctgctgaaggagcgctaccaggaggtgctggacaagcagaggcaggtggagaaccagctgcaggtgcagctgaagcagctgcagcagaggcgggaggaggagatgaagaaccaccaggagatcctgaaggccatccaggatgtgaccatcaagcgggaggagaccaagaagaagattgagaaggagaagaaggagttcctgcagaaggagcaggacctgaaggccgagattgagaagctgtgtgagaagggcagaagagaggtgtgggagatggagctggaccggctgaagaaccaggatggagagatcaacagaaacatcatggaggagacagagcgggcctggaaggccgagatcctgagcctggagagcaggaaggagctgctggtgctgaagctggaggaggccgagaaggaggccgagctgcacctgacctacctgaagagcaccccacccaccctggagaccgtgcgcagcaagcaggagtgggagacccggctgaatggagtgcgcatcatgaagaagaatgtgcgggaccagttcaacagccacatccagctggtgagaaatggagccaagctgagcagcctgccccagatccccacccccaccctgcccccaccacccagcgagacagacttcatgctgcaggtgttccagcccagccccagcctggcccccaggatgcccttcagcatcggccaggtgaccatgcccatggtgatgcccagcgctgaccccaggagcctgtccttccccatcctgaacccagccctgagccagcccagccagcccagcagccccctgcccggcagccatggaagaaacagccctggcctgggcagcctggtgagcccccacggcccccacatgcccccagctgccagcatccccccacctcctggcctgggcggcgtgaaggccagcgctgagaccccccggccccagcctgtggacaagctggagaagatcctggagaagctgctgacccgcttcccccagtgcaacaaggcccagatgaccaacatcctgcagcagatcaagacagcccggaccaccatggccggcctgaccatggaggagctgatccagctggtggccgcccggctggccgagcacgagcgggtggccgccagcacccagcccctgggccgcatccgggccctcttccctgcccccctggcccagatcagcacccccatgttcctgcccagcgcccaggtgtcctacccaggccgcagcagccacgccccagccacctgcaagctgtgcctgatgtgccagaagctggtgcagcccagcgagctgcaccccatggcctgcacccacgtgctgcacaaggagtgcatcaagttctgggcccagaccaacaccaatgacacctgccccttctgccccaccctgaagtag

SEQ ID NO: 265221 - DNA, 441 bp, Artificial Sequence
  derived and/or modified sequence
atggccgccagcgaggtggccggcgtggtggccaatgcccccagccccccagagagcagcagcctgtgtgccagcaagagtgatgagggcctgcctgatggcctgagcaccaaggacagcgcccagaagcagaagaacagccccctgctgtctgtgagcagccagaccatcaccaaggagaacaacagaaatgtgcacctggagcacagcgagcagaaccctggcagcagcgctggggacaccagcgctgcccaccaggtggtgctgggagaaaatctcatcgccacagccctgtgcctgagcggcagcggcagccagagcgacctgaaggatgtggccagcacagctggggaggagggggacaccagcctgcgggagagcctgcaccctgtgaccaggagcctgaaggccggctgccacaccaagcagctggccagctag

SEQ ID NO: 265222 - DNA, 2112 bp, Artificial Sequence
  derived and/or modified sequence
atggccgccagcgaggtggccggcgtggtggccaacgcccccagccctccagaaagtagtagtctttgtgctagcaaatccgatgaaggactgcctgacggactgtcaaccaaagattccgctcaaaagcagaaaaactctccactgttgtccgtgtcaagccagaccattaccaaggaaaacaatcgaaacgtgcacctcgaacacagcgagcagaaccccgggtcatctgcgggcgacacatcggccgcccaccaggttgtgctcggggaaaacctgatcgcaacagccctgtgcttgtccggttctggatcccagagcgacctgaaggatgtggcatccacagcaggagaggagggtgataccagcttaagggagagtcttcaccccgtcacgagaagcttaaaagcaggatgccacaccaagcagctcgcctccaggaactgctccgaagagaagtctccacagacttcgatcttgaaagaaggaaaccgagataccagtctcgactttcgccccgtggttagcccagcaaatggtgtagagggtgtgagagttgaccaggatgacgaccaggattctagctctctgaaactgtctcaaaacattgccgtgcagacagacttcaaaacagccgatagcgaggtcaacactgatcaagatatcgagaaaaacttggataaaatgatgacagagagaaccttgctcaaagaaagatatcaggaagttttggacaaacagagacaggtagagaatcagttgcaagttcagctgaagcagctccaacagaggagagaggaggaaatgaagaaccatcaggaaattctgaaagccatccaggacgttaccataaagagggaagagacgaaaaaaaagatagagaaagagaagaaggaattcttgcagaaggaacaggatctgaaggccgagatcgagaagttgtgcgagaagggcagacgtgaagtttgggagatggaactagatcgcttgaaaaaccaagacggggaaattaatagaaacatcatggaagaaactgagcgcgcctggaaagccgaaatccttagtcttgaatccagaaaagagctcctggtcctgaaactggaagaagcagaaaaagaggctgaactgcatctgacctacctcaagagcactcccccgactttagaaaccgtccgttctaagcaagagtgggaaactaggctcaacggcgtccgaatcatgaagaaaaatgtgcgggaccaattcaactcacacatccagctggtgcggaatggtgccaaactgtcatcccttcctcagattcccacgcccacactgccgccgccacccagcgagaccgattttatgctgcaggtgttccagccatccccttctttggcacctaggatgcccttcagcatcggccaggtgacaatgccaatggtgatgcccagtgcggaccccaggtcactgtcttttccgatactgaacccagcactgtcacagcccagtcagcctagtagccctcttcccggaagccatggccgcaattcccccgggctaggttccctcgtgagccctcacggtccacacatgccacccgccgcttcaatcccgccaccacctgggttgggaggcgtgaaggcatcagccgaaacgccacggccccaaccagtcgacaagctcgaaaaaattttggagaagctgttaacacgattcccccagtgtaacaaggcacagatgactaatattctgcaacagatcaagacggcaagaactaccatggccggactgacaatggaagagctgatccagctggttgcagctaggttagctgagcacgagagagtggccgcctcgactcagcctttggggcgaattagagcactctttcccgcaccattggctcagataagtacccccatgttcctgccgtcagcccaggttagctatccagggaggtcctctcacgctcccgcaacctgtaagctatgcctgatgtgtcaaaagcttgtgcaaccatcagagctgcatcccatggcatgcacgcatgtgctccacaaggagtgtatcaagttctgggctcagactaacactaatgacacatgtccgttttgtccaaccctaaagtag

SEQ ID NO: 265223 - DNA, 2112 bp, Artificial Sequence
  derived and/or modified sequence
atggccgccagcgaggtggccggcgtggtggccaacgcccccagccctccagagtcgtcttcactgtgtgcgagcaagtcggatgaagggttgccggacggtctgtctaccaaagactccgcccagaagcagaaaaatagccctttactatctgtttcgtcgcagactataaccaaagagaacaaccgcaacgttcatttagagcattctgagcagaacccgggctcttccgccggcgatactagcgccgcccaccaagtggtgttaggagagaatctaatcgcaacagctctctgcctctcagggtccggctctcagagtgacctcaaagacgtggctagcactgccggtgaggagggggacacctctctaagggaatctttgcaccctgtcacccgctccctcaaggcgggatgccatacaaagcagctagcctcccgaaattgctccgaggaaaaatctccccagactagcattctgaaagaggggaaccgggatacaagcctcgatttccggcccgtcgtgagtccagctaatggagtggaaggggttagagtggatcaggatgacgatcaggactctagctccttgaaactgtcccaaaatattgccgttcaaacggacttcaaaactgcagattctgaggtcaacaccgatcaggatatcgagaagaacctggataaaatgatgactgaaagaacccttctgaaagagcgctatcaggaagttttagacaaacagcgacaggtggagaaccagctgcaggtccagttgaagcaattgcagcagcgaagggaggaggagatgaagaaccaccaggagattcttaaggccatccaggacgtgaccatcaaaagggaggagacaaaaaaaaaaattgaaaaagagaagaaggaatttttacagaaagaacaagacctgaaggccgaaattgagaaattgtgtgaaaaaggccggagggaggtgtgggagatggagttagacagactgaaaaatcaggatggagagataaatcgtaacatcatggaggagacagagcgagcgtggaaagctgagatactgagcttggagtctcggaaagagctgctagtgctgaagttggaggaggcggaaaaggaggctgagttgcacctaacttacttgaagtctacaccaccaactctggagactgttcgcagcaagcaggagtgggaaaccagattaaatggtgtgcggattatgaagaaaaacgtccgcgaccagtttaattctcatatccagttggtgagaaacggagccaaactaagttcactgcctcagattccaacccccacactgcccccaccgccttcagagaccgattttatgctccaggtatttcagcccagtccctcactggcaccgcggatgcctttttccatcgggcaggtgaccatgcctatggtgatgccctctgctgaccccagaagtctgagtttccctatcctgaatcccgccttgtcacaaccgtcgcaaccatcttcacctctgccaggaagtcatggccggaacagtccgggtctggggtccctcgtatcaccacatgggccacacatgcccccagcggcgtccattcctcccccccctggtttgggaggtgtcaaggcttccgccgaaacccctcgcccccaaccagtggacaaactggagaaaattctagagaagttgctgaccaggttccctcagtgtaataaggcacagatgactaacattctccaacaaataaaaacagctagaaccaccatggccgggttgaccatggaagaacttattcagttggtcgcagcccgtctcgccgaacacgagcgcgtcgccgcctccacacagcccctggggaggattcgcgctctgttccctgctcctctggcacaaatctcgaccccaatgtttctcccatccgctcaggtgtcatatccaggacggagcagccacgcgccagccacttgtaaactgtgtctgatgtgccaaaagctcgtgcagccctccgagctacatccaatggcatgcacccatgtcctgcataaggagtgtattaaattttgggctcagactaacaccaatgatacatgccccttttgtcctactctgaagtag

SEQ ID NO: 265224 - DNA, 441 bp, Artificial Sequence
  derived and/or modified sequence
atggccgccagcgaggtggccggcgtggtggccaacgcccccagccctccagagagcagctccttgtgcgcctctaagtccgacgagggactcccggatgggctgagcactaaagatagcgcgcagaagcagaaaaactcccctctgctatccgtctcttcccagacaatcactaaggagaataatcgcaatgtacacctagaacacagcgaacagaatcccggctcatctgctggcgacacatcagcagcacaccaggtggttctgggcgaaaatctgatcgccacagccctgtgcctttccggaagcggaagccaaagtgatctaaaagacgtcgcctcaacagcaggggaggagggcgacacttctcttcgggagagcttgcatcccgtgaccaggagtctcaaggccgggtgtcacaccaagcagctggcttcctag

SEQ ID NO: 265225 - DNA, 2112 bp, Artificial Sequence
  derived and/or modified sequence
atggctgcctctgaggtcgctggggtggtggcaaacgctccttcccctcccgaatctagtagcctgtgcgcaagcaagagtgacgagggcttacctgacgggctctctactaaggactcagcgcagaagcaaaagaatagtccgcttttatccgtgtcgtcacagaccataaccaaagagaataacagaaatgttcacctcgagcattccgaacagaaccctggatcttctgctggcgacacctcagctgcccatcaagtggtattaggcgagaacttaatcgctactgctctttgcctctcaggttccggttcccagagcgatttgaaagatgtagccagcactgctggcgaggaaggcgacacgtcattaagagagagcctgcatcccgtaaccagaagcctaaaagccggatgtcatactaagcaactggcgtcgcgcaactgctctgaggaaaagtcacctcagacctccatacttaaggaggggaatcgagacacgtcgttggacttcaggcccgtggtgagccccgcaaacggcgtcgaaggagtacgtgtcgaccaggacgacgaccaagactcgtcctccctgaagctttcccaaaatattgcggtccaaacagatttcaagacagctgatagcgaggtgaataccgatcaagacatagaaaaaaacctcgataaaatgatgaccgagaggaccctgctgaaggaacggtatcaggaggtcttggacaaacaacggcaagtggagaaccagctgcaagtccagctcaagcagctgcagcagcgccgagaggaggagatgaagaatcatcaggagatactgaaagccatacaggacgttacaatcaagagagaagagaccaagaaaaagatagaaaaagagaaaaaagaatttctgcagaaagagcaagatctgaaggccgagattgagaagctgtgtgagaagggaagacgggaggtgtgggagatggaactcgataggctgaaaaaccaagacggtgagataaatcgtaatataatggaagagaccgagcgggcatggaaagcggagatcctgtcactggaatctaggaaagaacttctagttctgaaactagaggaagccgaaaaagaggctgaactacacctgacgtatctcaaaagtactccacccacacttgagaccgtacggtctaaacaagagtgggagacgcgattgaatggggttaggattatgaaaaagaacgtccgtgatcagtttaacagccacatacagctggtcagaaacggtgctaagctgagctccctcccgcagattccgactccgacccttccccctcccccaagcgagactgacttcatgttacaggtgttccagccctcgccctccttggcaccaagaatgccttttagcatcgggcaggtgactatgcccatggtgatgccatccgctgaccctcgcagcttatctttccccatcttaaatcctgccctgtctcagccctcccagccaagttcccccctgcccggtagccacggccgaaatagtcctgggctgggctcactcgtttcacctcatggcccacacatgcctccagcggctagtattccacctccccctggactgggtggggtaaaggcctcggccgaaactcccaggccacagccagtagacaagctggaaaagattctggagaagctcctgactcggtttcctcagtgcaataaagcccaaatgaccaacattctgcagcagattaaaactgcacgaacgactatggccggattaaccatggaggaattgatccagctggtcgccgcaaggctggccgaacacgagcgggtggccgcttccacccagccgctcggcagaattcgggcactttttcccgcacccctggcccagatcagtacccctatgtttttacctagcgcccaggtaagttatcctggccgaagttctcatgcacccgcaacatgcaaactgtgcctcatgtgccagaaactggttcaaccctctgagctccaccctatggcctgtacccacgtcttgcacaaagagtgtatcaagttttgggctcagactaacaccaacgacacatgcccattctgtcctacactgaaatag

SEQ ID NO: 265226 - DNA, 2112 bp, Artificial Sequence
  derived and/or modified sequence
atggccgcatctgaagtggcaggcgttgttgctaacgcgccttctcccccagagtcctccagcctctgcgccagcaaatctgatgaagggctccccgacggactgtctactaaagactctgcacagaaacagaagaatagcccactcctctccgtaagtagccagaccataacgaaggagaacaatcgcaacgttcacctggagcattcagagcagaatcctgggtcctccgcaggggacacgtcagcggctcatcaggtcgtcctgggcgagaacctaattgctaccgctctgtgtctgtcaggctctggaagtcagagtgacctaaaggacgtggcatctacggcgggtgaggaaggagatacctctctgagggaatctctgcatcctgtcaccagatctcttaaggccggttgccatacaaaacaattagcttctcgcaactgtagcgaagagaagagtccccagacaagcattctgaaagaaggcaaccgagacacatctctcgacttcaggcctgtcgtgtcaccagccaatggtgtggagggtgtgcgcgtcgatcaggacgacgatcaggactccagttcattaaaattgtcacagaatatcgccgtccagactgattttaaaacagccgactccgaagtcaacaccgaccaggacatagaaaagaacttggacaagatgatgacagaacgaacactcttgaaggagaggtaccaggaagtccttgataagcagaggcaggtggaaaatcagctgcaggtacagctgaagcagctccagcaacgcagagaggaagagatgaagaaccatcaggaaatcttgaaagcaattcaggatgttactattaaaagagaggagacgaagaaaaaaatcgagaaggaaaaaaaggagttcctccagaaggaacaggacctcaaggccgagattgaaaagttgtgcgaaaagggaagacgcgaagtttgggaaatggagctggaccggctaaaaaatcaagacggtgaaattaaccggaacatcatggaagaaacagaaagagcgtggaaagctgagattctgagtctggaaagtaggaaggagcttttggtcctcaagctcgaggaagccgagaaagaggcagagctgcacctgacgtacctgaagtctacaccccctactctggaaacagttcgatccaaacaggaatgggagactaggctcaatggcgttcggataatgaaaaagaatgtacgcgatcagtttaactctcatatccagctggtccggaacggcgcaaagctgagctcactccctcaaattccgacacccactttgccaccccctccttccgaaacggactttatgctacaggtgttccagccctccccctcccttgcgccacggatgccctttagtattggacaggtcaccatgccaatggtgatgccatctgctgaccccaggagtttgagctttccgattctgaatccagctttgtcccagccctcgcagccttctagccctctgccgggtagtcatgggaggaactctcccggactcgggagtttggtgtcacctcacggtccgcacatgcccccagccgctagcatcccgccacctccaggtctgggcggtgtgaaggcctcagcagaaacaccacgcccacagccagtagataagctggagaagatcctagagaagctgcttacccgcttcccccagtgtaacaaagcccaaatgacaaatattttacagcaaattaagacagcgaggacaaccatggcaggcctgactatggaagaactgatccagctggtcgcggcaagactggccgagcatgaacgcgttgccgcatcaactcagcctctgggccgtattagagccctgtttccagcgcctctcgcccagatttcaactccaatgtttctgcccagcgcacaagtgtcttacccaggcaggtcctcgcatgcaccagctacatgtaagctgtgtcttatgtgccagaaattagtgcagccatctgagctgcatccaatggcttgtacacacgttctgcataaggagtgcatcaaattttgggctcaaacgaatacgaatgacacgtgccccttctgtccaactctcaaatag

SEQ ID NO: 265227 - DNA, 441 bp, Artificial Sequence
  derived and/or modified sequence
atggcagccagcgaagtggctggcgtggtggcgaatgccccaagcccccctgagtctagctctctgtgtgctagcaagtctgacgaagggcttcccgatgggctctccacaaaagattcagcgcagaaacaaaaaaattcacccctactgagcgtttctagccaaacaatcaccaaagagaataaccggaacgtgcacctcgaacattccgaacagaatcctggatcctccgctggggatacctccgcggctcatcaggtggtgttgggggagaacctgattgcaacagccctgtgtctctccggtagcggaagccagtcagacctgaaggatgtcgcttccactgccggagaggagggagacacctcactgcgggagagtctacaccctgtgactagatcactgaaagctggctgccatacgaaacagcttgcttcttag

SEQ ID NO: 265228 - DNA, 2646 bp, Artificial Sequence
  derived and/or modified sequence
cagagcataatggcagcgtctgaggttgctggtgttgtggccaatgcccccagtcctccggaatcttctagtttatgtgcttccaaatcagacgaaggtctcccagatggtctaagcaccaaagactctgcacagaagcagaagaactcgcctctgttgagtgtaagtagccaaacaataaccaaggagaataacagaaatgtccatttggagcactcagagcagaatcctggttcatcagcaggtgacacctcagcagcgcaccaggtggttttaggagaaaacttgatagccacagccctttgtctttctggcagtgggtctcagtctgatttgaaggatgtggccagcacagcaggagaggagggggacacaagccttcgggagagcctccatccagtcactcggtctcttaaggcagggtgccatactaagcagcttgcctccaggaattgctctgaagagaaatccccacaaacctccatcctaaaggaaggtaacagggacacaagcttggatttccgacctgtagtgtctccagcaaatggggttgaaggagtccgagtggatcaggatgatgatcaagatagctcttccctgaagctttctcagaacattgctgtacagactgactttaagacagctgattcagaggtaaacacagatcaagatattgaaaagaatttggataaaatgatgacagagagaaccctgttgaaagagcgttaccaggaggtcctggacaaacagaggcaagtggagaatcagctccaagtgcaattaaagcagcttcagcaaaggagagaagaggaaatgaagaatcaccaggagatattaaaggctattcaggatgtgacaataaagcgggaagaaacaaagaagaagatagagaaagagaagaaggagtttttgcagaaggagcaggatctgaaagctgaaattgagaagctttgtgagaagggcagaagagaggtgtgggaaatggaactggatagactcaagaatcaggatggcgaaataaataggaacattatggaagagactgaacgggcctggaaggcagagatcttatcactagagagccggaaagagttactggtactgaaactagaagaagcagaaaaagaggcagaattgcaccttacttacctcaagtcaactcccccaacactggagacagttcgttccaaacaggagtgggagacgagactgaatggagttcggataatgaaaaagaatgttcgtgaccaatttaatagtcatatccagttagtgaggaacggagccaagctgagcagccttcctcaaatccctactcccactttacctccacccccatcagagacagacttcatgcttcaggtgtttcaacccagtccctctctggctcctcggatgcccttctccattgggcaggtcacaatgcccatggttatgcccagtgcagatccccgctccttgtctttcccaatcctgaaccctgccctttcccagcccagccagccttcctcaccccttcctggctcccatggcagaaatagccctggcttgggttcccttgtcagcccccacggtccacacatgccccctgccgcctccatcccacctcccccaggcttgggcggtgttaaggcttctgctgaaactccccggccccaaccagtagacaaactggagaagatcctggagaagctgctgacccggttcccacagtgcaataaggcccagatgaccaacattcttcagcagatcaagacagcacgtaccaccatggcaggcctgaccatggaggaacttatccagttggttgctgcacgactggcagaacatgagcgggtggcagcaagtactcagccacttggtcgcatccgggccttgttccctgctccactggcccaaatcagtaccccaatgttcttgccttctgcccaagtttcatatcctggaaggtcttcacatgctccagccacctgtaagctatgtctaatgtgccagaaactcgtccagcccagtgagctgcatccaatggcgtgtacccatgtattgcacaaggagtgtatcaaattctgggcccagaccaacacaaatgacacttgtcccttttgtccaactcttaaatgacggacctgactggggaggaagaagaagagaaactgatgtgaacaggaagcgcgggttcaagatttctaaaactctatatttatacagtgacatatactcatgccatgtacatttttattatataggtaatgtgtgtatagaaagtctgtattccaatgttcgtaaatgaaactatgtatattatgcagaaacagtctgttccccctcatcttgcaattcctttgggggatgcagattgtagggaagatgatgtttagtttggccttgaaattatgatatccctgcccagggctgttttcaaatacaatataaaaaccacctaggaacctgctgttgctctaaggccattctgctttggtttggctcagcctctagtccatttccttaaggctcatgtatgcagatttaaagcctggtgctcacccactgtccaaccagatgccttgcttaccgaaagcctccagaagcctcagtattgttttagccactctactccaaatggataaaatgagactctgattgagg

SEQ ID NO: 265229 - DNA, 2695 bp, Artificial Sequence
  derived and/or modified sequence
gtccctcccccactttcctcccgggggcgcggcgcgggagagcataatggcagcgtctgaggttgctggtgttgtggccaatgcccccagtcctccggaatcttctagtttatgtgcttccaaatcagacgaaggtctcccagatggtctaagcaccaaagactctgcacagaagcagaagaactcgcctctgttgagtgtaagtagccaaacaataaccaaggagaataacagaaatgtccatttggagcactcagagcagaatcctggttcatcagcaggtgacacctcagcagcgcaccaggtggttttaggagaaaacttgatagccacagccctttgtctttctggcagtgggtctcagtctgatttgaaggatgtggccagcacagcaggagaggagggggacacaagccttcgggagagcctccatccagtcactcggtctcttaaggcagggtgccatactaagcagcttgcctccaggaattgctctgaagagaaatccccacaaacctccatcctaaaggaaggtaacagggacacaagcttggatttccgacctgtagtgtctccagcaaatggggttgaaggagtccgagtggatcaggatgatgatcaagatagctcttccctgaagctttctcagaacattgctgtacagactgactttaagacagctgattcagaggtaaacacagatcaagatattgaaaagaatttggataaaatgatgacagagagaaccctgttgaaagagcgttaccaggaggtcctggacaaacagaggcaagtggagaatcagctccaagtgcaattaaagcagcttcagcaaaggagagaagaggaaatgaagaatcaccaggagatattaaaggctattcaggatgtgacaataaagcgggaagaaacaaagaagaagatagagaaagagaagaaggagtttttgcagaaggagcaggatctgaaagctgaaattgagaagctttgtgagaagggcagaagagaggtgtgggaaatggaactggatagactcaagaatcaggatggcgaaataaataggaacattatggaagagactgaacgggcctggaaggcagagatcttatcactagagagccggaaagagttactggtactgaaactagaagaagcagaaaaagaggcagaattgcaccttacttacctcaagtcaactcccccaacactggagacagttcgttccaaacaggagtgggagacgagactgaatggagttcggataatgaaaaagaatgttcgtgaccaatttaatagtcatatccagttagtgaggaacggagccaagctgagcagccttcctcaaatccctactcccactttacctccacccccatcagagacagacttcatgcttcaggtgtttcaacccagtccctctctggctcctcggatgcccttctccattgggcaggtcacaatgcccatggttatgcccagtgcagatccccgctccttgtctttcccaatcctgaaccctgccctttcccagcccagccagccttcctcaccccttcctggctcccatggcagaaatagccctggcttgggttcccttgtcagcccccacggtccacacatgccccctgccgcctccatcccacctcccccaggcttgggcggtgttaaggcttctgctgaaactccccggccccaaccagtagacaaactggagaagatcctggagaagctgctgacccggttcccacagtgcaataaggcccagatgaccaacattcttcagcagatcaagacagcacgtaccaccatggcaggcctgaccatggaggaacttatccagttggttgctgcacgactggcagaacatgagcgggtggcagcaagtactcagccacttggtcgcatccgggccttgttccctgctccactggcccaaatcagtaccccaatgttcttgccttctgcccaagtttcatatcctggaaggtcttcacatgctccagccacctgtaagctatgtctaatgtgccagaaactcgtccagcccagtgagctgcatccaatggcgtgtacccatgtattgcacaaggagtgtatcaaattctgggcccagaccaacacaaatgacacttgtcccttttgtccaactcttaaatgacggacctgactggggaggaagaagaagagaaactgatgtgaacaggaagcgcgggttcaagatttctaaaactctatatttatacagtgacatatactcatgccatgtacatttttattatataggtaatgtgtgtatagaaagtctgtattccaatgttcgtaaatgaaactatgtatattatgcagaaacagtctgttccccctcatcttgcaattcctttgggggatgcagattgtagggaagatgatgtttagtttggccttgaaattatgatatccctgcccagggctgttttcaaatacaatataaaaaccacctaggaacctgctgttgctctaaggccattctgctttggtttggctcagcctctagtccatttccttaaggctcatgtatgcagatttaaagcctggtgctcacccactgtccaaccagatgccttgcttaccgaaagcctccagaagcctcagtattgttttagccactctactccaaatggataaaatgagactctgattgaggaaaaaaaagtaa

SEQ ID NO: 265230 - DNA, 548 bp, Artificial Sequence
  derived and/or modified sequence
ctccgctcgtgccgccggaagtgggaggtgccgcgcgcgggccggcgctcgacccctccccccgtggctcggccgccccctccccccgctccgcccgctcagagcataatggcagcgtctgaggttgctggtgttgtggccaatgcccccagtcctccggaatcttctagtttatgtgcttccaaatcagacgaaggtctcccagatggtctaagcaccaaagactctgcacagaagcagaagaactcgcctctgttgagtgtaagtagccaaacaataaccaaggagaataacagaaatgtccatttggagcactcagagcagaatcctggttcatcagcaggtgacacctcagcagcgcaccaggtggttttaggagaaaacttgatagccacagccctttgtctttctggcagtgggtctcagtctgatttgaaggatgtggccagcacagcaggagaggagggggacacaagccttcgggagagcctccatccagtcactcggtctcttaaggcagggtgccatactaagcagcttgcctccag

SEQ ID NO: 265231 - protein, 241 aa, Artificial Sequence
  derived and/or modified sequence
MHEEEIYTSLQWDSPAPDTYQKCLSSNKCSGACCLVMVISCVFCMGLLTASIFLGVKLLQVSTIAMQQQEKLIQQERALLNFTEWKRSCALQMKYCQAFMQNSLSSAHNSSPCPNNWIQNRESCYYVSEIWSIWHTSQENCLKEGSTLLQIESKEEMDFITGSLRKIKGSYDYWVGLSQDGHSGRWLWQDGSSPSPGLLPAERSQSANQVCGYVKSNSLLSSNCSTWKYFICEKYALRSSV

SEQ ID NO: 265232 - DNA, 1673 bp, Artificial Sequence
  derived and/or modified sequence
cgtttgtacccggctgtggcaatctgtggtgaagttgaaatgcttttctgctagactggcaacatgttttgattcttctcaaataactcgcaagctcttgtgaagcacaacggcctaccttgtcctgaagaaaacatactctaaggcccacagatgattaaacccagccatttatgtgacaatagcatttttatttttcttatcaagatctgggtatttgatccacacaatggtaaagattcccatgttagccaagatctaaatgattcaaactgatgatactctctgcagaagaggtgactataaacgcagcccctgtgatgccaactggacatattatggagatagctgctatgggttcttcaaacacaacttgacatggaaagagagtgagcagtactgcactgacatgaaggctactctcctgaagactgacaaccagaacattctgtggatagaagtcaagggctccaatgtctcccaagacgaaagaatcccaagtctcatttggaggaatgctatcactaactaggattcctggagctaaaacattataggagttacttgttccagcctcctgtgtggactgctttcctatcaaagcaccttagacatgcacgaggaagaaatatacacctctcttcagtgggatagcccagcaccagacacttaccagaaatgtctgtcttccaacaaatgttcaggagcatgctgtcttgtgatggtgatttcatgtgttttctgcatgggattattaacagcatccattttcttgggcgtcaagttgttgcaggtgtccaccattgcgatgcagcagcaagaaaaactcatccaacaagagagggcactgctaaactttacagaatggaagagaagctgtgcccttcagatgaaatattgccaagccttcatgcaaaactcattaagttcagcccataacagcagtccttgtccaaacaattggattcagaacagagaaagttgttactatgtctctgaaatttggagcatttggcacaccagtcaagagaattgtttaaaggaaggttccacgctgctacaaatagagagcaaagaagaaatggattttatcactggcagcttgaggaagattaaaggaagctatgattactgggtggggttgtctcaggatggacacagcggacgctggctttggcaagatggctcctctccttctcctggcctgttgccagcagagagatcccagtcagctaaccaagtctgtggatacgtgaaaagcaattcccttctttcgtctaactgcagcacgtggaagtattttatctgtgagaagtatgcgttgagatcctctgtctgaaagaaattgtgttcaaagtgttctattacactgttatttggagcatgccattggaaaacccacccccaccccccctcaaaaaaacagaacagtaaaccaaaatgtgggccatgaaattagcaacctgggactcaataatacacttgggaatattcttccacaccgtccagatttcatttgatgttgttcacattgcaagagtaaaacttatttagagctacagaagacaaaaccctgaagagttaagaacaaacgcaaggaaataatttttattgtttaaagcccggaatgactgtaactttcacacaaggtacgcatctatgtttttggggga

SEQ ID NO: 265233 - DNA, 726 bp, Artificial Sequence
  derived and/or modified sequence
atgcacgaggaggagatctacaccagcctgcagtgggacagccccgcccccgacacctaccagaagtgcctgagcagcaacaagtgcagcggcgcctgctgcctggtgatggtgatcagctgcgtgttctgcatgggcctgctgaccgccagcatcttcctgggcgtgaagctgctgcaggtgagcaccatcgccatgcagcagcaggagaagctgatccagcaggagagagccctgctgaacttcaccgagtggaagagaagctgcgccctgcagatgaagtactgccaggccttcatgcagaacagcctgagcagcgcccacaacagcagcccctgccccaacaactggatccagaacagagagagctgctactacgtgagcgagatctggagcatctggcacaccagccaggagaactgcctgaaggagggcagcaccctgctgcagatcgagagcaaggaggagatggacttcatcaccggcagcctgagaaagatcaagggcagctacgactactgggtgggcctgagccaggacggccacagcggcagatggctgtggcaggacggcagcagccccagccccggcctgctgcccgccgagagaagccagagcgccaaccaggtgtgcggctacgtgaagagcaacagcctgctgagcagcaactgcagcacctggaagtacttcatctgcgagaagtacgccctgagaagcagcgtgtag

SEQ ID NO: 265234 - DNA, 726 bp, Artificial Sequence
  derived and/or modified sequence
atgcatgaggaagagatttacaccagcctccaatgggacagccccgctcctgacacttatcagaagtgtctatccagcaacaaatgctccggggcttgctgtctcgtgatggttatctcgtgtgttttctgcatgggattgctgacggcgtcgatattcctgggcgtcaaactgctgcaggtcagcacaatcgccatgcagcagcaggagaagcttattcagcaggaacgtgctttgttgaactttactgagtggaaacggagctgtgcccttcagatgaaatattgccaagcttttatgcagaactctctgtcatctgctcataactcttccccgtgccctaataattggatccaaaatagggaaagctgttattacgtgagcgagatatggtccatatggcatactagccaggaaaattgcttgaaggaaggctctactttattacaaatcgagagtaaggaggagatggactttataactgggtctttgcgaaagatcaagggctcctatgattactgggtcgggctgtcccaggatggacactcaggacgctggctttggcaggatggatcatcgccttccccaggactcctgccagctgagaggtctcaatccgccaaccaggtgtgcggatacgtcaaaagtaacagcctgctcagtagcaactgctctacctggaaatacttcatttgcgaaaaatatgcattaagatcatccgtatag

SEQ ID NO: 265235 - DNA, 726 bp, Artificial Sequence
  derived and/or modified sequence
atgcatgaggaggagatctacaccagcctgcagtgggacagccctgccccagacacctaccagaagtgcctgagcagcaacaagtgcagcggggcctgctgcctggtgatggtgatcagctgtgtgttctgcatgggcctgctgacagccagcatcttcctgggcgtgaagctgctgcaggtgtccaccatcgccatgcagcagcaggagaagctgatccagcaggagcgggccctgctgaacttcacagagtggaagaggagctgtgccctgcagatgaagtactgccaggccttcatgcagaacagcctgagcagcgcccacaacagcagcccctgccccaacaactggatccagaaccgggagagctgctactacgtgtctgagatctggagcatctggcacaccagccaggagaactgcctgaaggagggcagcaccctgctgcagatcgagagcaaggaggagatggacttcatcaccggcagcctgaggaagatcaagggcagctatgactactgggtgggcctgagccaggacggccacagcggccgctggctgtggcaggacggcagcagccccagccctggcctgctgcctgctgagaggagccagagcgccaaccaggtgtgtggctacgtgaagagcaacagcctgctgagcagcaactgcagcacctggaagtacttcatctgtgagaagtatgccctgcggagctctgtgtag

SEQ ID NO: 265236 - DNA, 726 bp, Artificial Sequence
  derived and/or modified sequence
atgcacgaggaggagatctacaccagcctgcagtgggacagccccgcccccgacacataccagaagtgcctgtcatctaataaatgtagtggcgcctgctgcctggtcatggtgattagctgcgtcttctgcatgggcttgttaaccgcgagcatttttttgggcgtgaaactgctacaggtgagcaccattgccatgcagcagcaggagaagctcattcagcaagagcgggccctcctcaatttcaccgaatggaagagaagctgtgcactccagatgaagtattgccaggcattcatgcaaaattccctgagtagcgcccacaatagctcaccttgcccgaacaactggatccaaaatcgggagtcctgctattatgtcagcgagatttggtcaatctggcacactagccaggaaaactgtcttaaggaagggtccacactgctgcagatcgagagtaaggaagaaatggattttattacgggtagtctgcgcaaaattaagggttcttatgattattgggtcgggctgtcgcaggacggacatagtggaaggtggctttggcaggatgggagttcccccagccccggcctgctccccgctgagcgctctcaatcagctaatcaggtgtgtggctacgtaaaatcaaactctctgctgtccagtaattgtagcacatggaaatactttatttgtgagaagtacgcactaaggtcttctgtatag

SEQ ID NO: 265237 - DNA, 726 bp, Artificial Sequence
  derived and/or modified sequence
atgcacgaggaagagatttacacttctttacaatgggattcccccgctcctgatacataccaaaaatgcctgtcgtccaataagtgtagcggagcatgctgtctcgtaatggtgatcagttgcgtgttttgcatgggacttctgactgcctccatcttcctgggtgttaaactgctgcaggtgtccaccatcgcaatgcagcaacaggaaaagctcattcagcaggagcgcgcattactgaactttactgaatggaagcgctcttgtgctttgcagatgaaatattgtcaggcctttatgcaaaactctttgagctccgctcacaacagcagcccttgccctaataactggatccagaacagggagagttgctattacgtctccgagatctggtctatatggcatacgtcccaagaaaactgtctgaaggaaggaagcactctgctgcaaatcgaatcaaaagaagagatggacttcataacgggcagtctcaggaaaattaaggggtcatacgattactgggtgggcctgagccaggacgggcactcaggcagatggttatggcaagacgggagcagcccatcccctggtttgctcccggcagagaggtcacagagcgctaatcaggtctgcgggtatgtgaagtccaattctcttttgtcctcaaactgttcaacttggaagtactttatctgtgagaagtacgcactccggtccagcgtatag

SEQ ID NO: 265238 - protein, 526 aa, Artificial Sequence
  derived and/or modified sequence
MEPEPEPAAVEVPAGRVLSARELFAARSRSQKLPQRSHGPKDFLPDGSAAQAERLRRCREELWQLLAEQRVERLGSLVAAEWRPEEGFVELKSPAGKFWQTMGFSEQGRQRLHPEEALYLLECGSIHLFHQDLPLSIQEAYQLLLTDHTVTFLQYQVFSHLKRLGYVVRRFQPSSVLSPYERQLNLDASVQHLEDGDGKRKRSSSSPRSINKKAKALDNSLQPKSLAASSPPPCSQPSQCPEEKPQESSPMKGPGGPFQLLGSLGPSPGPAREGVGCSWESGRAENGVTGAGKRRWNFEQISFPNMASDSRHTLLRAPAPELLPANVAGRETDAESWCQKLNQRKEKLSRREREHHAEAAQFQEDVNADPEVQRCSSWREYKELLQRRQVQRSQRRAPHLWGQPVTPLLSPGQASSPAVVLQHISVLQTTHLPDGGARLLEKSGGLEIIFDVYQADAVATFRKNNPGKPYARMCISGFDEPVPDLCSLKRLSYQSGDVPLIFALVDHGDISFYSFRDFTLPQDVGH

SEQ ID NO: 265239 - protein, 177 aa, Artificial Sequence
  derived and/or modified sequence
MEPEPEPAAVEVPAGRVLSARELFAARSRSQKLPQRSHGPKDFLPDGSAAQAERLRRCREELWQLLAEQRVERLGSLVAAEWRPEEGFVELKSPAGKFWQTMGFSEQGRQRLHPEEALYLLECGSIHLFHQDLPLSIQEAYQLLLTDHTVTFLQYQPPEEVGLCGSTIPTKLCPVPV

SEQ ID NO: 265240 - DNA, 1581 bp, Artificial Sequence
  derived and/or modified sequence
atggagcccgagcccgagcccgccgccgtggaggtgcccgccggcagagtgctgagcgccagagagctgttcgccgccagaagcagaagccagaagctgccccagagaagccacggccccaaggacttcctgcccgacggcagcgccgcccaggccgagagactgagaagatgcagagaggagctgtggcagctgctggccgagcagagagtggagagactgggcagcctggtggccgccgagtggagacccgaggagggcttcgtggagctgaagagccccgccggcaagttctggcagaccatgggcttcagcgagcagggcagacagagactgcaccccgaggaggccctgtacctgctggagtgcggcagcatccacctgttccaccaggacctgcccctgagcatccaggaggcctaccagctgctgctgaccgaccacaccgtgaccttcctgcagtaccaggtgttcagccacctgaagagactgggctacgtggtgagaagattccagcccagcagcgtgctgagcccctacgagagacagctgaacctggacgccagcgtgcagcacctggaggacggcgacggcaagagaaagagaagcagcagcagccccagaagcatcaacaagaaggccaaggccctggacaacagcctgcagcccaagagcctggccgccagcagcccccccccctgcagccagcccagccagtgccccgaggagaagccccaggagagcagccccatgaagggccccggcggccccttccagctgctgggcagcctgggccccagccccggccccgccagagagggcgtgggctgcagctgggagagcggcagagccgagaacggcgtgaccggcgccggcaagagaagatggaacttcgagcagatcagcttccccaacatggccagcgacagcagacacaccctgctgagagcccccgcccccgagctgctgcccgccaacgtggccggcagagagaccgacgccgagagctggtgccagaagctgaaccagagaaaggagaagctgagcagaagagagagagagcaccacgccgaggccgcccagttccaggaggacgtgaacgccgaccccgaggtgcagagatgcagcagctggagagagtacaaggagctgctgcagagaagacaggtgcagagaagccagagaagagccccccacctgtggggccagcccgtgacccccctgctgagccccggccaggccagcagccccgccgtggtgctgcagcacatcagcgtgctgcagaccacccacctgcccgacggcggcgccagactgctggagaagagcggcggcctggagatcatcttcgacgtgtaccaggccgacgccgtggccaccttcagaaagaacaaccccggcaagccctacgccagaatgtgcatcagcggcttcgacgagcccgtgcccgacctgtgcagcctgaagagactgagctaccagagcggcgacgtgcccctgatcttcgccctggtggaccacggcgacatcagcttctacagcttcagagacttcaccctgccccaggacgtgggccactag

SEQ ID NO: 265241 - DNA, 1581 bp, Artificial Sequence
  derived and/or modified sequence
atggaaccagaacccgagcccgctgcagtcgaggtccctgctggcagggtcttgtccgctcgtgagctttttgctgcaagatcaaggtctcagaaactgcctcaaaggtcccacggcccaaaggatttcctccccgacggctcggctgctcaagctgagcgcttgcgccgatgtagggaggaattgtggcagctgcttgccgagcagcgggttgagcgtctgggttctcttgtcgctgcagagtggcgacccgaggaaggattcgtcgaactgaaatcccctgcaggaaagttctggcagacaatgggattcagtgagcagggacggcagcgactccatcccgaggaagccctctacctcctggaatgtggatccatacatctctttcaccaggacctgccgcttagcattcaggaagcctaccaactgctgctcaccgatcatactgtcacgttcctgcagtaccaagtgttctcccatctgaagcgactgggctacgtggtgagaagatttcagcctagttctgtgcttagcccgtacgagaggcagttaaatctggacgcgagtgtgcagcacctagaggacggggacgggaaacgcaagcgatccagcagtagcccgcgctcaatcaataaaaaagctaaggcgttagacaactccttacagcccaagtcactcgcggctagttctccccctccctgcagccagccctctcagtgtccggaagaaaagcctcaggaaagttcacccatgaagggccctggaggtcccttccagttactaggctcgttgggcccatcgccaggccccgccagagaaggcgtcggctgtagctgggagtctgggcgggctgagaacggcgtcactggggctggaaaacgacggtggaattttgagcagatctcttttcctaatatggccagtgatagtaggcacacattgctaagagctcctgctccagaactgttgccagcaaatgtggctggacgggaaactgacgccgaaagttggtgtcagaagctaaaccaaagaaaggaaaaactgagccgacgcgagcgggagcaccacgcagaagcagcccagtttcaggaggatgtgaatgcagatcctgaagtgcagcggtgcagctcttggcgcgaatataaggagttgctgcagcgtagacaagttcagagatcgcagcggcgggccccgcatctgtgggggcagccagtgacgccactcctgagtcccggtcaggctagcagcccggctgttgtcctccagcatatctccgtgttgcagacaacccatctgccagacggcggagctcgtctgctcgagaaaagtggcgggcttgagatcatcttcgatgtgtaccaggccgacgctgtggccacatttaggaaaaacaatcccgggaagccatacgcacggatgtgcatctccggctttgatgagcccgtaccagatctgtgtagccttaagcgcctgagctatcaatcaggcgatgtgccccttatctttgcactggtggaccacggtgacatctctttctactccttccgggacttcactctaccccaggatgtaggccactag

SEQ ID NO: 265242 - DNA, 1581 bp, Artificial Sequence
  derived and/or modified sequence
atggagcctgagcctgagcctgctgctgtggaggtgcctgctggccgggtgctgagcgcccgggagctgtttgctgcccggagccgcagccagaagctgccccagaggagccacggccccaaggacttcctgcctgatggcagcgctgcccaggccgagcggctgcggcgctgccgggaggagctgtggcagctgctggccgagcagagggtggagcggctgggcagcctggtggccgctgagtggaggcctgaggagggctttgtggagctgaagagccctgctgggaagttctggcagaccatgggcttcagcgagcagggccggcagaggctgcaccctgaggaggccctgtacctgctggagtgtggcagcatccacctgttccaccaggacctgcccctgagcatccaggaggcctaccagctgctgctgacagaccacacagtgaccttcctgcagtaccaggtgttcagccacctgaagaggctgggctacgtggtgcggcgcttccagcccagctctgtgctgagcccctatgaaaggcagctgaacctggatgcctctgtgcagcacctggaggatggagatggcaagaggaagaggagcagcagcagccccaggagcatcaacaagaaggccaaggccctggacaacagcctgcagcccaagagcctggccgccagcagccccccaccctgcagccagcccagccagtgcccagaggagaagccccaggagagcagccccatgaagggccctgggggccccttccagctgctgggcagcctgggccccagccctggccctgcccgggagggcgtgggctgctcctgggagagcggccgggcagaaaatggagtgactggagctgggaagaggcgctggaactttgagcagatctccttccccaacatggccagtgacagccgccacaccctgctgcgggccccagcccctgagctgctgcctgccaacgtggccggccgggagacagatgctgagagctggtgccagaagctgaaccagaggaaggagaagctgagccggcgggagcgggagcaccacgccgaggccgcccagttccaggaggatgtgaatgctgaccctgaggtgcagcgctgcagctcctggagggagtacaaggagctgctgcagaggcggcaggtgcagaggagccagaggcgggccccccacctgtggggccagcctgtgacccccctgctgagccctggccaggccagcagccctgctgtggtgctgcagcacatctctgtgctgcagaccacccacctgcctgatggaggagcccggctgctggagaagagcggcggcctggagatcatctttgatgtgtaccaggctgatgctgtggccaccttcaggaagaacaaccctgggaagccctatgccaggatgtgcatcagcggctttgatgagcctgtgcctgacctgtgcagcctgaagaggctgagctaccagagcggagatgtgcccctcatctttgccctggtggaccatggagacatctccttctacagcttccgggacttcaccctgccccaggatgtgggccactag

SEQ ID NO: 265243 - DNA, 1581 bp, Artificial Sequence
  derived and/or modified sequence
atggagcccgagcccgagcccgccgccgtggaggtgcccgccggccgcgttttgagcgcgcgtgaactgttcgcagctcgctcaaggagccagaagctgccgcaacgctcccatggtcccaaggattttctgccagacgggtctgccgctcaggccgagaggctgaggcgatgtagagaagagctttggcagctccttgccgagcagcgagttgagagactcggctctttagttgcagccgagtggagaccggaggagggttttgtggagctgaaatctcccgctggaaagttttggcagaccatgggctttagcgaacagggaagacaaaggctgcatcctgaagaggcactgtatctcctggaatgcggatctatacacctgttccaccaggatctcccgctgagcatccaggaggcttaccaacttctgctgactgatcatactgttacgttcttgcagtatcaggttttttctcatttaaagcggctgggctacgtagtccgtcgtttccagcctagctccgtgctatcgccctacgaaagacagctcaacttagacgcaagtgtacagcatcttgaagatggggatggcaaacggaaacgctcttccagctcaccccgaagtatcaacaaaaaggctaaggcgctggacaattctctgcagcccaaaagtctcgctgcaagcagccctcccccgtgctcacagcccagccaatgccctgaggagaaaccccaggaatccagccccatgaagggcccagggggcccatttcagctgcttggtagtttggggccatcgcccggcccagccagagagggggtcgggtgcagctgggaatcaggcagggccgaaaatggcgtgactggggctggcaagcggagatggaattttgagcagatcagcttccctaatatggcctccgactctcgacacacactgctgcgggctcccgcccctgagctcctccctgctaacgttgctggaagggagactgatgcagaatcttggtgccaaaagctgaatcaacgcaaggagaaactatccaggagagagagagaacaccacgcggaagccgcccagttccaggaggatgtaaatgccgatccagaagtgcagaggtgttcgagctggcgcgagtacaaagagctgctacagcgccgacaggttcagaggtcccagcgccgggcgccccatctgtggggccagccagtcacccctctactgtctccgggccaggcatcttcccccgccgtcgtccttcagcacatctccgtgctccagaccacccatctgcccgacggtggcgcacgcctcctggaaaaatccggcgggttggaaatcatttttgatgtgtatcaggctgatgccgtggccaccttcaggaagaacaaccccgggaagccctacgcaaggatgtgcatttccgggtttgatgagccagtgcctgacctgtgtagcttaaagcgtctgagctaccaaagtggtgacgttcctctcatcttcgccctggtggaccacggggacatctcgttctacagttttcgcgatttcaccctgcctcaagacgtgggccattag

SEQ ID NO: 265244 - DNA, 1581 bp, Artificial Sequence
  derived and/or modified sequence
atggaaccggaaccagagcctgcagccgtggaagtgccagccggtagggtcctatcagccagggaactgttcgccgctcgctctaggtcccagaagctgcctcaacgaagccacggtcctaaggacttcttgccagatggctcagccgctcaggccgagaggctgcgacgctgccgagaagagctgtggcagcttttagccgaacaaagagtggagcgcctgggctccctggtcgccgctgagtggcgccctgaggaagggttcgtagaactgaagagcccagccggaaaattttggcagacgatgggtttctctgagcaaggcaggcaacgcctccatcctgaggaggcgttatacttgcttgaatgtggtagcatacacctctttcaccaggacctgcccctatcaatccaggaggcctaccagcttctgttaactgaccataccgtaactttcctgcaataccaagtcttttcacacttgaagaggctgggttatgtagtccggcgttttcagccttccagcgtcctctcaccttatgagagacagctaaacctggacgcgtcagtgcaacacctcgaagacggcgacgggaagaggaaaaggtctagctcctctccgaggtcgattaataagaaagccaaggcgctggataacagtctgcagccaaaatccctggcagctagctcccctcccccatgctcacagccttcacagtgtcccgaggagaagccacaggaaagcagccctatgaagggtccagggggtccctttcagctgctcgggtccctgggtccaagccctggccctgctagggaaggtgtgggatgctcctgggaaagcggtagggcagagaacggagtgactggtgccggaaagcggaggtggaatttcgaacagatatcttttcccaacatggcctctgactcccggcatacccttctcagggcacccgcacccgagctacttccagccaatgtggcaggtcgagagactgacgccgaaagttggtgtcagaagcttaaccagaggaaagagaaacttagccggagggaacgtgaacatcacgctgaagctgctcagtttcaagaggatgtaaatgcggacccagaagtccagagatgttccagctggcgggaatacaaggagctgctacagagaaggcaggtccaacgtagtcagcgccgtgcccctcacctatggggacagcctgttacgcctctcctttctccagggcaggcttccagtcctgcagttgtcctgcagcatatctccgtactgcagaccactcacctccccgatggaggtgccagactgctagagaagtccggtggcctggaaatcatttttgatgtttatcaggcagacgctgtggcaactttcaggaaaaacaacccgggtaagccctacgcaagaatgtgcataagcggttttgacgagcccgttcccgacttgtgcagcctaaagaggctatcttatcaatctggcgacgtacccctgatctttgcactcgtcgaccatggtgatatctccttttatagtttccgggattttactttgccccaggacgtgggccactag

SEQ ID NO: 265245 - DNA, 1941 bp, Artificial Sequence
  derived and/or modified sequence
gtggcggcgcgcgcagcggcaggcggcggcgggatggagcccgagcccgagcccgcggccgtggaggttcccgcggggcgcgtgctcagcgcccgggagctcttcgccgcccgctcgcggtcgcagaagctgccccagcgctcgcatggccccaaggactttctgcccgacggctcggcagctcaggccgagcggctgcgccggtgccgggaagagctctggcagctgctggcagagcagcgcgtggagcgcctgggcagcttggtggctgccgagtggaggccagaagagggcttcgtggagttgaagtctcccgcgggcaaattctggcagaccatgggcttctcagagcagggccggcagcgccttcacccggaagaggccttgtatcttctggagtgtggctccatccacctcttccaccaagacctgccactgtctatccaggaagcttaccagctgctgctgaccgaccacactgtgaccttcctgcagtaccaggtcttcagccacctgaagaggttgggttatgtggttcgacgattccaaccaagctctgtcctgtccccgtatgagaggcagcttaacctggatgccagcgtgcagcacttggaggatggagatggcaagagaaagaggagcagctccagccctcggtccattaataagaaggccaaggccctggacaactccctgcaacccaagagtctggcagcctccagcccacctccctgcagccagcccagccaatgcccagaggagaaaccccaggagtcaagccccatgaagggcccagggggcccctttcagcttctggggtccctgggccccagccctggcccggccagggagggggtggggtgcagctgggagagtggcagagccgagaacggagtcacgggagccggtaagcggcgctggaacttcgagcagatctccttccccaacatggcttcagacagccgccacacccttctgcgcgccccagccccagagctgctcccggccaacgtggctgggcgggagacagacgctgagtcctggtgccagaagctgaaccagcgcaaggagaagctctccaggcgggaacgggagcaccacgcggaggccgcgcagttccaggaagatgtcaacgccgatcccgaggtgcagcggtgctccagctggcgggagtacaaggagctgctgcagcggcggcaggtgcagaggagccagcgccgggcccctcacctgtggggccagcccgtcaccccgctgctgagtcctggccaggccagctccccagccgtggtccttcagcatatctctgtgctgcagacaacacaccttcctgatggaggtgcccggctgttggagaagtctgggggcttggaaatcatctttgatgtttaccaggccgacgctgtggccacattccgaaagaataaccctggcaaaccctatgcccggatgtgcattagtggatttgatgagcctgtcccagacctctgcagcctcaagcggttgtcttaccagagtggggatgtccctctgatctttgccctggtggatcatggtgacatctccttctacagcttcagggacttcacgttgccccaggatgtggggcactgacctcacagctctgcagaggatggagcttgctccgggggaccgggactgtctgttctcagggaccatctcggctgcctcctgtacccagactctaacctgtagcttcagaggccagtctgggccttggccctgggtgtctgatactcacagagtgaaactgtgaccctctcccttccctgctgccttgcagtgacccctctggaactcaggactcgattttaaggacccaggaggtggggcagaagagaggactgtgtgcctttaacgagagggtgcctgcttcgtgctataaagccaaagccattaaaaatagatttcttttctgct

SEQ ID NO: 265246 - DNA, 1856 bp, Artificial Sequence
  derived and/or modified sequence
cggcgggatggagcccgagcccgagcccgcggccgtggaggttcccgcggggcgcgtgctcagcgcccgggagctcttcgccgcccgctcgcggtcgcagaagctgccccagcgctcgcatggccccaaggactttctgcccgacggctcggcagctcaggccgagcggctgcgccggtgccgggaagagctctggcagctgctggcagagcagcgcgtggagcgcctgggcagcttggtggctgccgagtggaggccagaagagggcttcgtggagttgaagtctcccgcgggcaaattctggcagaccatgggcttctcagagcagggccggcagcgccttcacccggaagaggccttgtatcttctggagtgtggctccatccacctcttccaccaagacctgccactgtctatccaggaagcttaccagctgctgctgaccgaccacactgtgaccttcctgcagtaccagccacctgaagaggttgggttatgtggttcgacgattccaaccaagctctgtcctgtccccgtatgagaggcagcttaacctggatgccagcgtgcagcacttggaggatggagatggcaagagaaagaggagcagctccagccctcggtccattaataagaaggccaaggccctggacaactccctgcaacccaagagtctggcagcctccagcccacctccctgcagccagcccagccaatgcccagaggagaaaccccaggagtcaagcccccagccctggcccggccagggagggggtggggtgcagctgggagagtggcagagccgagaacggagtcacgggagccggtaagcggcgctggaacttcgagcagatctccttccccaacatggcttcagacagccgccacacccttctgcgcgccccagccccagagctgctcccggccaacgtggctgggcgggagacagacgctgagtcctggtgccagaagctgaaccagcgcaaggagaagctctccaggcgggaacgggagcaccacgcggaggccgcgcagttccaggaagatgtcaacgccgatcccgaggtgcagcggtgctccagctggcgggagtacaaggagctgctgcagcggcggcaggtgcagaggagccagcgccgggcccctcacctgtggggccagcccgtcaccccgctgctgagtcctggccaggccagctccccagccgtggtccttcagcatatctctgtgctgcagacaacacaccttcctgatggaggtgcccggctgttggagaagtctgggggcttggaaatcatctttgatgtttaccaggccgacgctgtggccacattccgaaagaataaccctggcaaaccctatgcccggatgtgcattagtggatttgatgagcctgtcccagacctctgcagcctcaagcggttgtcttaccagagtggggatgtccctctgatctttgccctggtggatcatggtgacatctccttctacagcttcagggacttcacgttgccccaggatgtggggcactgacctcacagctctgcagaggatggagcttgctccgggggaccgggactgtctgttctcagggaccatctcggctgcctcctgtacccagactctaacctgtagcttcagaggccagtctgggccttggccctgggtgtctgatactcacagagtgaaactgtgaccctctcccttccctgctgccttgcagtgacccctctggaactcaggactcgattttaaggacccaggaggtggggcagaagagaggactgtgtgcctttaacgagagggtgcctgcttcgtgctataaagccaaagccattaaaaatagatttcttttc

SEQ ID NO: 265247 - protein, 503 aa, Artificial Sequence
  derived and/or modified sequence
MAGLWLGLVWQKLLLWGAASALSLAGASLVLSLLQRVASYALLMKPDGREFFQQIIEYTEEYRHMPLLKLWVGPVPMVALYNAENVEVILTSSKQIDKSSMYKFLEPWLGLGLLTSTGNKWRSRRKMLTPTFHFTILEDFLDIMNEQANILVKKLEKHINQEAFNCFFYITLCALDIICETAMGKNIGAQSNDDSEYVRAVYRMSEMIFRRIKMPWLWLDLWYLMFKEGWEHKKSLQILHTFTNSVIAERANEMNANEDCRGDGRGSAPSKNKRRAFLDLLLSVTDDEGNRLSHEDIREEVDTFMFEGHDTTAAAINWSLYLLGSNPEVQKKVDHELDDVFGKSDRPATVEDLKKLRYLECVIKETLRLFPSVPLFARSVSEDCEVAGYRVLKGTEAVIIPYALHRDPRYFPNPEEFQPERFFPENAQGRHPYAYVPFSAGPRNCIGQKFAVMEEKTILSCILRHFWIESNQKREELGLEGQLILRPSNGIWIKLKRRNADER

SEQ ID NO: 265248 - protein, 525 aa, Artificial Sequence
  derived and/or modified sequence
MAGLWLGLVWQKLLLWGAASALSLAGASLVLSLLQRVASYARKWQQMRPIPTVARAYPLVGHALLMKPDGREFFQQIIEYTEEYRHMPLLKLWVGPVPMVALYNAENVEVILTSSKQIDKSSMYKFLEPWLGLGLLTSTGNKWRSRRKMLTPTFHFTILEDFLDIMNEQANILVKKLEKHINQEAFNCFFYITLCALDIICETAMGKNIGAQSNDDSEYVRAVYRMSEMIFRRIKMPWLWLDLWYLMFKEGWEHKKSLQILHTFTNSVIAERANEMNANEDCRGDGRGSAPSKNKRRAFLDLLLSVTDDEGNRLSHEDIREEVDTFMFEGHDTTAAAINWSLYLLGSNPEVQKKVDHELDDVFGKSDRPATVEDLKKLRYLECVIKETLRLFPSVPLFARSVSEDCEVAGYRVLKGTEAVIIPYALHRDPRYFPNPEEFQPERFFPENAQGRHPYAYVPFSAGPRNCIGQKFAVMEEKTILSCILRHFWIESNQKREELGLEGQLILRPSNGIWIKLKRRNADER

SEQ ID NO: 265249 - DNA, 1512 bp, Artificial Sequence
  derived and/or modified sequence
atggctgggctgtggctgggactggtgtggcagaaactgctgctttggggggctgccagtgcactgtccttggcgggggcttccctggtgctgtcacttctgcagagggtggcctcttacgcactgctgatgaaacccgatggacgagagttttttcagcagatcattgaatataccgaggagtatcggcacatgcccctgctgaagctctgggtgggtcccgtgcctatggtggccctgtataacgctgaaaacgttgaggttatccttacttcttctaagcagatcgataaaagtagtatgtataagttcctggaaccctggctgggcctggggctgctgacttctaccggcaacaaatggcgatcaaggcgcaaaatgttgacacctactttccatttcacaatcctcgaggacttccttgatatcatgaacgagcaggctaatattctcgttaaaaagctagaaaagcatataaaccaagaagcattcaattgttttttctatattaccctgtgtgctttggacatcatctgcgaaacagctatggggaaaaacattggcgctcagtcaaatgacgactcagagtacgtgcgggcagtttacaggatgtccgagatgatatttaggaggataaagatgccttggctctggctagacctgtggtatctgatgtttaaagagggctgggagcataagaaaagcttacaaatcctgcacacctttacaaactcagtcatagcagaaagagctaacgagatgaacgccaatgaggattgccgtggagacggccgcggtagcgcgccttccaagaataagcgacgagcattcctggacttactactaagcgtcactgacgatgagggcaacagattaagccacgaggacatcagagaagaggtcgatactttcatgttcgagggccatgatacgaccgcggccgccataaattggtctttgtacctcctgggttccaatccagaggtgcaaaaaaaagttgaccacgaactggatgacgtattcgggaagagtgatcgtcccgctacagtagaagacctcaaaaagctgcgctatctcgagtgtgttataaaagaaaccctgaggctgtttccctccgttcctctgtttgctcgctcagtgtcggaagattgcgaggtagccgggtacagagtcttgaaggggaccgaggcggtaatcattccatacgcactgcacagagacccaagatattttcctaatccagaagaattccagccagaacgttttttccccgagaatgcccaaggaagacacccctacgcatacgtgccgttttccgccggccccagaaactgtatagggcagaagtttgccgtcatggaggagaaaaccatactgtcctgcattcttcgccatttttggatagaaagtaatcagaagcgcgaggagttgggtctggaaggtcagttaatcctccgcccgtctaatggcatctggattaagctgaagcgacgcaacgctgacgagagatag

SEQ ID NO: 265250 - DNA, 1578 bp, Artificial Sequence
  derived and/or modified sequence
atggcagggttgtggctgggcctcgtttggcaaaagctcctcctgtggggggcagccagtgccctcagcttggctggtgcctctctagttctgagcctcctgcagcgcgtggccagttatgctagaaaatggcagcagatgcgaccgatccccactgttgcccgcgcttaccctttagtgggccatgcactgctgatgaaacctgacgggcgtgaattcttccaacagatcatcgaatacactgaagagtatcgccacatgcccctgctgaagctgtgggttggcccggtgcctatggtggccctgtataatgccgagaacgtcgaggtgatactgacctcatctaagcaaatcgataagagcagcatgtacaagttcctggagccttggctgggacttggtcttttaacctctaccggcaataagtggaggtctcgacggaaaatgttgactccaacctttcacttcactattctggaagatttcctcgacattatgaacgaacaggctaatatactcgtaaagaaactggagaaacacattaaccaagaagcatttaactgtttcttctacataacgctgtgtgcattggatattatttgtgagacggccatggggaaaaacatcggcgcccagtctaatgacgacagcgagtacgtgcgggcagtgtatcggatgtctgaaatgatcttccggaggattaaaatgccgtggctgtggctcgacctctggtacctgatgttcaaagaggggtgggagcacaaaaaatccctgcaaatcctgcacaccttcaccaattcagtaatcgccgagcgcgctaacgaaatgaacgccaatgaagactgtagaggcgatggacgcggcagtgccccaagcaaaaacaagaggagagccttcttggacctccttcttagcgttacagatgacgaagggaataggctttcccacgaagatataagagaagaagttgatacttttatgttcgaagggcacgacaccactgctgccgctattaactggtctctttacctccttggctctaaccccgaagtacagaaaaaggttgatcacgagctggacgacgtgtttgggaagtctgaccggccagctaccgtggaagatttgaagaagctacggtacctggagtgcgtgatcaaagagacgctgcgcttgtttcccagcgtaccactcttcgccagatcagtaagcgaagactgtgaggtggcgggctacagggtgctcaagggaacagaggctgtgattatcccatacgctcttcacagagaccctcgctatttcccgaacccagaggagtttcagccagagcgatttttccccgaaaacgctcagggccgccatccctacgcctacgtaccattcagcgccggtccacgaaactgcatcggccaaaaattcgcagtgatggaggagaagacgattctgagctgtattctccggcacttttggatcgagagcaaccagaaacgggaggaactcgggctcgaggggcagttaattctgcgccccagtaatggaatttggatcaaattgaaacgcaggaatgccgatgaacggtag

SEQ ID NO: 265251 - DNA, 1512 bp, Artificial Sequence
  derived and/or modified sequence
atggccggcctgtggctgggcctggtgtggcagaagctgctgctgtggggcgccgccagcgccctgagcctggccggggccagcctggtgctgagcctgctgcagagggtggccagctatgccctgctgatgaagccagatggccgggagttcttccagcagatcatcgagtacacagaggagtaccgccacatgcccctgctgaagctgtgggtgggccctgtgcccatggtggccctgtacaatgcagaaaatgtggaggtgatcctgaccagcagcaagcagattgacaagagctccatgtacaagttcctggagccctggctgggcctgggcctgctgaccagcactggaaacaagtggaggagcaggaggaagatgctgacccccaccttccacttcaccatcctggaggacttcctggacatcatgaatgagcaggccaacatcctggtgaagaagctggagaagcacatcaaccaggaggccttcaactgcttcttctacatcaccctgtgtgccctggacatcatctgtgaaacagccatgggcaagaacattggagcccagagcaatgatgattctgaatatgtgcgggctgtgtacaggatgtctgagatgatcttccgccgcatcaagatgccctggctgtggctggacctgtggtacctgatgttcaaggagggctgggagcacaagaagagcctgcagatcctgcacaccttcaccaacagcgtgattgctgagcgggccaatgagatgaatgccaatgaagactgcagaggagatggccggggcagcgcccccagcaagaacaagaggcgggccttcctggacctgctgctgtctgtgacagatgatgagggcaaccggctgagccatgaggacatccgggaggaggtggacaccttcatgtttgagggccatgacaccacagctgctgccatcaactggagcctgtacctgctgggcagcaaccctgaggtgcagaagaaggtggaccacgagctggatgatgtgtttgggaagagtgacaggcctgccaccgtggaggacctgaagaagctgcgctacctggagtgtgtgatcaaggagaccctgcggctcttccccagcgtgcccctgtttgcccggtctgtgtctgaggactgtgaggtggccggctacagagtgctgaagggcacagaagctgtgatcatcccctatgccctgcaccgggacccccgctacttccccaaccctgaggagttccagcctgagcgcttcttcccagaaaatgcccagggccgccacccctatgcctacgtgcccttctctgctggccccaggaactgcatcggccagaagtttgctgtgatggaggagaagaccatcctgagctgcatcctgcggcacttctggattgagagcaaccagaagcgggaggagctgggcctggagggccagctgatcctgcggcccagcaatggcatctggatcaagctgaagagaagaaatgctgatgaaagatag

SEQ ID NO: 265252 - DNA, 1578 bp, Artificial Sequence
  derived and/or modified sequence
atggccggcctgtggctgggcctggtgtggcagaagctgctgctgtggggcgccgccagcgccctgagcctggccggggccagcctggtgctgagcctgctgcagagggtggccagctatgccaggaagtggcagcagatgaggcccatccccaccgtggcccgggcctaccccctggtgggccacgccctgctgatgaagccagatggccgggagttcttccagcagatcatcgagtacacagaggagtaccgccacatgcccctgctgaagctgtgggtgggccctgtgcccatggtggccctgtacaatgcagaaaatgtggaggtgatcctgaccagcagcaagcagattgacaagagctccatgtacaagttcctggagccctggctgggcctgggcctgctgaccagcactggaaacaagtggaggagcaggaggaagatgctgacccccaccttccacttcaccatcctggaggacttcctggacatcatgaatgagcaggccaacatcctggtgaagaagctggagaagcacatcaaccaggaggccttcaactgcttcttctacatcaccctgtgtgccctggacatcatctgtgaaacagccatgggcaagaacattggagcccagagcaatgatgattctgaatatgtgcgggctgtgtacaggatgtctgagatgatcttccgccgcatcaagatgccctggctgtggctggacctgtggtacctgatgttcaaggagggctgggagcacaagaagagcctgcagatcctgcacaccttcaccaacagcgtgattgctgagcgggccaatgagatgaatgccaatgaagactgcagaggagatggccggggcagcgcccccagcaagaacaagaggcgggccttcctggacctgctgctgtctgtgacagatgatgagggcaaccggctgagccatgaggacatccgggaggaggtggacaccttcatgtttgagggccatgacaccacagctgctgccatcaactggagcctgtacctgctgggcagcaaccctgaggtgcagaagaaggtggaccacgagctggatgatgtgtttgggaagagtgacaggcctgccaccgtggaggacctgaagaagctgcgctacctggagtgtgtgatcaaggagaccctgcggctcttccccagcgtgcccctgtttgcccggtctgtgtctgaggactgtgaggtggccggctacagagtgctgaagggcacagaagctgtgatcatcccctatgccctgcaccgggacccccgctacttccccaaccctgaggagttccagcctgagcgcttcttcccagaaaatgcccagggccgccacccctatgcctacgtgcccttctctgctggccccaggaactgcatcggccagaagtttgctgtgatggaggagaagaccatcctgagctgcatcctgcggcacttctggattgagagcaaccagaagcgggaggagctgggcctggagggccagctgatcctgcggcccagcaatggcatctggatcaagctgaagagaagaaatgctgatgaaagatag

SEQ ID NO: 265253 - DNA, 1512 bp, Artificial Sequence
  derived and/or modified sequence
atggccggcctgtggctgggcctggtgtggcagaagctgctgctgtggggcgcagcttccgcactcagcctggcaggagcctcgctcgtattatcattgctgcagcgagtggccagttatgctctactgatgaagcctgatgggagggagttcttccaacaaatcattgaatacactgaggagtaccgccatatgcctctgctcaaattgtgggtggggcccgttcccatggtggctctgtacaacgccgaaaatgtggaggttatcctgacatcatccaagcagatcgataaatcctcaatgtataaatttcttgaaccctggctgggtttaggcctgcttacctccacaggaaacaagtggcggtcgcgcaggaagatgttaacccccacatttcacttcactattctcgaggacttcctagatattatgaacgagcaggctaatatcctggtaaaaaagctggaaaagcatattaatcaggaggcattcaattgttttttttatatcacactgtgtgctctggatattatctgcgagaccgccatgggcaagaacattggagcccagagcaatgatgacagtgaatacgtgagggcggtctaccggatgtctgagatgatttttcggcgcattaaaatgccatggttatggctggacctgtggtatctcatgttcaaggaagggtgggaacataagaaatctctccaaattctgcacacatttactaattcagtcatcgctgagagggcaaatgagatgaatgccaacgaggattgtcgcggcgatggccgtggatcagcaccaagtaagaacaagcggcgggcgttcctcgacttgctgctgagtgttacagacgacgagggaaatagactctcccacgaggatatcagagaggaagtggatacctttatgtttgagggccacgacaccacagccgccgctatcaattggtccctttacctgttaggttctaatcccgaagtgcaaaagaaggtcgatcacgagctggacgatgtgttcggtaaatctgatcgaccagccaccgtcgaagacctcaagaagctcagatacctggagtgcgtgatcaaagaaacacttaggctgttcccttcagttccattgttcgctcggagcgtgtctgaggactgcgaggtggcgggataccgcgttttgaaaggaactgaagccgtgatcatcccttatgcgttacacagagatccacgctactttcctaacccagaagagttccagccagaaagattcttccccgaaaatgcacaagggcgccatccttatgcatatgtgccattctcagccggcccccgaaattgtatcggccagaaatttgctgtgatggaggagaaaacgattctttcttgcattctgcgccacttttggattgagtccaatcagaaacgcgaggagttagggctggaggggcagcttatcctgcgtccttcgaatggcatctggataaaactgaagcggcgcaatgccgacgagcgatag

SEQ ID NO: 265254 - DNA, 1578 bp, Artificial Sequence
  derived and/or modified sequence
atggccggcctgtggctgggcctggtgtggcagaagctgctgctgtggggagccgctagtgccctgtcactagctggggcttccttggttctgagcttgcttcagagagtcgcttcatatgcgaggaagtggcagcagatgagaccgatacctaccgtggcaagagcttacccgttggtaggccatgccttactcatgaaaccagacggcagagaattctttcagcagattatcgaatacacggaagaataccggcatatgcctctactgaaactgtgggtgggcccagtgcccatggtggcactgtacaatgcagagaatgttgaggtgatactgacgagtagtaagcagatagacaagagctctatgtataaatttcttgaaccttggcttggactgggcttgctgacatccaccggaaataagtggcggtcaaggcgaaaaatgctgacccccacttttcacttcaccatactggaggacttcctcgacatcatgaacgagcaggccaatattctcgtcaaaaagctagagaaacatatcaaccaggaagcatttaactgttttttttatattactctgtgcgctctggacattatctgcgagactgctatgggcaaaaatattggagcacagagtaatgatgacagtgaatacgtcagagccgtgtatcgaatgtccgaaatgatcttccggcggattaaaatgccgtggttgtggctagacctgtggtatctaatgttcaaggagggctgggaacataaaaaatccctgcagatactgcataccttcactaatagcgtcatagctgagagagccaatgaaatgaacgctaacgaagactgtcgcggcgacggtcgcggaagcgctcccagcaaaaataagcgtcgcgcattcttggatctgctcctgtctgtgaccgacgacgaggggaataggctatcccatgaagacatcagggaagaagtggacacttttatgtttgaggggcatgatacaaccgctgccgcaattaattggagcctgtacctcttgggttccaatccagaggtgcagaagaaagtcgaccatgaactggatgatgtattcggcaagtctgatcgacccgccaccgtggaagatctgaagaaattgcgctacctggagtgcgtgattaaggaaacgttaaggctgttcccgagcgtgcccctgttcgcacgctccgtgagcgaggattgtgaggtcgctgggtatcgggtcttgaaggggactgaggctgtgatcatcccctacgctttgcacagagaccctcgctacttcccaaatcctgaagagtttcaaccggagcgattcttccctgagaatgcacagggacgccatccctatgcctatgttcctttcagcgccggccccagaaactgtatcggtcagaagtttgccgtcatggaagaaaaaacaatcttgagctgtatactgagacatttttggatcgaaagtaaccaaaagagagaagaactcggattggaagggcagctcatcctgagaccctcaaatggaatttggatcaagttaaaacgccgcaatgcagatgagcggtag

SEQ ID NO: 265255 - DNA, 1512 bp, Artificial Sequence
  derived and/or modified sequence
atggcaggactctggctaggccttgtttggcagaagctcctcctgtggggcgctgcctctgcacttagtctggcaggcgcttctttggtgctaagcctcctacagcgcgttgcttcatatgccctgctgatgaaaccagatggccgagagttcttccaacagatcatagaatatacagaggagtacaggcacatgcctttgcttaagctgtgggtgggcccagtacctatggtggccttatacaacgcggaaaatgtggaggtcatcctcactagctctaagcagatcgacaagagttctatgtacaagttcttggagccgtggttgggactcggactgctcacatctaccgggaacaagtggaggtcaaggcgtaagatgctaacaccaaccttccacttcaccatcctagaggattttctggatatcatgaatgagcaggcgaacatcttagttaaaaaactggagaagcatatcaaccaagaggcatttaactgcttcttttacataacactttgtgcactcgacatcatctgtgaaactgccatgggtaaaaacatcggtgcccagtcaaatgacgacagtgagtacgtacgcgctgtgtaccgtatgtccgaaatgatctttcgccgaattaaaatgccatggttgtggcttgacttgtggtatctcatgttcaaggaggggtgggaacataaaaagtctctccagatcttgcacacttttacaaactcagttatcgccgagagggctaatgagatgaacgccaacgaggattgtagaggagacggaagggggtccgcccctagcaagaataagcggagggcatttctcgacttgttgctgagcgtgactgatgatgaagggaaccggctctctcacgaggatatccgggaagaagtggacacttttatgttcgagggccacgatacaaccgcggctgccattaactggtcactttaccttctcggcagcaatcccgaggtgcagaaaaaggtggaccacgaactggatgacgtcttcggcaagtccgataggcccgctaccgtcgaggatctcaagaagcttcggtaccttgagtgtgtcataaaagagaccctcaggctgtttccatccgtgcctctctttgctcgaagcgtgagcgaggactgcgaggtcgcagggtatcgggtgttgaaggggaccgaggccgttatcatcccgtacgccctgcacagagacccaagatacttccctaaccctgaagagttccagcccgagcgcttttttccagagaatgcccagggcaggcacccatacgcctacgtcccatttagtgccggaccccgtaactgcatcggccagaaattcgccgtgatggaggagaaaacgatcctctcctgcattctcagacatttctggatcgagagtaaccaaaaacgcgaagagttggggctggagggccaactcatactgcgaccgtccaatggtatctggatcaagctgaaaaggagaaacgccgacgagcggtag

SEQ ID NO: 265256 - DNA, 1578 bp, Artificial Sequence
  derived and/or modified sequence
atggctggactctggctgggcctggtttggcaaaagctgctgctgtggggtgccgcttccgcattgtcactggccggtgcctcgctggtcctctctctgctgcagcgcgtggcaagttacgcaaggaaatggcagcagatgcggcctataccaacggtggccagggcttacccccttgttggacatgccttactcatgaagccagacggccgtgagttttttcagcagattattgagtacacagaggaatatcggcacatgcccctcttaaagttatgggtcgggccagtccccatggtggctctgtacaatgctgaaaacgtggaagtgatcctgacatccagcaaacagattgataagtcatctatgtataagttcctggaaccttggctggggttaggacttctgacttctacaggcaacaagtggcgttcacggagaaagatgctgacccccacttttcactttacaatcctcgaggattttcttgatattatgaacgaacaggcaaacattctggtgaaaaagctcgagaagcatatcaaccaggaggctttcaattgctttttctacatcacactgtgtgccttagatattatttgcgagacggcgatggggaagaatatcggggcacagtccaacgatgacagcgaatatgtgcgggctgtctaccggatgtctgagatgatttttaggagaattaagatgccttggctgtggctcgacctgtggtatctaatgttcaaggaaggctgggagcacaagaagtctctgcaaattctgcacacattcacaaactccgtcattgccgagcgagcaaacgagatgaacgctaatgaggattgcaggggcgatggcaggggcagcgcgccatcaaagaacaagcggagggccttcctcgatctgctgttatcggttaccgacgacgagggaaaccgcctatctcacgaagatataagagaggaagtggacaccttcatgttcgaaggccacgacacgaccgctgccgctatcaattggagtctttatttgctcgggagtaaccccgaggtgcaaaagaaggtggatcatgaattagatgacgtctttggtaagagcgatcggcctgccacagtagaagaccttaaaaagttaaggtatctggaatgtgtgatcaaagaaaccctgcggctttttccctccgtccccctgtttgcacgatctgtttccgaggactgcgaagtagcgggataccgtgttctgaaagggaccgaagcagtaattatcccttacgcattacatagggatccccgatacttccctaatccagaggaatttcagcccgagagattctttccagagaacgctcaagggaggcatccatacgcctacgttccattctctgcaggtcccagaaactgcattggccaaaaattcgcagtaatggaagagaagacaatcctctcttgcatactgcgccatttttggatagagagcaaccaaaagcgggaggagcttggtctggaaggacaattgatcctaaggccgtctaatgggatctggatcaaactgaaaaggcggaatgcggatgaacgttag

SEQ ID NO: 265257 - DNA, 4333 bp, Artificial Sequence
  derived and/or modified sequence
atggcggggctctggctggggctcgtgtggcagaagctgctgctgtggggcgcggcgagtgccctttccctggccggcgccagtctggtcctgagcctgctgcagagggtggcgagctacgcgctgctgatgaagccggacgggcgagaattttttcagcagatcattgagtacacagaggaataccgccacatgccgctgctgaagctctgggtcgggccagtgcccatggtggccctttataatgcagaaaatgtggaggtaattttaactagttcaaagcaaattgacaaatcctctatgtacaagtttttagaaccatggcttggcctaggacttcttacaagtactggaaacaaatggcgctccaggagaaagatgttaacacccactttccattttaccattctggaagatttcttagatatcatgaatgaacaagcaaatatattggttaagaaacttgaaaaacacattaaccaagaagcatttaactgctttttttacatcactctttgtgccttagatatcatctgtgaaacagctatggggaagaatattggtgctcaaagtaatgatgattccgagtatgtccgtgcagtttatagaatgagtgagatgatatttcgaagaataaagatgccctggctttggcttgatctctggtaccttatgtttaaagaaggatgggaacacaaaaagagccttcagatcctacatacttttaccaacagtgtcatcgctgaacgggccaatgaaatgaacgccaatgaagactgtagaggtgatggcaggggctctgccccctccaaaaataaacgcagggcctttcttgacttgcttttaagtgtgactgatgacgaagggaacaggctaagtcatgaagatattcgagaagaagttgacaccttcatgtttgaggggcacgatacaactgcagctgcaataaactggtccttatacctgttgggttctaacccagaagtccagaaaaaagtggatcatgaattggatgacgtgtttgggaagtctgaccgtcccgctacagtagaagacctgaagaaacttcggtatctggaatgtgttattaaggagacccttcgcctttttccttctgttcctttatttgcccgtagtgttagtgaagattgtgaagtggcaggttacagagttctaaaaggcactgaagccgtcatcattccctatgcattgcacagagatccgagatacttccccaaccccgaggagttccagcctgagcggttcttccccgagaatgcacaagggcgccatccatatgcctacgtgcccttctctgctggccccaggaactgtataggtcaaaagtttgctgtgatggaagaaaagaccattctttcgtgcatcctgaggcacttttggatagaatccaaccagaaaagagaagagcttggtctagaaggacagttgattcttcgtccaagtaatggcatctggatcaagttgaagaggagaaatgcagatgaacgctaactatattattgggttgtgcctttatcatgagaaaggtctttattttaagagatccttgtcatttacaatttacagatcatgagttcaatatgcttgaatcccctagacctaatttttccttgatcccactgatcttgacatcaagtctaacaaagaaaaagttttgagttttgtattttcttttttcttttttctttattttttttttttgaaaccgtgtctcactctgtcgcccaggctggaggagtgcagtggtgtgatctcagctcactgcaacctccacctcccaggttcaagcaattcttctgcctcagcctcccaagtagctgggattacaggtgcctgccaccatgcctggctaatttttttgtatttttagtagaaacagggtgtcaccatgttggccagactggtctcaaactcctgacctcaagtgatccacctgcctcagcctcccaaagtgctgggattatagtcgtgagccaccacgcctggccagagttttttatttttatcaccaccatagatgttacagttggctgtggtcacaaaagtagttaattgtgtcagcacccaaataaacatctaacaggtttctcaacagaggaatccacagtccaattccacttcaattgatagacccaaaaaatataatttaatcaaagttctagagtttttgtttgtttgtttgagatggagtcttgctctgtcgcccaggctggaacgcagtggtgacatctcggctcactgcaacctccacctcccaggttcaagtgattctcctgcctcagcctcctgagtagctgggactacaggcgcctgccaccacgcccagctaatttttgtatttttagtagagatggggtttcaccatgttggccaggatggtcttgatctcttgacctcgtgatctgcctgcctcggcctcccaaagtgctggcattacaggcatgagccaccatgcctggcccaaagttctagaattttttaaaggtattcatggtgactcaggaatacacacatacacacacacacacacacacacacacacacacatacacacatataatttgaaagaggtgagtatgtactctgacttcagctctcaggttttaaaaattatattagtgggaccagttatgacaagaataatcattatagtacttttcagattttataacctggagcagattattttaagttgattagtaggttctgttacagtttttcttttgatcgtgcacttatagtcttcatttaattcctcatagaatcccagtcacctttatatatcatattattggaagagattcatcttcataatctccagttttttcacagtgcctcacagagttaatcatgccttttggagctagaaggactttagaacttatctagttatgctcctttatattataagtaagggaatagaatcaataagacagtttctgcccaaagtcatgttaccagttggtgacagagctggaaatacgtagagatctatacccttaaatctctccactcacatgctgatatactttctactacaatatgctatagctttatggaactcagggtgatgatcagacgtgtcattagaacatgagtcctctgcttctgattcaggcatacttttgggattcttccatctttaaaggaaaaaggaagccattcatctatatttagtaacccagtaatatctcacttagtttagggttagatctttagttaattcaaccttatagatcatacttatgaaggtgataactgacacgtgttcactgaattttaatttgataggcaatacatctacccactccattattttttaaaacttcatttaatagtttaaacaagattggttttgttttcaatttttattcactcttcatagaatcacaattacctttatatatcatatgttattggaagagattcctcagtaatctccaatctctcatagtgcctcacagggttggtcaatggcttttggaactggaaggaccttagaacttatctgttatgctcctgatagccaatagcagatagaagcttgcaatcaagagggtaggacatgtgttcttcaatggatatcaaaggaagaggttgcaaaccaaagccatttggcaagccctgtagcctgggccatttaagacaggggcggtctcagccaaattgcacccatttaactatcccaaagagccacagtgcctacaacccaggccctaagttgatgaagaaaaagtcaaggaaggaggtgatacaattggaaatattcccatcaaatggttaatcttatttagaaaatgggcatattagaaaaagtccttccaagatgattttggataataaaagttgtatttgtggaaattggtattatctctgttttatgcacttacatttatcccttacattttgtttttagtgaccctacatgacattaaatttaaagtaaaacattgtttaatgttaccttttggcttgagaatgtctttcagctccagaattattgttactcatattttaatcagtaagtcatttaagctatgacagagtaggaattgagaaattatttcatatgctacagtattgaaatgtggatgctgccttgttttataagaagatgatcaaggtttgtgtgcccattacctttcctctgcctgaaagacgtgtctcaagaaaaataaattctattttagatgcaggtactgcattttattctaagaattgatatcaattcaaaacatagaaaactgtaaaagataaatcaggagatggctgattcataatgggtaataaaataaatagcactttcgagctg

SEQ ID NO: 265258 - DNA, 2042 bp, Artificial Sequence
  derived and/or modified sequence
gggcctccagtgcaatcactacgccctggggcccggaaaccgttttccggtctttcgctttcggctggggcgtggaggccgcggtgctgcgtaggccgggccgggcgcaggaacagccccgtggcgccctctctggccgccgcccgggcgggaaacgtcgttccggggaccgggcgaccccgcagcggggagcgcgccaggtccgcgcggggaagtgggcggtgtgcggccggcaccgcctcgcaccacgcccccgcgggcccgcactttcccggagtgcaccccgcggccgccagccggggcgatggcggggctctggctggggctcgtgtggcagaagctgctgctgtggggcgcggcgagtgccctttccctggccggcgccagtctggtcctgagcctgctgcagagggtggcgagctacgcgcggaaatggcagcagatgcggcccatccccacggtggcccgcgcctacccactggtgggccacgcgctgctgatgaagccggacgggcgagaattttttcagcagatcattgagtacacagaggaataccgccacatgccgctgctgaagctctgggtcgggccagtgcccatggtggccctttataatgcagaaaatgtggaggtaattttaactagttcaaagcaaattgacaaatcctctatgtacaagtttttagaaccatggcttggcctaggacttcttacaagtactggaaacaaatggcgctccaggagaaagatgttaacacccactttccattttaccattctggaagatttcttagatatcatgaatgaacaagcaaatatattggttaagaaacttgaaaaacacattaaccaagaagcatttaactgctttttttacatcactctttgtgccttagatatcatctgtgaaacagctatggggaagaatattggtgctcaaagtaatgatgattccgagtatgtccgtgcagtttatagaatgagtgagatgatatttcgaagaataaagatgccctggctttggcttgatctctggtaccttatgtttaaagaaggatgggaacacaaaaagagccttcagatcctacatacttttaccaacagtgtcatcgctgaacgggccaatgaaatgaacgccaatgaagactgtagaggtgatggcaggggctctgccccctccaaaaataaacgcagggcctttcttgacttgcttttaagtgtgactgatgacgaagggaacaggctaagtcatgaagatattcgagaagaagttgacaccttcatgtttgaggggcacgatacaactgcagctgcaataaactggtccttatacctgttgggttctaacccagaagtccagaaaaaagtggatcatgaattggatgacgtgtttgggaagtctgaccgtcccgctacagtagaagacctgaagaaacttcggtatctggaatgtgttattaaggagacccttcgcctttttccttctgttcctttatttgcccgtagtgttagtgaagattgtgaagtggcaggttacagagttctaaaaggcactgaagccgtcatcattccctatgcattgcacagagatccgagatacttccccaaccccgaggagttccagcctgagcggttcttccccgagaatgcacaagggcgccatccatatgcctacgtgcccttctctgctggccccaggaactgtataggtcaaaagtttgctgtgatggaagaaaagaccattctttcgtgcatcctgaggcacttttggatagaatccaaccagaaaagagaagagcttggtctagaaggacagttgattcttcgtccaagtaatggcatctggatcaagttgaagaggagaaatgcagatgaacgctaactatattattgggttgtgcctttatcatgagaaaggtctttattttaagagatccttgtcatttacaatttacagatcatgagttcaatatgcttgaatcccctagacctaatttttccttgatcccactgatcttgacatcaagtctaacaaagaaaaa

SEQ ID NO: 265259 - DNA, 1512 bp, Artificial Sequence
  derived and/or modified sequence
atggccggcctgtggctgggcctggtgtggcagaagctgctgctgtggggcgccgccagcgccctgagcctggccggcgccagcctggtgctgagcctgctgcagagagtggccagctacgccctgctgatgaagcccgacggcagagagttcttccagcagatcatcgagtacaccgaggagtacagacacatgcccctgctgaagctgtgggtgggccccgtgcccatggtggccctgtacaacgccgagaacgtggaggtgatcctgaccagcagcaagcagatcgacaagagcagcatgtacaagttcctggagccctggctgggcctgggcctgctgaccagcaccggcaacaagtggagaagcagaagaaagatgctgacccccaccttccacttcaccatcctggaggacttcctggacatcatgaacgagcaggccaacatcctggtgaagaagctggagaagcacatcaaccaggaggccttcaactgcttcttctacatcaccctgtgcgccctggacatcatctgcgagaccgccatgggcaagaacatcggcgcccagagcaacgacgacagcgagtacgtgagagccgtgtacagaatgagcgagatgatcttcagaagaatcaagatgccctggctgtggctggacctgtggtacctgatgttcaaggagggctgggagcacaagaagagcctgcagatcctgcacaccttcaccaacagcgtgatcgccgagagagccaacgagatgaacgccaacgaggactgcagaggcgacggcagaggcagcgcccccagcaagaacaagagaagagccttcctggacctgctgctgagcgtgaccgacgacgagggcaacagactgagccacgaggacatcagagaggaggtggacaccttcatgttcgagggccacgacaccaccgccgccgccatcaactggagcctgtacctgctgggcagcaaccccgaggtgcagaagaaggtggaccacgagctggacgacgtgttcggcaagagcgacagacccgccaccgtggaggacctgaagaagctgagatacctggagtgcgtgatcaaggagaccctgagactgttccccagcgtgcccctgttcgccagaagcgtgagcgaggactgcgaggtggccggctacagagtgctgaagggcaccgaggccgtgatcatcccctacgccctgcacagagaccccagatacttccccaaccccgaggagttccagcccgagagattcttccccgagaacgcccagggcagacacccctacgcctacgtgcccttcagcgccggccccagaaactgcatcggccagaagttcgccgtgatggaggagaagaccatcctgagctgcatcctgagacacttctggatcgagagcaaccagaagagagaggagctgggcctggagggccagctgatcctgagacccagcaacggcatctggatcaagctgaagagaagaaacgccgacgagagatag

SEQ ID NO: 265260 - DNA, 1578 bp, Artificial Sequence
  derived and/or modified sequence
atggccggcctgtggctgggcctggtgtggcagaagctgctgctgtggggcgccgccagcgccctgagcctggccggcgccagcctggtgctgagcctgctgcagagagtggccagctacgccagaaagtggcagcagatgagacccatccccaccgtggccagagcctaccccctggtgggccacgccctgctgatgaagcccgacggcagagagttcttccagcagatcatcgagtacaccgaggagtacagacacatgcccctgctgaagctgtgggtgggccccgtgcccatggtggccctgtacaacgccgagaacgtggaggtgatcctgaccagcagcaagcagatcgacaagagcagcatgtacaagttcctggagccctggctgggcctgggcctgctgaccagcaccggcaacaagtggagaagcagaagaaagatgctgacccccaccttccacttcaccatcctggaggacttcctggacatcatgaacgagcaggccaacatcctggtgaagaagctggagaagcacatcaaccaggaggccttcaactgcttcttctacatcaccctgtgcgccctggacatcatctgcgagaccgccatgggcaagaacatcggcgcccagagcaacgacgacagcgagtacgtgagagccgtgtacagaatgagcgagatgatcttcagaagaatcaagatgccctggctgtggctggacctgtggtacctgatgttcaaggagggctgggagcacaagaagagcctgcagatcctgcacaccttcaccaacagcgtgatcgccgagagagccaacgagatgaacgccaacgaggactgcagaggcgacggcagaggcagcgcccccagcaagaacaagagaagagccttcctggacctgctgctgagcgtgaccgacgacgagggcaacagactgagccacgaggacatcagagaggaggtggacaccttcatgttcgagggccacgacaccaccgccgccgccatcaactggagcctgtacctgctgggcagcaaccccgaggtgcagaagaaggtggaccacgagctggacgacgtgttcggcaagagcgacagacccgccaccgtggaggacctgaagaagctgagatacctggagtgcgtgatcaaggagaccctgagactgttccccagcgtgcccctgttcgccagaagcgtgagcgaggactgcgaggtggccggctacagagtgctgaagggcaccgaggccgtgatcatcccctacgccctgcacagagaccccagatacttccccaaccccgaggagttccagcccgagagattcttccccgagaacgcccagggcagacacccctacgcctacgtgcccttcagcgccggccccagaaactgcatcggccagaagttcgccgtgatggaggagaagaccatcctgagctgcatcctgagacacttctggatcgagagcaaccagaagagagaggagctgggcctggagggccagctgatcctgagacccagcaacggcatctggatcaagctgaagagaagaaacgccgacgagagatag

SEQ ID NO: 265261 - protein, 521 aa, Artificial Sequence
  derived and/or modified sequence
MSSDSDRQCPVDGDIDQQEMIPSKKNAVLVDGVVLNGPTTDAKAGEKFVEEACRLIMEEVVLKATDVNEKVCEWRPPEQLKQLLDLEMRDSGEPPHKLLELCRDVIHYSVKTNHPRFFNQLYAGLDYYSLVARFMTEALNPSVYTYEVSPVFLLVEEAVLKKMIEFIGWKEGDGIFNPGGSVSNMYAMNLARYKYCPDIKEKGLSGSPRLILFTSAECHYSMKKAASFLGIGTENVCFVETDGRGKMIPEELEKQVWQARKEGAAPFLVCATSGTTVLGAFDPLDEIADICERHSLWLHVDASWGGSALMSRKHRKLLHGIHRADSVAWNPHKMLMAGIQCCALLVKDKSDLLKKCYSAKASYLFQQDKFYDVSYDTGDKSIQCSRRPDAFKFWMTWKALGTLGLEERVNRALALSRYLVDEIKKREGFKLLMEPEYANICFWYIPPSLREMEEGPEFWAKLNLVAPAIKERMMKKGSLMLGYQPHRGKVNFFRQVVISPQVSREDMDFLLDEIDLLGKDM

SEQ ID NO: 265262 - DNA, 1566 bp, Artificial Sequence
  derived and/or modified sequence
atgagcagcgacagcgacagacagtgccccgtggacggcgacatcgaccagcaggagatgatccccagcaagaagaacgccgtgctggtggacggcgtggtgctgaacggccccaccaccgacgccaaggccggcgagaagttcgtggaggaggcctgcagactgatcatggaggaggtggtgctgaaggccaccgacgtgaacgagaaggtgtgcgagtggagaccccccgagcagctgaagcagctgctggacctggagatgagagacagcggcgagcccccccacaagctgctggagctgtgcagagacgtgatccactacagcgtgaagaccaaccaccccagattcttcaaccagctgtacgccggcctggactactacagcctggtggccagattcatgaccgaggccctgaaccccagcgtgtacacctacgaggtgagccccgtgttcctgctggtggaggaggccgtgctgaagaagatgatcgagttcatcggctggaaggagggcgacggcatcttcaaccccggcggcagcgtgagcaacatgtacgccatgaacctggccagatacaagtactgccccgacatcaaggagaagggcctgagcggcagccccagactgatcctgttcaccagcgccgagtgccactacagcatgaagaaggccgccagcttcctgggcatcggcaccgagaacgtgtgcttcgtggagaccgacggcagaggcaagatgatccccgaggagctggagaagcaggtgtggcaggccagaaaggagggcgccgcccccttcctggtgtgcgccaccagcggcaccaccgtgctgggcgccttcgaccccctggacgagatcgccgacatctgcgagagacacagcctgtggctgcacgtggacgccagctggggcggcagcgccctgatgagcagaaagcacagaaagctgctgcacggcatccacagagccgacagcgtggcctggaacccccacaagatgctgatggccggcatccagtgctgcgccctgctggtgaaggacaagagcgacctgctgaagaagtgctacagcgccaaggccagctacctgttccagcaggacaagttctacgacgtgagctacgacaccggcgacaagagcatccagtgcagcagaagacccgacgccttcaagttctggatgacctggaaggccctgggcaccctgggcctggaggagagagtgaacagagccctggccctgagcagatacctggtggacgagatcaagaagagagagggcttcaagctgctgatggagcccgagtacgccaacatctgcttctggtacatcccccccagcctgagagagatggaggagggccccgagttctgggccaagctgaacctggtggcccccgccatcaaggagagaatgatgaagaagggcagcctgatgctgggctaccagccccacagaggcaaggtgaacttcttcagacaggtggtgatcagcccccaggtgagcagagaggacatggacttcctgctggacgagatcgacctgctgggcaaggacatgtag

SEQ ID NO: 265263 - DNA, 1566 bp, Artificial Sequence
  derived and/or modified sequence
atgagcagtgactcagaccgccagtgtccagtggatggggacattgaccagcaggagatgattccctccaagaaaaatgccgtgctggttgacggcgtagtcctgaacggccccaccacagatgccaaggcaggggagaaattcgtggaggaggcatgcagattaattatggaggaggtcgtactcaaggctacggatgtgaacgagaaagtttgtgagtggaggccgccggagcagctcaagcagctgctggacttagaaatgagggatagcggggagccaccccataaattgctggaactctgtagagacgtgatccattattcagtaaaaactaatcacccaagattcttcaaccagctgtacgccgggctggactactacagcctggtggctcggttcatgactgaggcgctgaacccctcagtgtatacatatgaggtctcgcctgtgttcctgctcgttgaggaggccgtgctcaaaaagatgattgagtttataggatggaaagagggcgatggaattttcaaccccggggggtccgtgagcaatatgtatgccatgaatttagcacgatacaaatattgccccgatattaaggaaaagggcctatcaggaagtcctcgcctcattctgttcacttccgcggagtgtcattatagcatgaagaaagcagccagctttctgggcattgggaccgaaaacgtgtgcttcgtggagacagatgggagagggaagatgattccagaggagctcgaaaagcaggtgtggcaggcgcggaaggagggcgctgccccctttctcgtgtgtgcaacatcagggacaacggtcctaggcgccttcgatcctctagacgagattgccgatatttgcgaacggcactcactttggctgcacgtggacgccagctggggagggagcgctctaatgagccggaagcatcgaaagctattgcatggcattcatcgcgcagacagcgttgcctggaacccgcacaagatgctaatggccggcatacaatgttgcgctctgctcgttaaggataagagcgatctacttaagaagtgttatagtgccaaggcctcctatctgttccagcaggacaaattctatgacgtgtcatacgacacaggggataaatctattcagtgttctaggaggcctgatgcctttaaattctggatgacatggaaggctctgggcaccctggggctcgaggaaagggtcaacagggctctggccctgtcccggtacctggttgacgagataaagaagcgagaggggttcaaactgttaatggaaccggagtatgccaacatatgtttctggtatattccaccaagtttaagagagatggaagaagggcccgagttttgggccaaactcaaccttgtcgctcctgctattaaggaaagaatgatgaaaaaaggctccctgatgcttggctaccagcctcaccggggcaaagtgaatttcttccgccaggtggtgatttctccccaagtctcgcgggaagacatggattttttgctggatgaaattgatctcttggggaaagacatgtag

SEQ ID NO: 265264 - DNA, 1566 bp, Artificial Sequence
  derived and/or modified sequence
atgagcagtgacagcgaccggcagtgccctgtggatggagacatcgaccagcaggagatgatccccagcaagaagaatgctgtgctggtggatggagtggtgctgaatggccccaccacagatgccaaggccggggagaagtttgtggaggaggcctgccgcctcatcatggaggaggtggtgctgaaggccacagatgtgaatgagaaggtgtgtgagtggaggcctcctgagcagctgaagcagctgctggacctggagatgagggacagcggggagcccccccacaagctgctggagctgtgcagagatgtgatccactacagcgtgaagaccaaccacccccgcttcttcaaccagctgtatgccggcctggactactacagcctggtggcccgcttcatgacagaggccctgaaccccagcgtgtacacctatgaggtgtcccctgtgttcctgctggtggaggaggccgtgctgaagaagatgattgagttcatcggctggaaggagggagatggcatcttcaaccctgggggctctgtgagcaacatgtatgccatgaacctggcccgctacaagtactgcccagacatcaaggagaagggcctgagcggcagccccaggctcatcctcttcaccagcgctgagtgccactacagcatgaagaaggccgccagcttcctgggcattggaacagaaaatgtgtgctttgtggagacagatggccggggcaagatgatccctgaggagctggagaagcaggtgtggcaggccaggaaggagggcgccgcccccttcctggtgtgtgccaccagcggcaccaccgtgctgggcgcctttgaccccctggatgaaattgctgacatctgtgagcggcacagcctgtggctgcacgtggatgcctcctggggcggcagcgccctgatgagcaggaagcacaggaagctgctgcacggcatccacagagctgacagcgtggcctggaacccccacaagatgctgatggccggcatccagtgctgtgccctgctggtgaaggacaagagtgacctgctgaagaagtgctacagcgccaaggccagctacctgttccagcaggacaagttctatgatgtgtcctatgacacaggagacaagagcatccagtgcagccggcggccagatgccttcaagttctggatgacctggaaggccctgggcaccctgggcctggaggagcgggtgaacagagccctggccctgagccgctacctggtggatgagatcaagaagcgggagggcttcaagctgctgatggagccagaatatgccaacatctgcttctggtacatcccccccagcctgcgggagatggaggagggccctgagttctgggccaagctgaacctggtggccccagccatcaaggagaggatgatgaagaagggcagcctgatgctgggctaccagccccaccggggcaaggtgaacttcttccggcaggtggtgatcagcccccaggtgtcccgggaggacatggacttcctgctggatgaaattgacctgctgggcaaggacatgtag

SEQ ID NO: 265265 - DNA, 3759 bp, Artificial Sequence
  derived and/or modified sequence
gcgcgtcctcgtccctccgtttgcactggtgttctctccgcggctgcctggtgcacctgcgggtcccccggggggcgctgcctcggcaaccaccgtcgccgcccagactgcgggagccgcgcccggggcagcctggagtgggggagcggagatgagcagcgactcggaccgccagtgtcctgtggacggagatattgatcaacaagagatgattccaagtaagaagaatgctgttcttgtggatggggttgtgctgaatggtcctacaacagatgcaaaagctggagaaaaatttgttgaagaggcctgtaggctaataatggaagaggtggttttgaaagctacagatgtcaatgagaaggtgtgtgaatggaggcctcctgaacaactgaaacagcttcttgatttggagatgagagactcaggcgagccaccccataaactattggaactctgtcgggatgtcatacactacagtgtcaaaactaaccacccaagatttttcaaccaattgtatgctggacttgattattactccttggtggcccgatttatgaccgaagcattgaatccaagtgtttatacgtatgaggtgtccccagtgtttctgttagtggaagaagcggttctgaagaaaatgattgaatttattggctggaaagaaggggatggaatatttaacccaggtggctcagtgtccaatatgtatgcaatgaatttagctagatacaaatattgtcctgatattaaggaaaaggggctgtctggttcgccaagattaatccttttcacatctgcagagtgtcattactctatgaagaaggcagcctcttttcttgggattggcactgagaatgtttgctttgtggaaacagatggaagaggtaaaatgatacctgaggaactggagaagcaagtctggcaagccagaaaagagggggcagcaccgtttcttgtctgtgccacttctggtacaactgtgttgggagcttttgaccctctggatgaaatagcagacatctgcgagaggcacagcctctggcttcatgtagatgcttcttggggtggctcagctttgatgtcgaggaagcaccgcaagcttctgcatggcatccacagggctgactctgtggcctggaacccacacaagatgctgatggctgggatccagtgctgtgctctccttgtgaaagacaaatctgatcttcttaaaaaatgctactctgccaaggcatcttacctcttccagcaggataaattctatgatgtgagctatgacacaggagacaagtctatccagtgtagcagaagaccagatgcattcaagttctggatgacctggaaggccctgggtacattaggccttgaagaaagagttaatcgtgctcttgctttatctaggtacctagtagatgaaatcaagaaaagagaaggattcaagttactgatggaacctgaatatgccaatatttgcttttggtacattccaccgagcctcagagagatggaagaaggacccgagttctgggcaaaacttaatttggtggccccagccattaaggagaggatgatgaagaagggaagcttgatgctgggctaccagccgcaccggggaaaggtcaacttcttccgccaggtggtgatcagccctcaagtgagccgggaggacatggacttcctcctggatgagatagacttactgggtaaagacatgtagctgtggctttggtcccccagaggcatagatcctatcctgggagagtttagatccagaacatcttggagatacacagtagattgcagcccttctgatgagaaatagggaatactcccagtccaggcccagcaaaaccaaaatgctaagcaatgaatattaaggactctctagctgcctgggcattactgttgctaaaagaagaaagtttaaaaaaaaaaatgattttctcaaggaatgcccctggaacacagctctgaagagagtttagtaagtaccatgtaggttctggattctaagcttacattgctctttaaagaacttataaactaacggtttaaagcagtggttctcaaagtgtggtccctggactatcagcatcaaagcatcacctgggaacttgctaaaaatgcagattctcaggctttctctagaccaactggatcagaagctctgggggtgaggcccagtattctgtgttttaacaagcccgtcagggaattctgatgcacagtaaaatccgagaaacactggtttaagaaaaaccttgtaatgatcgaatacccactctgatgttttgccagcaaagggatatctaatatttcagaagcctctgagccagtctttgaaaaaatacaactatggcatctgcagcacaaatatttaaggacatcagaagcatgtcaaagctatttttaaagagagaaactgtataagatgtttacttcatagagatttatgttttatgcaggctgaatgtttatctcaaaagttaaaattatccattctcaaaagttaaaattatatatatatatatatatacacacacacacatatatatatatatataattcaaagcacaataattgaaagcacaataattgacagaaaaatacaggttctattaataaattaataaactgttggtcttcaaaatagaaatgcatgtaatatccatattagttttttcttggtagacaactggaaggttttcttttttttcgtctatgactaattttctttattcaagatacctgaactggggtgctttttaagaaaaatttgggaaatatatatgtttctgtgatatacatatatacatatatatgtatatatatacacacacatacatatgtgtgtgtatagtatatatatatatacacacatatatgtttctgtgttcctcttttagcttgaggggcttgtttattatcttgctctgtgcctcatagggaataaacacaatgaagtccagggttgtacaacattccctttcctaagctttgaaatgtcagtatagattattaagtggtttatattacagaatctgggattcagcagactttcagtgtaaatgcttcctccatttctcctgagagtgggtgattttaattctatctctgaccctggtcctaggtttctaggagagttttgtttaactaagaaattgacagaattcataggtgtgggtgtagagttcaccaagataagattatgaatataattaaaggtctgcattaaaaggtgaatgattgaagagtgttaaagcattagacttagcacattcaataaccttttcgtactccattgttaaccaatgtcatttaaattttgagtactatttgcttttattgcttattttcattttagtgtgcacagtttctcggtatctctattggtcaaagaatattaaatctgtctctgaattacttcaaattctcaggtgaaacctattggtgtgtgtgtgtgtgtgtgtgtgtttattttgcatttcttgttgcctttttgttttaatgtctacataaaatatttctaaaattgatgtttgtaacaatttgggtttcatgaaacaaaaaggaacattactatacttagtgttgttgacttttcttttcctgtcatctcctctttactggattgtaccaatacattttagaagtgaactggacttggttggcattttagtttaatgactgaaaaagtaggttgaaagctctctgtattttagttaacaccttgaataaaatggaaaaagcagttatagc

SEQ ID NO: 265266 - DNA, 1566 bp, Artificial Sequence
  derived and/or modified sequence
atgagcagcgacagcgaccggcagtgccccgtggacggcgacatcgatcagcaggagatgatcccctccaagaagaatgcagttctggtcgacggggtggttctaaacggccccacaaccgacgctaaggctggggagaagttcgtggaagaggcatgccgcctgattatggaggaagtggtactcaaggcaaccgacgtcaatgagaaagtatgcgaatggaggcctccagaacagttgaagcaacttctggatctcgaaatgcgagattccggggaacccccacataagctccttgagctgtgccgtgacgtgattcactacagtgtcaagacaaaccaccctcggttctttaaccaactttacgctgggctcgactactactcgcttgttgcaagattcatgacagaggctctgaacccttcagtgtacacatacgaagtgagtcctgtgttcctcctagtcgaggaggccgtgttaaaaaagatgattgagttcataggctggaaagaaggagatgggatattcaacccaggcggctcagtgtctaacatgtacgctatgaacctcgccagatacaagtattgtcctgacatcaaagaaaaaggattgagtggaagccctcgcttgatcttatttaccagtgcagagtgccactattcaatgaagaaggctgcaagttttttggggattggaaccgagaatgtttgctttgtggagaccgacggaaggggaaagatgatccccgaggagctggagaaacaagtctggcaggctagaaaggaaggtgccgctccttttctggtctgtgccacatcaggcaccacagtcttgggggcatttgaccctctggacgagatcgccgacatttgcgagagacattccctttggctgcatgtcgacgcatcctggggtggctccgccctaatgtccagaaaacaccgaaaactactgcacgggatccaccgcgctgacagtgtcgcctggaacccacacaagatgctgatggcgggcattcagtgctgtgccctgctggtgaaggacaagagcgacctgttaaagaaatgctatagcgcaaaggcttcctacctgttccagcaagacaagttctatgatgtatcctatgacactggcgacaaaagcatccagtgtagcagacggcccgacgcttttaagttctggatgacttggaaggctctcggcacattggggctggaggaaagagtgaatagagctcttgccctgtcccgctatctagtggatgagataaaaaagcgggagggatttaagctcttgatggaaccagaatacgccaatatttgcttttggtatattccaccgagcctacgagagatggaagaaggcccagagttttgggccaagttaaatctggtggcaccagctattaaggagcgtatgatgaagaaagggtccctcatgttgggttatcagccccataggggaaaagtgaactttttccgccaagttgttatttcacctcaggttagccgcgaggacatggatttcctccttgacgagatcgatctgctgggcaaggacatgtag

SEQ ID NO: 265267 - DNA, 1566 bp, Artificial Sequence
  derived and/or modified sequence
atgtcctcagattcagatagacagtgtccagtggatggtgacatcgaccagcaagagatgataccgtcaaagaagaatgctgttctggtggacggggtcgtgctgaacggcccaaccacagacgccaaagccggagaaaaatttgtggaggaagcgtgtcggctgataatggaagaggtggtattgaaagctaccgacgtaaatgaaaaggtttgcgagtggcgccctccagagcagttgaaacagctgcttgatcttgaaatgcgcgactccggtgagcctcctcataagctgttggaactgtgtcgcgacgtgatacattatagtgtgaaaactaaccaccctagattctttaaccagctctatgcagggctcgactactactcactggtggcccgatttatgactgaggctttaaatccctctgtatacacatacgaggtgtcgcccgtgttcttgctcgttgaggaggctgtgctgaagaagatgattgagtttattggttggaaggagggtgacggcattttcaatccagggggatctgtaagtaatatgtacgcaatgaatcttgctaggtacaaatactgccccgatattaaggaaaaagggctatccggttccccacggttaatactttttacgtcggccgaatgccactacagtatgaaaaaggccgcaagtttcctgggcatcggaaccgaaaatgtctgctttgtggaaaccgacggacggggaaagatgatcccggaggaattagaaaaacaggtctggcaggctcgaaaggagggtgctgccccattcttggtctgtgcgacctccggaaccactgtgctcggagcctttgatccgctcgacgagattgctgacatctgtgagaggcactccctttggctccatgtcgacgcatcatggggcggaagcgccttgatgtcccggaagcaccgaaaattgctccacggcattcaccgggctgattcagtggcctggaacccccataagatgctgatggcaggcattcagtgctgcgcccttctggtcaaggacaaatccgatctgcttaagaagtgctactctgccaaagcctcgtacttgttccagcaggacaagttctacgatgtgagctatgacaccggtgacaaatccattcagtgttctagaaggccagacgcattcaagttctggatgacttggaaggctttgggaaccttgggattagaagagcgggtaaatagggccctcgctctgtctcggtatctcgtggatgaaataaagaaacgggaggggtttaagctgctgatggaacctgagtatgccaacatttgcttttggtatatccctccaagtctccgggagatggaggagggtcccgaattttgggcaaagctgaacctggtggcacccgctataaaagagagaatgatgaaaaagggctctctcatgctgggctaccagccccacagaggcaaagtgaacttcttccggcaggtggtgatttccccacaagtaagtcgagaagatatggatttcctattggacgagatcgacctcctgggaaaggacatgtag

SEQ ID NO: 265268 - protein, 527 aa, Artificial Sequence
  derived and/or modified sequence
MEHPSKMEFFQKLGYDREDVLRVLGKLGEGALVNDVLQELIRTGSRPGALEHPAAPRLVPRGSCGVPDSAQRGPGTALEEDFRTLASSLRPIVIDGSNVAMSHGNKETFSCRGIKLAVDWFRDRGHTYIKVFVPSWRKDPPRADTPIREQHVLAELERQAVLVYTPSRKVHGKRLVCYDDRYIVKVAYEQDGVIVSNDNYRDLQSENPEWKWFIEQRLLMFSFVNDRFMPPDDPLGRHGPSLSNFLSRKPKPPEPSWQHCPYGKKCTYGIKCKFYHPERPHHAQLAVADELRAKTGARPGAGAEEQRPPRAPGGSAGARAAPREPFAHSLPPARGSPDLAALRGSFSRLAFSDDLGPLGPPLPVPACSLTPRLGGPDWVSAGGRVPGPLSLPSPESQFSPGDLPPPPGLQLQPRGEHRPRDLHGDLLSPRRPPDDPWARPPRSDRFPGRSVWAEPAWGDGATGGLSVYATEDDEGDARARARIALYSVFPRDQVDRVMAAFPELSDLARLILLVQRCQSAGAPLGKP

SEQ ID NO: 265269 - protein, 321 aa, Artificial Sequence
  derived and/or modified sequence
MEHPSKMEFFQKLGYDREDVLRVLGKLGEGALVNDVLQELIRTGSRPGALEHPAAPRLVPRGSCGVPDSAQRGPGTALEEDFRTLASSLRPIVIDGSNVAMSHGNKETFSCRGIKLAVDWFRDRGHTYIKVFVPSWRKDPPRADTPIREQHVLAELERQAVLVYTPSRKVHGKRLVCYDDRYIVKVAYEQDGVIVSNDNYRDLQSENPEWKWFIEQRLLMFSFVNDRFMPPDDPLGRHGPSLSNFLSRKPKPPEPSWQHCPYGKKCTYGIKCKFYHPERPHHAQLAVADELRAKTGARLGVRGRPPASARPAAPAAGRTPP

SEQ ID NO: 265270 - protein, 321 aa, Artificial Sequence
  derived and/or modified sequence
MEHPSKMEFFQKLGYDREDVLRVLGKLGEGALVNDVLQELIRTGSRPGALEHPAAPRLVPRGSCGVPDSAQRGPGTALEEDFRTLASSLRPIVIDGSNVAMSHGNKETFSCRGIKLAVDWFRDRGHTYIKVFVPSWRKDPPRADTPIREQHVLAELERQAVLVYTPSRKVHGKRLVCYDDRYIVKVAYEQDGVIVSNDNYRDLQSENPEWKWFIEQRLLMFSFVNDRFMPPDDPLGRHGPSLSNFLSRKPKPPEPSWQHCPYGKKCTYGIKCKFYHPERPHHAQLAVADELRAKTGARPVLPGRPPASARPAAPAAGRTPP

SEQ ID NO: 265271 - DNA, 1584 bp, Artificial Sequence
  derived and/or modified sequence
atggagcaccccagcaagatggagttcttccagaagctgggctacgacagagaggacgtgctgagagtgctgggcaagctgggcgagggcgccctggtgaacgacgtgctgcaggagctgatcagaaccggcagcagacccggcgccctggagcaccccgccgcccccagactggtgcccagaggcagctgcggcgtgcccgacagcgcccagagaggccccggcaccgccctggaggaggacttcagaaccctggccagcagcctgagacccatcgtgatcgacggcagcaacgtggccatgagccacggcaacaaggagaccttcagctgcagaggcatcaagctggccgtggactggttcagagacagaggccacacctacatcaaggtgttcgtgcccagctggagaaaggacccccccagagccgacacccccatcagagagcagcacgtgctggccgagctggagagacaggccgtgctggtgtacacccccagcagaaaggtgcacggcaagagactggtgtgctacgacgacagatacatcgtgaaggtggcctacgagcaggacggcgtgatcgtgagcaacgacaactacagagacctgcagagcgagaaccccgagtggaagtggttcatcgagcagagactgctgatgttcagcttcgtgaacgacagattcatgccccccgacgaccccctgggcagacacggccccagcctgagcaacttcctgagcagaaagcccaagccccccgagcccagctggcagcactgcccctacggcaagaagtgcacctacggcatcaagtgcaagttctaccaccccgagagaccccaccacgcccagctggccgtggccgacgagctgagagccaagaccggcgccagacccggcgccggcgccgaggagcagagaccccccagagcccccggcggcagcgccggcgccagagccgcccccagagagcccttcgcccacagcctgccccccgccagaggcagccccgacctggccgccctgagaggcagcttcagcagactggccttcagcgacgacctgggccccctgggcccccccctgcccgtgcccgcctgcagcctgacccccagactgggcggccccgactgggtgagcgccggcggcagagtgcccggccccctgagcctgcccagccccgagagccagttcagccccggcgacctgccccccccccccggcctgcagctgcagcccagaggcgagcacagacccagagacctgcacggcgacctgctgagccccagaagaccccccgacgacccctgggccagaccccccagaagcgacagattccccggcagaagcgtgtgggccgagcccgcctggggcgacggcgccaccggcggcctgagcgtgtacgccaccgaggacgacgagggcgacgccagagccagagccagaatcgccctgtacagcgtgttccccagagaccaggtggacagagtgatggccgccttccccgagctgagcgacctggccagactgatcctgctggtgcagagatgccagagcgccggcgcccccctgggcaagccctag

SEQ ID NO: 265272 - DNA, 966 bp, Artificial Sequence
  derived and/or modified sequence
atggagcaccccagcaagatggagttcttccagaagctgggctacgacagagaggacgtgctgagagtgctgggcaagctgggcgagggcgccctggtgaacgacgtgctgcaggagctgatcagaaccggcagcagacccggcgccctggagcaccccgccgcccccagactggtgcccagaggcagctgcggcgtgcccgacagcgcccagagaggccccggcaccgccctggaggaggacttcagaaccctggccagcagcctgagacccatcgtgatcgacggcagcaacgtggccatgagccacggcaacaaggagaccttcagctgcagaggcatcaagctggccgtggactggttcagagacagaggccacacctacatcaaggtgttcgtgcccagctggagaaaggacccccccagagccgacacccccatcagagagcagcacgtgctggccgagctggagagacaggccgtgctggtgtacacccccagcagaaaggtgcacggcaagagactggtgtgctacgacgacagatacatcgtgaaggtggcctacgagcaggacggcgtgatcgtgagcaacgacaactacagagacctgcagagcgagaaccccgagtggaagtggttcatcgagcagagactgctgatgttcagcttcgtgaacgacagattcatgccccccgacgaccccctgggcagacacggccccagcctgagcaacttcctgagcagaaagcccaagccccccgagcccagctggcagcactgcccctacggcaagaagtgcacctacggcatcaagtgcaagttctaccaccccgagagaccccaccacgcccagctggccgtggccgacgagctgagagccaagaccggcgccagactgggcgtgagaggcagaccccccgccagcgccagacccgccgcccccgccgccggcagaacccccccctag

SEQ ID NO: 265273 - DNA, 966 bp, Artificial Sequence
  derived and/or modified sequence
atggagcaccccagcaagatggagttcttccagaagctgggctacgacagagaggacgtgctgagagtgctgggcaagctgggcgagggcgccctggtgaacgacgtgctgcaggagctgatcagaaccggcagcagacccggcgccctggagcaccccgccgcccccagactggtgcccagaggcagctgcggcgtgcccgacagcgcccagagaggccccggcaccgccctggaggaggacttcagaaccctggccagcagcctgagacccatcgtgatcgacggcagcaacgtggccatgagccacggcaacaaggagaccttcagctgcagaggcatcaagctggccgtggactggttcagagacagaggccacacctacatcaaggtgttcgtgcccagctggagaaaggacccccccagagccgacacccccatcagagagcagcacgtgctggccgagctggagagacaggccgtgctggtgtacacccccagcagaaaggtgcacggcaagagactggtgtgctacgacgacagatacatcgtgaaggtggcctacgagcaggacggcgtgatcgtgagcaacgacaactacagagacctgcagagcgagaaccccgagtggaagtggttcatcgagcagagactgctgatgttcagcttcgtgaacgacagattcatgccccccgacgaccccctgggcagacacggccccagcctgagcaacttcctgagcagaaagcccaagccccccgagcccagctggcagcactgcccctacggcaagaagtgcacctacggcatcaagtgcaagttctaccaccccgagagaccccaccacgcccagctggccgtggccgacgagctgagagccaagaccggcgccagacccgtgctgcccggcagaccccccgccagcgccagacccgccgcccccgccgccggcagaacccccccctag

SEQ ID NO: 265274 - DNA, 1584 bp, Artificial Sequence
  derived and/or modified sequence
atggaacacccgagcaagatggagttctttcagaagctcgggtatgaccgggaggacgtgcttcgggtgttgggaaaactgggcgagggcgccctcgttaatgatgtactacaggagttgatacggacaggctcacgcccaggcgccctggaacaccccgccgccccgcgactcgtgccaagaggaagctgtggggtgcctgatagtgcccaaaggggaccaggcaccgctctggaagaagattttaggactttagccagtagcttacggcctattgtgattgatggatcaaacgttgccatgagtcacggcaataaggaaaccttctcttgcaggggtatcaagctggccgtggactggttccgagacagggggcacacctatattaaagtgtttgttccctcatggagaaaggaccccccccgggcggacacacctattcgggaacagcacgttttagcagaactggagaggcaggctgttctggtgtacacccctagcaggaaagtgcacggcaaacggctcgtgtgttacgatgatagatacatagtcaaggtcgcatatgagcaagacggggtcatagtctcaaacgacaactaccgtgacttgcagtccgagaatccggagtggaagtggttcattgagcaacgtctgctgatgttcagttttgtaaacgatcgtttcatgccaccagatgaccccttgggtcgtcacggaccgagcctgtctaacttcctgtctcgcaagccaaaaccaccagagcctagttggcagcactgcccctatgggaagaaatgcacgtacgggatcaagtgcaagttctaccacccagaaaggccccatcatgcccagctggcggtagctgacgaactgagggccaagacaggagccagacccggtgctggtgctgaagagcagcgccccccacgggcccccggaggctcagctggcgctagggcggccccccgggagccgtttgcccacagcctgccaccggctcgcggatcaccggacctggccgcattacgcggatctttctcacgactggcctttagcgatgatctgggtccactaggtcccccacttcctgtgcccgcttgtagcctgacaccgcgcctcggcggccccgattgggtttctgcaggcggtcgggtgcccggcccactgtctctgccgagccctgagtcgcagttcagtcctggcgacctgccacctccccctggcttacaacttcagcctagaggcgagcatagacctagagatctgcacggcgatcttttgtctcctcgaaggcctcccgatgatccctgggcccgtcctccccggtccgaccgctttccaggcaggagcgtctgggctgagcctgcatggggagatggtgctactggggggctcagcgtgtacgccaccgaagacgatgagggagatgcgcgcgcccgcgcccgtatcgctttgtactcagttttcccccgagatcaagtcgaccgcgttatggcagcatttccggaattgtccgatttagcccgattgatcttactcgtccagaggtgccagtctgccggagcacccctgggcaaaccttag

SEQ ID NO: 265275 - DNA, 1584 bp, Artificial Sequence
  derived and/or modified sequence
atggaacacccttccaagatggaattctttcagaagctagggtatgacagggaggatgtattacgggtcctaggcaagctgggagagggcgcccttgtgaacgatgtgctccaggaactgattcgaactggatctcggccgggggccctagagcaccccgcagctcccaggctagtacccaggggtagttgtggggtacccgactccgcacagcgcgggcccggaactgccctggaagaggatttccggactcttgcgtcttcattgaggcctatagtcatcgacgggagcaacgttgccatgtcacacggaaacaaggagacctttagttgtcgcggcattaaactcgctgttgactggtttagagaccggggacacacctatatcaaagtattcgtgccaagctggcgcaaagaccccccgagagcagatacgcccattagagagcagcatgtactggctgagcttgagagacaggccgtactggtctacacccctagtcgcaaggtgcatggcaagcgtctcgtgtgctacgatgatagatatatcgttaaggtcgcctacgaacaggacggtgtgatcgtctcaaacgataactacagagacctgcagtcagaaaatccagagtggaagtggttcatagaacagcgcctgcttatgtttagcttcgtgaacgatagattcatgcccccagacgatccattgggcagacatggcccatcgcttagcaacttcctgagcaggaaacctaagccaccagaacccagctggcaacactgcccttatggcaaaaaatgtacctatgggattaagtgtaaattctatcacccggaacggccgcatcacgcccaactggctgttgcggatgaactaagggcaaaaaccggcgctcggccaggcgctggggcagaagagcagaggccaccgagagcccctggtgggagcgcaggcgcccgagctgctccaagggaacccttcgcccattctctcccacctgcaagaggctcaccggatctggctgccttacgcgggagtttcagtaggctggcattctctgacgacctgggacccctcggtcctcccctgcccgtccccgcttgttcactcactcctcggctcggtgggccagactgggtctcagccggtgggcgtgtccccgggcccctgagccttcctagtccagagagccagttctcccccggggaccttccgccaccacccggactccagcttcagccaagaggggagcacagaccacgagatttgcatggagaccttctgtcgcctcggcgccctcccgacgacccatgggcccgaccaccgaggtcggatagatttcccggaagatcagtgtgggctgaacccgcatggggcgatggggccactgggggactgagcgtgtatgccactgaggatgacgagggggatgcccgggcacgcgccaggatcgcactttatagtgtgttcccaagagatcaagtggacagggtcatggctgcctttcccgagctctctgatctcgctcggctgattctgctcgtccagcgatgccagtccgccggagcccccttgggaaaaccatag

SEQ ID NO: 265276 - DNA, 966 bp, Artificial Sequence
  derived and/or modified sequence
atggagcatccatctaagatggaatttttccagaaacttggctacgatcgcgaagacgtattgcgagtgctgggcaagctcggagaaggagcactagtcaacgatgttcttcaggaactgattaggactggaagtcgacctggtgccctcgaacaccctgccgctccccgcctagtgcctagaggatcttgtggggtgcctgactccgcccagagggggcctggaacagcgctggaagaagatttcaggacactagccagctctctgcgtccgatcgtaatcgatgggtctaatgtggctatgtcacatggcaacaaagaaactttcagctgtagaggtattaagctggcggttgattggtttagggaccgcggccatacttacatcaaagtgtttgtgcctagttggcgtaaggatcctccaagggcagacactccaatacgggaacaacacgtgctagcagaattagagcgccaggccgttctggtttacacacccagtcggaaggttcatggcaaacgcctcgtgtgttacgatgatcggtacatcgtgaaagtcgcttatgaacaggatggagtcatcgtcagtaatgacaattatcgtgatttgcaatccgaaaatccagaatggaaatggttcattgaacaaaggttgctcatgttcagtttcgtaaacgacagatttatgccccccgacgatccgttgggacgccatggtccatctctgtccaatttcttgtcacgcaaacctaaaccccctgagccttcctggcagcactgtccttacggtaagaagtgcacgtatggaatcaagtgcaagttctaccaccctgagcggccgcatcacgctcagttggctgtggctgacgaacttcgtgctaagacgggtgctcggctgggcgtgagaggtagaccccctgcctccgctcgcccggcagctccagctgcaggtcgaaccccgccctag

SEQ ID NO: 265277 - DNA, 966 bp, Artificial Sequence
  derived and/or modified sequence
atggagcacccaagtaagatggagtttttccagaaactcggctatgatcgtgaggatgtattgcgagtcttaggtaagctgggagaaggcgctttggtcaatgatgtgctgcaagaactcatccggacgggctcaaggccaggagcccttgagcaccctgcggcgccaagactcgttcctcgcggaagttgtggggtgccagattcagcccaacgtgggcctggcaccgccctggaagaagactttaggacattagccagctcactcagacctatcgtgattgatggctcaaatgtagccatgtcccacggcaacaaagaaactttttcatgtcggggaataaaattggctgttgactggtttagagatcggggccatacttatattaaagtgttcgtgccttcttggcggaaagacccgcccagggccgacacccctatccgcgagcaacatgtgctggcggaactggaacgtcaagctgtgctagtctatacacccagtcggaaggtacacgggaaaagactagtttgctacgatgacaggtacatcgtcaaagtggcttatgagcaggatggcgtgatagtcagcaacgacaactaccgggatctgcaatctgagaatccggagtggaaatggtttatcgaacagagattgctgatgttctccttcgtaaatgaccggttcatgccgcccgacgatcccctcgggaggcatggaccttcactgagtaactttttatcgagaaaacccaagccacccgagccgagctggcagcactgtccgtacggcaagaaatgcacctacggcattaaatgcaagttctaccaccctgagcgcccgcatcatgcccaattggctgttgcagatgagcttagggccaaaactggggccaggccagttctgcctggtaggccccccgcaagcgctcggcctgcggcccccgcggccggaaggacacccccctag

SEQ ID NO: 265278 - DNA, 1584 bp, Artificial Sequence
  derived and/or modified sequence
atggagcaccccagcaagatggagttcttccagaagctgggctatgaccgggaggatgtgctgcgggtgctgggcaagctgggggagggcgccctggtgaatgatgtgctgcaggagctgatcagaacaggcagcaggcctggggccctggagcaccctgctgccccccggctggtgccccggggcagctgtggggtgcctgattctgcccagaggggccctggaacagccctggaggaggacttccgcaccctggccagcagcctgcggcccatcgtgattgatggcagcaatgtggccatgagccacggcaacaaggagaccttcagctgccggggcatcaagctggccgtggactggttccgggaccggggccacacctacatcaaggtgtttgtgcccagctggaggaaggacccccccagggctgacacccccatccgggagcagcacgtgctggccgagctggagcggcaggccgtgctggtgtacacccccagcaggaaggtgcacggcaagaggctggtgtgctatgatgaccgctacatcgtgaaggtggcctatgagcaggatggagtcatcgtgtccaatgacaactacagagacctgcagagcgagaaccctgagtggaagtggttcatcgagcagaggctgctgatgttctcctttgtgaatgaccgcttcatgcccccagatgaccccctgggccgccacggccccagcctgagcaacttcctgagcaggaagcccaagcccccagagcccagctggcagcactgcccctacggcaagaagtgcacctacggcatcaagtgcaagttctaccaccctgagcggccccaccacgcccagctggccgtggctgatgagctgcgggccaagacaggagcccggcctggagctggagctgaggagcagaggcctccccgggcccctgggggcagcgctggggcccgggccgccccccgggagccctttgcccacagcctgcccccagcccggggcagcccagacctggccgccctgcggggcagcttcagccggctggccttcagtgatgacctgggccccctgggcccccccctgcctgtgcctgcctgcagcctgaccccccggctgggcggccctgactgggtgtctgctgggggccgggtgcccggccccctgagcctgcccagccctgagagccagttcagccctggggacctgcccccacctcctggcctgcagctgcagcccagaggagagcaccggccccgggacctgcatggagacctgctgagcccccggcggcccccagatgacccctgggcccggccccccaggagtgaccgcttccctggccgctctgtgtgggccgagcccgcctggggagatggagccaccggcggcctgtctgtgtatgccacagaagatgatgaaggagatgcccgggcccgggccagaattgccctgtacagcgtcttcccccgggaccaggtggacagagtgatggccgccttccctgagctgagtgacctggcccggctcatcctgctggtgcagcgctgccagagcgctggggcccccctgggcaagccctag

SEQ ID NO: 265279 - DNA, 966 bp, Artificial Sequence
  derived and/or modified sequence
atggagcaccccagcaagatggagttcttccagaagctgggctatgaccgggaggatgtgctgcgggtgctgggcaagctgggggagggcgccctggtgaatgatgtgctgcaggagctgatcagaacaggcagcaggcctggggccctggagcaccctgctgccccccggctggtgccccggggcagctgtggggtgcctgattctgcccagaggggccctggaacagccctggaggaggacttccgcaccctggccagcagcctgcggcccatcgtgattgatggcagcaatgtggccatgagccacggcaacaaggagaccttcagctgccggggcatcaagctggccgtggactggttccgggaccggggccacacctacatcaaggtgtttgtgcccagctggaggaaggacccccccagggctgacacccccatccgggagcagcacgtgctggccgagctggagcggcaggccgtgctggtgtacacccccagcaggaaggtgcacggcaagaggctggtgtgctatgatgaccgctacatcgtgaaggtggcctatgagcaggatggagtcatcgtgtccaatgacaactacagagacctgcagagcgagaaccctgagtggaagtggttcatcgagcagaggctgctgatgttctcctttgtgaatgaccgcttcatgcccccagatgaccccctgggccgccacggccccagcctgagcaacttcctgagcaggaagcccaagcccccagagcccagctggcagcactgcccctacggcaagaagtgcacctacggcatcaagtgcaagttctaccaccctgagcggccccaccacgcccagctggccgtggctgatgagctgcgggccaagacaggagcccggctgggcgtgcggggccggcccccagccagcgcccggcctgctgccccagctgctggccgcaccccaccctag

SEQ ID NO: 265280 - DNA, 966 bp, Artificial Sequence
  derived and/or modified sequence
atggagcaccccagcaagatggagttcttccagaagctgggctatgaccgggaggatgtgctgcgggtgctgggcaagctgggggagggcgccctggtgaatgatgtgctgcaggagctgatcagaacaggcagcaggcctggggccctggagcaccctgctgccccccggctggtgccccggggcagctgtggggtgcctgattctgcccagaggggccctggaacagccctggaggaggacttccgcaccctggccagcagcctgcggcccatcgtgattgatggcagcaatgtggccatgagccacggcaacaaggagaccttcagctgccggggcatcaagctggccgtggactggttccgggaccggggccacacctacatcaaggtgtttgtgcccagctggaggaaggacccccccagggctgacacccccatccgggagcagcacgtgctggccgagctggagcggcaggccgtgctggtgtacacccccagcaggaaggtgcacggcaagaggctggtgtgctatgatgaccgctacatcgtgaaggtggcctatgagcaggatggagtcatcgtgtccaatgacaactacagagacctgcagagcgagaaccctgagtggaagtggttcatcgagcagaggctgctgatgttctcctttgtgaatgaccgcttcatgcccccagatgaccccctgggccgccacggccccagcctgagcaacttcctgagcaggaagcccaagcccccagagcccagctggcagcactgcccctacggcaagaagtgcacctacggcatcaagtgcaagttctaccaccctgagcggccccaccacgcccagctggccgtggctgatgagctgcgggccaagacaggagcccggcctgtgctgcccggccggcccccagccagcgcccggcctgctgccccagctgctggccgcaccccaccctag

SEQ ID NO: 265281 - DNA, 1584 bp, Artificial Sequence
  derived and/or modified sequence
atggagcaccccagcaagatggagttcttccagaagctgggctacgaccgagaggacgttctgagagttcttggaaagctgggcgaaggagctctagtgaatgacgttcttcaagaacttatcaggaccggatctcgaccgggagccctcgagcaccccgccgctcccaggctcgtgcctcgcggttcctgtggcgtgcccgacagcgcccagcggggacctggaacggcgctggaagaggatttccgcacattggcctctagccttcgccccatcgtgattgacggcagtaacgtggccatgtcgcatggcaataaagaaacgttttcatgtcgcgggatcaagttggccgtggattggttcagagatcgcggccacacctacatcaaggtgtttgtgccttcctggcgcaaggaccccccccgcgctgatacgcctattcgcgaacagcatgttctggcggagctcgagcggcaagccgtcctggtttacaccccttcccgaaaggtgcatggtaaacgactggtctgctacgacgaccgatacattgttaaggttgcgtacgagcaggacggggtgattgtgagtaacgacaactatagagatttgcagtctgaaaaccctgagtggaagtggttcatagaacagcgcctactcatgttttcgtttgtcaacgatcgcttcatgccaccagatgaccccttgggtcggcacgggcccagcctcagtaattttctgtctaggaagcctaaaccccccgaaccttcatggcagcactgtccctacggaaaaaagtgtacctacggtatcaaatgcaagttctatcaccccgaacggcctcatcacgctcagttagctgtcgcggacgagttgagggctaaaactggtgcacgcccgggggccggggcggaggaacagaggccacccagagctcccggcggatccgccggagcgagggccgcgccaagagaaccgtttgctcacagtctgcctccagctcgaggatcccctgatctggccgcgcttagagggagtttttccagactcgcattcagtgacgacctggggccactcggtccgccgctgcctgtcccagcctgttcactcactccaaggttgggcgggcctgattgggttagcgccggaggtcgggtcccaggccccctatccttgcccagtcccgaatctcaatttagcccgggtgatctcccccctcctcctggtctgcagctgcagccaagaggagaacacagacctcgcgatctgcacggggacttgctgtctccacgccggcctccggacgacccttgggcaagacctccaaggtctgacagattccctggccggtccgtatgggccgagccagcatggggtgatggtgctaccggcggtcttagcgtttacgccaccgaggacgatgagggggacgcccgcgcacgcgccagaatagccctctactcagtgttccccagggatcaggtagatcgggtgatggccgcatttcctgagctgtccgatctggcgagacttatccttctggtacaacgctgccagtccgcaggtgccccactgggcaagccctag

SEQ ID NO: 265282 - DNA, 1584 bp, Artificial Sequence
  derived and/or modified sequence
atggagcaccccagcaagatggagttcttccagaagctgggctacgatagagaggacgtcctgagggtgctcggaaaactaggggagggagcccttgtgaatgatgtgctccaggagctcatccgaactggttcgcgacccggggccctggaacacccagccgccccgcgcttggtaccacgcgggtcctgtggcgttccagactctgcccagagggggccgggcactgcacttgaggaggacttccgtactctggcttcttccttacggcccatagtgatcgacggctccaatgttgccatgtcacacggcaataaggaaaccttctcttgtagaggcatcaaactggcagtcgattggttccgggatcggggacacacgtatattaaggtatttgtgccctcttggagaaaggacccaccccgcgctgacacgcccattagggagcagcacgtgctggccgagctggagcggcaggccgttcttgtgtacactccatctcggaaagtccatgggaagcgattagtgtgctatgatgacaggtacatagtcaaagtcgcttatgagcaagacggagtcatcgtatctaacgataactacagagatctacagtcagaaaatccagagtggaagtggtttattgagcagaggctccttatgttctcatttgtgaacgatcgatttatgcctccggatgatcccttagggcggcacggaccttcattatccaacttcctgagccgtaagccaaagccccccgagccaagttggcagcactgtccgtacggcaaaaaatgcacgtatggcattaagtgcaagttttaccatccagaaaggccacatcacgcacagctggctgtggccgatgagttacgagccaagaccggggccaggcccggggccggggctgaagagcaacgaccacctagagcgcctggtgggagtgcaggcgccagagctgcacctagggagccctttgctcacagccttccccccgctcgtggatctcctgacctagcagcgctgcgtggctccttcagcaggcttgcatttagcgacgatctggggccattgggcccccccctgcccgtgcccgcctgcagcctgacccctaggcttggcggccctgattgggtctccgccggcggacgagtaccgggccccctctccctgcccagtcccgaaagccagttttcgcccggggacttaccgcctccacctggactgcagctgcagccccgcggagagcatcgtcctagagacttgcacggcgatctgctgagtcctcgacgccctccagatgacccctgggccaggccgcctcgctctgatcgcttcccagggaggtcagtgtgggccgaacctgcctggggcgacggcgccacaggcggcctatcggtgtacgctaccgaggacgacgagggtgatgccagggcgcgcgcccgcatagccttgtacagtgtctttcctcgcgatcaagtggacagagttatggctgcctttccagaactgtccgacctggctaggctgatccttctcgtccagcggtgtcagagcgccggcgctccactcggcaagccatag

SEQ ID NO: 265283 - DNA, 966 bp, Artificial Sequence
  derived and/or modified sequence
atggagcaccccagcaagatggagttcttccagaagctgggctacgaccgtgaggatgttctcagggttctggggaagcttggcgagggagcactcgtcaacgatgtgctgcaggaacttatacggacaggctctcggcccggcgcactggaacacccggcggctcctcgattggttcctagggggtcctgtggggtgccagactccgcacagcggggcccaggcaccgccttggaggaggactttagaacacttgccagctcattacgcccaatagtgatcgatggatcaaacgtagcaatgagccacgggaacaaggagacgttctcgtgccgcggaatcaagctcgcggtcgactggttccgagatcgtggtcacacttatatcaaggtgttcgttcctagttggagaaaggaccccccgagggccgacaccccaattcgtgagcaacatgtcctggccgagctggagcgtcaggcagtgttagtgtacacaccaagtcgcaaggtccacggaaagaggctcgtttgctatgacgatcggtacatcgtgaaagtagcttatgaacaggatggagtgattgtgtctaatgacaattatcgggaccttcagtcggagaacccggagtggaaatggtttatcgaacagagacttctgatgttctcctttgtcaatgacagattcatgcctcctgacgatccacttggccgccatggaccttccttgtctaattttctgtccagaaagccaaagccccctgagccctcatggcagcactgtccctatggaaaaaagtgtacttacggaataaagtgcaagttctatcaccccgagcgtccccaccatgcacaacttgctgtggcagatgagttaagagcaaaaaccggggcgaggctcggcgtgaggggccggcctcctgctagtgccaggccagctgccccagcagcaggccgcacccccccctag

SEQ ID NO: 265284 - DNA, 966 bp, Artificial Sequence
  derived and/or modified sequence
atggagcaccccagcaagatggagttcttccagaagctgggctacgaccgggaagatgtcttgagagtacttggcaagttgggcgaaggcgctctcgtgaacgatgtgttgcaggagttgatcaggacagggagtcgtcctggcgcgctagaacatccagctgccccaagacttgtgccccgcgggagctgcggtgtgccggacagcgcgcagagggggccagggaccgcactggaggaggattttcgtacactggccagcagcttaagacccatcgtgattgatgggtccaatgtggccatgtcacatggaaataaagaaacgtttagctgtaggggtattaaactcgcagtggactggttccgcgaccgagggcacacttatatcaaggtgtttgttccgagctggagaaaggaccccccaagggctgacacgcctattcgggagcagcacgtactcgcagaactcgaacggcaggctgtgcttgtgtatactccaagtagaaaagtgcatgggaagcggttggtgtgctacgacgataggtacatcgtgaaggtggcgtatgaacaagacggggtgattgtaagcaatgacaattacagagacctgcagagtgaaaacccagaatggaaatggttcatcgaacaacggttgctcatgttctcctttgtaaatgatcgttttatgcctcctgacgaccccctggggcgccacggaccttcactatcgaactttcttagcaggaaacctaagccacccgaaccctcttggcagcattgcccctacgggaaaaaatgtacatacggaattaaatgcaagttctaccaccctgaaaggccccaccacgcacaactggctgtcgctgatgaactcagggcaaagaccggagcacggcctgtgctgcccggacggcctccagctagcgctcggcctgctgcgcctgcggcgggaagaacccctccttag

SEQ ID NO: 265285 - DNA, 1584 bp, Artificial Sequence
  derived and/or modified sequence
atggaacatccaagcaaaatggagtttttccaaaaattgggatatgatcgcgaagacgtgctgcgcgtgttgggcaagcttggcgagggagccttagttaatgacgtgttgcaggagctgatccggacaggtagtcgccctggggctcttgagcaccccgctgccccacgcctggtgccgcgtggctcatgcggagttccagactctgctcagcgaggcccaggtaccgccctggaagaggacttcaggactctggcttcttctttaagacctattgttattgacggcagtaatgtcgcaatgtcccacggaaacaaagaaaccttctcttgcagggggattaaactggccgttgattggtttagagataggggtcatacatacataaaagtattcgtgccctcctggcgcaaggacccaccaagggcagataccccaatccgggagcagcacgtactcgctgagctggagaggcaggcagtgctggtttacactccctctcggaaggtgcatggaaagcgcttagtttgctatgacgataggtacatagtgaaagtggcctacgagcaggacggcgtgatagtctccaatgacaattatcgagatttacaaagtgaaaacccagagtggaagtggttcatcgaacaacgactgctgatgttctcctttgtgaacgatagattcatgccaccggatgatcctctagggcgacacgggccttcactctctaactttctttctagaaagcctaaacccccagaaccaagctggcagcattgtccttatggaaagaagtgcacttacgggattaagtgtaaattctatcaccccgagaggccccaccatgcgcaacttgcagtcgccgacgaattacgagctaagaccggtgcccgaccgggtgcaggggcagaggagcagcgtccacctagagcaccgggtgggtccgcaggggctcgcgcagctcctagggagccttttgctcactctctcccccctgctcgcggatcacctgacctcgccgctctgcggggatccttttcacgacttgctttcagtgacgacttgggacctctcggaccaccattgcctgtccccgcatgtagtctgactccgaggctcggcggacccgattgggtctcagccggtggaagagtgccaggcccattatctctgccctcaccggagagccaattctcacctggggatctgccaccgccaccagggctacagctacagcccagaggcgagcaccggcctagggatctgcacggcgatttactgtccccacgtcgcccacctgacgatccgtgggcaagaccaccgcgaagcgataggttccccggacgcagtgtgtgggcagaacctgcatggggagacggcgcaacgggcggtctgtccgtgtacgcgacggaggacgacgaaggagatgctcgtgcacgggctcggatcgccctgtactcagtcttccccagggaccaagttgacagagtgatggcagctttccccgagctgtctgacctggcacgcctgattctgctggtgcagagatgccagtctgccggagcccctctaggcaagccctag

SEQ ID NO: 265286 - DNA, 1584 bp, Artificial Sequence
  derived and/or modified sequence
atggaacacccatctaagatggagttcttccagaagcttggatatgatcgtgaagatgttctgagggtgcttggtaagctgggagaaggagccttggtgaacgatgtgctgcaagaactgattagaacaggatcccgccctggcgctttggaacatccggctgcaccccgactggtaccgaggggctcctgcggggtcccggacagtgctcagcgagggccaggcactgcactcgaggaggattttcgaaccctggcctccagtctccggcctatagtgattgatggtagtaacgtcgccatgtcgcacggcaacaaggagaccttctcgtgcaggggtatcaagttagccgtcgactggtttcgggataggggacatacctacatcaaggtctttgtgccctcctggagaaaggaccccccacgggctgatactcctataagagaacagcacgtgctagcagagctggagagacaggccgtgctggtgtatacaccaagcaggaaagtgcacggaaagaggctggtgtgctacgacgaccggtatattgttaaagtggcctatgagcaggacggggttatcgtgagcaatgacaactaccgtgacctacagagcgagaaccctgaatggaagtggtttattgagcagcggctcctcatgttttcatttgtcaacgaccggtttatgccccctgatgacccgctggggagacatggtccatctctgtctaattttttgtcacggaaaccaaaacctcccgaaccctcctggcaacactgtccgtacggaaagaaatgtacttatggaatcaagtgcaaattctaccaccccgagcgccctcatcacgctcaactggctgtcgccgatgagctgcgtgctaaaacgggggcaaggccgggagcaggggcagaagagcagaggccaccccgagctcctgggggtagcgctggggcaagagccgcaccacgcgaaccattcgctcattcactgccacccgcaagaggaagcccagatttggctgccctgaggggctccttcagtcgacttgccttcagcgatgacctcggacctttggggcctccattacctgttccagcctgcagtcttacgcctcggctaggcggtcccgattgggtatctgccggaggcagggtacccggacccctatcattgccttctccggagtcacagtttagcccaggggatctacctccaccgccaggtctacaactgcaacccagaggggagcatcgacccagagatctgcacggagacctgctatcccccaggagacctccagatgacccatgggccagaccacctaggagcgataggtttccaggccgatccgtttgggccgagcctgcttggggcgacggagccaccggtggcctctctgtctatgcaactgaggacgatgaaggagatgcacgggcaagagctcgtatcgcgctgtactccgtgtttcctagggaccaggtggaccgggttatggcggcatttcccgagttgagcgacctggctcggctgattctattagtgcaacgttgtcaatccgcaggggcaccgcttggcaaaccctag

SEQ ID NO: 265287 - DNA, 966 bp, Artificial Sequence
  derived and/or modified sequence
atggagcacccctccaagatggagttttttcagaaactggggtacgacagggaagatgtgctccgcgtgctcggcaaactcggagagggagcgctcgtgaacgatgttctgcaagaattaataagaaccggctcgcggcctggtgctctcgagcacccagcagcacctaggttggtcccgagaggaagctgcggcgttcccgacagcgcgcagcgcggaccagggacagccctagaggaagattttcggactctggcttccagcctacggccaatcgtgattgacgggtcaaatgttgctatgtcccatggaaataaagaaaccttcagctgtagaggaatcaagctcgctgtcgactggttccgagataggggacatacctacatcaaagtttttgtcccctcttggaggaaagatcccccacgggctgacacccccatacgtgaacagcatgtgttggccgaactagagcgacaggctgttctcgtgtacaccccgagcagaaaggtgcacggaaagaggcttgtgtgctacgatgacaggtatatagtaaaagtcgcctatgagcaggatggagtgattgtgtcgaatgataactaccgggatctgcagagtgaaaatcctgagtggaagtggttcatagagcagcgactacttatgtttagcttcgtaaatgatcgtttcatgccaccggatgatccactagggaggcacgggcctagcctgagcaactttctctcaaggaagcctaagccacctgagccatcatggcagcactgcccttacggtaagaagtgtacttatggaatcaaatgtaagttctatcaccccgaaagaccccaccatgcccagttggccgtggcagacgagctcagagccaagactggcgctcgcttgggagtccgtggcagacctcccgcatcagcacgcccagctgccccagccgctgggaggactcccccatag

SEQ ID NO: 265288 - DNA, 966 bp, Artificial Sequence
  derived and/or modified sequence
atggagcatccgtccaagatggagttttttcagaagcttgggtatgacagagaggacgtgttgcgcgtcttaggaaaattaggagaaggcgcactggtcaacgacgtcctgcaggagctgatccggactggctctcgtcctggtgcgctggagcatcctgccgcaccccgactggtgccaaggggttcttgtggagtgccggacagcgcacagcgcggacccggaactgccctggaggaagatttccggactctggccagctctctgcgccctattgtcatcgacggctctaacgtggcgatgtcacatggtaataaagaaacatttagctgtcggggaattaaactggcggtggactggtttagagacagagggcatacctacatcaaggtcttcgttccctcctggcgaaaagatcctcctcgagctgacactcccatacgagagcagcatgtgctggcagagttggagcgacaggctgtactcgtgtatacgccatctcgtaaagtccacggaaaaaggctcgtttgttatgatgaccgatatattgtgaaagttgcctatgaacaggatggcgtgatcgtgtccaatgacaattatcgggacctccaatctgaaaatccagaatggaagtggtttattgagcagcggttgcttatgtttagcttcgttaacgaccgctttatgccaccagatgatccactggggcgacatggaccatctctctccaatttcctgtcacggaagcctaagccaccagagccgtcttggcagcactgtccctatggcaagaagtgcacatatgggatcaagtgtaagttctatcatcctgagcgccctcatcacgctcagctagcagtggctgacgaactccgtgccaagactggggctcggcctgtactccccggtcgcccacctgcttcagccagacccgctgcacctgcagctggaaggacacccccatag

SEQ ID NO: 265289 - DNA, 3046 bp, Artificial Sequence
  derived and/or modified sequence
ggaagtggagcattggcatgaagtggctcctagtggctgcttggcgcacgccagctgccctcctctgactccagtggcacctgggggcctggcctcactgacgggagaacattggcgtgaaggctgctggcgactgggccagcattcattgtgaagaccggagggacacaccctgctgctcatgtctgcagggctctgagaggaggaagcctggggcaggacctgcgccagtggccgctgggcacagcatggagcaccccagcaagatggaattcttccagaagctgggctatgaccgggaggatgtgctccgggtgttgggcaagctgggcgagggcgccctggtcaacgacgtgctgcaggagcttatccgcacgggcagccgcccgggtgccctggagcacccggctgcacccaggctagtgcctcggggctcctgtggggtcccggactctgcccagcgtggcccggggacagccctggaagaggacttcagaaccctggccagttctctgcgacccatagtgattgatggcagcaacgtggcgatgagccatggaaataaagaaaccttctcttgccggggaatcaagctggctgttgactggttcagggacagaggacacacctacatcaaagtttttgttccatcctggaggaaggacccaccaagagctgacacccctatcagagagcagcacgtgctggcggagctggagcggcaggcggtgctggtgtacacgccgtcccgcaaggtgcacggcaagcgcctggtctgctacgacgaccgctacatcgtgaaggtggcctacgagcaggacggcgtcatcgtctccaacgacaactaccgggacctgcagagcgagaaccccgagtggaagtggttcatcgagcagaggctgctcatgttctccttcgtcaacgaccggttcatgccgcctgatgaccccctgggccgccatggaccctccctgagcaacttcctgagcaggaagccgaagcccccagagccatcctggcagcattgtccttatggcaagaaatgcacctatggcatcaagtgcaagttctaccacccggagaggccgcaccacgcgcaactggcggtggccgacgagctccgcgccaagacaggggcccggcctggcgcgggcgccgaggagcagcggccaccgagagccccgggcggctccgcaggagcccgggcggccccccgggaaccatttgcgcacagcctcccgccggcgcgggggtccccggacctggccgccctgcgagggagcttctctcggctggccttcagcgacgacctggggcccctggggccgcctctcccggtccccgcctgcagcctcacgccccgactgggcgggcccgactgggtgtccgcgggcggccgggtgccaggcccgctcagcctccctagcccggagagccagttctccccgggcgacctcccgcctccgcccggcctgcagctccagccgcggggcgaacaccgccctagggacctgcacggcgacttgctttccccgcgcaggccacccgacgacccgtgggcccgtccaccccgctccgaccgcttccctgggcgctccgtctgggcggagccggcctggggcgacggcgccactgggggactttcagtgtacgcgaccgaggacgacgagggggacgcgcgcgcccgggctcgcatcgcgctctacagcgtcttcccgcgtgaccaggtggaccgcgtgatggccgcgttcccggagctctcagacctcgccaggctcatcctcctggtacagagatgccagagcgcgggggcgcccctgggcaagccctaagggaccaacacgcacttgcagggaatggcccagcctcgccttgcgtcttggacgggtggacctgtggttgccagcctggacctgagtgggcccatcatggtgcccccttttctttaaagatggtcagggaagcctgcttcctcctcctgagcggggttgtgggggcctggtggcacttggtgatcctcactgaggccggggcctgctgcggggaggtccacccacttccgtggagggaatgattttccatgtgcacggagactgcgggtccaagctgcagtagaacccacaagtgggtcacaaaatcaatttagtgggtcaccaccacaaacacagtggactgggacagggcaaagcgcaccctgtgccatcaggctgagtctgaactcttgttacctatcctgtgtccccacccccttggcagccatgtaactaacctcaatgtgggtcgtagtcagaagtttaaaaaagactatgaatgctcttgaatttcattgcttcaggtaatgtttgaaatatgtagtcaggtggccaggggaggtttgctatctggaagttttcatgttagctattgctaaccccacccgcaagggcagcccagcctccaggtgtgggctctcctgtgctctgaattgtgtggctgtcctatgctggggacaagtggtaggagcgctttgtcccagggccaccttctggggccttcacacacatacccccaccacacaaacacacacacacacacacacacacacacacagtctatcatacatgtacatactcacacacaccacacagacacatactgtttggctaagggttaagtatctccaatattttattagccatccatcatggcagtttccagaataggctttctactgtaccagctgagctgccttcttttacttcttcttcttcttctttttttaaacagacagagtctcggcccggcatggtggctcatgcctctcagcctcccaaagtgctgggattataggcgtgagccaccgcgcctggccccgggcctttatttttatttttaaccttttgacaagacacgctttctattagagctgctttttgtctccctggttcgatttcctgatgtagaatcattgtgttgctgatttttcagttgaaaatgtttaaactgcttcctttgagaacaagtttgagttttagtaagctgtaaagctgttttatttgattcactg
